United States Patent Application Publication US 2017/0114356 A1 - sequence listing, part 71

SEQ ID NO: 102793 - DNA, 1369 bp, Zea Mays
aatcgtaatgatactcagattctcctcacagccagattcttcccacagtcaaattttcagaaaagttggtcagaaaaaataactgaaccaaacacggccttcgcaatcactcgcaatcacatattaacgatagctaggcacggagaaaccaatgccaagtggcaaatgaccgccatccggtggcaagtgagctgatgcagacacataaccaacctaccacacgtcgacaccccaccagctgagtcaaactcagctagaaataatataggacaggccttggacagcaggaatgctgcttttattctccccgtacgcactagcagaacctcctcgtgcaaaaacaaggcggcgaaagcgaaaccaatcgcgcgatcacgcagcgtctccacaagacgaacgcaatccgatgggatcggtcactcacatacagtaattacacacagcagaggcaggagctagcctctgtcgatgatttactactggtcgtacctagagcgcggtcacggtggcctcggcctcgccggccggcgagcgtcgcggctcctgccgcttcgtcttgcacttgtcgacgaccgcgtacaggcggtagggcgacgcgtcggtggcgagccactgctcgacggtgaagagctgctgcgcgcacccgaggtggggccccgtgaccgtggcctcgaggtagttgcagtaccagccgtggtgcgcgccggtgccgtcggaggtgaggttcatggcgcagggcgcctggctcatgcaggggccccggccgctgaagatgtccaggttgccgcgctcgtagtagtcgtggccggcgcccatgaggccgccccaccccgccaggtcccggatccggatgcccgtgccgtcggggcccagcagcgtcacgccgatggtcgagtccgtgccgcccttccagatggaccccgtccgcacgtacaccgtgtacacgcactggttctccgggtccgactccaactccgactgcgacggggcgcccgcgcccctgacgacggccgccgcgcgcgacgccgacgccgacgccgcgtacgcctgatgaatcaagcaaataaaggcgcgcgcggagacggagcgaataatcgattcaagaggcgacttcgtaggcgccacagcgcaatagcagcagacagcagatgaccgatgatgtgcttaccgcggtggcaaagaaggcgaggaggagaaggcagggagagaggagcttcagcttcatggcacccccggagcgcggaatccttggctgctacgatctgatctgaatctgatgaatgggaggctgtctagccgtgggcggcggcctggtggagaactatatgggggtcgaccggcgacggccccacaggacagtgatagattt

SEQ ID NO: 102794 - DNA, 326 bp, Zea Mays
accgacaggtcctcggcctagccgaactgtcctaggcgataggtttctagtctccctctagtcaatcaagaggtacgaaattgcatcgactattcttgatctgttcatcgaaagagagacgagatgagcgggtatcggtggcgagtgagtccaagctgtacatcacacgggtctagggcctccctggtcgcagggcctccaccgcagcacgctcgaggccatgcgcctccgcgattgccaccacacaggcggagattccctcccgaagaggcaaatatcgtagacgaggcgtttcctcagtcgaacgtcggccccggcctagcgcg

SEQ ID NO: 102795 - DNA, 615 bp, Zea Mays
accgagtcaccgtctctgtctctcagccgccaccgccagaaaccgagcaccggccgccggccagcctccaccatcagccgccaccaccagccgccaccaccagaaaccgagcgccggccagccggtctccaatcctgcaatccctccaatatccaataggggatgaggtgcagcgagcaagtccaataacctacagtgcttggaatttgtggaaggagagatgctggcgaatctttgataacagagcacctgccaggctccaatcctgcgtcagcgtccctggctccgtgccggctgccggtctccaagaatcatgcgtcagcgtccctccaatccgaggagcgtcccttcattatccttgctgtttttgttctttgctgcccaacagtccaagtttatgtccaagactgaagactctaagagacatttgttgttttgtttaattatacccgcgggtgtccgatacccgcccgatacccgatgggtacgggcacgggtacaaaatcctacccgcgggtatagacgcgggcgggtatgagtaacaccccgcgggtattattgcgggcggatatttaccatacccgatccgaacccgacccattgccatccctacgc

SEQ ID NO: 102796 - DNA, 1137 bp, Zea Mays
cagccttggtctcctgggatatggatattatccgctctgggagttccgcagcctctcaaattccggcgttcttccacatccactcttttcttcgtcccgaggcccggccggcccccggtggcccgcccgatcacgaggcacccatccgaacgctggcacctggtcgcgccacgtctccgcacaataccacatccacatggtgaccccccccccccccccggctgtctctaccctctcctcctcctccagtcctccctcgctcttcctcctcgcgaaacgacgcggaggaggttgccggtcaggccaccgccgcgcccgcccgcccgccggagacccggtccgcagccaacgcgtgacgtagggaggacacgcagccatggccacttcctcctcgtcgctcacaacgctccactcccgcttcctctctcccaccccttcctcgccctacatggcggcgctgccccgacggcgaagggccggagcgcggtaccctcgcatccgggccattgacctcgaccagaacacgattgtggccatttcggtgggcgtcgtcagcatcgccgtgggaataggtgtccctgtgttctacgagactcaaatcgacaatgccgccaagagggataatacacagccatgcttcccctgcagtggttctggcgcgcaggtatgcaggttttgcagtggaaagggcattgttactgtagtacttggtgcaggcgagactgaagaatcgcagtgtgtcaactgcgagggcatcggctctttgacatgcactacatgccaaggcaccggaatccaaccacgctatcttgaccgcagggagttcaaggatgacgattgatgaaggttttattgccatctttggtagtatatgtcaaagatgtaacatcacgtctaatttgaggacaaagttgcggactcagaagagatgtacctatcagccataggaatcatctgattgttttgtgtttatatgttccagtttggtaaatatagatggcagtcgccctccagcagagaagataatgtctcaaatttaagtgttgaacgttttttgcgggagatgtagtacacattgttcttctggttttgtcatgcataattgcaaataaacaacgcgagtaaacaaaaaattca

SEQ ID NO: 102797 - DNA, 1695 bp, Zea Mays
aaataaaactgaaatatcgaggaagggacgggctcggcctctctgcccgaattcccgattgcgcctcctccgactccgagatcccgtcagccatggacgggctcctgtcgaagctccgcagcctggacgcgtaccccaaggtgaacgaggacttctacagccgcaccctctccggcggcatcatcacgctcgtctcctctgctgtcatgctcctcctcttcgtctccgagctccgattatatctccatgcagttactgagacaacactaagggttgatacttcaaggggagaaacacttcgcataaattttgatgtcacctttccagcccttcaatgttctataattagcctggatgcaatggacatcagtggacaggagcacctagatgtgaaacatgatgtattcaagcagcgaattgatgcccatggcaatgttattgcgactaggcaagatgtagttggtgggatgaagatggaggcacctctacaacatcatggtggaaggcttgaacacaatgaaacctattgtggctcttgttatggtgcacaagaatctgatgatcaatgttgtaacacatgtgaagatgttcgtgaagcctacaggaaaaaagggtggggtgtatcgaatccagatttgcttgaccaggtagaaccatctgattgcaaaagggagggctttcttcaaagtataaaggacgaagaaggcgaaggatgcaatatttatggttttattgaagttaataaggttgctgggaatttccattttgctccagggaaaagtttccagcagtcaaatgtgcacgttcatgacttgctcccgttccagaaggacagcttcaatgtcagtcataagataaacagactaagttttggagaatactttccaggtgttgttaatccacttgatggggcaaattgggtgcagcattcatcatatggaatgtatcaatacttcatcaaggttgttcctacagtctacacggacataaatgaacacattattctctctaatcagttctctgtaacggaacattttagaagtggtgagagtggtcggatgcaggcccttcctggtgtgttcttcttttatgacctttctccaatcaaggtcacattcacggaacaacatgtgtcatttttacactttttaactaatgtttgcgctattgttggaggtgtgttcaccgtttctggaatcatagattcgtttgtataccatagtcaaagagcaatcaagaagaagatggaaataggcaaattcaactgatgttgccttactattgctgcaattaagtagctcctgttgcagctccaagatccagaaatgcaatgtggcttttcctcgaactcttggcacagttgcgtagttgacaaacaattgctcatcagataactcttgatgtgcttgccaacttgcttccggcaaagataccagcgagcaagatggtcatcttgtatacttcgatgttacatttttgtacgcttagtctgacaagaaaacattttacttcctcgagctgcaggtgttcgtgtactgttgtaaatttgtggtagagggagcctatctgtagtttttttttacaattatgtgtttgtaccagttttttctgagacatttgtagcttagacaggtaaagattgtttgaaatacatataaaccatttttgaaggaaagcaagcttatcgttgtaacc

SEQ ID NO: 102798 - DNA, 1680 bp, Zea Mays
aaataaaactgaaatatcgaggaagggacgggctcggcctctctgcccgaattcccgattgcgcctcctccgactccgagatcccgtcagccatggacgggctcctgtcgaagctccgcagcctggacgcgtaccccaaggtgaacgaggacttctacagccgcaccctctccggcggcatcatcacgctcgtctcctctgctgtcatgctcctcctcttcgtctccgagctccgattatatctccatgcagttactgagacaacactaagggttgatacttcaaggggagaaacacttcgcataaattttgatgtcacctttccagcccttcaatgttctataattagcctggatgcaatggacatcagtggacaggagcacctagatgtgaaacatgatgtattcaagcagcgaattgatgcccatggcaatgttattgcgactaggcaagatgtagttggtgggatgaagatggaggcacctctacaacatcatggtggaaggcttgaacacaatgaaacctattgtggctcttgttatggtgcacaagaatctgatgatcaatgttgtaacacatgtgaagatgttcgtgaagcctacaggaaaaaagggtggggtgtatcgaatccagatttgcttgaccagtgcaaaagggagggctttcttcaaagtataaaggacgaagaaggcgaaggatgcaatatttatggttttattgaagttaataaggttgctgggaatttccattttgctccagggaaaagtttccagcagtcaaatgtgcacgttcatgacttgctcccgttccagaaggacagcttcaatgtcagtcataagataaacagactaagttttggagaatactttccaggtgttgttaatccacttgatggggcaaattgggtgcagcattcatcatatggaatgtatcaatacttcatcaaggttgttcctacagtctacacggacataaatgaacacattattctctctaatcagttctctgtaacggaacattttagaagtggtgagagtggtcggatgcaggcccttcctggtgtgttcttcttttatgacctttctccaatcaaggtcacattcacggaacaacatgtgtcatttttacactttttaactaatgtttgcgctattgttggaggtgtgttcaccgtttctggaatcatagattcgtttgtataccatagtcaaagagcaatcaagaagaagatggaaataggcaaattcaactgatgttgccttactattgctgcaattaagtagctcctgttgcagctccaagatccagaaatgcaatgtggcttttcctcgaactcttggcacagttgcgtagttgacaaacaattgctcatcagataactcttgatgtgcttgccaacttgcttccggcaaagataccagcgagcaagatggtcatcttgtatacttcgatgttacatttttgtacgcttagtctgacaagaaaacattttacttcctcgagctgcaggtgttcgtgtactgttgtaaatttgtggtagagggagcctatctgtagtttttttttacaattatgtgtttgtaccagttttttctgagacatttgtagcttagacaggtaaagattgtttgaaatacatataaaccatttttgaaggaaagcaagcttatcgttgtaacc

SEQ ID NO: 102799 - DNA, 1743 bp, Zea Mays
cgaattcccgattgcgcctcctccgactccgagatcccgtcagccatggacgggctcctgtcgaagctccgcagcctggacgcgtaccccaaggtgaacgaggacttctacagccgcaccctctccggcggcatcatcacgctcgtctcctctgctgtcatgctcctcctcttcgtctccgagctccgattatatctccatgcagttactgagacaacactaagggttgatacttcaaggggagaaacacttcgcataaattttgatgtcacctttccagcccttcaatgttctataattagcctggatgcaatggacatcagtggacaggagcacctagatgtgaaacatgatgtattcaagcagcgaattgatgcccatggcaatgttattgcgactaggcaagatgtagttggtgggatgaagatggaggcacctctacaacatcatggtggaaggcttgaacacaatgaaacctattgtggctcttgttatggtgcacaagaatctgatgatcaatgttgtaacacatgtgaagatgttcgtgaagcctacaggaaaaaagggtggggtgtatcgaatccagatttgcttgaccagtgcaaaagggagggctttcttcaaagtataaaggacgaagaaggcgaaggatgcaatatttatggttttattgaagttaataaggttgctgggaatttccattttgctccagggaaaagtttccagcagtcaaatgtgcacgttcatgacttgctcccgttccagaaggacagcttcaatgtcagtcataagataaacagactaagttttggagaatactttccaggtgttgttaatccacttgatgggtagtttcttgctcctacaatgttattttcattttatatctgggtttgttactagggtgaaaatgatcccaaaaatctaagtgagaatctaagattcttgttaaatgtgcagggcaaattgggtgcagcattcatcatatggaatgtatcaatacttcatcaaggttgttcctacagtctacacggacataaatgaacacattattctctctaatcagttctctgtaacggaacattttagaagtggtgagagtggtcggatgcaggcccttcctggtgtgttcttcttttatgacctttctccaatcaaggtcacattcacggaacaacatgtgtcatttttacactttttaactaatgtttgcgctattgttggaggtgtgttcaccgtttctggaatcatagattcgtttgtataccatagtcaaagagcaatcaagaagaagatggaaataggcaaattcaactgatgttgccttactattgctgcaattaagtagctcctgttgcagctccaagatccagaaatgcaatgtggcttttcctcgaactcttggcacagttgcgtagttgacaaacaattgctcatcagataactcttgatgtgcttgccaacttgcttccggcaaagataccagcgagcaagatggtcatcttgtatacttcgatgttacatttttgtacgcttagtctgacaagaaaacattttacttcctcgagctgcaggtgttcgtgtactgttgtaaatttgtggtagagggagcctatctgtagtttttttttacaattatgtgtttgtaccagttttttctgagacatttgtagcttagacaggtaaagattgtttgaaatacatataaaccatttttgaaggaaagcaagcttatcgttgtaa

SEQ ID NO: 102800 - DNA, 682 bp, Zea Mays
ggtaaaatttggatttactgaaaatcattgtattgtagttgctttacatgtgttttgcagtacatgagtgtaatttttcatgaatgccttttacaggtcacattcacggaacaacatgtgtcatttttacactttttaactaatgtttgcgctattgttggaggtgtgttcaccgtttctggaatcatagattcgtttgtataccatagtcaaagagcaatcaagaagaagatggaaataggcaaattcaactgatgttgccttactattgctgcaattaagtagctcctgttgcagctccaagatccagaaatgcaatgtggcttttcctcgaactcttggcacagttgcgtagttgacaaacaattgctcatcagataactcttgatgtgcttgccaacttgcttccggcaaagataccagcgagcaagatggtcatcttgtatacttcgatgttacatttttgtacgcttagtctgacaagaaaacattttacttcctcgagctgcaggtgttcgtgtactgttgtaaatttgtggtagagggagcctatctgtagtttttttttacaattatgtgtttgtaccagttttttctgagacatttgtagcttagacaggtaaagattgtttgaaatacatataaaccatttttgaaggaaagcaagcttatcgttgtaacc

SEQ ID NO: 102801 - DNA, 1607 bp, Zea Mays
tttccgcgaatcggcaccttctccttttttttaagctgaatccccatcttcgacttccgcacctcgcctgaatcgctcattcgctccccaccccaacgctccgtccccgcggcccaccaaccgccgccgccgccgccacagccatgcacggccgccggcacctcgcggcgtcccttacccgggccctgatccaggcgccatcccgctccatctcctccaccccgtctctcctccaaaccctcgacccctcagtgccgtcgcctcccgccgcgggagcagggcggctcgcggagctgcggcggcggctgcaggcggacgcgccgtcgctgggtgacttcacgtactcggtggaggtggggacgcggcagcgcccgctgcccaagcccaagtggatgaaggagaccgtgcctggcggcgccaagtacgcggccatcaaggccaagctgcgggagctgaagctgcacaccgtctgcgaggaggcccggtgccccaacctcggcgagtgctggtccggcggcgagactggcaccgccaccgccacaattatgatccttggggacacctgcacgcgcggatgcaggttctgtaacgtcaagacatctcgaacaccccctccaccggatcctgatgagccttccaatgttgctcaagctattgcctcatggggccttgaatatatagtaatcacgagtgttgaccgggatgatctacctgatcagggcagtggtcactttgctgaaacagtacagaagctaaaggctttgaagccagaaatgcttattgaagcgcttgtacctgatttccgtggagatccaagctgcgtagagaaggttgcgacttctggattgcatgtttttgcgcacaacattgaaactgtggaagagcttcaaaggaatgtcagagactaccgtgcaaatttcaagcaatctatagatgttctggaaatggcgaaagagtatgctcctcccggtacccttacaaagacatcgataatgctgggatgcggggagactccagatcaggttattaggaccatggaaaaagtgagggctgctgatgttgatgtcataacatttggccagtacatgaggccatcaaaacgtcacatgcctgtttctgagtatgttacgcctgaagcttttgagaagtatcgggcccttggtgtcgaaatggggttccgctacgttgcgtctgggccaatggtccggtcttcgtacaaggcaggtgaattctacatcaaggctatgatcgaagcggagcgagccaagggaaccgctgcagactcaagtgcataaccgagatagcacctcccggccccacccaccccttgacttggttgtgctgcaaataagctcctcactgcttttgtagtcagagagacatgtcgattttttacgtcataattgtaaccacacattcacttctattttttttggtcaattgaacagttccggcgccttcgtgccttggttcatcctccctctcaagtccaagaaaaaaaaagaggtatttgttgtagcagtatatttaggcgaccgcttcctttgtatctcgctcgtacagaacatgaatacagggcgtggggtttctgtgccgttggtagatcc

SEQ ID NO: 102802 - DNA, 794 bp, Zea Mays
atggccggatcgagggcgcagccgagcctcgagttgagcgtcagggtcgtcagggtggacggcctagaccaagagcagctggagcgcggcgggaccctcttcctgaggtactacgtgccggcaggggacgggcggcggcggctgcgcgtggacacgcgggaggtcccgtgcggcggggacctgcgctggggcggcgagctcgcgcgcttcgagcgccgtggtggcagcagtggcactggcggcgcggcgccggccgcggggatcgcgttcgagctgcgctggaggccgcgcccgtcctcgtccgggctggcggcggcgttgctgggggccgcggcacgggcaaggaggccgtcgtcgcgggtgctggcgcgcgccgagctcccgtggcccgacgtgtcgtcgtcgtcgcggccggcggagcggtggctcacgctctcgctctcgcaggtgggccgcgaccgcgagctgggcgggtgcaaggcgccgaagctgctcgtcgaggccgaggctgtccacgccgtcgccggtgctcaagtgacgacgggaaggacgcccggcggcgtgccccccgagtgctgccgtgccggcgagcgctgcggccagtgcgggtggattgggagcgaggaggacatgttcctcgcagcaacgttcagtcactaggccgtctcaattgtcgtttctcacagcaaaattaacaacttcggacactcccatgtcagcgtacctctatcgagttcgagtgtagcggggtagcccccagctccaagttttgagaattgagatatgattgattg

SEQ ID NO: 102803 - DNA, 1446 bp, Zea Mays
accagtacagccagtggcaggcagcggtgtcaccggcaaaaaaattcgaaacgagcggtgtctgcctatcactgccatttcgctcgcgaagaaatcgcgaggggaagcgtgccgagctgagcaggcaggcggtagtggccgagcgaaagcatccccgatctcaacgtctcgtagtcgtagctgctgcctctcactcagggcaatggagagggcggtgccggttcggaagccgcacaccagcacggccgaccttctctcctggtcggccacggcccctgacgcatctgcctcgccggccgcgtcctcccgccccagcctcaagccggccgccgggattacgcctgcgatgttcggcgcgccggtcaccgagcaggaggccgaggatctgagcaagagtgaaaggaaattttgctccggatcgaagttgaaagagatgagtgggagtgggattttcgctgagaagagtgaaaatggtgactcagaggcttcaaatcctgataacaagacttccttgaggatgtaccagcaaactgtgactggaataagccagatttcatttagtgctgatggaagtgtttcaccgaagaagccgtcgtcaatacctgaggtggctaagcagcgagagcttagtggtaccctggaagatgctgatgctaaaatcaataagcagctttctgaagccaagaccaaggagcttagtgggagtgacatctttggtccgcctcctgagattcctgccaggccattggctgctcgtaacatggagctacaaggaaatgtcgatttttcacttccacagcgaagcgtccacacatcagttaaagtatcaaatcctgctggaggtccgagcaacatctcattcagtgaagagcccgtagtgaagacagcaaagaaaatccacaaccagaagttccaggagctgacaggtaacaacatcttcaaggaggacgtcccttcctcagccgagaagtctctgagctctgcgaagctgaaggagatgagtggcagtgacatcttcgccgatggaacgccagctccccgagaatacctcggcggcatccggaagccccctggtggcgagagcagcatcgcgctgatctgattgtcctggactgctttaattcggaccggctgtagctcccatcgccactaaagctcgcagagagtgcatttctcgacctctcgattctccatccgtgttgggatcataatttatgttgggtatcgttagtctaatataatgtagagtcagcagaatctgactcgtatcgtctgatacgctggtgtgtgatctcgcatcttttattgttgcgacattattatgttatatatttgtacacccgaaccgaaacttacgcaataattaaattttggactcattttcagggattatggcatcataggatgttttacttgtgctgttgtttgacgcaaaaggtccatact

SEQ ID NO: 102804 - DNA, 489 bp, Zea Mays
atgctcctagcgaccctaaacccaccccagttccgccgtcgcgttactcccccatcccgcgaccagccgcccctgcccccggcgagacattttggtggccagcacgagttggccttcttctccgactccagcgacgccgccggctcccgccaccccattcccatgctcatcttcctggtgggtacgctggcccaaaacctcgtccagctcaaggagaagcccgctgcctccacccctgatgggcgcgtgcgcactgcggccctagcggaggcgttgcagatcctgcaggagcaggcggcgctcgcctacctctgcgccccgtccgaatcggatagcgtcgtggatttgttcgtcgggcagtgcctcagtggagatggtgttggatccgtagcggcgacggcgaccatggataggagcatgctcgacgacctggatggcctccccgaggaggacaagatgcggatggctgccatgatcgaccagctctag

SEQ ID NO: 102805 - DNA, 110 bp, Zea Mays
ccgacttcatttgcttgcatttaccaccggagatgcacttgtgatcaattcatttttcattgaattttccttttttatacatttagttttcgtagtaagctgcagttttc

SEQ ID NO: 102806 - DNA, 3269 bp, Zea Mays
atcattttggcagcacgcccacacagcagcatcaacctcgggtgctctgcggccactggactgccctgccagtgctcggtgcccgtgcccgcgcgcgctagcctagctgctcctgcctggttcgccgtagcccgtagcccgtagcacaacaacaacaaaaaaaatctccgcggcgcggggggaggtggtctgttcaccttggggagcagcggcgggccgtcggccgagaaatgcccggtggcgccttcctcctcaacggcagcggcggcggcatggcggactacggcggcggcctcaccgtccccgtcgtcgtgacctgcctcatggcggcctccggcggcctcatcttcggctacgacattggcatctcaggaggtgtgtcggagatggaggatttcctgaacaagttcttccccgggttgctcaagaggacggcgcgcgccaacaaggacgtgtactgcatttacaacaaccaggcgctgacggccttcacgtcgtcgctgtacgcgttcggcatggtggggacgctgctggcgagccgcgtgacccggcggctggggcggcaggccgtcatgctgatcggcggcggcctgttcttggccggcgccctcgtcaacgccgccgcggccaacatcgccatgctcatcgtcgggaggatgctgctcggcctggggctcggcttctccggccaggccacgccggtgtacctcgccgaggtgtcgcccccgcgctggcgcggcggcttcatctcggccttccccctcttcatcagcgtcgggtacctggtggccaacctcatcaactacggcacctcgcggatcccgggctggggctggcgcctctcgctcggcctcgcctccgtcccggccgccgtcatggtggtcggcgccgcgttcatcccggacacccccagcagcctcgtcctgcgcgggaagcacgacgacgcccgcgccgcgctccagcgggtgcgcggcaagggcgtggacatcggccccgagttcgcggacatcctcgccgcggcggagaacgaccgccggaacgaggagggcgcgttccgccggatcctgcgccgggagtaccggccctacctggtgatggccgtggcgttcccggtgttcctcaacctcacaggggtggccgtcaccgccttcttctcgccgatactgttccggaccgtcggcttcgagagcgacgccgcgctcatgggcgccgtcatcctgggcctcatgaacatcggcggcatcctcgcgtcgggcttcgccatggaccgctacggccggaagctgctcttcatgatcggtggcgcgctcatgttcacgtgccaggtggcgatggcgagcataatcggatcacacctcggcaacgggagcaagatgcccaaggggtacgcggtgacggtgctggtggtggcgctgatcttctcggcgagcttcagctggtcgtggggcgcgctgtactggaccatccccggcgagatataccccgtggaggtgcggtcggcggggcagggcgcggccgtggcgctcaacctggggctcaacttcttgcaggcgcagttcttcctggccatgctgtgctgcttcaagtacggcaccttcctcttctacgcgtcgtggctggttgtcatgaccgccttcgccgtggcgttcgtgccggagaccaagggcgtgccgctcgagtccatggctcacgtcttcgcgcgccactggtactggggcaggttcgtcaaggaccaccagaagttgggcgaagagtccacctagctaagctaataattcggaatcagcgaacgacgtaccctactaccagtagcagattattgataagggagtcaaacacatattgcgtgtgtgtgtcttttaaagtgttcgtttagaatggcttgagaagctcatccgtgtagtaaatttggagacttcgaaatataataaatatgttcgtagttggcaagctataaggatagtgatgtagcaaattggcagatcgtaactggtttttttgacaaatcgtagctgggagggtttatatatagttccttggttttattctgtattgtcattctagtgaaaattcattgtttcataattcgtagtgtaaatttacattgttctagagctgaagataggtgtggatgtcaaatcatatacgcggacatttatagaggtccgaaatattagatctatcactctacttatgtaaccaaatattctgcacgctcagtcgccaacaacatattgggtatctattctcttagtcctaaaacataatagcgtttaagttattctcgagtaataaaataagaataaaacaaaaagtgagttcgctttacgtcgaacatatcttggtgttcagtaggaaaaagatattaaaaacagccaagataatcctgcaatcgttacgctggccgaaaactttaattgggctctcacgacagtccgttgtggcccagttaggcgaagcgagacctcccagctcccgcgcacgcgctctaggcagacaggatattttgtgtcgagggagcccgaggctaacggcacactgaaccatcataatttaccagcaaacacttgagttttaccactctttacttttccctacatgcagttcacctgaacctcctgcttggcgtccctgacgaacctcctccagtaccagtgccccgcccagacggcgcgcatggcctccagcggcacgcctttggtctccggcaggaacgcggcgatgaaggcagtcatgacgaggacccatccggcgtagaacaggaagatggcgtgcttcatggcgcagagcagggagacgaacacctgcgtctgcgcgaatgagaggcagagcgcgatggacaccgtcagcgcctgcgccgccgacctgatctccacggggtagatctcgctcggcaccacccacttgagcggcccccacgacacgccgaagctgaaggtgtacaggcacatgagcaccagcacggccaccgcgtagtcccgcggcatcgtcaccgcgttctgcttgccgaggtggcccgccaggatgcacgacatggccaacttgtttaatttgacacgtggaaagagatttctcagctcaacagtacgacatacgtatactgatgaccaccatcggatttctcggttacctgacaaatcatcattgccgcgccaccgacgatgaacaagaacctgcggccggcgcggtccaagacgaaggaggagagcaatgacgaggcaaggttgacgaggctaaggatcacggacccaaatatcgccttctggctg

SEQ ID NO: 102807 - DNA, 2018 bp, Zea Mays
atcaacctcgggtgctctgcggccactggactgccctgccagtgctcggtgcccgtgcccgcgcgcgctagcctagctgctcctgcctggttcgccgtagcccgtagcccgtagcacaacaacaacaaaaaaaatctccgcggcgcggggggaggtggtctgttcaccttggggagcagcggcgggccgtcggccgagaaatgcccggtggcgccttcctcctcaacggcagcggcggcggcatggcggactacggcggcggcctcaccgtccccgtcgtcgtgacctgcctcatggcggcctccggcggcctcatcttcggctacgacattggcatctcaggaggtgtgtcggagatggaggatttcctgaacaagttcttccccgggttgctcaagaggacggcgcgcgccaacaaggacgtgtactgcatttacaacaaccaggcgctgacggccttcacgtcgtcgctgtacgcgttcggcatggtggggacgctgctggcgagccgcgtgacccggcggctggggcggcaggccgtcatgctgatcggcggcggcctgttcttggccggcgccctcgtcaacgccgccgcggccaacatcgccatgctcatcgtcgggaggatgctgctcggcctggggctcggcttctccggccaggccacgccggtgtacctcgccgaggtgtcgcccccgcgctggcgcggcggcttcatctcggccttccccctcttcatcagcgtcgggtacctggtggccaacctcatcaactacggcacctcgcggatcccgggctggggctggcgcctctcgctcggcctcgcctccgtcccggccgccgtcatggtggtcggcgccgcgttcatcccggacacccccagcagcctcgtcctgcgcgggaagcacgacgacgcccgcgccgcgctccagcgggtgcgcggcaagggcgtggacatcggccccgagttcgcggacatcctcgccgcggcggagaacgaccgccggaacgaggagggcgcgttccgccggatcctgcgccgggagtaccggccctacctggtgatggccgtggcgttcccggtgttcctcaacctcacaggggtggccgtcaccgccttcttctcgccgatactgttccggaccgtcggcttcgagagcgacgccgcgctcatgggcgccgtcatcctgggcctcatgaacatcggcggcatcctcgcgtcgggcttcgccatggaccgctacggccggaagctgctcttcatgatcggtggcgcgctcatgttcacgtgccaggcatcgcacatgtcacattctttattgaacgaataaccttttcattacttatatatagtatatcaaaaagaaaaggaaaaacttcctgcttcgcaggtggcgatggcgagcataatcggatcacacctcggcaacgggagcaagatgcccaaggggtacgcggtgacggtgctggtggtggcgctgatcttctcggcgagcttcagctggtcgtggggcgcgctgtactggaccatccccggcgagatataccccgtggaggtgcggtcggcggggcagggcgcggccgtggcgctcaacctggggctcaacttcttgcaggcgcagttcttcctggccatgctgtgctgcttcaagtacggcaccttcctcttctacgcgtcgtggctggttgtcatgaccgccttcgccgtggcgttcgtgccggagaccaagggcgtgccgctcgagtccatggctcacgtcttcgcgcgccactggtactggggcaggttcgtcaaggaccaccagaagttgggcgaagagtccacctagctaagctaataattcggaatcagcgaacgacgtaccctactaccagtagcagattattgataagggagtcaaacacatattgcgtgtgtgtgtcttttaaagtgttcgtttagaatggcttgagaagctcatccgtgtagtaaatttggagacttcgaaatataataaatatgttcgtagttggcaagc

SEQ ID NO: 102808 - DNA, 1962 bp, Zea Mays
cagataatgtgttgccacattccagttagaaattacaccgaaatagtcatcgcaaccatataagtgtaaatctagtatatttagaaagaagaaaaaggagaataaagatcattatatttcaccgcaacttcattagctctgttgctcccgatcaggaggtgtgtcggagatggaggatttcctgaacaagttcttccccgggttgctcaagaggacggcgcgcgccaacaaggacgtgtactgcatttacaacaaccaggcgctgacggccttcacgtcgtcgctgtacgcgttcggcatggtggggacgctgctggcgagccgcgtgacccggcggctggggcggcaggccgtcatgctgatcggcggcggcctgttcttggccggcgccctcgtcaacgccgccgcggccaacatcgccatgctcatcgtcgggaggatgctgctcggcctggggctcggcttctccggccaggccacgccggtgtacctcgccgaggtgtcgcccccgcgctggcgcggcggcttcatctcggccttccccctcttcatcagcgtcgggtacctggtggccaacctcatcaactacggcacctcgcggatcccgggctggggctggcgcctctcgctcggcctcgcctccgtcccggccgccgtcatggtggtcggcgccgcgttcatcccggacacccccagcagcctcgtcctgcgcgggaagcacgacgacgcccgcgccgcgctccagcgggtgcgcggcaagggcgtggacatcggccccgagttcgcggacatcctcgccgcggcggagaacgaccgccggaacgaggagggcgcgttccgccggatcctgcgccgggagtaccggccctacctggtgatggccgtggcgttcccggtgttcctcaacctcacaggggtggccgtcaccgccttcttctcgccgatactgttccggaccgtcggcttcgagagcgacgccgcgctcatgggcgccgtcatcctgggcctcatgaacatcggcggcatcctcgcgtcgggcttcgccatggaccgctacggccggaagctgctcttcatgatcggtggcgcgctcatgttcacgtgccaggcatcgcacatgtcacattctttattgaacgaataaccttttcattacttatatatagtatatcaaaaagaaaaggaaaaacttcctgcttcgcaggtggcgatggcgagcataatcggatcacacctcggcaacgggagcaagatgcccaaggggtacgcggtgacggtgctggtggtggcgctgatcttctcggcgagcttcagctggtcgtggggcgcgctgtactggaccatccccggcgagatataccccgtggaggtgcggtcggcggggcagggcgcggccgtggcgctcaacctggggctcaacttcttgcaggcgcagttcttcctggccatgctgtgctgcttcaagtacggcaccttcctcttctacgcgtcgtggctggttgtcatgaccgccttcgccgtggcgttcgtgccggagaccaagggcgtgccgctcgagtccatggctcacgtcttcgcgcgccactggtactggggcaggttcgtcaaggaccaccagaagttgggcgaagagtccacctagctaagctaataattcggaatcagcgaacgacgtaccctactaccagtagcagattattgataagggagtcaaacacatattgcgtgtgtgtgtcttttaaagtgttcgtttagaatggcttgagaagctcatccgtgtagtaaatttggagacttcgaaatataataaatatgttcgtagttggcaagctataaggatagtgatgtagcaaattggcagatcgtaactggtttttttgacaaatcgtagctgggagggtttatatatagttccttggttttattctgtattgtcattctagtgaaaattcattgtttcat

SEQ ID NO: 102809 - DNA, 121 bp, Zea Mays
ggccatagcttgtatttaaaaaaactatttatcgaaaaaattgaatatagggaagatatattcctcagttggacttgtgtagtttatgtgtctattttcccttttttgtatacctagtttg

SEQ ID NO: 102810 - DNA, 153 bp, Zea Mays
atggagaagggtggaaccagcttcgatgccgatttttcagatggtccgtgcgaggtcggtgcggcggtctgctgcccggagctgcccttcgtctccaaaaatgcaggcgtggtggcctactcgtatctggattcaggcgtcacggggaaatag

SEQ ID NO: 102811 - DNA, 804 bp, Zea Mays
accacgcgtccacgcctcaccatcgcagaagcgcagtaggaagccggacaaagctacgcaaggagggagaaagcgtgtaaaccatggcgtcctccgcgttcctcaacgctctcgtcctccgatcgccatcaccgtcgctctcgtcctcgtctaaccgccgcagcaccggcgccttcgcgttcccgaacccaccgcgcttcccatgcctgcgttctgcgcgtcgactcgtccttgcgagggcggcggcagcgccggcgccgggcgatggccccgaggacgagtgggggccggagcccgagggcggttccgctgtcacgggggccgcggtggcggaggcgccggaggcgagagaggtcgcggagctcaaggcgcagctaaaggacgcgctgtacggcacggagcggggcctgcgggcgtccagcgagtcacgagccaaagtgctggagctcatcacgcagctcgagacgcgcaaccccacgccggctcctacggaggcgcttacgctccttaacgggaagtggatcctcgctgaagcgcttgtgaggttattgatgaacgcgaagcagctgctgcagcaccatggtggtgttggtgttgcctatggatccgatcaggtctccggataccaagtgtcatggtcctgcttgggggggtggccggttggggctagagtggttggtggttagggctagcggcggcacacaagagagaagggggcacttgtatttatagtccatagaggacttgtattccaagcaaactaaaggaagagtccttaggctatccgcaaccgttacccctaaa

SEQ ID NO: 102812 - DNA, 1492 bp, Zea Mays
accacgcgtccacgcctcaccatcgcagaagcgcagtaggaagccggacaaagctacgcaaggagggagaaagcgtgtaaaccatggcgtcctccgcgttcctcaacgctctcgtcctccgatcgccatcaccgtcgctctcgtcctcgtctaaccgccgcagcaccggcgccttcgcgttcccgaacccaccgcgcttcccatgcctgcgttctgcgcgtcgactcgtccttgcgagggcggcggcagcgccggcgccgggcgatggccccgaggacgagtgggggccggagcccgagggcggttccgctgtcacgggggccgcggtggcggaggcgccggaggcgagagaggtcgcggagctcaaggcgcagctaaaggacgcgctgtacggcacggagcggggcctgcgggcgtccagcgagtcacgagccaaagtgctggagctcatcacgcagctcgagacgcgcaaccccacgccggctcctacggaggcgcttacgctccttaacgggaagtggatcctcgcgtacacatcattttcccaactattcccactattggggtttggtaatctgcctcagctggtgaaggtggaggaaatatcacaaaccattgattctgagaacttcacagtgcaaaactgtatcaagttttcaggacctttggctacaacctcagttgccactaatgcaaaatttgaaattagaagccccaagcgtgtgcagatcaaatttgatgaagggattgttggtacaccacagttgaccgactccattgtgctaccagagaagtttgagttatttggacagaacatcgacctgagtccactgaaaggcatattttcttccatcgaaaatgcagcatcctcggttgcaaagaccatatctgagcagcctccgctcaaaataccgatcaggacaaacaatgctgaatcgtggttgcttacgacataccttgacgaagagctcaggatctccagaggcgatggcagcagcatctttgtgctgttcaaggagggaagtactcttctatactgagatccaaatcccgagtccatgatcgttgaagctgaaccgtgaagtagttatactgcttatgcttttctttcttatagtaatatgctccgtctcaaaataagtcaatttctagaatcacttaaagtcaaattatcttaagtttgaccaattttataggaaaggcaccatcgtctatgtctctatgacaccaaatgagtacattatgaaaaatattttatggtgcattagtgacactaattcagtgccatgctctttttatgaatttggtcaaacttaaaaatagtttgatttaagataactctgagaaattgatttattttgggacagagagaatgtttctgggttgtcttgtaaatacagttcttgtcattagagtatatgatgactaggaccggtttaatccgaattatataaactctctatatatcagcgaaccccttttttatagttaa

SEQ ID NO: 102813 - DNA, 998 bp, Zea Mays
gggagctcgaacacaaacagcaagaaccaccaagcgaccaagcctgcaagtcaccaagggagcccgatctgagtcaagcgagtcttcccgtttcatcgcctggaaaaaggcgagaaaccccaaagcgaaggaacagcagcgcgagtgctagcagcagcagcgattccttcgccataccgttcgctgcgctcgctcactcggatcgaaaccccctagggttcgcatcgtcctcccgccaactcctatccctcccctctccctccgccgcgcgcgcgcgtggagctaccaaaccctaggacggcaaatccggtgcgatcgcccacggtggaggcctctcggccgccgagaggagccgctcggggctcggatcagggttccggtacttcgccggtgccgcctctgggtggtgggaccggtggatggtcatgggagccagcggctccaagcttgagaaggccctcggagaccagttcccggaaggccagcgctacttcggcctcgagaacttcggcaacacctgctactgcaacagtgtccttcaggtatgggtacatgcctctgaaactaacagctaatagatttgatgcttggttatgcttggcttgatactggtaagtgcggcagtgtagtgaaacggcctggttcggtttttttaggtagtaggtgtgtatatgctagatattataatgttctagcacttgttcgccagtttcgagatatgccacctattggtatgggctattcatatcgagcacaagtctttaggagtttggacctttttttcgaaaactctaatttgtttttttaattcctaatctgatctcgaagttttgaccttttggagtttaagttttgggaatagtcttgaatcctccctatgtaactatggtcaatgtttatctcaatctctagaaatctggccaaacagcaatatcgtgcatagggagcagcactgctagaccacaacactatcgggatgagaagttgcactgtcaggc

SEQ ID NO: 102814 - DNA, 1935 bp, Zea Mays
tcaagcgagtcttcccgtttcatcgcctggaaaaaggcgagaaaccccaaagcgaaggaacagcagcgcgagtgctagcagcagcagcgattccttcgccataccgttcgctgcgctcgctcactcggatcgaaaccccctagggttcgcatcgtcctcccgccaactcctatccctcccctctccctccgccgcgcgcgcgcgtggagctaccaaaccctaggacggcaaatccggtgcgatcgcccacggtggaggcctctcggccgccgagaggagccgctcggggctcggatcagggttccggtacttcgccggtgccgcctctgggtggtgggaccggtggatggtcatgggagccagcggctccaagcttgagaaggccctcggagaccagttcccggaaggccagcgctacttcggcctcgagaacttcggcaacacctgctactgcaacagtgtccttcagaaatctggccaaacagcaatatcgtgcatagggagcagcactgctagaccacaacactatcgggatgagaagttgcactgtcaggctgagaagtggcaccgtcgtgctgctccgagagatttcagatttggcttccttcagatatttgggtatctttttggtctgattgcttcctctagagactcttttagagaattcaatcaagagttgattgaggtgttcttaattttggatcattttttaggttttgatgtcttagaggtttacgtgaagttttggaagataagccaagattgtccaaagcaatatttttattggctctcattcatcccctttggtaacctaatctaatgattccaatatagttagaaaatcagcttatggctatatatattctacatattactattgtattgatcattattgtcattcactctactcccatttacctacaaaaaaggaaattttaatctagctgtagcttggacgaacaaaattgttggtgataagatctccactcaaaggtccgaattgatgaaatccatgtttaggtagttttgtaggatatggttgtcagccaaagccaaaggaaaaacactttgaagagcttagaagcatacaaacaagccaaaaataaatgaagacgaagatacgaaaagcctaagttttgttatataatgtagatatttatgaactttaacagtgttttgttaaaatatttataaattttatcagggtcaactaacctcgataaatacccctaaattagctcctggtgatgggtccttagcggaatcaaaggttgagatatctccaccataacgaatctttgtcaacgccctagtgtacaagctttacacctagtcagcgggcgacactgaatgaccctcatcttttttctttactttggtcaacttgattttctacgcctctttgtgtttcttagccaactcatccaccttcgacaaggaaaatataaggactcaatactagaagaataatgcaaaaataaatgaaaggtgaataaccaacttgttggggccttggtcttttaaaggtccttaaaaacacgtttaaccattggttgccaagtattataggagcttcggcactagaacaccttcgatgcaggacattagaggggcgacgaagctaactttgtcatagcgacacagggagacgatgcaaggaagagtcatcctgaatgctaaaagcaaaagacaatgttgcccttgcattatttgtaaatcatgtgtgtagtccttgtgggtgtaaatgtaatttcgtacgaagttgtacgattctctataaatagatgaatagtgtcctgcataaattaccttttggagggcaggacaattgttgtgtaatcttttctctaaagcaccttcgctcttcgctctaattcattctgtggaaccttcgaaagaggagaaatacgatattatatttatgcaattaagtca

SEQ ID NO: 102815 - DNA, 1167 bp, Zea Mays
gcaggcaatgcctcgtgcattggccaaggcgtagtagtcaccacttgaatccaagacaggggaaaaacctttaacctcgccatccatccatctaagagctttgctggtatccgcatccttgaagatcatctgcttcggtcgtgccctaaccaaagataaggtatcatacatgtgttgcttgcagcatgagcatatgtcgtagagagaatccactgtgattgcatagcagccatggatattagcaattgagtggtctttttcttctcttcagcaagttcgtcaaagatatcatgattcttcttgttaccttcgacaagctgatgtagaagcccaaaaatttctgaattgttttcttcctgtttcttgatggcttcggcactaatccttttatacttggcctccaagacagactgaattacatccttctgctccgttagacccttgaccatgtttttgcattcaagaaaatctttggacaaagtagttagcgttttagtgtttttcgcggtgtcttttcttagctcgctgacctcttttcgaagttgggagagttccacatcactttgtgctttgaggaccttgctcagttttagcccctaaaacaaggcaaaggaaactaggtttcaatgacaaggcatggaaaaactgtatgataaaacaaagttaggttaatagtttgaactcattatagaaaacgaattaatcccgcgtgggatactgttgggggccaatgaaatctatgtttggatagttttttatgttatggttgttagaagccgaagaaaaaaaaactctttgaagagctttggagcacacagacaagccaaagatacatgaaaaggaagataaaggatttcggctccatagtaaaggatttcggagaagagaagattaagggagcgtctacaaagagaagacgtgcccaacacgcctatgcaacaatatgacattgttgtactctcctaaatattaaagcaactttgtaatagggagggatagaaattttattttacatggagatataactgagcccgaccttataaataaatgaacggtaccaccattctgaagggctggccatttgtagatttcttgtccatgcctccatggcatttctgtgattagagagtttcagaatttattgatatgttgaaactattgtattaa

SEQ ID NO: 102816 - DNA, 1798 bp, Zea Mays
cgaacacaaacagcaagaaccaccaagcgaccaagccaccaagggagcccgatctgagtcaagcgtcttcccatttcatcgcctggaaaaaggcgagaaaccccgaagtgaaggaacagcagcacgagtgctagcagcagcagcgattccttcgccataccgttcgccgcgctcgctcactcggatcgaaccctccctagggtttcgcatcgtcctcccgccaactcctatccctcccccctccctccgccgcgcgcgcgcggggagctaccaaaccctaggacggcaaatccggtgcgatcgcccacggtggaggcctcgtcggccgccgagaggagccgctcggggctcgggtcagggttccggtacttcgccggcgccgcctctgggtggtgggaccggtggatggtcatgggagccagcggctccaagcttgagaaggccctcggagaccagttcccggaaggcgagcgctacttcggcctcgagaacttcggcaacacttgctactgcaacagtgtccttcaggcactttatttttgcattccattcagggagcagttactggaatattatgcaaataacaaaactccaggtgacgttgaggaaaatcttttgacttgtttggccgacctttttatgcagataagccaagcaaagaaaaagaccggtgttattgctccaaaacgttttgttcagagagtgaagaaacagaatgagttgtttcgcagctacatgcaccaggatgcacacgagttcttaaattttcttttgaatgaacttgttgatattctggaaaaagagtcaagtgctgctaaggactcaccccaatcatcatctccagaaaaagctccaaatggcccagttcaacctttagccaatggagttaaaaaagaaccaccagttactctggtccataaaaatttccagggcatattgaccaatgaaacaagatgcctaagatgtgaaacagtaactgcaagggatgaaacgtttcttgatcttagtgttgacattgaacaaaatagttctatcacaagctgcctgaaaaatttctgttctacagagactttaaacgcagaggataaattcttctgtgacaaatgctgcagtttgcaagaagcacagaagagaatgaagatcaagaaggctccccacatactggtgatccatctaaagcgtttcaagtacattgagcagcttggccggtataagaagctttcataccgggttgtattccccatggaactgaagctcagtaatacatctgacgatgtagacactgagtattccctctttgctgtcgtggtccatgttggaagtggccccaaccatgggcactatgtaagccttgtcaaaagccacaaccactggttgttcttcgatgacgaaaacgtcgagatggttgaagagcagaccctacaaacattcttcggttcctcacatgaatactcaggcaacacagaccatgggtatatcttgttttatgaggggcttggtgggaagagttagatgggtttattcatcttccttgtttcttttctccttttctctttggagcttgcaaattcactcttgtgcctacacagctactatttcattacctccatgggaaacgggtcaatcgaaggggtgttgtatgaggtgaggacgccagattttgggtggtttcagtgtacaggggataatggaatctagctccaacgatgaaataaggtgtattttttttaacttctcagggctaaagagttggactttactattgagcacaacgtacatattttccagtgatcttgtg

SEQ ID NO: 102817 - DNA, 232 bp, Zea Mays
cgcgggcggccatgccgcgcggctagggcctgatggtatatggtcgggcgcggctagggtcttggtggagcgcgcacatccggccacggcggcctgcggtttcgtgcgggctagaggcggcgcggccggaggtgggacggcacgatcgagttaggccggcgccagcggccggaggcgccacgggcaggcacagcgaggctgaagcctgatgctgttcctgcgggcggcggtg

SEQ ID NO: 102818 - DNA, 591 bp, Zea Mays
atgggccctgctcctcttcagcttcccctccgcgcaggctcacctttggtcgtcgtgaggacaccagcaggctccaaatccgaacgctcgtgctccaactttggccggtcaccatcctctacaccgagatcttcctggtgcgcgggtccttggccaccatctctgggcgccgctgcccaagtccgaccacagcccctacctcgacgccgcctgattcaagagccgctcggcatcatccctggcggccaagctccagaactttcggggaagatcgccgttgaagctcactggggagcacccttgctactcgacgtgagcgccatatctcccagtccgtgggctagtcggcgtgggttggctcaaggtaccgaatcaagtgcatttatctcgttcaattcaatgcctctgcgcctggcgaaagaaatccgtcgggggttaccatggggcagcgaattcctcactggcattgtgtgttccaccgtgcaccgccaggcgtcgtggacaggaatcctaggagcccaatcgccggtaagaaggtctcatctacgatcacatttgtctctactgcgccttgaatctattcgtgcttaa

SEQ ID NO: 102819 - DNA, 678 bp, Zea Mays
ctcccccgcgcggcgctgcatctccattcccttctccccgcccatcgcctctcggatcttctcctccaccgcctcccgccgaacgtcctggccgatctccatggccacgccccactccacgcacgtgtaccggcagttggtctgctgctccgcgaagaagggccagcacagcatcggcaccccgccgcacaggctctccatggtggagttccacccgcagtgcgtcaggaacacgcccaccgcctcgtgcctcagcaccacctcttgcgggcaccagctcgccaggtggccgcggcccctgatggcttccaggaactccggcggcagcacggcggcgtcgccgttgaccaggtccggccggatgatccacaggaagtcgtggccgctgttggccaggccccacgcgaattccaccagctcctcgttcgtcatcaccgtgatgctgccgtagttcacgtacaccaccgacctgggcgccctgccgtggagccactcgaagcaggacacgtcctccttccagaggttggagcctagcgcgtcggtcgggcctccgcggggcactatctcctcggcgaggaacgcgagcggcccgatggtgtggatggacgcggacgacgggatcatggcgcgcatggcgtcgagcgcctcctgctcgagctcgtcgaaagtgttgaggat

SEQ ID NO: 102820 - DNA, 898 bp, Zea Mays
gagagctcatggtactcaagtgccaattcttgaggatgatgaagatggtcttgatgtgggtgaagagaacgaagacgatgacaattttgtgcttgatgatcttgacatggatgatgaagaagaaacaaacaacagtggtggccgtggtgatgagcaagacaagaatgatgttggtttagatgatttggatgatgaccatgcccccaagggtctcatcggcggcagtcatggaagcattgtgtcgcggtctgtcgggcacatgccgggcaactcgtcgtcggagggcaatttggggtccgccgccgaggtgggctgcgtgggggaggtcgtcaagcacaagcgcctcgctgatgaccagttcttcctcatctgcaagggccagcagaggttccgcgtcgcccgcgtcgtgcgcaccaagccctacctcatcgccgccgtgcactggctcgaggaccgcccgcccgccgagcccccggcacatggggaggacgccgaggcgctggccaccgacgtcgaggccctcatgcgggacgtcatacgcatcgccaaccgcctcaacggcaagcattcccatcctcgccgtcttcggggtgaggtgaggtcgtcacttgtcagctaggaatggatgacgataaggggtctgtggtcgaggctataggataaaactttgttatcactcttcgaagcccttttttggcattttttcttattatattttttgtggctaggttctatctgcatatggttagcattctagcgtgtaaaattgtagaacatggtgtgtgtcaactcaagaaaatttggagctgtgatatataggtccttgataaggacgagaattttgctctcagagagtgactcatgcttctacccctaaattggagctgaatcgaagtta

SEQ ID NO: 102821 - DNA, 606 bp, Zea Mays
aaaatctaaaatccttgcattccaaaaagccctgcccacggcgtggcttcaccttcgccctgcgcggctgcgcccctgcccttccacgacgacgaccacgaccacagcagtacagcacccccgagtccccgaccccgtcctcggcggtggcccgccaggccttcttcttttacgttcccctctgacacgggtttcttttcctggcctcggagtccgcgccggccgcctcgtgcccgacccgagatcggatctccttcgaggccgggctcaggcctcaggggtgccgccaccgcctcgtccgtctccagggaccgcgagctgtcccctcgcctccagcgcagccgctcatccgccggcggcggctccaaggcgtccctgtccccggaggtactgcacaccaccgccttttgttgccatctcccacgctacgttacgcacgaagccgaacgcctttggaacggagtcaagaccgatcaggggcgccggtatatattaaggacattacagtttgtttttttctaacggcggcggctcttggtttcctgttcggcagaggcggcgcggcgtgggcgcgatgcagcagcgggtggcgcagctggaggagga

SEQ ID NO: 102822 - DNA, 1775 bp, Zea Mays
cagtggcctccatgtgcgttcttttattgtttgactatttagtccggcgatacggtttcctcaactgggatccgccatccacctcgcagatcggatctccttcgaggccgggctcaggcctcaggggtgccgccaccgcctcgtccgtctccagggaccgcgagctgtcccctcgcctccagcgcagccgctcatccgccggcggcggctccaaggcgtccctgtccccggagaggcggcgcggcgtgggcgcgatgcagcagcgggtggcgcagctggaggaggagctccggagggagcgggaggagaaggcccggaccgtgagggacctcgaggacctgaggcgggacggcggcgccaagggtgtcgcggacaaggtgcaccttctggagcgggaggtgagcaagtccaagcagtcggagcgcaagatgctggagtcgctgatataccagaccaagcagctggagcagaccaagatatcgctcgaggaggccaagctggagatggccacgctgcagcagcaggcgagcaagagcctcgcgtcagcccggcgcggcggcgtgctggagcagaggagcgtcagggacctcatgttcggcggcgcggacgaggagatcatggtcctgcgcgcggagctccgggcggcggtgcagggcgaggagaggagccgcaaggcgctggacgacctctccgccgcgctctcggacgtgaccgcggaggccaggcaggtcaaggcctggctctccgaggcgcaggccgagctggaggccgccaacgccgaggccgggcggctgcgcgcggcgctgcgcggcgcgtccgacgagcgcgaccgctacaggctcgaggccgacgagtgcgcggcggcctggggcgacaaggagcgcgtgctcctcgactgcgtgcgcgcgtccgagggcgacgcgagccgggcgcggcaggagaacaccaggctggtggagtcgcagcgcgtcgtccgcgacgagaacgcgcgcctgcgggacatcctcaagcaggccgtggccgaggccagcgccgccagggactcgctggagctcgccagggccgagaacgcgcgcctcagcgccgccgtcgccgacaaggacggcgcgctgcagagcctccgccaggagtacgagtgcgtcagggtcagcgaggccgcggcgcagggtagcctcagggagctcaacagcctcctcgccgccaccacaacgacggcgtgcaacacgcccgcgtcgtccgccaagaccgcccccgcgccgggctacggcctcgatcagcgccttccgaatggcagcagcaagaagggaacgccgcggtcggcgtcgcagcggtggatgcctgacaagccacggacgccgagcagccggcggacgtactcgatcggcgagccgggtaagctgacgactggcttctcgcggtccgcgcggatggggaacctgaaccccagggatcgggtgttcgcgtccctgagcaacatcgccgacctcaagtccgcggcggacgcggcgacggaggacttggacgacgagttcgaccacatcgacgagagccactacgttgacacggaggactccacgaagcacaagaagagcctgatattccgcagattcggtgattttttcaggaggaaaagcctctataagccgaattcagcgccagtacacacactctaaaaatcttttctttttttctccgccccatggatacacgcttgtagttccgttgtgttcttgttcatctgaatacacgagaaatgaaaaggttgttgaatcaga

SEQ ID NO: 102823 - DNA, 407 bp, Zea Mays
tttttctttttctttttgttgttgttgctcttgtgcctagatactcaatgtcaagactaagatgttgcctcataaatggagaactgatttaggtggaagcaatgaagtgaggaggtctcgtgaggatatgcgttctctaaagtattccagtttaaggttgcttggttgtatgagcacatgccattctccctttactgcattttctaggatcatcatgctatcattagattacatgtagtaatatgatagtttctatcttcttgcagatggtacatattttgcaagtatatattgagaagaatgtattgctattccagggttttgagcacaacaataaagagtctattgaagtttttgtatcactaatgactaaagtgagttttttaaagtatgcttttatttatgtt

SEQ ID NO: 102824 - DNA, 113 bp, Zea Mays
gtctagttttcccatatgattttgcccctgtttttatagtgttctatgaatttaacatctgttttgacatcaaatatatgaacaacaattcataagaacttctactggaaaaa

SEQ ID NO: 102825 - DNA, 1736 bp, Zea Mays
accaaaagccccaagctgcggcgagccagcgggcatccccttccccagtccacggctgcacctgcacgcaccgccctaaacgtccacgcactcacgttaaggcgcacgcttctccgcaaccttcccagcactttcccctccgtctccagcgcctggtctccgcctcccgcgcgcgcccgatgcagatgccgccgtcgcggccgatctgacgccatcggtcgccggccatgaggcctcgccgccgggccctcttcccgttgcacagcgcaggcgctggggcctgcggtgacccgtgggccgactgccagacaccaccgccggttcccagcactcctgattccggccctggcccttccccatcgctgcctccctatggcgatctaccgtgccctcccgttttgtcgccgtcgccgtctccgtcgcctgctcccgcgcataacggtaggaggaaccagggagggacgcagggatacgggcccccacccggtgcaggcgaccacgaccgacggcacctcgtcaaatacgcgctcatcgccgccggggtgttcgccttcgtatgcctgatcctgctcggcgtctcggtggccgtgcggcgccggcaggtccggcggaggcggcaggcgctcctcgcaccgcctatcccattccccgagggcgcggcgaacgtcggcggcggcggcgggcacgaccacgggtgggacggcgcaggcggggtggtgcaccacgtctggaacatccggaccgtggggctcgacgaggcgtccatcagttccatcgccgccacgcggtaccgcgccggggcggggctcctgggcgcggctgactgctccgtctgcctcggcgagttccaggacggcgagctcgtgcgcctgctgcccaagtgcgcgcacgcgttccacgtcccctgcatcgacacctggctccgcgcgcacgtcaactgccccgtctgccgctccgacgtgctcgaccccgccgtcacggccgactccggaggaggcggcgagtccagctccagcccgccgccagctgatccggacgcgagtcccaacggcggaccagatcatgttggcgcggcgagcgacgcagccccggatcacgaaggagaggagagcgacggcctagacgcttcgcccgcacgagaggaccagcaagagcgacccagctccgcacagccgccgccgccgccagaactcttgtgtgcgctgccgcgtaacgtgcggcgcgcggcatccatggatgccgtggcggtgtcaactgcggcgagtgtcgcggagctagaccggctgccggaagtagcagctcctgaagaggagcagatcggtgggaggcggaagcgctggacgggcccgtgcccgtcccgcccgaaggcatcgggttcggggcaccgcagcaacctcagcaccgactggctgctggctcccagcggcgtcccgaggtccttcttctcgcgccattcccgcgctcggagctcggtgctgccattgtgagtgatggcggtctctggtggtactcgagccgaattttgctcgctgctgctaataacgtttgctgctgcctgctggtcgttggatcgacggccgcgatcagtacgcccttagcttatgcttgtgatctctaaaatgaggttagaagttgatgatcggatccaggaattggatgtttgcaactcgagaaatgtatactgtacagccctgttattctctgcagatcggatccaggaatgctcgtttgatgat

SEQ ID NO: 102826 - DNA, 996 bp, Zea Mays
ccacgaccgacggcacctcgtcaaatacgcgctcatcgccgccggggtgttcgccttcgtatgcctgatcctgctcgacgaggcgtccatcagttccatcgccgccacgcggtaccgcgccggggcggggctcctgggcgcggctgactgctccgtctgcctcggcgagttccaggacggcgagctcgtgcgcctgctgcccaagtgcgcgcacgcgttccacgtcccctgcatcgacacctggctccgcgcgcacgtcaactgccccgtctgccgctccgacgtgctcgaccccgccgtcacggccgactccggaggaggcggcgagtccagctccagcccgccgccagctgatccggacgcgagtcccaacggcggaccagatcatgttggcgcggcgagcgacgcagccccggatcacgaaggagaggagagcgacggcctagacgcttcgcccgcacgagaggaccagcaagagcgacccagctccgcacagccgccgccgccgccagaactcttgtgtgcgctgccgcgtaacgtgcggcgcgcggcatccatggatgccgtggcggtgtcaactgcggcgagtgtcgcggagctagaccggctgccggaagtagcagctcctgaagaggagcagatcggtgggaggcggaagcgctggacgggcccgtgcccgtcccgcccgaaggcatcgggttcggggcaccgcagcaacctcagcaccgactggctgctggctcccagcggcgtcccgaggtccttcttctcgcgccattcccgcgctcggagctcggtgctgccattgtgagtgatggcggtctctggtggtactcgagccgaattttgctcgctgctgctaataacgtttgctgctgcctgctggtcgttggatcgacggccgcgatcagtacgcccttagcttatgcttgtgatctctaaaatgaggttagaagttgatgatcggatccaggaattggatgtttgcaactcgag

SEQ ID NO: 102827 - DNA, 665 bp, Zea Mays
tccacaacaaaaaaagaacacattagatcaaagttcattgcgcagcacagacaatgaattcaaccccgcattcacgaggcctatggcaggaggagcaataataacaagggacaaggattctgccggtgccgaacctcaagggcgtgcttgtagcgacggacgcgggtgaggtcgcgcgcgatgcggcggagctccgccgtgggtgcgtcgcgtccctcactggaccacttctcgagtgccgccgtcgcgctccgcttcgccaggcccagtcggaagatgcggctgcgcaggtcgtccccatcgtgctcgcccgtagccgcgaccacgcgatcgcccacggcggtcgacgcggcttcagatgagaaggtcccgtgccccgcgagaacagagcggaggtggaagccggagacggatcgcttggagcggccgccggctcgggtaagcaccgccgccatctcgttaccctgtgcggctgtaaccccgttcgagcgagcgaaccgtgccggcagcgaggtgcgcagtgttactgtcttgcagggccgaaccgttgtatgggctgagccgtgctttacaaatttggtgagactgggcccccaaaattggcctgtatgactattttcagcggctgtcttatagcaattataaataaataatttaaaaataac

SEQ ID NO: 102828 - DNA, 604 bp, Zea Mays
aaccccgcattcacgaggcctatggcaggaggagcaataataacaagggacaaggattctgccggtgccgaacctcaagggcgtgcttgtagcgacggacgcgggtgaggtcgcgcgcgatgcggcggagctccgccgtgggtgcgtcgcgtccctcactggaccacttctcgagtgccgccgtcgcgctccgcttcgccaggcccagtcggaagatgcggctgcgcaggtcgtccccatcgtgctcgcccgtagccgcgaccacgcgatcgcccacggcggtcgacgcggcttcagatgagaaggtcccgtgccccgcgagaacagagcggaggtggaagccggagacggatcgcttggagcggccgccggctcgggtaagcaccgccgccatctcgttaccctgtgcggctgtaaccccgttcgagcgagcgaaccgtgccggcagcgaggtgcgcagtgttactgtcttgcagggccgaaccgttgtatgggctgagccgtgctttacaaatttggtgagactgggcccccaaaattggcctgtatgactattttcagcggctgtcttatagcaattataaataaataatttaaaaataac

SEQ ID NO: 102829 - DNA, 297 bp, Zea Mays
atgaccaatgttcttgaggatgaggaaaatgaatcaatcactggtattgtgcccaatgctgaaccagaaccagcagaaggagtacaagttagagcaaacgcatcatcatcacaaggagcagcaacacagaacaaaagaaagagagatacccagcttcgaaagagaaggaagttgattcctgatgacgaagaaatacaatcagctgatttctctacagattcagaagatgagaatcaccatttttacatgcattcaccatctgcatcatcttctgtgactttgttcagatctttttag

SEQ ID NO: 102830 - DNA, 317 bp, Zea Mays
tatagaatataaaacaattattctgtatttttcataatcatgcctcatgaaaatcgaggttacatcacatgttcattctgtaaataaatagtacaagtatagccttttcgccaacatcaagtactaatggtctaaagtctttatcacatgcccacttcggtttcgttgacatctttggacgaatactcaagtacctccccctcaatcttctcaaggaaacggtgcatgaccactaaactctcgtcatctgcacgccatggaacagccatacattgtggaattagtttggctgactgccgttcgtatatatcgaggcg

SEQ ID NO: 102831 - DNA, 2614 bp, Zea Mays
tacaaaaatatttataataaatgtcttataaaactatatttcataattagatattattattatatatatttaaaatatttgcatttcctttgaaaccgagggagtgtataacacagaaaaaaatacagacgcaaaggcgaaaacccctcccgcttctcctcccgctgtcccgcaagaacacgagcaggaggcgtggccgtggcagccggtttgacccgcccccgagcgttataagctgtttctccgggaacgtcttgtcgcgcaagtcgctcgcgccggccgcctccacctgcttgctcggtctcagattcccgcgcgcgaaagcgtggaccggacagccggcaggcgctcttttctttcattccctgtcgtggtctctcgtgctctccgtccgttctaacttctgcggcgcgcgaaggtactgtgggaatcgctgctctttccttgattccggcggcggcggaggtgcgcgggttccgttcgtcgcgccgtgggggtgcgagggaggcgccgcgcgcggcctcggattcgatcggacacagcgtccgtcgcgcggcggcggcggtggccgacgacggatggagtcggtgaaggggtgggtggccgccgactacgcggcggagcccatggcgtcggtgcagcactcgttgcgcgtcgcctacgtggtcttctccttctgcgccgccttcttcctcggcggcatcaaagcggtggtggtcgggcccgttgccgccgccgtgatgatagtgggcaacgtcggcgtcatactcgtgctcttcccggcgcacgtctggtgggcaatctactcgctcatcaagaccgaccgcatcaacgcgggcctgaagctagccgtgctcttggcgctacccgtgctgttcggcctctggctggggctgggcatcttgggcagcgcgctggtgggtctcgggtacggcttcttcacgccgtggatctccaccttcgaggcgttccggcaggaaagcgaggccaagaagttcgtgcacggcattgtggatgggacgtggggcacgatcaagggcagctgcacggtggtcagggacttcgcggacatctgcttccactcctaccctgtctacctcaaggagctgcgcgagggctcccagaatcgtgagccccattccataaggttgctggacgtgccctcatgcatagtcgtcgctctcctcgggctagtcgtggacataccactttacacggtgattgcgctggtcaagagcccctacatgctcttcaaaggctggcagaggctgctgcacgaccttataagccgagaaggcccgttcctcgagacggtctgcgtgccgatcgccggcctggctatcctgttctggccgctggtggtggtcgggagcgtcctgctggccatcgtctccagcatctttgtggggctctacggagcggtcatcgttttccaggagaggtcgtttcagaggggcgtttcgtatgtcgtggccatggttgcggagttcgatgagtacaccaacgactggctctacctccgtgaaggaacagttctcccaaagccgtcctacagaaagaggaaaccgtcgaactccacggaattctcggtgagaacaaacgcctccggcggcaaaggagctgaccaccctcctggccccagtgaagcaccggcaatgttggttccgaatctggcgcctgcgagatcagtgagagaggctatacaggaagtcaagatggtccagatatgggagaacatgatgaagtcatgcgagcagcgggggagggacctcctgaaccagaacgtgataacggccgcggggctggcggagtggctgaggggggcgaaggagggcgggcaccacgagaccgtgagcctgggcctgccgtcctactcgctgctgtgcaccgtgctgcagtcgatcagggccgggtccgggggcctggtgctgggcagcttcgaggtgaaccagcacaaccggccgcaggaccggctgctggactggttcttccaccccgtgctggtgctcaaggagcagatacaggcgctgaggatgaccgaggaggaggtcaggttcctggagaagctgaccgtcttcgccggcaacgtcgcgggcgctggcgctggcgggtgggagaacggcgccgggatgatggtggtgccccaggaccctgtgaggctggcgcagatccaggccataagtagaaggctggttgggattgtgaggagcctgtccaagttcccgacgtacaggaggaggtacaggcacgtcgtgaagctgctcatcgcctactccgtcgagagggagagctcgggcaggtcgtcggcttcagggcgctcggcctcctactttgagataacacagctggacgtgtagtatagtttgggaagcgttctccgattgtaattaagctgttaatttctaggatcaggtagtagctgtcagtgccttcgtgtgtttgaagcctagctggtgaggtttttgtagaacactagtgcatggttacaggagaaaggcgctccattgcagatgctgatcaggcgcgttcacgtgccaaaagcttcagacaattgtacacattctcttttgttctgtatatagcctgtaggttcaatgcacatgtgttgttcttt

SEQ ID NO: 102832 - DNA, 1621 bp, Zea Mays
ccctcctgccgcttttcgggatttcatttcgtagggcgaggggccggcgcgcgtgggagcgggctggatttgcgcgtcctgtaccgagcgccccatgtgacaggtcgctcgcttgcccccgctccgccgctccctccctcgtcccgcaaagcaaccgcaacgcgccgagcgggcagcggggtccccggccagccgagcaatcccccctccccaccaccccaaaaggcgaggcagcgagcgggcggaaaaggctagtgcgcgcctcgtgctcgtgctcccccgagcagactagaccagcgcgctagcgccagcaaggccaaggcgagggaggggcgatgctcgcccgatctgctacagccgccgccgccgccgggatctggctgtgattaaggatgtcggcgtcgcggagcgggaggatcaggcgggccgggagcgtggcgctcggggactttctgcggcgggaggcgtcggcggagcgggccgcgttgggaggcggcgagcggccctcggtcgcggcggggcaggcctgccgggcgaagaagggcgaggacttcgcgctgctcaagcccgcctgcgagcgacgccccggcgcgccgtccacctccttctccgccttcgccctgttcgacgggcataacgggagcgccgcagcggtgtacgccgaggagcacctcctcgccaacgtgctcggctgcgtcccggccgatctgagcagggacgactggctcgccgcgctcccaagggcgctcgtcgccgggttcgtcaagaccgacaaggattttcaaactaaagctcattcctcggggacaaccgtgacacttgccataattgatggctccgttgtaactgttgcgtccgttggtgactcacgttgtgtccttgatgctgcgggatccatctactatttgtcggctgaccaccgctttgacgctaatgaagaggaggttggacgtgtaaccgaatgcggaggtgaagttggaaggctaaatgttgtcggtggtgctgagattggtccccttagatgttggccaggtggtctatgcctctcaagatcgattggtgatcaggacgtaggtgaatttatcattccggttccttatgtgaagcaaattaagctgtctaacgctggaggtcgtcttattatttcaagtgacggtgtttgggatgctttgactgcggaaatggcttttagatgtgcacgggggcttcctcctgaggctgcagccgagcaaattgttaaagaagcagttgaatcaaaaggattgagagatgatacaacttgcattgtcattgacataataccaccagagaaacaaaaatgcactatagaatctccaaaaacgccaggaaaaggccttgtccttctaaaaaatttcttcttaaggaaaacggcatctggttcattgtctctcgctgacaaggataattatcccgagccagatttcgtggaggaggtctttgaggatggatgcccatccctttcgaggaggtttgtgcccttatctcatcttgattacggatgcataataggtgccaaataattgtactataaattgtgcttcgtatgtagcactgtttcagtactggctaagatatttgtagttactactacaataaagaa

SEQ ID NO: 102833 - DNA, 2379 bp, Zea Mays
ccctcctgccgcttttcgggatttcatttcgtagggcgaggggccggcgcgcgtgggagcgggctggatttgcgcgtcctgtaccgagcgccccatgtgacaggtcgctcgcttgcccccgctccgccgctccctccctcgtcccgcaaagcaaccgcaacgcgccgagcgggcagcggggtccccggccagccgagcaatcccccctccccaccaccccaaaaggcgaggcagcgagcgggcggaaaaggctagtgcgcgcctcgtgctcgtgctcccccgagcagactagaccagcgcgctagcgccagcaaggccaaggcgagggaggggcgatgctcgcccgatctgctacagccgccgccgccgccgggatctggctgtgattaaggatgtcggcgtcgcggagcgggaggatcaggcgggccgggagcgtggcgctcggggactttctgcggcgggaggcgtcggcggagcgggccgcgttgggaggcggcgagcggccctcggtcgcggcggggcaggcctgccgggcgaagaagggcgaggacttcgcgctgctcaagcccgcctgcgagcgacgccccggcgcgccgtccacctccttctccgccttcgccctgttcgacgggcataacgggagcgccgcagcggtgtacgccgaggagcacctcctcgccaacgtgctcggctgcgtcccggccgatctgagcagggacgactggctcgccgcgctcccaagggcgctcgtcgccgggttcgtcaagaccgacaaggattttcaaactaaagctcattcctcggggacaaccgtgacacttgccataattgatggctccgttgtaactgttgcgtccgttggtgactcacgttgtgtccttgatgctgcgggatccatctactatttgtcggctgaccaccgctttgacgctaatgaagaggaggttggacgtgtaaccgaatgcggaggtgaagttggaaggctaaatgttgtcggtggtgctgagattggtccccttagatgttggccaggtggtctatgcctctcaagatcgattggtgatcaggacgtaggtgaatttatcattccggttccttatgtgaagcaaattaagctgtctaacgctggaggtcgtcttattatttcaagtgacggtgtttgggatgctttgactgcggaaatggcttttagatgtgcacgggggcttcctcctgaggctgcagccgagcaaattgttaaagaagcagttgaatcaaaaggattgagagatgatacaacttgcattgtcattgacataataccaccagagaaacaaaaatgcactatagaatctccaaaaacgccaggaaaaggccttgtccttctaaaaaatttcttcttaaggaaaacggcatctggttcattgtctctcgctgacaaggataattatcccgagccagatttcgtggaggaggtctttgaggatggatgcccatccctttcgaggaggcttaattctgaatatcctgtccgagatatgttcaagctttttgcatgtgcaatttgtcaaattgacttggagtctggccaaggcatatccatacacgagggttcgtcaaagacagggaagctgcgtccctgggatggccctttcctttgtcacagttgccaggaaaagaaagaggcgatggaggggaagcgtcactcgcgagactcctcgtcaagaaatagcgggtcaagtgaatagtgactaaagccaggagtcatcttgaggcgaccacctagcggtgtgacgagctaactcttgttgcagttgtcattgtagcagcacttcctctatacatggattaccattggacatagacagatgttggaacttggatggtgccatgcgtacatatgttggacctaatgcggtaatggaccgtcggccaaattcaatcgcctctaggtaccacaccggcgacggcgtcttcggcaaggcttgtagcagtagctcatgcaggtagtgatgacaagggactgttagcgaagaatgtcgacagcggccaatggtcatgtaaattgttcatcgtatagaggtgcaagtgacaattagccacggttttgtaattctgagctaggattagctattgggaccctgtaattcgtctgggcagacctcaaactagaggtcaacaacgtagcctggcctattgtagaatgtatcttgccctacagtcttcatgatacaacgctgtaattaggctggtgccggtgtaccatcctctcgttcttctatgttagatctcgactccactctcctcgtcgtgtatagccctatagcagactatagacttagtccaaaaccacatcaactttgtttatttcaaaattaagtaagcacatagatttgtttc

SEQ ID NO: 102834 - DNA, 1870 bp, Zea Mays
ataactaagcaagcttatggctcggccgctcgctgcggcagtaaagctcggaagtaccagagccacccacgttccttcctggtggacgaccggaccggaggcccatccgtggcagcatggcggcgcggtggcaacccggcagcaagagcagatcgtcggccttgcgaccgacggtgctggtggccgcggcgagcgtggcggccgtcctgctcacggccgccgtcctcttcggggcccgatggacgccttccagcgacgccgaaacatgggtctcggccggagtccgcgtcgtcatgaacgccatgtctgacaagggcggcatcccgttggcgacggtgccgaaccccggcgacaggctcctcggcggtctcctctcgccagacttcgacgacagctcctgcctgagccggtaccgagcctcgctctaccgccgggcgtccctgcacgcgctctcaccccacctcgtctccgccctccgccggtacgagtccctccaccgcctctgcgcacccggcaccccggcctacgcacgcgccacggaacgcctgcgcgcctctcccaacgcctctggcgacggcgctgacccctcctcatccggcgcccggtgcaactacctcgtgtggacaccgaacgcgggcctcggcaaccgcatcctctccatcgcctccggcttcctctacgcgctcctcaccgaccgcgtgctgctcctccacagcagcagcagccacgacctgggcgacctcttctgcgagcctttcccggggtcaacgtggatcctgccggagaaagacctccccgccgttcacgaggggctcagcacccgcaccaacgcgagcctcgggaacacgctgcgacgtggcgaggcgctccgcggggcgccgtggctctacgtgcacctgctgcacaactacaacgtccaggataagctcttcttctgcgacgaggtgcaggccgagctgcgccgcgtgccctggctcgtgttccaggcggacaactacttcgcgccgggcctgttcctggtcccgcggcacgagcgggagctcgcgcgcatgttcccccgccgcgacgccgtgttccaccacctcggccgctacctcttccaccccagcaacgcggtctggggcatggtgacgcggtaccacggctcctacttcgcccgggcggacgagcgcgtgggcgtccaggtgcgcgtgttcaagtgggcgcccatctccaccgaccagttctacgcccagatcctcaagtgcgcggagcatgagaacatcctgccaggcgtcagcgtgcccagagccaacaccaccgccgccgccgtgggctccgccgcccagccggccaaacgcaaggcggtggtcgtcgtctccctatacaacgagtactctgaaaagctcagcgaactgtaccacgagcacggcgcggcgggcggggaggcggtgagcgtgttccagccgacgcacctgggcgagcaacgcttcggtgaccggcagcaggaccagaaggcgctcgcggagatggtgctactcagcttcgccgacgtgctggtcaccaccggcgtttccacgttcgggtacgtcagccaggggctggccgggctgagaccgtgggtgctcatgccccccaaccatgggaaggcgcctgacacgccgtgcaggctggcccccacaatcgagccgtgttttcactcgccgccgaactacgactgccgggcgaaggccagaggtgacaccggcaggatggtccggcacatccggcactgcgaggacttcccacagggtgtccagttgctgcagtcatgagatactgttatttagttcatacatcacacattcagattttcccctcattatactgtgattaaaagttataaataaag

SEQ ID NO: 102835 - DNA, 638 bp, Zea Mays
catcacccggacacacactggaaccccttgcacaccgccggccaggccacgaatagcacgaggcagagtggtagacgacggtgtcgacggcgatgatgaccttcacgtgccgcatccacagcgaccgcgacaactgctgcctccgcagcctggactggtgctcgtcctcacagcccccgcccccgccgacgacgacgacagcttgtccctggaccgccgcttctccttcctgctcccacgaccgagagatggccttccccaaatccaaccacaaagacaaagagccaggacccaaatcgttcgtacctgctggaggtgggcctgggagatctcgcgctcgcggctggcgctctgcaaagaactggagctcagcgatgagatgctcgcgctcgatggagagctcctcggcctgcgcgtacgcctatgcaaggacgaggagctcagcagagtggatcgcgccttccatggaacgctgaggtcggggtcgcactgcgccgtcccatggatatccgaggtgagtgaggctgtcacggcggaggtggcagggcatagggtgagcgaaggacaagggcggggcacacacggagggggggcgcacgtaaggaaggaaggcgatggcacggatggcggcctcggtg

SEQ ID NO: 102836 - DNA, 393 bp, Zea Mays
ttttagctgaagtagcactatatcaggcgtcagaatggcaccacatcctccacgagggaggttactgttgcgggagtcttcagcaggtcactcgccacatgcgccttccagcagtgattttctttgtcctcatggcggggtacctcccatttaaagattcaaacctgatgtcgctttacaagaagatcttcaaagcggatttcagttgcccatcctggttctccacaagtgcaaagaagctcatcaagaagatacttgatcctaatgctaacactatgagttctgttgtttgtagccatcatttaactcattttgttcaacatctgcagagttaataactgtgtaccatcgttctgtggcctgtgtagataatagctattgcggagcacatta

SEQ ID NO: 102837 - DNA, 606 bp, Zea Mays
cgccggcgtagacgaggccgtacttgtggccgctgacgttgatgctcttgaccagcggcagccggaagtcccactccaggtccgggtacaggaagggcgcgatgaagccgccgctcgccgcgtccacgtggatcggggtgtcccaccccgttcgcctgttgttggccgcgaggaggtcgttgaggcgcctgacgtcctcgaactcgccggtgagggtggagccgaggatggcggcgacgcagatggtgttgtcgtccaccattcgcacggcctcgtcggggtccatgacgtagcacccttcccgcagcctcacctccttgagctccacctcgaagtagcgcgcgaacttctcccagcacacctgcacgttggcgcccgtcacgatgttgggcctgtcgcagggctgccccgccgccctccgccggttctgccaccgccgcttgaaggccagccccgccagcatgatcgcctccgacgaccccaccgtgccgaccccgacggccttctcgctggcgcccaccggcgcgtggaatagccgcgcgatgatgttcacgcaccggttctgcatctcggtggtgaccgggtactcgtccatgtcggcgtagt

SEQ ID NO: 102838 - DNA, 1436 bp, Zea Mays
cattccacgacatcccctgcacatccttgccggtggcgacttcacctccacatcctgccagcggcgacttcaactccccatcctgccagcggcgactttacctcccatttcttgccggcagcaacttcacatccccttcagcactctgtcccaagatcaggatggctccagggaggatgggatcacgatgcaaaagggatgccctagcagaaactactcctactgaatatgagaaacagagggcagcacatgtgatgaggaacaaccaaatgttccaacggcttgggattaatcagctgcgcacaataatgactgctacaagagtaaggagcaaagatgattgttcagaggaatctgggtctttgtatgacggtgaggacagtgaaggctctgagcaagaggaggatttccaggttgcaaaaggtgtacgtagccacaactcaactcatgttgctgaaaaaactacgcaaggaacacgaggacataaaagggttgtggcccctggtgtaaatgaacaacaaattagaatcactaggcaaaggagtgctaccataaaccaacaatccttcctaaacctaactaccactacacatcctagttcaacagctaccacaaaccaagaatccacccaaaatattacttctgcaacacaatttacttcaagtgcagccgctgaacaaaattacacccaaggcctgactgctgctgcacaagctaattctcccatacaagctgacatcagcgaccacattgcagatgaaggcaagtgattatttatatatgtaatttcaattcgattgttattcaataaatttattagtttatcctaggctagtgaacctgcataagtaattcaagttgtaagtatatgtccaattattttttagatttggcactaaattgctttttactcactccaataactagaattggtaccaaggcaaagaagtatgggcaaacaacttgaatccttgagcagagggttaggcactaagattccaatccaaatttatgatggaaagcgaaggccagaaccccctattcaggtcgcaaagtttgcatcagagggtgggatcatactcaggcaacatattccaatatttccacactggaaggagtacaagaagcaagagaacgagggtaaaattacagactatattggcaagcttgctggtcaattcaccatggatgtggacagtaaggcagtcaaagatgcatgtgttgatatgataaaaggagggcagcgccagatgaggtataggctgaaaaggaagtacttcaccggggttcctgcaaatcaagtgaggactacatcgcctgttccatgtatgactgatgaccaatggaaagatttggtacaaatgtggtctaccccaaaccacaagaacaattgtgtcaagaacaaacttaattgtgagaaggtgcaatttccacag

SEQ ID NO: 102839 - DNA, 465 bp, Zea Mays
atggaacctagtgcaattgatcttttcaaggagatgcattgcagcaagaagaaaggatttagtgaggccgttcagaaagctataggtgatatggaagcaatggtggcaacaccagttgaagatggacagcatgtgctgtcttcgacagaagttgtttccaatgtgctatcgagttcaagtaaatttcttcacaatgctggccttttacctacctccaagagaagcaatacaaggactatctcgacaaggatgcaagagcttcagactcaattggacactgagaggcaagaaaaaaatggatttcgagaagaaatggaaaccttaaaggcccagtcacaagcatctgaggcaaccattgctaatcaaacgaccgagattgcagatttgaagaagtccttatcagaaaataacagtctccttcgacaaatattaagcatcaatcgtggccaaatgactcctccttaa

SEQ ID NO: 102840 - DNA, 102 bp, Zea Mays
gaaattaataggaactacaacttgttctattgttcacttgttatagaggattatgaatcatgtttaatgttaaaagctatgtgttggatgcattatgcttga

SEQ ID NO: 102841 - DNA, 1806 bp, Zea Mays
gttgatgttaccgtcccggcaacgaaaccaaacagcactagatgtcaccgtttccaacagccttattcaaatggtctacgaaatacacttttgtatgcagcaacactgatgcagtgtatgtgtggcgggtcattttccccctattcctctaaaatattaagttccgctggatcaacagccgtgaactcaccctcttgcgagaacaagctactagtctggacaaccttcctctgcgggatctggctgatcttgagccgctcctcgtcggtcagctcccagtcgaatatcccaaggttctgcctcagcctctccttgctgtaactcttgacgatgcatgtcactccctgctcatgtatccatcgcaacgccacctgagcaaaggaagacatgccaccattgaaacaggtgggtggcagggtgggttagtgctgaaacagggttgtcttgtgttgacactaaaataagttccaaataaggttgtttggtttaggatcaatagttaagacaagactatctaaatgttgttccaattatcccttaaaattgtagggataatggaggacgtcagggacgtcttgtcgtgtcccacaaccagaaacaggtgggtggcagggtgggttagtgctgaaacagggttgtcttgttgacgctaaactcgaatgaagtcatcgaaagttcagaagaagagattaaatatacaaaataatagtaataataataaataatgcccccacgtgccatatccttctagaaacaaccttgaaactacttttttgacatagcggcacggcaccaagagatcgagaccaacgcaaacacaaacacatgatcaaccaaacctcatcggccgggcaaacagcagcatacctgcgcgacggttttccccctcgccttggctatcgcggcgagcacctcggagtccagcacggcgctgccctgcccgtcccagttctgccctcccagcggcgagtaggccgcgacgtggatgcccctgtcggcgcagtacgccctgagcgtccgctgctgccacgccgggttcagctccacctggttcaccgcgggcgggaccgtggcgacggccaggaccccgtcgaggtgcctggtggtgaagttgctcacgccgatcgccttggcgaggcccagccgctggcactcctccatggcgcgccacacgcccgcgaggtccagcggcacggcgttctccttcctggtcgggagctcgggcggccccggtttcaggcacaccggccagtggatcaggtacagatccacgtactccatctgcaggttcctgctcccacggcacgagccgcacgagacaaggatcgatcgttttgtatttcagaaagctccatttacaactgcagcggcgatagggacggactagcggcttacttgagtgtttcccggagggacggcagcacgaggtccgggtggttctgcgagcaccacagcttggacgtcacgaacagatcctcccgggaccgcagggtcccgcgccggagcgcctcggccacggcgtcgcccagcggcttctcggtgccgtacatggaggccgtgtcgaagtggcggaaccccacctcgatggcggagagcacgccgtccttgacggcctcgtgcaccagagggaacgacgccgtgcccatgccgaccatcggcatcgccgtcctcgcgttgcccgaccgcagggccacctcgggcaccaccgccgtcgtccccgcggatgccatgttggtagggtcagatgtggtgcgctgccgctgcagtacaacgtctagactagatgcgagagacagagagggggtg

SEQ ID NO: 102842 - DNA, 1493 bp, Zea Mays
ctgccatgtgccagcgcatgagtggagactggagaaagagccctactaccctagctaagccggcacagcggcggccggcgatacacgtgcgagcggcggcgtgaggaaaggcgggcggggtgagagatacctaaccactaagcggctgcggcagcgccgcagcataaccggcaccaggtcaaaaaacgacgactgggcaggcaccgtatgcatatcctgaatttcagcaccgcatacactttctacagggcccttgccacaccagacaagcacagacaaacacgcgagcggcatgccatgtcatcaccggcagcaaggagcatcacttgctactccaaaattccagagttcttggtgggcactaatgggcagccaatgcccgcagtggggctcggcacagcatcacacccatttgtggcggaggatgtcaggacatccgtgctcactgcgctggagcttggctaccgccacatcgacactgcgggactctacgcctctgagcgagttgtcggcgaggccatggctgaggcagtgtcgtgcggccttgtggcgtccagggacgagctgtttgtgacatccaaggtgtggtgcactcaatgccatcctgagcttgtgcttccgtccctcaaggagagcttgaagaaccttcaaatggaatatgttgatttgtacctgattcattggcccatggctgtaaagcctagcaagcctcacttcccaatgaaaagggaggacattgtgccgatggaccttagtggtgtatggcaggcaatggaggaatgccatcgacttggccttgctaaaatgattggtgttagcaatttcacaacaaagaaattgcaggagctgcttgccattgcaaaaatttccccatttgtaaatcaggttgaattgaatcccacttggcaacagaaaaaactaattgagttctgcaatgacaagggtattcatgtgacggcttattctcccctaggaggccaaagaatctctaaactgaatccagtacgacaatctgacatattggaagagattggaaaggctagagggaagtcagtggcccagatttcactgaggtggatatacgagcaaggtgcaagcatggtggcaaagagcttgaaaagggagaggcttaaggagaacattgaaatcttcgattgggaattgagtgacgaagatcggtttaagattggtcagatagcacagcgcaagttggtcacagtacagaatctcctgtgtcctgaaggtatctccagtgtggatatcttggatgttgatgttattgaaatatagctgtggtctccatctatttgcaatgggcaaaagaattggtgtacaacatgttggatacatcagaagcagtctttcacgtttctatgtactaatgttcatcttgctaaattcacatgtgcacctttctattgtcaccaatacttttgtaccattttctggattaatctactattaaaaatgcaaaaatatataacgatccaaaa

SEQ ID NO: 102843 - DNA, 1446 bp, Zea Mays
ctgccatgtgccagcgcatgagtggagactggagaaagagccctactaccctagctaagccggcacagcggcggccggcgatacacgtgcgagcggcggcgtgaggaaaggcgggcggggtgagagatacctaaccactaagcggctgcggcagcgccgcagcataaccggcaccaggtcaaaaaacgacgactgggcagggcccttgccacaccagacaagcacagacaaacacgcgagcggcatgccatgtcatcaccggcagcaaggagcatcacttgctactccaaaattccagagttcttggtgggcactaatgggcagccaatgcccgcagtggggctcggcacagcatcacacccatttgtggcggaggatgtcaggacatccgtgctcactgcgctggagcttggctaccgccacatcgacactgcgggactctacgcctctgagcgagttgtcggcgaggccatggctgaggcagtgtcgtgcggccttgtggcgtccagggacgagctgtttgtgacatccaaggtgtggtgcactcaatgccatcctgagcttgtgcttccgtccctcaaggagagcttgaagaaccttcaaatggaatatgttgatttgtacctgattcattggcccatggctgtaaagcctagcaagcctcacttcccaatgaaaagggaggacattgtgccgatggaccttagtggtgtatggcaggcaatggaggaatgccatcgacttggccttgctaaaatgattggtgttagcaatttcacaacaaagaaattgcaggagctgcttgccattgcaaaaatttccccatttgtaaatcaggttgaattgaatcccacttggcaacagaaaaaactaattgagttctgcaatgacaagggtattcatgtgacggcttattctcccctaggaggccaaagaatctctaaactgaatccagtacgacaatctgacatattggaagagattggaaaggctagagggaagtcagtggcccagatttcactgaggtggatatacgagcaaggtgcaagcatggtggcaaagagcttgaaaagggagaggcttaaggagaacattgaaatcttcgattgggaattgagtgacgaagatcggtttaagattggtcagatagcacagcgcaagttggtcacagtacagaatctcctgtgtcctgaaggtatctccagtgtggatatcttggatgttgatgttattgaaatatagctgtggtctccatctatttgcaatgggcaaaagaattggtgtacaacatgttggatacatcagaagcagtctttcacgtttctatgtactaatgttcatcttgctaaattcacatgtgcacctttctattgtcaccaatacttttgtaccattttctggattaatctactattaaaaatgcaaaaatatataacgatccaaaaa

SEQ ID NO: 102844 - DNA, 758 bp, Zea Mays
tcttttatgatgattgacgcaacaacaaaaatgcacttcatcgattatggcggctacctcgactgacataatgcctacctttggctcctgtcctctagtctcatgttcgggtgcaaaaacaagcaatgcgctctagcacttgcgtgcacaaattctaggactgttagaccaactccagcaaaggtggctccgtatccgtaaaatacgtaggcgcgatcaccattgcggagcctccaaccgcgggcgttccagcagatagactccgtatcacactcgcaaccgcgggcgttccagcagatagactccgtatcacactcgcacaccatatctgcatgcaagtgatactgacagatgacagatgggtcctacgagcgtagacttttattgctacgttgctcagatatgtgcgcagaggagaaataatacatgggaaaagggagcgcaaatacacggcgtacattttgtggagagggatacggagtcagttggactgatgaatagtgcacagtgcaaaaggagattgggagccacatacggaggctgctggagttggtcttagtgacaagactgctcacttctctttttttctagcgcttttatgatgatcgatatagaaacaaaactgcactacatcgatcgtgataactatattgactggcataatgtctgttgttgggtatatttgttctttcctttggtttaaatcacgtttctctatactacattcatgttcatcttgtcaaatttacacatacatc

SEQ ID NO: 102845 - DNA, 1487 bp, Zea Mays
atgcggagcggcggcggcggcaataagcgcagcctgctgctgctgctgtcggcgtggtggctactcctcggcagcctcgtcgcccagctcccggcggcccgcggcggcagcggccacgtcgtcacgcgcatgcccgggttcgacgggcccctcccgttccacctcgagacagggtacgtggaggtggacgagcagctcggcgtgcagctcttctactacttcgtgcggtcggagaaggacgaccccggcgaggacccgctgctgctgtggctgtccggcggccctggctgctccggcctctccggcctcgcctacgagataggtggccactcggctaagctgttctgcatgctaccacagcgtttggtttggcccttccattttgatgctcgagggtacaggggcgggtttcctacccttctctaccgacccgagacgtggaccaaggtgagcaacatcatatttatggattctccggtggggactgggttctcgtacgccacgtcggatgaggggctcaagtccagtgacactcaggctgtcaggcagctagccatttttctcagaaagtggcttgaagagcatcccgagttcctgccgaacccgctctacatcggtggagattcatacggcggcatgattgttcctgctcttgcactacaaatacacacaagtacagaactcggtgaaaacccatccttcaacctcaagggctacgttactggcaacccggtgacggatagccagttcgacacggacggcgtggttccgttccttcacggcatgggactgataccatacgagttttatgagaacgctcgcgagatgtgtggtggaaagtacagtgatgcagccagtgttgcgtgcgcggaggtcacccgagctatagccaacagagcttcgtacgtcctatcccgcgtctgggcaaacgacgaaacggttcaggagagcctcggtgtccgcaaggggacaatcggagcgtggaaacgatgcaaccaggacatactttacaaccagaacgtccaaagtgtagtgccgtaccattcgaggctagccgcgaaagggtacagggcgctgatatacagcggcgatcacgatcgtatcgtacccttcgttggcacacaagcatggattaggtatctcaacttgaccgttgtagatgactggcgaccatggtatgttggtggccaagttgccggattcacaaggaactcaggcaacctaatatatgcaactgtgaagggcgctgggcatactgcaccggagtacaagcccacggagtgccaaacgatgtttaggaaatgggtttcacgggatcctctctgatattacgtcgtctgagagaattacgtacgtgtcgctcctatgagtgtaggccggacgtacgtggtatgccctactgcaggccggagatcaaaataaaggagattttccattttcatgtagaaaaaatgagtgtccatggtgtctacttgttccctgtatta

SEQ ID NO: 102846 - DNA, 1926 bp, Zea Mays
gcgcctcgtcctccttatagaaccatcgccactgctctgcccccccgtcctctgatctcctcctctcatctcggacacggcaaatttaccggcaacgtacagcgaaagccagaggtccgcagccgttgagccccaagaaggagaggacgaaatggcgctgtccacgacgaacacgaacgccgccgagtcgcagctgcactgctccacctttgcgtcgcgctacgtgcgcaccgcgctgccgaggttcaagatcccggagcagtcgatccccaaggaggcggcgtaccagatcatcaacgacgagctgatgctggacgggaacccgcggctgaacctggcgtcgttcgtgaccacttggatggagcccgagtgcgacaagctcatccagtcctccatcaacaagaactacgtcgacatggatgagtaccccgtcaccaccgagctccagaaccggtgcgtgaacatgatcgcgcacctgttcaacgccccgatcggcgacgacgagacggcggtcggggtggggaccgtcggctcctcggaggccatcatgctggccgggctggcgttcaagaggaagtggcagaacaagatgaaggcggcgggcaagccctacgacaagcccaacatcgtcaccggcgccaacgtccaggtgtgctgggagaagttcgccaggtacttcgaggtggagctcaaggaggtgaagctcaaggaagggtactacgtgatggacccagagaaggccgcggagatggtggacgagaacaccatctgcgtcgccgccatcctcggctccacgctcaacggcgagttcgaggacgtcaagctgctcagcgacctgctcacggccaagaacgccgagacagggtgggacaccccgatccacgtggacgcggcgagcggcggcttcatcgcacccttcctgtacccggagctggagtgggacttccggctgccgctggtcaagagcatcaacgtcagcggccacaagtacggcctcgtctacgccggcgtcggctgggtcatctggaggagcaaggaggacctccccgacgagctcatcttccacatcaactacctcggcgccgaccagcccaccttcacgctcaacttctccaaaggttccagccagattatcgcgcagtattaccagctcatccgcctcggattcgagggctacaaggacgtgatgcagaactgccgcgacaacgcggcggtactacgcgagggcatcaacaagatgggctacttcgacgtggtgtccaaggactcgggcgtgccgctggtcgccttctccctcaaggactcctccaagtacacggtgttcgaggtggccgagagcctgcgccggttcggctggatcgtgccggcctataccatgcccgccgacgccgagcacgtggccgtcatgcgcgtggtcatccgcgaggacttcagccgcgggctcgccgagcgcctcatcgcggacctgggcaagaccatggccgacatggacgcgcacgccggcaggaagcaggcgccggagcagcccaagaagtcggtgcacgacatcgagaaggaggtcaccaccttctggcggaggctggtcgccaatagcaagaagaagagcagcatggtgtgctagctgatgggcgctctgcggaggaataacgcaataacattcgtgatgcgagatgttctcacacgttttcgttttcggtttacgtctgcgtacgtgtgattcgattttttacctcacatttggtatgcttcaaatcgaccttcctgacggaattagttagaacttgtcaggacaagctcgtgaagtatttttattggagaggatgttaacatcttgagaaaatagtaaaaaaagaataataaaagataaagtgagcaatgacctttttgatttaataaatatcaaagaacagaatagtaaaagataaa

SEQ ID NO: 102847 - DNA, 786 bp, Zea Mays
cttctccgtgtacagatttctctttcgacccttatgttctctctttcttctcgtttcaatatttggagcttttgttctgcgttggacgatgatgatttgctcatatataccatcaaactctgaacaatcatacgctatgttgattgcacaaagcttcccgttttcagcgctgtacgttgccgagagtgattgggcgcagattctggcacgggacgtctctctgtatgtcttgtgcattctactcgcccttacagttatttgatccgcaagatccctcttctattctatcgttcaatacaaatatttcaagagacttgtgtttttttgcccttccgaacagtgtcttctgcactaaaagaaatatttgtgattttgatttgacccagatagtctacatattcaatgagtaaacgaaagtgaattaactcggcaataaattagagtctctgttgcgcttgtttcagtagcgtcttcagcgctgtacgttgcctagaacaattgggcaaagattctggcacttccatctattcttatggcttgtgcattcgacttcccgacagtttgtgaataaattaactagatcacctggcaagatcttggcacccatctgtcgatttccaggaatcttggttaattattgtttactcaaaattttgtaagtagaataaacgtctaaaatcttggcagtttggcactcaggttttaataaattatctttagttttgggagtaaatttcttcgtttcagggacaaactaaattcaattttgggaatcattaagagtac

SEQ ID NO: 102848 - DNA, 1411 bp, Zea Mays
acgcgtccagctccctctcggcctcgcaccagctcatcccagctccgccctcacccttcccttgccctcctcccaccgcctctcccccaatccctcccaccaccaccagattcgcctcgcctcctcgacgcccctccctcacccttgatgccacgcccccctcccatggcgccacgcccgcgcccctccccacccgcccgagccgcgacgctgaccctcctcctcccgctcctcctcctcgcctctccgtccctcccctccgccgccgctgccccctcgccgccgacggtgcccgccacgcagcggcaggccgcgtccgcgtccgacgccccgtcccctcctccccctccggcgcagcagcacccgcggaggcaccgccaccggcactggaagcaccggccgccgcccccgcacccgccgccgccgcccaggcggcgtcggctcaacttcggggagcggctcgggatcgccttcgccggcgtggctatcgcaatgcaggtcgtcctcggcgccttcctcgcgctgcgcgcgtggcagctgcggcggctcgacaaggccgaggtgtcctcctccacgcccctcacctgaccaccgtctccccgcccgaagctcgtcgtgtgcatcagtcaggtccgtggtttatttgtgatctgatctgatgctgctgtaaacgaatccatggtgtagtagctgcgcgtgtccgtgttcggcaccattctttccgttctgttgtactaccctgtacaatctgcttctgctccgtgcaggctctagttgagaggcttgtgtgtgttatgagagttgtgctgcttctttggttgttaacgtgcctcacctgatctagattagtagactgttagttctactgctgccttgctgttacatatttacagtgttcgcttctgtgggggttacaattgcttactcgcttactccgggtttggatgctaaatgggcttcaatgtacaaagccattatttcaattattgcactggtaccatataaactaaccacctgtcagttgcacttctcttattttcactgtcaagatcactccttgtggagtgattgagctataatatataaaaaaagcatacaggattttggtgtactcaagatcaagacccccaaccgcagcatatctgggactcattaccatagaggatagcttattgtaatttgaaaggcttttaattaccccccttcttccatcttaggctcattgccatctcctgggggatgtgcaggatattggtgcaatttttgaaaagctatatactgtctagttttcattagattttatagatttgaatgtttttactgtttcagaatcaaaagaaaatgtacatagtgcctaaatttcctttcttgaaccagaaatactcactttcctacttatgtaggagtacat

SEQ ID NO: 102849 - DNA, 780 bp, Zea Mays
ttcgtgaacaccagtagaaatttgtttgaaccacattctcagtcttacagactcagactcccatactcacagattcaagcagacattctcgcacattgtcggataattaattcaagaagacaaaaccagaacacattataacataaagtgccacaaaccccacgatcactaagtatgttcgccacacgtgaaatgttcgttcaccgtctgcactctgcaaacctattcgtttatcggcagcacaatatgttgctagggttggggatgggttaaaaagcgttccggcatgcatcaggccgtccctagaaagaatacgggcagttcaaagaagaaaaagaatactaaattcaacaaatgaaaattcacagctcaatggctaggaagtctgaaacataccggtgggtggcacatcgaaggatccagcagcgtcgctacctccgaagaaagacgatgcagctagatctgattgaactcctacatgtcatgccatgggatgacgaggaactcctacaccatggaaagtatctcggtagtcgcctccactgtcgctcctgatctccatcaccggccatctcccacgggaggattcggccgcggacgaactccacttcccacaagatttgagccgacagtgttggagcagcagtccttgtcgggaccatcttacccgccttctcttcgaacgccgccgcctcctcctctccggccgccgccaccaccgcttcctgcctccaccacaacacctacacacacgacaaaagaaaaattggggagcctaga

SEQ ID NO: 102850 - DNA, 999 bp, Zea Mays
acatccaccccatccgtcattgacagatcccgcaatactcacagggccctcttctctcatctctcactccctcgctccgtctaccagtaccaccacgtccctcctcgtcgacgatctcgtagcggcggcgcacatggcgagcgacggcgcggcggctacgccagcgaaggttaccccaaagaaggccaatctcctcgacccgcactccatcaagcaccttctcgacgagaccatctccgaggtcgtgaagagtaagggctacaccgaggacacgcggctgggcaactggaagctggggatcggagccgccgtgattgctgtcgccctcctcgctcagttttaccccaagaagttcccgcagaaccgcgatttcctccttggctgcatcgccctgtatgtggtgctgaatgtggtgctgctgatccttagctacaccaaggagaaggatgccatcctattcacgcaccctcctatgggttctttcagcagcactggcctcactatttcttctaaattaccaagattctcggacatgtacactctcacaatagcaagtgcggatccacagtctatctctgcaaacaagccagttcatttcactaagagcgtaacaaagtggtttacaaaggaaggagttcttgtggagggcctgttctggaaggatgtcgagaagctgattgatgactacaacagtgagcgcaagagtaaatgaattggtagctcgtgtctctggccatctggggagacatcgctgtctagagaaatccgtcaaagtttagcttaatctgaacaggcatttttgctatactgtaccggttgaccagtgaatgaatgatgttctagacattaactttggttccaagctttctgtcgtgtccatggataactatccgtccgaatcctagaaacgtggtccgtgcttgtaacctgtttgttctggtgcttccatacgccggagcagattttgaagagaaatgaaacaaatcgttaaatcacatt

SEQ ID NO: 102851 - DNA, 1128 bp, Zea Mays
acatccaccccatccgtcattgacagatcccgcaatactcacagggccctcttctctcatctctcactccctcgctccgtctaccagtaccaccacgtccctcctcgtcgacgatctcgtagcggcggcgcacatggcgagcgacggcgcggcggctacgccagcgaaggttaccccaaagaaggccaatctcctcgacccgcactccatcaagcaccttctcgacgagaccatctccgaggtcgtgaagagtaagggctacaccgaggacacgcggctgggcaactggaagctggggatcggagccgccgtgattgctgtcgccctcctcgctcagttttaccccaagaagttcccgcagaaccgcgatttcctccttggctgcatcgccctatatccttttcttcattggtttgccctatcttttggttatgatgaatcggcgctagatctgatttctgttgagaatcgtgtggaattgttgcttgttgctgttgatccttgacttagatgactcgatacgtatgtggtgctgaatgtggtgctgctgatccttagctacaccaaggagaaggatgccatcctattcacgcaccctcctatgggttctttcagcagcactggcctcactatttcttctaaattaccaagattctcggacatgtacactctcacaatagcaagtgcggatccacagtctatctctgcaaacaagccagttcatttcactaagagcgtaacaaagtggtttacaaaggaaggagttcttgtggagggcctgttctggaaggatgtcgagaagctgattgatgactacaacagtgagcgcaagagtaaatgaattggtagctcgtgtctctggccatctggggagacatcgctgtctagagaaatccgtcaaagtttagcttaatctgaacaggcatttttgctatactgtaccggttgaccagtgaatgaatgatgttctagacattaactttggttccaagctttctgtcgtgtccatggataactatccgtccgaatcctagaaacgtggtccgtgcttgtaacctgtttgttctggtgcttccatacgccggagcagattttgaagagaaatgaaacaaatcgttaaatcacatt

SEQ ID NO: 102852 - DNA, 772 bp, Zea Mays
ccagtaccaccacgtccctcctcgtcgacgatctcgtagcggcggcgcacatggcgagcgacggcgcggcggctacgccagcgaaggttaccccaaagaaggccaatctcctcgaccccaagaagttcccgcagaaccgcgatttcctccttggctgcatcgccctgtatgtggtgctgaatgtggtgctgctgatccttagctacaccaaggagaaggatgccatcctattcacgcaccctcctatgggttctttcagcagcactggcctcactatttcttctaaattaccaagattctcggacatgtacactctcacaatagcaagtgcggatccacagtctatctctgcaaacaagccagttcatttcactaagagcgtaacaaagtggtttacaaaggaaggagttcttgtggagggcctgttctggaaggatgtcgagaagctgattgatgactacaacagtgagcgcaagagtaaatgaattggtagctcgtgtctctggccatctggggagacatcgctgtctagagaaatccgtcaaagtttagcttaatctgaacaggcatttttgctatactgtaccggttgaccagtgaatgaatgatgttctagacattaactttggttccaagctttctgtcgtgtccatggataactatccgtccgaatcctagaaacgtggtccgtgcttgtaacctgtttgttctggtgcttccatacgccggagcagattttgaagagaaatgaaacaaatcgttaaatcacatt

SEQ ID NO: 102853 - DNA, 1237 bp, Zea Mays
attttgcattcccacccctccactttttccagctgccacagccttcttcctcctctccccacacgcacagctctcttcttccctgtgcatggcgcagaaaaatctcccagccgtgcagcagctctgcgcgctcccctcggccaccatggcgccctcctccctactccctgctggcgagcagcagctccatggcgcccagattttttttccagcagagagcttcttccctgcaggttgccagcagccttctccctggccgccgagctccctgttcccctgctccaagggcgcgcacccacctcccagcgcccttcttccccctagcgctcgctccctgcaggcgagcagctcgaccccttcctccctgcgcagcagctctgcccactccaccttggtcagcgcagggcccctctgatccgagctcgagcagtgagctcaccgtcgctcatggagcccccactccctgctacactttctcccggcctcctctgcccagcgcccctttttccctgttggccgtggatgttggcgccctctctaaaacagcaagtttccagcgccccctacatctcctatggaaaacagcaagcccccacggcgtcctggtgttctcgctgctcgacttggcctcgcgagctcgctgtcgggacaccctagccgctgctccaccgcgcgcactacctgctcgacgatatgcgcagccgactgcatgctgtcttgcttgtgttgtgcgcagccctgctcgcctcttttcggtgttgtcaaactgtcggtgtggagcactgtgtcggggacaacatcgtcaacttttattctggcgtgctgctcaatccgtgctgtcccgctgtgcgtcgtagcgctgtgaatccacggcatggtctcgacgtcgctctccttgcaacgcccccttgcagccacacccctgcagctcccgcacgccgcaccacaaaaaaaatcccgcaaccacgcctctcctcgcgcttgccgtgctgtcgcgcgcagcgagaaccatagcgccatgacttgttccggctcggcgagagcagccgcgtcgtcaatccgtgcagccccgacgtctccacgtctcactttgccgggtctgcacagcctcttcgcgccatgcgaacagcagcaacaactaagttatttttggtaagttgatttgttgttttgggtaaagttaataaataaatagaggtatggtgatcgtgatgattctcgagcaataagtgatgat

SEQ ID NO: 102854 - DNA, 2384 bp, Zea Mays
cctccctgcatcccgactccatgaccgccgccgccccctcctccactcacacgctccgacacgccttcctccgcattccccgatgttcccctgccacgatacgctccgcctccgcatacctcctcatcacccactacttcgcctcctccactacgccttcagccccgaggcccacccgccgccgcaacacccggccccggcagcatcgcacgccgccgagctctggatcgctaaggcactcgcatcagctgccctcttccgtccgcactgcctcccggccttccgcggcctcacgccctcccatcttgctgccgtggccgcagttaggctcgcgccgtgcgctgggtctgccctccgcatcttctccgccctgcactccccgccgctctctgtacccccttctgagcagtcctacatccacgttatcgcgtttctatgccggtccggtcgccacagggacgcactcaagctgttcgaccaaatgatggatcagtcggggtacttacccgaagcagggttcttctcgttcgtggctggatcctgcaccaatgccggccttcttgatgccgcatcgactttgctcacaaagggctcacggcttggttgctgcattgagccgtatgcatataattacctcttgaactcgttaattgcccatggccgtgcgcaggatgctgttgctttgtttgagagctggattcaggacgggctatattctcccgatgtctggagttttaatgttgttattaagggcgtgtgtcggatggggaatttccagaaggcacttgagttagttgaaaggatgactgagtttgggtgttctccggataccatcacacacaatattcttgttgatgggctatgcagggcgaagcaggtgaacaagggccatgaggtattgagaaggctccagagggatggtgtttgcatgcccaatgctgtgacatacacctcagtaatatcaggttattgcaaggctggcaagatggaggatgcaatgtcagtatataatgacatgcttgaatctggaacaagacccaacacggtcacatacaatgtgcttattaatggatatggaaaggctttggacatggaatctgcagtgagaatgtatcggcagctgattctccgtcactgccctcccgatgttgtgacatttagttctttgattgatggatattgtcggtgtggacagcttgatgatgccaagaggatttggaaggagatgggtctgcatcatattcaaccaaatgtgtacaccttctccatcataatacactcactttgtaagcagaacagatcagcagaagctcttgatattctaagggaactgaatatgcgaacagacattgctccacagacatttatatataacccagtcattgatatactgtgcaagggaggaaaagtggatgaagcaaacttgattgtaacagacatgaaagagaaagggtgtcatcctgacaagtatacatatactattctaataattgggcactgtatgaagggtaggataccagaggcaatcacccttttccacaaaatggtggaagctgggtgtcgccctgacaatattacagttaattcttttgttagttgtgttttgaaggctgggatgcctaatgaggtagatcaaatcatgcttattgcttcaggtcatggtttagctagtcagaaagtttcttctcaacagagccgtagactagatatttcagttgctgtatagttgaattgtgctacaataaagaatgtagagaagagacctgagctgtctcagatagtcagatgcttattgcagcatagaactggtcaggggcggaactagaggcttttattggtgtcatttgacactgatagattttggaaaaccaatgaagaaacagtataatttactgatttacggtgtagatgatactatcctgtaatggtgatgacaccggcagctttattggctggcttcgcccctggaactgggacttctctagatgaggaaaggcgtggaattcatctaagtaaactcaggtgtgaattttgagatattggttgcaccaaggctacctaactatcaaaaagtagtcaaaccaagttgatgctgtgtaaaaatgacaaaggtaagctatttgttgcactgcacattcagtgaagtggctcgcttagtcccacgaagaggagtcaaacaagtgtccatagtgctgctctgccgctgtggtgctacaaaacttgcacacaagaatgctggacacactcctgttatgtaaacattatatccaagcatacgttctgtcagtctccttgaccttttgccaagattcaagagcagctacatttgggagattgttaactggataatattgaattagcatatgcagacccattgcttgaag

SEQ ID NO: 102855 - DNA, 411 bp, Zea Mays
agaaatcatgcaactttgtccaaaggttactattttgcagttatgacccgttacctttttagagatgaataatattggttctccttcaccgtctttgaccataagctctcccttggatccaagtattccacaaccatctacgacgaatacaatgttatgactgaggaatgctcttgtccattttgcttgatgtagctcacgaattggagagagagagattacttgtatctgaacccctgtttctgtttgtctgccttgcctcgagcaagttctgtggccagcaggtgagtacttatattggagcaatggatgattgtttcaaacaagacagtctcccaagctaagaagcaacgaggagagttcagtaggttggtgtggttcaagagtctgcaatggaaagtcactgcaaga

SEQ ID NO: 102856 - DNA, 148 bp, Zea Mays
gcaactactgttacaatttaagtgcgcaagcaatttaaatcctggaattttactgaacctagactcagtttgtttttgtttttaccatcccactaccactagtccgtttagtgtgtttagatcaaaattttagctcattgttttttgc

SEQ ID NO: 102857 - DNA, 759 bp, Zea Mays
gggaacgcaacgcaacagagggagaaggaaaggaaacagcagagcagaggccacgagccccccccccccccccccccccccccccccgcgcgagagagagagagagagaggaggcgccgcggagcgagcagcgagaacgagcaaaggcgcgaagaatgggggaagctccgcctccgtgcgccatcgtggggccacgccgcgccgccgcgcactccttccgcctgcctcgccacggccgccgcaaggtgcacgtggtccggctcggcggccctggcgcgcgcggccgcggccgcgggctccggctccggcagtggctgcggcgcgcggcgtggcgcctcgccgagctctgcgtggcggcgctgtctggccaccacggtcacccgcacccgggggcgccgcccagcgcggcgcacccgccgtggaccggcgtcgagccctgcttcgccgcgcccttcgtccccgtcgcgcggatgaagcgcgcggcagcgcaggcctagctagcttgccgcgatcgacgacaggcagagttggttaccgctgctacgccgcctacgcgtgacgccgtgacgcctgaagtgaagagacttgcttcgctcgtgtcgatctcggcatgtagcagcgaatcatgtaggacagggggcgctctcgctgtggtgcccagtgcgcaatggcatattgcacactccagtgaccgtacttaaatcttattgtacttgtgtctgctgctactgataactaatgaaacattgctatcaaata

SEQ ID NO: 102858 - DNA, 1237 bp, Zea Mays
ggttagcatcagataagtccaagaaagtaggagttagttgagagtttataggagaagttggttagccatagggctatttataagtcgcatggcaacagggaataaatcaagcaagatcaataccaaaccaatctctctctctctcttgcaatgaccctctcaagcgcctagggctgctaccctagaaccaagcctgcggcagaggggtataacctcgccggagaagacagctatccccatggaccgaaggtccatgacacctggtatcagctccaggttatcctcaccaccaccagccgcccatccctcaccaccaccagccgccgcgccatctgccgccgcaacgccctcccacccgccctctccaactctagatgcattcactcggctcgaagagaagtgggatcaattcgttgtgatgttccaccgctacaaggagaagacagagaaggaactccaagcagcggtgcggattcaggcggcagcgcgagggttcctggcacgccgccaggtacagtcccttcgtggggagaagcaccttgttgtggcctccagggccaccccatggccatcatcacatgagcaggccgtggtgcgcctgcaagccgcagtgcgtggcttccttgttaggcgggcggtgcagaagctgcacttgctgatcagctcatcgctgcaccaactcgcagcctgtgcgtccaaccaccaagtctcgtctatactttttgaaccccatgcagaagtcaagatttgggtatgcaatccccctgcacggccaaagagggtcgtctccttcattcgggcaactgccttggtgctggacagacccaacataagaacgggctggttcctccttcacctttcatccaatgtgaagtccgcagttcagctctttccttgagatccaggaggacatagctacagttcaaatttatattttagttccataattattttatattttcgtcttaaataataaaggtaagccgagatgtaaaaggcttaaccttaagtcgtgtcaggtaagtctatggcagctcgaggacgagctggtcctcaagggagggggagatgtcatgggcatcatagggagcgagacgcaacagccaggctgggataaggctagagaataagattgagatgagctgggataaggctagagaataggattgggatgagagaatcgtggagagttggttagcatcagataagtccaagaaagtaggagttagttgagagt

SEQ ID NO: 102859 - DNA, 1129 bp, Zea Mays
aagcaagatcaataccaaaccaatctctctctctctcttgcaatgaccctctcaagcgcctagggctgctaccctagaaccaagcctgcggcagaggggtataacctcgccggagaagacagctatccccatggaccgaaggtccatgacacctggtatcagctccaggttatcctcaccaccaccagccgcccatccctcaccaccaccagccgccgcgccatctgccgccgcaacgccctcccacccgccctctccaactctagatgcattcactcggctcgaagagaagtgggatcaattcgttgtgatgttccaccgctacaaggagaagacagagaaggaactccaagcagcggtgcggattcaggcggcagcgcgagggttcctggcacgccgccaggtacagtcccttcgtggggagaagcaccttgttgtggcctccagggccaccccatggccatcatcacatgagcaggccgtggtgcgcctgcaagccgcagtgcgtggcttccttgttaggcgggcggtgcagaagctgcacttgctgatcagctcatcgctgcaccaactcgcagcctgtgcgtccaaccaccaagtctcgtctatactttttgaaccccatgcagaagtcaagatttgggtatgcaatccccctgcacggccaaagagggtcgtctccttcattcgggcaactgccttggtgctggacagacccaacataagaacgggctggttcctccttcacctttcatccaatgtgaagtccgcagttcagctctttccttgagatccaggaggacatagctacagttcaaatttatattttagttccataattattttatattttcgtcttaaataataaaggtaagccgagatgtaaaaggcttaaccttaagtcgtgtcaggtaagtctatggcagctcgaggacgagctggtcctcaagggagggggagatgtcatgggcatcatagggagcgagacgcaacagccaggctgggataaggctagagaataagattgagatgagctgggataaggctagagaataggattgggatgagagaatcgtggagagttggttagcatcagataagtccaagaaagtaggagttagttgagagt

SEQ ID NO: 102860 - DNA, 1604 bp, Zea Mays
atttcgtcgaggaggtaccggtacctcaccatggacggaacgtggtggacaagcggtcttcctgccggccgacgcgtcgaggtcgggttccaaccagcccaaaccactcccgccgccggccgtttccccgtgccccaccacctgacctgcgccggcccatcctccccgcctggcccaagccaacgctgcccttgccgtgccgagtaccagccggatgcccggatccccctcaaagcacgaccgacaaccccacgccgccggcaccgccgcaccaccgaaactaaccctacccaaaccagatcggatccgatccccttctccttcaccaacgctcccctcgcccaattcgcttcgatccgccgggacccagatggacgacgacgacgacatgtcgccctcctcctccccgtcgccgccctcctcggcgctccccgtggacggccccgtcaccgtcgccgctgcgccgccgggcgccaccatggtggtcgcgctcccgatccataggaccgcggcgtccctgtacgccagcgccgccgccgccggcggcgggggcggcgggagggaggacgcctggagcgacggcgccacctccgcgctcatcgacgcctggggtgagcggttcgtcgcgctgggccgcggcagcctccggcacccgcagtggcaggaggtcgccgacgccgtctcctcccgtgacggctactccaaggggcccaggtccgatgtccagtgcaagaaccgcatcgacacgctcaagaagtacaaggtcgagagggccaagccggtctccgcctggcagttcttcgaccgcctcgattttctcctcgcgcccacatacggcaacaagcccggctctagcggcggcggcggcggagggcacaactctaacagccgcggccagatgccctcggcgctgcgggtgggcttcccgcagcgcagccgcacgccgctgatgcccgcggccaagcggagggcgccttcgccggagccgtcggtgtcctcagacggcttctcgccgttgccggcgcttcctccggcggtgaacgggaagaggaagaggccggacgaagggcgccccgacggtggcagcggcgacgaccgcgcgcgggggctccaggagctggcgcatgcgatacggcgcctcggcgaggcgtatgagcgcgtggaggccgcgaagctggagcaggccgccgagatggagcgccagcgcatggacttcgcgcaggagctggagtcgcagcgcgtgcagttcttcctcgacgcgcagatggagctcacgcaggccaggaaccacgtgtctcctgcctcggccgcgcgccccgccgctggtggctcgtccaggaggacgtccgtggttaccgacaccggcggcagcagcaatcaccatagccgttaccggatcagccatggcgacatgcaccgtcacgctccacgctcccattaccagccgcagtaccatggcaacaatcacgcgggggcgggggcgggggcgggggctgcaagtgaggaggaggatgattacgaagaagagagctagtaattgtagccgcgattcgccataatttatataggtattgccatggaattattgcattgctccgattcaa

SEQ ID NO: 102861 - DNA, 110 bp, Zea Mays
cttctttacaactggttgtgcacggtgtggtccatgatggttgtttttctgtatctctagttgcactcaccaatttctgtcttattagttcaattttttgttgaatttac

SEQ ID NO: 102862 - DNA, 837 bp, Zea Mays
atggcgaccaacccctccaacggcgccggcaccgacgtccctgcagccccggcggcggttaagttcagcgtggaggtgcctacttccatcattcacgagtgctaccaatccacgctacaggagtacgccaaacgtgttaaggttcctggattttggcctgggaagaccattccagaaaacgttcttataaactatgtaggaccgcaacatgtagaggagagggcattagaagattctgttcgcattctgactcaatttgatgatatgagaaattctttctcactcgacaatgtgtttagatatgatgttgttgtggatgttgcccctgaagtccgatggttatctgaagacaaatataagaacctcaaagttgttgaaatagatgaagctgttgatgcagaaaaggcggcagagaaagagcttcagcgtcgtcataaagctctgggcttacttagaattgtggctgacagagtcatcctatcatcatctcatgttgttgcttctcgccacaaactcccgacctcttgtgattccgatctcctgtgcctcacctcctctcgcaacgcgcagctccgctggccccgagccccgatgcggctctaccggtcgtcgtgttgtccctgcggcggctcagcggcacagccgccggggccgcctcctctacagccacattcattctacaaccacattatgttcatatgtagatatatgttggatgcggaggtccaaaaaccgttgctttcagttttcccaatgatgaatggattcagaatgaacgaggaacttccatggttatgcttaaaaacatttcagaagccaagtaccttgcattcataa

SEQ ID NO: 102863 - DNA, 737 bp, Zea Mays
tgcccatataaccctaactagggttacttaacaagttgctcaggggagatgacgagcccaatggtggccaccccggtccagctccgcagcaccggccgcctcagcttctgctgcttccccagcagcgcatcggggacagcccccagtcggcggcgattcgggcggtgacggtgagggcgtccgcggagacgatggcgacggagaagctgggtatcaaggtggagcgcaacccgccagagtcccgcctctccgagctcggcgtccgccagtggcccacgtgggggtgcgagaagagcaagttcccgtggacctactccgccaaggagacctgctacctgctgcagggaaaggtgaaggtgtaccccgacggtcacggcgaggagttcgtggagatcgccgcgggggaccttgtcgtcttccccaagggcatgagctgcacctgggacgtcgccgaggccgtcgacaagcactacaacttcgagtagccgccgccgccgccatgtttggattgcttcccctagcttcctaccatgtgcttgtagacttgctgtgctcttatacacctatgctccattccagagttaaacagcgtaaaataaagctccggattagcggactacacaattcacaccaacgttctgtcaggcgtttttcctgttatgacaagtggaacctgtacatgttagtatgtgattcatgccctcaaggcctcaaactacctcgctgattcttggctc

SEQ ID NO: 102864 - DNA, 2752 bp, Zea Mays
gagagagagatgtctgcggagtatgagctgaacgagatagatgctgctgagaccagcttgcatggctctttggggagcaggctctccctgtttgcgagggagctcaagtccaggaggagcagctggcacagcagcggcgccctgaggctaccacacagctgctgctactatggcagcttcgtcatacaccctaatggaaggtggtacaggatctggtcgagcgcggtgttcctgtggtccatctactccaccttcttcacccccttcgagttcgccttcttccggggcctcccggaccacctgctggacctggagtgcgtgcagctcatcttcctcgccgacgtcgccgtccacttcctcctcgcctacagggacgcccgcacctaccggatggtgtacgacaagcgcaggatcgcgctgcggtgagtgagaggccggccgcggttgctctgccgctcctctgccccggccacgcacaccatttcatcttttctcgatcagaccgtgatcgactgatggcttaattgacgacctagcaagcatagcaattgttctcttctcgcgcgtgcatgcactgcagctacatcaagggaagcttcgctctcgacatcctcggctgcttcccgtgggactccatatacaaggcgacggggagggcggaggcggtgcggtgccttgtgtggctgcgcctctacagggcgcgcaacatcctggccttcttcaggaggatggagaaggacatccgcatcagctacctcttcacgcgcgtcgtgaagctcgtcaccgtggagctccacttcacgcacaccgccgcctgcgccttctactacctggccaccacgctgccgccggcgcgcgagggcggcacgtggatcgggagcctcgcgctcggggacgcccggtacgccggcttccgggaggtgggcctgctcacccgctacgtcacctcgctctacctcgccgtcgtcaccatggcgacggtcggctacggcgacatccacgcggtcaacccgagggagatggccttcaccgccgtgtacatctccttcagcatcctcctcagcgcgtacctggtcggcaacatgacggcgctcatcgtcagagggtccaggaccgagaggttccgggacaggatggccgacctcatcaggtacatgaacaggaacaagctgggcgccggcgtcaggtcccaggtcaaggatcacctgctgctgcagtacgagagcagctacaccagggacagaatcgtcgacgacatcccggtcgctgtcagatccaagatgtcccagacattgtatctggacatggtttcaagagtgcacctgttcaaaggatgctcagaggacttccttagccagattgtggtaaagctacatgaagagttcttcctccctggggaggttatcttagagcaaggcactgtggtggatcaaatttacatcgtggcacacggatgcttggaagaggtggccactggagaaggtggatcggaggacatcatctcagagcttctgccctacgacatcgtcggcgacgtctccgtagtttgcaacgtcccacagccacacacagtcagggtctgtgatctttgtagcctcctgagaatcgacaagcagtccctgaccagcatcctgcagatctactccaaggatagccgtcagatcttgagcaacctactcaaggggcgcggcggaaccgagtccagggggaagcagctggagtcagatatcgcttacctgatatcaaggcaagaagcggagctggtccttggagtgaacaacgccgcttaccatggagatctgtcccgtctgaaaggactggtcagtgcaggagcagatccgagtaaacctgatcacgatggaaggactgcactgcatgttgctgcgttaagaggatacgaagatatcgtcaggttcctagttcagcgaggagccaatgtcaacagcatagacaagttcgggaattcacccttgctgctagcactgaaatcaggccacgagaggatcacctctctcctagcgaagcacggcgcagcactgaacctagaagacgccggagggtacctgtgcagggtcgtcacggacggcaaggtcgacctgctcagcaggctgctcaggtccggcgtcgaccccaactgcaggaactacgaccagaggacgccgctccacgtcgctgccgccgagggcctgcacctcgtcgccagcatgctcgtcggcttcggagcagacgttctggccaaggacaggtggggaaacacgccgttggacgaaggccggagatgcagcagcagaccactggttcggattctagagcacgctacgccgtgatcaagctcatgctatgtatgatccggaaatcttcatccggtgttcatgtgtgaacagctggcaatgaaacattctttagtttcctggtcgatgaaaccatccgtctccaaatgcatgccttcaattctcagcagcggaaataactggtttccatagaaattggatagatctggacagcacacgaacatgaagctagcgtttccaaccgacggtgacgagtgaaatctactccaacaccgatacagttatagatgcaccttcaaatttcacagcatatggttgtcagttactgttttcaagaggggcacgagcaatactgcatacattgtttaacatgaccccaaaaaaaagcaacttaactctgttgttttgtcctaattatctcatatcagaaaggggtttggttgcagttgcaacaagttgct

SEQ ID NO: 102865 - DNA, 3137 bp, Zea Mays
gagagagagatgtctgcggagtatgagctgaacgagatagatgctgctgagaccagcttgcatggctctttggggagcaggctctccctgtttgcgagggagctcaagtccaggaggagcagctggcacagcagcggcgccctgaggctaccacacagctgctgctactatggcagcttcgtcatacaccctaatggaaggtggtacaggatctggtcgagcgcggtgttcctgtggtccatctactccaccttcttcacccccttcgagttcgccttcttccggggcctcccggaccacctgctggacctggagtgcgtgcagctcatcttcctcgccgacgtcgccgtccacttcctcctcgcctacagggacgcccgcacctaccggatggtgtacgacaagcgcaggatcgcgctgcgctacatcaagggaagcttcgctctcgacatcctcggctgcttcccgtgggactccatatacaaggcgacggggagggcggaggcggtgcggtgccttgtgtggctgcgcctctacagggcgcgcaacatcctggccttcttcaggaggatggagaaggacatccgcatcagctacctcttcacgcgcgtcgtgaagctcgtcaccgtggagctccacttcacgcacaccgccgcctgcgccttctactacctggccaccacgctgccgccggcgcgcgagggcggcacgtggatcgggagcctcgcgctcggggacgcccggtacgccggcttccgggaggtgggcctgctcacccgctacgtcacctcgctctacctcgccgtcgtcaccatggcgacggtcggctacggcgacatccacgcggtcaacccgagggagatggccttcaccgccgtgtacatctccttcagcatcctcctcagcgcgtacctggtcggcaacatgacggcgctcatcgtcagagggtccaggaccgagaggttccgggacaggatggccgacctcatcaggtacatgaacaggaacaagctgggcgccggcgtcaggtcccaggtcaaggatcacctgctgctgcagtacgagagcagctacaccagggacagaatcgtcgacgacatcccggtcgctgtcagatccaagatgtcccagacattgtatctggacatggtttcaagagtgcacctgttcaaaggatgctcagaggacttccttagccagattgtggtaaagctacatgaagagttcttcctccctggggaggttatcttagagcaaggcactgtggtggatcaaatttacatcgtggcacacggatgcttggaagaggtggccactggagaaggtggatcggaggacatcatctcagagcttctgccctacgacatcgtcggcgacgtctccgtagtttgcaacgtcccacagccacacacagtcagggtctgtgatctttgtagcctcctgagaatcgacaagcagtccctgaccagcatcctgcagatctactccaaggatagccgtcagatcttgagcaacctactcaaggggcgcggcggaaccgagtccagggggaagcagctggagtcagatatcgcttacctgatatcaaggcaagaagcggagctggtccttggagtgaacaacgccgcttaccatggagatctgtcccgtctgaaaggactggtcagtgcaggagcagatccgagtaaacctgatcacgatggaaggactgcactgcatgttgctgcgttaagaggatacgaagatatcgtcaggttcctagttcagcgaggagccaatgtcaacagcatagacaagttcgggaattcacccttgctgctagcactgaaatcaggccacgagaggatcacctctctcctagcgaagcacggcgcagcactgaacctagaagacgccggagggtacctgtgcagggtcgtcacggacggcaaggtcgacctgctcagcaggctgctcaggtccggcgtcgaccccaactgcaggaactacgaccagaggacgccgctccacgtcgctgccgccgagggcctgcacctcgtcgccagcatgctcgtcggcttcggagcagacgttctggccaaggacaggtggggaaacacgccgttggacgaaggccggagatgcagcagcagaccactggttcggattctagagcacgctacgccgtgatcaagctcatgctatgtatgatccggaaatcttcatccggtgttcatgtgtgaacagctggcaatgaaacattctttagtttcctggtcgatgaaaccatccgtctccaaatgcatgccttcaattctcagcagcggaaataactggtttccatagaaattggatagatctggacagcacacgaacatgaagctagcgtttccaaccgacggtgacgagtgaaatctactccaacaccgatacagttatagatgcaccttcaaatttcacagcatatggttgtcagttactgttttcaagaggggcacgagcaatactgcatacattgtttaacatgaccccaaaaaaaagcaacttaactctgttgttttgtcctaattatctcatatcagaaaggggtttggttgcagttgcaacaagttgctagccaacaaaatcttgttacactcgaaacctttggtcagtaaagcacaactagctgaattaatagggaaatggaacagtagtgtcagccacaaccattactacatttcagcattcaatccgaaccgaaccactctgcgtcgagatgaacttgggcttcctaatcacctgctccacgcactgtatgatatcccctacctggaaatcatcgcaatcctgaatcaccagcccacagtcgttacccttttcgactgtttctgcgtccttcttctcccgcttcagagactcgcatggaccctcaaagacaacatctccgctcctcaacagtctcatggttccggatttgctgaagtggccatcagttatacggcagccagcaattttgacatccggtccttttgacttgctgcgccctttcagctcaaatatgttcagaacctcagcctctcctgaaacctgggtttcagcagttcccggtgccttctccacaatggcctttcccatctcctcaagaaggtgatagatgaccttgtgaagcaaaacct

SEQ ID NO: 102866 - DNA, 1476 bp, Zea Mays
taaactgatcgatcggcgctgctagctagctgtcgccgatcggcggtgcgcgcggccgccatgtacgcgcccaagcaccggggccactcatcgcagcagcaccacaataccgacgaggggatgggtgccgccgccaatggccacgggcaccgagcacggccggcgcctcggcgcgccaagctcaaggtcctgcttctcgtcatcgccaccagcctcgtctccgtgtacctcttctccggcgcgtctctgtccgtgcacattccggcgtccgcgccgcggatccacctgtgggactcagccgcgctgctgcgggacctcaacgccacgcgcgccgcgctcgccggcgcccgcgccgagctcgcggcgctgcgggcgcagtgcaacgcgtcgtcgtacctcctcgagtccgtgctcgcgggcctcggcgccgtgcacggggacacgccggaagccaaagacttcggcggctggcccgaggagcccctgggcgagctcaagctcgccatcgagccccaccggctgccgctcggattccacgccaacttcggcaccgacgagctgttcccggggctggggttcgcctgccgcaacttccaggaggagctggcgcagtacatgacgtacaacgtcagcggcgagtgccccgaggacgacgccctggcgctgcagctggcgctcaaggggtgcgagccgcttccccgccgccgctgcaggccgagggagccggcgaggtacgcggagcccgcgccgctcccgcggagcctttgggccgtcccgccggacaccaccgtgcgctgggcgccgtacacgtgcaagaactacacctgcctcgtgcagcgcgcgcgcaccaggggcgggccctacttctgcaaggactgcttcgacctggaggggaaggagcggcggcggtggcaggccgacaatggcggaccggggttcagcgtcgacagcgtgctgcggtcccgggccccgggcacggtgcggatcgggctggacatcggcggcggcacgggcaccttcgcggcgcgcatgcgggagcggaacgtgacggtggtgaccacgacgctggacctcgacgcgcccttcaaccgcttcgtggcctcccggggcctcgtgccgctgcagctcacgctgatgcagcggctccccttcgcggacggcgtgctggacatcgtgcactccatgaacgtgctcagcaactgggtgcccgacgccgtgctcgagtccacgctcttcgacatctaccgggtgctcaggcccggcggcctcttctggctcgaccacttcttctgcctcgggccgcagctcaacgccacctacgtgcccatcttcgaccgcgtcggcttccgccggctgcggtggaaagccggccggaagctcgacctcggcgccgagaggaacgagtggtacgtgtcagcgctgctcgagaaacccatgacctgagcatctccctttcgggcggggcgccgtttcatt

SEQ ID NO: 102867 - DNA, 1028 bp, Zea Mays
tgaagagttcagctaccctaccatccacactttattcatctcagggcagtagccagtagctagctgtagagggagttatcggccatgtcggaggaggcgacgctggaggacacgcctacgtggatcgtggcgtccgtgtgctccgtcatcgtcctcatctccttcgtcttcgagcgcgcgctccaccacctcggcaaggcactggagcgccggaggaagaccctgtacgaggcgctgctaaagctcaaagaagagctcatgctgctgggcttcgtctcgctgctcctcgtcgtctcccaggacttgatacagaagatctgcatcgacgacagcctcatggagcactggatgccgtgccggggtgcgagcgccaccgcctcggctcattacggtgtctcctcctcctcctcctcctccgcggtcggtggcgggaggaggatgctcaaaggcggcggggcagctttcgggcactgttcaagcaagggaaaagtcccgttgctatcacttcacgccttggagcaggtacacattttcatcttcgtcctagctatcacgcaagtcgttctcagcgtcgccaccgtcctcctgggacttctgcagatgcggatatggatgcactgggagaacaccattcagcaagagggcagctctgctcccaagatgatcgcccgtgtgcagaaaatcaggttcatccaggaccggtgtaaggggtacgagaaggccgcctgggttataatatggctgcgttctttcttcaaacagttctacggatcagtgtccaacgacgactacattgcgatgagactcggtttcgtcatggagcactttagggggcaccccaagttcaacttttacgactacatgatcaaagctctcgagaaagatttcaagcgagtagttagtataaagtaagcttgtgtatttatttggttggaggttttgttcttcggaatctatgctttctgtaactttattctgcaactggcgcattagtgacttgcctcccaatattgtagatggtattactg

SEQ ID NO: 102868 - DNA, 1870 bp, Zea Mays
tgaagagttcagctaccctaccatccacactttattcatctcagggcagtagccagtagctagctgtagagggagttatcggccatgtcggaggaggcgacgctggaggacacgcctacgtggatcgtggcgtccgtgtgctccgtcatcgtcctcatctccttcgtcttcgagcgcgcgctccaccacctcggcaaggcactggagcgccggaggaagaccctgtacgaggcgctgctaaagctcaaagaagagctcatgctgctgggcttcgtctcgctgctcctcgtcgtctcccaggacttgatacagaagatctgcatcgacgacagcctcatggagcactggatgccgtgccggggtgcgagcgccaccgcctcggctcattacggtgtctcctcctcctcctcctcctccgcggtcggtggcgggaggaggatgctcaaaggcggcggggcagctttcgggcactgttcaagcaagggaaaagtcccgttgctatcacttcacgccttggagcaggtacacattttcatcttcgtcctagctatcacgcaagtcgttctcagcgtcgccaccgtcctcctgggacttctgcagatgcggatatggatgcactgggagaacaccattcagcaagagggcagctctgctcccaagatgatcgcccgtgtgcagaaaatcaggttcatccaggaccggtgtaaggggtacgagaaggccgcctgggttataatatggctgcgttctttcttcaaacagttctacggatcagtgtccaacgacgactacattgcgatgagactcggtttcgtcatggagcactttagggggcaccccaagttcaacttttacgactacatgatcaaagctctcgagaaagatttcaagcgagtagttagtataaaatggtattactggatttttgtgatgatctttctgctgctcaatgtcaccgggtggcactcctacttctggatctcattagttccactggctctgctgcttctgattgggacgaagctggagcacatcataaacaggctggcctacgaggtggcctcgaagcacgccgccgggcaaggcgaagggggcatcgtggtgagcccttcggacgagctgttctggttccgcagcccacggctggtgctcgtgctcatccacttcatcctgttccagaacgcgttcgagttcgcgtatttcttctggacactggcgatgttcggcgccaactcctgcatcatggacagtctaggatacagcgtctcgcgaatcatcatatgcgtcgtcgtccaggtgctctgcagctacagcacactcccgctctacgccatcgtgtcccatatggggagttcgttcaagagcgctgtgttcgcggacgacgtcgccgacaatctcagagggtgggccgacggcgcccggaggcgcgtgcggagatctgccacgggtgtcgacgccagttgcctgggtacgccggcggcggcgggacggggctgggaaggcgccgccggctggagattgattgccgggaggccgagccgcccaactcagcagcctcggagcatctccttctgagttctgtctagtttctgaagaaggaatcgaaagccgcgcaatctgcagcacgcgtatgctgtcgctgcccgtcttcatttgggtattattgggtttgagttgacactgaccaactgccgaattttgcggaaacttttatggtcatgcctcttgtgccactattacgaccgtggcggtgagcacggagtgtaatagagtagtaaagatatgtagctcgcatatatatatatatactgtacctccgcccgtgatgctagcagtagcagcggcggatggggctctagcggcattgttg

SEQ ID NO: 102869 - DNA, 1633 bp, Zea Mays
cgcatctcgatatcgatgccatcctgcaacggtggctcatgcatgcatctccgtcgatttgtagagctcatgctgctgggcttcgtctcgctgctcctcgtcgtctcccaggacttgatacagaagatctgcatcgacgacagcctcatggagcactggatgccgtgccggggtgcgagcgccaccgcctcggctcattacggtgtctcctcctcctcctcctcctccgcggtcggtggcgggaggaggatgctcaaaggcggcggggcagctttcgggcactgttcaagcaagggaaaagtcccgttgctatcacttcacgccttggagcaggtacacattttcatcttcgtcctagctatcacgcaagtcgttctcagcgtcgccaccgtcctcctgggacttctgcagatgcggatatggatgcactgggagaacaccattcagcaagagggcagctctgctcccaagatgatcgcccgtgtgcagaaaatcaggttcatccaggaccggtgtaaggggtacgagaaggccgcctgggttataatatggctgcgttctttcttcaaacagttctacggatcagtgtccaacgacgactacattgcgatgagactcggtttcgtcatggagcactttagggggcaccccaagttcaacttttacgactacatgatcaaagctctcgagaaagatttcaagcgagtagttagtataaaatggtattactggatttttgtgatgatctttctgctgctcaatgtcaccgggtggcactcctacttctggatctcattagttccactggctctgctgcttctgattgggacgaagctggagcacatcataaacaggctggcctacgaggtggcctcgaagcacgccgccgggcaaggcgaagggggcatcgtggtgagcccttcggacgagctgttctggttccgcagcccacggctggtgctcgtgctcatccacttcatcctgttccagaacgcgttcgagttcgcgtatttcttctggacactggcgatgttcggcgccaactcctgcatcatggacagtctaggatacagcgtctcgcgaatcatcatatgcgtcgtcgtccagatggggagttcgttcaagagcgctgtgttcgcggacgacgtcgccgacaatctcagagggtgggccgacggcgcccggaggcgcgtgcggagatctgccacgggtgtcgacgccagttgcctgggtacgccggcggcggcgggacggggctgggaaggcgccgccggctggagattgattgccgggaggccgagccgcccaactcagcagcctcggagcatctccttctgagttctgtctagtttctgaagaaggaatcgaaagccgcgcaatctgcagcacgcgtatgctgtcgctgcccgtcttcatttgggtattattgggtttgagttgacactgaccaactgccgaattttgcggaaacttttatggtcatgcctcttgtgccactattacgaccgtggcggtgagcacggagtgtaatagagtagtaaagatatgtagctcgcatatatatatatatactgtacctccgcccgtgatgctagcagtagcagcggcggatggggctctagcggcattgttg

SEQ ID NO: 102870 - DNA, 1085 bp, Zea Mays
gttaggcagttgccgtggcagtggcgcggcggcaggaacgggaggtcgcagccgcagcgtcgtcatgcctccctcggctccacagccgcctgagagaactcagccgcgccaagccctccgcttttgccgcgccgccttcacgcggcggcggaggcggtggcggtgccggtgccgtttccctgacatggatgaccagcggcggcggcgctccacggggagcgctcgggccgctgcggaccgccgccctcgccacggtgaccgcgccctgggatccccagaacaggacgttcgtcggcaggtccgtggggtaggtggcgggcgccgggagcgccggagggagggccgaggacggcggcgccggcgccggcgcagggagcaggccgacgtcgacgcggcagagcgggcacgtggagtggccgcgcagccactggtcgatgcactcggcgtggaagccgtgcgcgcacctgggcaggaacctggcgggctcgccgtcggcgagctcggcgaggcacacggcgcactccagcgcctcgcctgcccggtggtcgtccttcgcctcgtaaaccgtcaccggcagcgcccggagcaccgacgggtcaaggccgccggtggcgtcgcgtcctcgtcccagcgtgccgtgctgctggtgctgctgggcgctcgttggcgccgcccccacccccgcgccgccgccgcggcgactgaccgtggccgtggagtagtggtacaggacgaacgccaaggccagggcgacgaagaggagggctacgctgcagaggacgacgtcgccgcccaccggcgaggccgcgctccaccacgcgaccggcgggccactgccgcctgcgacgacgttctccggcgacgctgacatggtctctcgtgccttggatcgcccctcggcgtgagatcttgtgtggtgacttgtggctgagatttaggggatgtttattggcgcgttcttggagaggtttaggtgcagccggttggatggagttggtatgatggctgatggcgtgggtgtggggatcagtgtgttaacctgaattgagcagcttgagctgatgctgatgtagggggcttgttaa

SEQ ID NO: 102871 - DNA, 377 bp, Zea Mays
accacgctcacattgtctgggacaatggcaatgtatggatgaattgaaggaagtaaagaaggcagacaatcttacataaactctgcatcttgaaactgccatgattgacaaagaagctagatgcgtcatgtgcattggtgtcttatcaccatgcagtaatgtgaagcaagttcatttgttgaataagaatggatgaacacaaataagtgaagagttctttgcactagagatggaggttgaagaggtgctaggtttcaatatggctttgatacaattttgcacctacaatctttgtacagaacaagaaaaataacattgtatgtagatactattgtaattcaataatttatttctaaataatagatatatttgtttat

SEQ ID NO: 102872 - DNA, 110 bp, Zea Mays
ccaaattctgtgaggtattttgggcacgtcatgttccagaagcccctatacaaataaagttcaaagcgtttttggatctaaagtgaggtgaagaagcgagtgtgatggac

SEQ ID NO: 102873 - DNA, 679 bp, Zea Mays
aagttttagttgcttcacttggtgtcttagcggttcgtgtttgtaagtctaagctcctcttccgagccaccaactcgatctgccctagtcttcccatctcctacttaagtcaaggtccagtaggccgtgcagtcctagagctcgagtgatctccttggctcttgtagcctatgtttccccggagttaatcccctcccaatatcttagtccatctgcccagagcttggtgtaccagtccctaggtggtgaccatcgttgacagttagtccacctcgccgtgaccagattagctgaaaactggattgcagcagattgctcagtttggagctctcctatgaccagttcatgaggttttgggttaccagttgtatagaaaagtcaaagaccagatgaaggtgaacaagcttcatcagaggagtggggcttactactgtgtaaaatatggagaaatatgtgctgcaattttctatgtcaggtgttgtgttcaggtctttttcagttagctgaaatttagcctttgcgttttcacctcaagtttggtgctctgtaacttgagatctgtttagggttagctagtagctcttgtaacaaagatggagagagattatagaggaaccattcatagtaaggaaatacattgagccctcatatggaattgcgagaaaatagtattacaaaa

SEQ ID NO: 102874 - DNA, 1089 bp, Zea Mays
atggaatggaggtcggccacgcgtgtatatatacgcgctacaggcctctcccgcgtcaaagttgaagggcttgacctgggagctggccggttggttattggattgccaatggcggccttctcatccagcaacggcgtgccgccgggcttccggttccaccccaccgatgaggagctgctgctatactacctcaagaagaaggtcgggtttgagaagttcgacctcgaggtcatcagggaggtcgacctcaacaagatcgagccgtgggacctgcaagagaggtgccggatcgggtcggcgccgcagaacgagtggtacttcttcagccacaaggaccgcaagtacccgacggggtccaggacgaaccgcgccaccacggccggcttctggaaggccacgggccgggacaagtgcatccgcaccagctaccgcaagatcggcatgcgaaagacactcgtcttctaccgcggccgcgcccctcacggccagaagtccgactggatcatgcacgagtaccgcctcgaggacgccgacgacgcccagggcggcaccagcgaggacggatgggtggtgtgccgcgtgttcaagaagaagtgcttcttcaagattggcgggggcgaagggagcaccagccagagcgcggacgctggcggccacctggctgtgtcgccgccgctcggcggacaccacgaccagcaggccagggccgcgctggcgtacatgcacccgcacccgtactaccaccacgcctcctcctactactcccagatgcacgcgccggggccgcacgccgccgcgtactcgcaccacgtgcaggtccaggacctcctcaccaaccaccggcccacggacgacggcgccggcacaagctatgacttctccggactgccggtcgagcatcaccccggcggcggccttgacgtcggcaccagcgacggcgtcgccacggatggcggcgagaccaccggtacagccgcagagcagtggcaggcgatggatggtttcagcaacggcgggagcgcggcggtgcagcaaatgaccggcgcccaacgaggtggggagatggatttatggggttacgggaggtaa

SEQ ID NO: 102875 - DNA, 693 bp, Zea Mays
gaatccatctccatcctttcataacacacctgcaatcataaagagaggtgcaacgtcttctccgtgcttaccactcgccattcctaagtcctaactacctccacccccgcacgcacaactggccgcgccaaggcaaagctagaagaagacaacgcaaagggagaggacagaggaggagcagaggacgatgggcagcggcggcgctaacactgcccccctcctcaccccctacaagatgggaaaattcgatgtttcccacagggtagtcctcgcaccactgacgagacagcggtcctacggcaatgttcctcagcctcatgccatactgtactatcagcagagggcgactaaaggaggtcttctgatcgctgaggccacgggggtttcagacactgctcaagggtacgtctgtcgtctgctagaccatcaggctactacggctgcttgagatctgtgtggtcatgctaaatttcatcattcagtagtttagtcgatgtctgaataaagatgtgttttctgtatgcgcacaaggtacaaggacactcctggcatttggacccatgagcaagtcgaagcatggaagccgatcgtagacggggttcaccagaaaggagggatatttttctgtcagatttggcacgtagggagagtctccaattccagtatgtttaccacctctaacgcagatcggtt

SEQ ID NO: 102876 - DNA, 1473 bp, Zea Mays
gaatccatctccatcctttcataacacacctgcaatcataaagagaggtgcaacgtcttctccgtgcttaccactcgccattcctaagtcctaactacctccacccccgcacgcacaactggccgcgccaaggcaaagctagaagaagacaacgcaaagggagaggacagaggaggagcagaggacgatgggcagcggcggcgctaacactgcccccctcctcaccccctacaagatgggaaaattcgatgtttcccacagggtagtcctcgcaccactgacgagacagcggtcctacggcaatgttcctcagcctcatgccatactgtactatcagcagagggcgactaaaggaggtcttctgatcgctgaggccacgggggtttcagacactgctcaagggtacaaggacactcctggcatttggacccatgagcaagtcgaagcatggaagccgatcgtagacggggttcaccagaaaggagggatatttttctgtcagatttggcacgtagggagagtctccaattccacttttcagcctaatgggcaggctccaatttcaagcaccgataagccactaaagcctcaagtgagagccaatgggtagctgctcgaaatgcgattgaagctggatttgatggtgtcgaaatccatggagctcacggttacctgattgatcagtttctaaaggacggggtcaacgaccgcacagacaaatacggtggcagtctggagaaccgctgccggtttgcactggaagtaactcaagccgtggtcgacgaaattggagctgacaaggtcgggataaggctgtcaccattcgctagctactcggaggcgccggactcagacccggaagctctgggcatgtacatggcgaacgcgctgaacgagttcgggattctctactgccacatggtggagccgcggatggtgaaactcggtgaaaagttcgaaaccccctacagccttcgcccgataagggacgctttcaggggaacgttcatcgttgccggcggctacggcagggaggatgggaatcgcgcgatctccactgggtatgctgatttggtcgcgttcgggcgcgtgttcttggctaatcctgacctgcctcggaggttcgaagtagacgctccccttaacaagtacaacagagacacgttttacatccctgatccggttattggatacctgactacccatttctttcgtcagatgtataaatgttctcttttcagcaatctgctttttagattgtgtagtaactggttggtgtaccagtaaaatattagacgaataaaccattggtctgaatgcctcattctcatatatatggacaaaagcaatatgatcgttgtaattgtgcctcaaatcttatagttatagttgtaaaaaaatattgtgaagaagatcagtcagttgtcaagttgtataaaaagtcagcctggttcacagaatcacaggcaacta

SEQ ID NO: 102877 - DNA, 1571 bp, Zea Mays
gaatccatctccatcctttcataacacacctgcaatcataaagagaggtgcaacgtcttctccgtgcttaccactcgccattcctaagtcctaactacctccacccccgcacgcacaactggccgcgccaaggcaaagctagaagaagacaacgcaaagggagaggacagaggaggagcagaggacgatgggcagcggcggcgctaacactgcccccctcctcaccccctacaagatgggaaaattcgatgtttcccacagggtagtcctcgcaccactgacgagacagcggtcctacggcaatgttcctcagcctcatgccatactgtactatcagcagagggcgactaaaggaggtcttctgatcgctgaggccacgggggtttcagacactgctcaagggtacaaggacactcctggcatttggacccatgagcaagtcgaagcatggaagccgatcgtagacggggttcaccagaaaggagggatatttttctgtcagatttggcacgtagggagagtctccaattccacttttcagcctaatgggcaggctccaatttcaagcaccgataagccactaaagcctcaagtgagagccaatggtatagacgtggctactttcgcagttcctagacgcttagagactgatgaaatccctttggtcgtcaatgatttcagggtagctgctcgaaatgcgattgaagctggatttgatggtgtcgaaatccatggagctcacggttacctgattgatcagtttctaaaggacggggtcaacgaccgcacagacaaatacggtggcagtctggagaaccgctgccggtttgcactggaagtaactcaagccgtggtcgacgaaattggagctgacaaggtcgggataaggctgtcaccattcgctagctactcggaggcgccggactcagacccggaagctctgggcatgtacatggcgaacgcgctgaacgagttcgggattctctactgccacatggtggagccgcggatggtgaaactcggtgaaaagttcgaaaccccctacagccttcgcccgataagggacgctttcaggggaacgttcatcgttgccggcggctacggcagggaggatgggaatcgcgcgatctccactgggtatgctgatttggtcgcgttcgggcgcgtgttcttggctaatcctgacctgcctcggaggttcgaagtagacgctccccttaacaagtacaacagagacacgttttacatccctgatccggttattggatacctgactacccatttctttcgtcagatgtataaatgttctcttttcagcaatctgctttttagattgtgtagtaactggttggtgtaccagtaaaatattagacgaataaaccattggtctgaatgcctcattctcatatatatggacaaaagcaatatgatcgttgtaattgtgcctcaaatcttatagttatagttgtaaaaaaatattgtgaagaagatcagtcagttgtcaagttgtataaaaagtcagcctggttcacagaatcacaggcaactactatgcccctgttggaatcaca

SEQ ID NO: 102878 - DNA, 938 bp, Zea Mays
tgctgcagcttgcaacaatgggcatggtttgtcttcacttggtgtagctactagaaaaccgatttcattttgttgggttaacaatatgatcaaaatacaaaatttattctctcacctaaataactcccgaactgtcctgataagaagtatgttttgaattgctcttttagatagattatctgcaaatatggttgcaagaacctttgacattgtggtatatgctgtgcaggaagctgctaattctgttgcacgaaaacgggatatgaagataagagaccgcgtgttgaggctcacccatgcaaaaccggtggacgcagcaccaaagaaaacagaagtcaagaaaaggagccgcgtgccaaaccacaaggaggtttcgacaccaggcaacaaatctaatgaaggcagtgacaaagccaaatgtaaagcatcagtgctgtcgtatcaaggcctgaggtcgagcaaatctggtgttgtgaagaaggtgaaagtgacccagcaacccagcaaccaagggaagcagaggaaaactgatgaaactggagcaactgctcgcaaagctaagcgacccgctgtggctgcaagaaaagcaaagcagctggccaagaaacgcaaggtggatgcatcaacccctgagaatacacacaggagcaagaaaccaaggaagtaagttgtccattgcgctggtcgtttgcccttgcttcgtattgtaacaggagtttcactaaatcaaatcccggacgatcttgtcagatgattgtgttactaggtagaggcaatgtgcgacctcaagtcaggttagggcaaatacaagagcgctctcgctactgtaaaccttgtaaccttatttggcacttgttttgttttactatttccctccacaaacatttgcattttactatctccggcacaaagtttcttcctaagtcaaactatcgtat

SEQ ID NO: 102879 - DNA, 108 bp, Zea Mays
ctcatgttctgtcatcattttatgttctctcattctcattcccccctccccgcaaagcccattcccattctcattcccccgtacaacccacgtctagctaaaatttaa

SEQ ID NO: 102880 - DNA, 1063 bp, Zea Mays
atccaagaaggcaaagtaccactaccacatcaaaaccaagaagtcaagactcaagaaccagcacggcaccgccgccagtccgctacatggaagccgcagcctccgcccttctcctccttggcctcagcgccagcctcgctcccttcgcctcggccgcggctccgtacgacccgccgacggtgccggagctcatggaccagttaggcctcccgcgcgcgctgctcccggagacagcccggcggtacctcctacacgacgatggcacctttgagctcttcctcgacgacggttgcgtggtagaggcggggggctaccgcgtcggctacgacatcaagctctccggcaccgtgtcccctgggtcggtcacggggctcgagggcgtccgcgtccgcgtgctgttcgcctgggtgcccatcaccggcgtcgaggcggccgacggagaggtcactgtccacatcgggccaatcaggaagtcgttccccgccgttgggttcaaatccagcccccggtgcatcatcggattggcggcggcagatatcttgcctcctttggtagaacagtagtcaggctgcctgatttgttaggatttagtcgaaatttgcggtgtcaacaagattataatttccttatgcttttctgtggcatgttgtttctgaaccctcactagtgtctgcgatagcacacaattacacgattattgtattgtttagtgtgactatttgttttctatcgaacagaaaaacgaagactgtaacatatcgtatgttttatttttcttttgttttacccaaacggaaatcatgcaccccagtttgctgtagacttgtagttcaacaagggagatgtaattttcatccacaactgcgatttggtgagtttgctgcaccaaagatcatgcactgtcatgttgaacgcggaaatggcaactaaggttattgtgcaaaagatcatgtgctttcatgttcaaggatgtgttcaggaaaaaaatagcgaataggaagaaacaaccgaaaatattaaaaatatgtattgaagatgacgaagcaactgaaaacataaaaaa

SEQ ID NO: 102881 - DNA, 1443 bp, Zea Mays
cttcccgctctcctccttcatcagtcatcacacacgcctgcggcctgcctgcctgcctgcctgagtcctgacaccatactatacctccacctccccggccctgtcctactagccgtcagaggtttgccgcctcctcgctcctcgtcttcatcaccccctctctctctcttccttcgtcctcgacctgtggccacctgtggcgtcacgctttataagagcacgcggccggcaaccatctcccttgccacccacaagtagagaagaatcttttgttgctgacgcctgagacgctggcactgccgccgcgccgtctggagagaaagagcagagggacactgaagcagaggagccgaggggtagcgacgagagacgagcgagagcggccgacggagatggaagcaggaggagcaggagcggagggggtgatgagggtgctgctggtggacgactcccccgtcgaccgccgcgtggcgcagctgctcctcagcagcaactcctgcgccggctcattccacgtcatcgccgtcgacagcgccaagaaggcgatggagttcctcggcctcaaggacggcggcaaggagcaggccatcgacatggtgctcacggactactgcatgccagagatgaccggctacgacctgctcaaggccatcaaggcgctgaacccgctgaagccgatccctgtcatcgtcatgtcgtcagaagacgagccccagaggatcagccgatgcctgaacgccggcgccgaggacttcatcgtgaagcccctgcagagcaaggacgtgcagcgcctccggaactgctccacggtcgggaggcccagcaacaagggcggcgccacgttgccgtgcgaggagaacgccgtggccaagtggagtaacaacaagctgccgccctccgccggcgccggcgccggcgccagcgccacgtcgccgtcggggcggcgggcgaacctcgccggagtcgccatgcgccaggtgctgcactcgtcgagagtggagatctcgcagtacctgccgctcctgctcaagctcgtcgtgctggcgtacgccgcgctgtgcctgggcgagctcctgcacagatggtcgtcgggtggcagctgctcgctctccccgtggtgcgcctgatcaggaaggagcaagcagcgcaaaaggccagcaacggtgcaagagcccccctgggcaccgacgacaggagactgctgatgcaccaagcattatttcagaggctccaatagccctagtcttttaatttaggtagatgagattgtctgctctgagatcctaaccggggtttcgaccgatgatgagtccccccgtggcttttgttcgttgatttgaggggccggggccgtagacgtaggaaggagaggaacggaacgaaccccttgtatcctctgctctgtatagaatgaatgaatgaacgaatgaatcagaatgcaac

SEQ ID NO: 102882 - DNA, 746 bp, Zea Mays
acaagtagagaagaatcttttgttgctgacgcctgagacgctggcactgccgccgcgccgtctggagagaaagagcagagggacactgaagcagagggcccagcaacaagggcggcgccacgttgccgtgcgaggagaacgccgtggccaagtggagtaacaacaagctgccgccctccgccggcgccggcgccggcgccagcgccacgtcgccgtcggggcggcgggcgaacctcgccggagtcgccatgcgccaggtgctgcactcgtcgagagtggagatctcgcagtacctgccgctcctgctcaagctcgtcgtgctggcgtacgccgcgctgtgcctgggcgagctcctgcacagatggtcgtcgggtggcagctgctcgctctccccgtggtgcgcctgatcaggaaggagcaagcagcgcaaaaggccagcaacggtgcaagagcccccctgggcaccgacgacaggagactgctgatgcaccaagcattatttcagaggctccaatagccctagtcttttaatttaggtagatgagattgtctgctctgagatcctaaccggggtttcgaccgatgatgagtccccccgtggcttttgttcgttgatttgaggggccggggccgtagacgtaggaaggagaggaacggaacgaaccccttgtatcctctgctctgtatagaatgaatgaatgaacgaatgaatcagaatgcaacgcgtcatccgagcacacgaacgt

SEQ ID NO: 102883 - DNA, 1190 bp, Zea Mays
attcccttctccatccacaactgtcctccacacacacccacacacgccacactgaggagccctgagccctccgcccttaaaccctagcgagcgagccagcgagaggtctcatccccaccaacaccacccatggagctccgcctctaccacctcgcgctgctgctcggcctcgtcgcctgggcggcggctgctgccacgggagccgaggcgcagccggtgtgcgacccctccatcatcgccacccagatcgcgctcttctgcatgccggacatgcccacggcgccctgctgcgagccgatcatcgcctccgtcgacctcggcggcggcgtcccctgcctctgccgcgtcgccgcccaaccgcagctcgtcctcgcccgcctcaacgccacccacctcctcgcgctctacgcttcctgcggaggacaacacaccgtgggcgctcacctcgctgccgcctgccaaggtccgtcacctcccgccaccgttcctgttatcgccccgccgccgcccgccgcgccccgcctcaagcagccaacacgcgaggcccctccccctccgccacaaagcgagaagccgtccccgtcgccccagcagcagcctggcgtcgccgccgcccacggcaaggccatccccaccagttcggccgccaacttctccacgctggcgccggccgccgcgcccacgactcccacgccaccacactctggctccgacaacgggtgcgtcgtcgtctcctccacgattgtcatcttcgtcatcgccgttatcaccatcctcgaatgagcctcacggcgccggcccggccggccgccaaccatcgccggtgcctggatagagcccgtagcagcagcagaagtcgtagtgcaactcgttttcaagatccccctttggcagtagtagtagtatcatcaccagtggtagctagtgccactaggtcatcgtagttctgttgcatctcagtatagtaacgtgatggctggtctggcgttttttctgcttggtgtcgacccatagatcgatcacttgcctggacgaagtgagtcgatctaataagagaatggactgtggccgaggggaacactgctttttttggttggttaatcttgtctccgtagttgaactatggtttcggaattcggatggatggtgatggaataaatcttggatggttcgatctggaccttattttt

SEQ ID NO: 102884 - DNA, 735 bp, Zea Mays
gctttaacttttcgcgcgctctgtttgattgatgcgagaattggactaatccgtgctgtgcataattttctgttgcgatgtttggcaggcgaggcccctccccctccgccacaaagcgagaagccgtccccgtcgccccagcagcagcctggcgtcgccgccgcccacggcaaggccatccccaccagttcggccgccaacttctccacgctggcgccggccgccgcgcccacgactcccacgccaccacactctggctccgacaacgggtgcgtcgtcgtctcctccacgattgtcatcttcgtcatcgccgttatcaccatcctcgaatgagcctcacggcgccggcccggccggccgccaaccatcgccggtgcctggatagagcccgtagcagcagcagaagtcgtagtgcaactcgttttcaagatccccctttggcagtagtagtagtatcatcaccagtggtagctagtgccactaggtcatcgtagttctgttgcatctcagtatagtaacgtgatggctggtctggcgttttttctgcttggtgtcgacccatagatcgatcacttgcctggacgaagtgagtcgatctaataagagaatggactgtggccgaggggaacactgctttttttggttggttaatcttgtctccgtagttgaactatggtttcggaattcggatggatggtgatggaataaatcttggatggttcgatctggacctta

SEQ ID NO: 102885 - DNA, 2357 bp, Zea Mays
aaaaccgcccccggttaaaaattccgaacgcatcacgcaatcgagaaaaacacaaaccgaaaaacctcctctacagtcccatctaggcgcccctcctcggctccgatccagtttcgccggcggccatgtcgcagccggcggcgacggtggccgcggcggcgcagccgcagggtcgcggccccgcggggcgccagggcggcctggggcagagcatcgcaggcatcgtgcggatggcggtgttctggtactttgcgtccaagttcttcgggcccaagcgcccacccgcggaccccgggatgctcatgtccaacctcttccagaagggcgagccaatggatatgtggatgtatttgtcagagaacgagaagttcaacgattttgctaatgaggatgcacttatttggcacgaggcaaacataccatatgcagtctggggacctaccagtactagaacacggtcattaacgtactatccgtcagaggctctcaagcataatggctctttgtatgctcatgtttacttcgccccgttcggggttatcctgtggaccctacagatccagaatatgagcagaaatcttcgtttgggaggacccatcgtatctgttgtggcattcttgccaaaatcaaaagctggtaaaaagaagagcttgcttggagattcagaagagcctgaagagaaagcaccgcgcaataaggagaataaagaatctgaggataaagatgagggtccgactgaatatatatcttattggaaaccaaatgtaacaataaatcttgttgaagatttcacacgcttgacagatctgaatgtggatccagttacgggcgattattatcctacagtattcttcaatgagttttggctattgaaggataaattaatagcgctcaacgagactgtggaggaattgcccttaaaccttgaagttggtcctattagcatgaccaagtggcaattatttttacagattgagcagtccttccaggttcatcgtagttatggaagtatgcttgaaggcgaggctgatgaactcaagagggtttttcttgaaggaaatccttatcttcttggattgactatggtcgtttctctattacactccctgtttgattttctggccttcaaaaatgatatccagttctggaacaagaacaagtccatggaaggtctatcggcaaaatctgtggttctgaattttgtgtgtcaactagttgttttcctgtaccttcttgacaatgacacttcatggatgatccttgctagctctggagttggtgtgtgcattgaattttggaagattggaaaggcaatgcatattgaggttgatagaagtggaaaaattcccatgttgaggttccgagaccgtgaatcatatgcacagaataagactaaagagtacgatgccattgcaatgaagtaccttacctatgtacttttcctccttgtggtcggtttctctatctattcacttaagtatgaaaagcacaagagctggtactcatggatactttcttctatgacaagctgtgtgtacatgtttggtttcattatgatgtgcccccaattgtttatcaactacaagctgaagtctgttgctcatatgccatggagacaaatgacctacaagttcctcaacactataatcgatgacctttttgcatttgtcatcaaaatgccaatgcttcatcgtctctcagttttcagagatgatgttatcttcttgatatacctctatcagaggtggaagtatccggtcgacaagaagcgtgttaacgagtttggcttcgggggcgaggacgaaccggcagcccaggaggctgtggaaggaagtgattcagctgcagcaccccagctaacggaggccgggtccgagacgagtacggaggacaagaaaaccaagtgatctccaatcttttgatcatccaaatacaagcatacatctctgcaacatctgccttcccagcgggcgtgaaatttctttgctgaaactggatgctggactcttgcggtcttgtcttaccgagacgtgctgaccataagataaggcgtgtaacaagggacacgatagtcttttgtctagagcagcgggcgaacaggcacacactgtcacaattacgtttccagttcgtcttttagcagccattactagttgatatgcttgtttgattggtttgtgtacaaattttgtgcatttttcttaaaacacacaattggcggctcgtagtttcatcgtgatgtgttttccctaatattagtgttgcaacgagtgtccactagtgagtgcacacaacggtgcggttctaaactgttcctcacaagaaacaattgaatccctgccaagagaagtagagaa

SEQ ID NO: 102886 - DNA, 2060 bp, Zea Mays
gagggagagaagagagcgcgcgcgcgagctgagggaatggatgtggagatgagctgcgcggcgccggaggcggcggccgtccccgtcgactggcgcggccgcccgtgccggccgcggcggcacggcggcatgcgcgccgccgtcttcgtcctaggcgtccaggcgttcgagatcatggcgatagcggcggtggggaacaacctcatcacctacgtgttcggggagatgcacttcccgctgtcgcaggcggccaacgtggtgaccaacttcgtcggcaccatcttcctcctcgccctcctcggcggcttcctctccgactcctacctcggctgcttctggaccatgctcatcttcggcttcgtcgagctctcgggcttcatactgctgtccctgcaagcgcacctgccgcagctgaagcccgcgccgtgcgacatgtcgtccacggacggcggctgcgagaaggcgagcggcttcaagtcgaccgtgttcttcctggcgctgtacctggtggcgctgggcagcggctgcctcaagcccaacatgatcgcgcacggcgcggaccagttcgacgccgccaccccgggcggcgccaacagcctgcccacctacttcaactcggcctacttcagcttctgcgcgggcgagctggtcgccctcacggcgctggtctgggtgcagacgcactccggcatggacgtcggcttcggcgtctccgcggtcgccatggcggcgggcctcgccagcctcgtcgccggcgccgccttctaccgcaataagcccccgcagggcagcatcttcgcgcccgttgcaagggttttcgtcgctgccttcaccaaaaggaagcaagtctgcccttccagctccaattctgtcaacgccggggcttgcgagccggcgcgcctcgccggcaacttccgccacaacaacaaattcaggttcctggacaaggcatgcgtcccggcagcgccgcaggggccgaacacgaagcccggagaagcgcgtggcggctgtgcacggtggccgaggtgcagcaggcaaagacgctcctcgccgtgacgcccatcttcgcgtgcaccatcgtcttcaacaccgtgctcgcgcagctgcagacgttctcggtgcagcagggcagcgccatggacacggcgctcccgccgggctcgggctcgttccgcatcccgcccgcgtcgctgcaggccatcccgtacgccctgctgctggcgctcgtcccggcctacgagctcctcctcgtcccgctcatgaagcgcctcacgggcacccggtccgggatcaccccgctccagcgcatcggcgtcggcctcgccaccctcgcgttctcgatggtcgcggcggccgacgtcgagcgcaggcgccgggacgccgccgcggagggccgccagatgtccgtcctgtggatcgtgccgcagttcctcgtcttcggcgtgtcggagatgttcaccgccgtggggctcatcgagttcttctacaagcaggcgtgcgccggcatgcaggccttcctcacggcgctcacgtactgttcctacgcgttcgggttctacctcagctcggtgctcgtctcgctggtcaacagggtcacggcgaggcacggtggcgctgggtggctcggagacaacaacctcaacaaggataggctggacctcttctactggatgctcgccgtgctcagcgtgctcaacttctgctgctacctgctctgtgccaggtggtacaatgctggcgcacagggttccgatgcagctgcctctggtctggtggcatctgaggttgatgatcgcaaggagatcatctgaacaactcaggaagagattgaaactgtatatgtctaattccatctatagactatagctgtatgtatacatgcatgcatgagaaatagtgaccagaaaatgagcactaggataaaattaagacctctcatttggatcaataggatgtatagtgttttaggcaacttttttaacggagaaaacctctttctattacgaattaagtagaggttcaacataatctccacgtcgattctcacgtcacgagacgag

SEQ ID NO: 102887 - DNA, 2096 bp, Zea Mays
atgccatgccgccgggtaggttcgtagtcgtactacacgcgcggccggccaccactagcaagtagcaaagccactccctctctctctccaagtagatcgagcaactacacgtgcgaaagggaagttgaaagcgccatagcgacgctacttttgcaattgactgttttctaacaagtagaaattaacccttaaaccccgcaaatcgaaagcattttttcccagttctcttctttttttttttgacaaaagacgtcaagtattgttcttgtttcaatcaagaaaacagagtatatttttttggggtggagcatgccatagtaatctaatcctacaggagacacagacgacgaaagcttgcgtttctctgatctctatctatggtctgtgtacgatgttgctctttaccagggcttcatactgctgtccctgcaagcgcacctgccgcagctgaagcccgcgccgtgcgacatgtcgtccacggacggcggctgcgagaaggcgagcggcttcaagtcgaccgtgttcttcctggcgctgtacctggtggcgctgggcagcggctgcctcaagcccaacatgatcgcgcacggcgcggaccagttcgacgccgccaccccgggcggcgccaacagcctgcccacctacttcaactcggcctacttcagcttctgcgcgggcgagctggtcgccctcacggcgctggtctgggtgcagacgcactccggcatggacgtcggcttcggcgtctccgcggtcgccatggcggcgggcctcgccagcctcgtcgccggcgccgccttctaccgcaataagcccccgcagggcagcatcttcgcgcccgttgcaagggttttcgtcgctgccttcaccaaaaggaagcaagtctgcccttccagctccaattctgtcaacgccggggcttgcgagccggcgcgcctcgccggcaacttccgccacaacaacaaattcaggttcctggacaaggcatgcgtcccggcagcgccgcaggggccgaacacgaagcccggagaagcgcgtggcggctgtgcacggtggccgaggtgcagcaggcaaagacgctcctcgccgtgacgcccatcttcgcgtgcaccatcgtcttcaacaccgtgctcgcgcagctgcagacgttctcggtgcagcagggcagcgccatggacacggcgctcccgccgggctcgggctcgttccgcatcccgcccgcgtcgctgcaggccatcccgtacgccctgctgctggcgctcgtcccggcctacgagctcctcctcgtcccgctcatgaagcgcctcacgggcacccggtccgggatcaccccgctccagcgcatcggcgtcggcctcgccaccctcgcgttctcgatggtcgcggcggccgacgtcgagcgcaggcgccgggacgccgccgcggagggccgccagatgtccgtcctgtggatcgtgccgcagttcctcgtcttcggcgtgtcggagatgttcaccgccgtggggctcatcgagttcttctacaagcaggcgtgcgccggcatgcaggccttcctcacggcgctcacgtactgttcctacgcgttcgggttctacctcagctcggtgctcgtctcgctggtcaacagggtcacggcgaggcacggtggcgctgggtggctcggagacaacaacctcaacaaggataggctggacctcttctactggatgctcgccgtgctcagcgtgctcaacttctgctgctacctgctctgtgccaggtggtacaatgctggcgcacagggttccgatgcagctgcctctggtctggtggcatctgaggttgatgatcgcaaggagatcatctgaacaactcaggaagagattgaaactgtatatgtctaattccatctatagactatagctgtatgtatacatgcatgcatgagaaatagtgaccagaaaatgagcactaggataaaattaagacctctcatttggatcaataggatgtatagtgttttaggcaacttttttaacggagaaaacctctttctattacgaattaagtagaggttcaacataatctccacgtcgattctcacgtcacgagacgag

SEQ ID NO: 102888 - DNA, 382 bp, Zea Mays
ggaaggtgttgatcccatgcattgtgttatattgccacatgcacacgtgaaaagtgaagccacgtcgcacaaacagcacagaggagagaccgtcatctccacaaaagccacaaattccttattcagaacattaaaaaggaaaaaaatactgacgcatacaataatgataaattgtccgacgtttcataccgtatgtttatcagtttatatatatatgcgcttgtataaatactcgctcaggcttttgctgccttaaatttatatgaattatttcatgcagtttcttcagcgctattgcagcggctttgctggagcagtattgcagcagacttgagtctgccaacgatctcctccgccgtgactgtgaatccttcgtccacct

SEQ ID NO: 102889 - DNA, 1747 bp, Zea Mays
tctttccccctcccatcgctcgggaaggcgaagggtcaaggcgtctggcacttcagcttgtcccgcttgcagcttgctcctggagtcctggttgctccgtcttctccggtcgggctcttgtccgacgaacgtgtggctgtggcactcgaggaagtacactgagcagagcattccatggagctcgaggcgatcggaaagcgactccgtataagcagcggcagcagcagcttggcccgcgacaggctgacctccctgccggattgtgtcatccaccacatcatgtccttcttgagggcccgtcaggtggtgcagacctgcgtgctgtccaccaggtggaggcacctctggcgctctgtgccatgccttgacattgaccaggacgagttcaaggccgccggctcgaaccgcatcacagagaaggaacgggagcacttcgaggacttcaccgaccacctgcttatacctaataatatttccattgcgctcctggatacacttcgtctgcatgttagcgatgatgaatattatcatcgtggagcatcagttagatggatccgtcatggcataaagtacagtgcccagaatcctggcattatgcacaaggaatcgaacttagccttttggcgcctcaaaaaactacacctctccggtgtatatctggatggcagtttcatgaagcatgtcagttcagggtgcccgtatttggaggttctcgagctcaaagattgcccgtgcacatttgaagaggtcacatcccacacactgaagaacttgattctggaaaattgcggatgcaatgggctttatgggattacaattacatcacccacgctgaagagtttaacaattattggtagtgaatattacaacacaattacgctggttttgaaggcccctgctgttgcttatctgctcctggatgtgattgcttattttgttaaattcggtgtttcatttgatgagatgtcatctcttgccaaggcttcaatttatctaagggactgtgtaggaagtggactcagcaagcaccaattcaagcttctttgtagtgtgtttaatgtgacaactttggtgttgtcaggtttccagacaatggtgatcagtgaagaattcccagaattccgtaaccttttgaccttgttattggaaaaatgtgatcttagtgataacttccagatgttggcaaactttcttcagcattcacctgatttggagaagctcactttgggccgttgcaagttctcaaaagatcccaagaaaaagaaaggaaaagccagattgagcaaggggtgtctgaaccagtttaacgtccggtgcaagaacctcaagcttactgaaattatctatgaagacgacgatgcgaaaaaggtggtggaacttttgtggagcatgtcaggggacctgcccaagaattacataaaactcaccaaggttgacccggatcatccttagtccaggtcatctggcacttggtcacacagtggcttctatgaactttgcttgcatgcctcccctgtgtttagacgtccttagttgaactgctgggcgtgttcttttggactcatttctagataatttagttctacgagctatggtacttattttgtgtggtctgcagctcgagactctagtccttatggtgtaagcttgcatgcttcaaagggaacagaaaattgcatgtttgcttcgtttccttgtatatccggtttcaagtttggtggatgcaggctgtttcgtatttttgttg

SEQ ID NO: 102890 - DNA, 1765 bp, Zea Mays
tctttccccctcccatcgctcgggaaggcgaagggtcaaggcgtctggcacttcagcttgtcccttttgcagcttgctcctggagtcctggttgctccgtcttatccggtcgggctcttgtccgacgaacgtgtggttgtggcactcgaggaagtacactgagcagggcattccatggagctcgaggcgatcggaaagcgactccgtataagcagcggcagcagcagcttggccggcgacaggctgacctccctgccggattgtctcatccaccacatcatgtccttcttgaaggcccgtcaggtggtgcagacctgcgtgctgtccaccaggtggaggcacctctggcgctctgtgccatgccttgacattgaccaggacgagttcaaggccgccggctcgaaccgcatcacagagaaggaacaggaagacttcgaggactttaccgaccacctgcttatacctaataatatttccattgcgctcctggatacacttcgtctgcatgttagcgatgatgaatattatcatcgtggagcatcagttagatggatccgtcatggcataaagtacagtgcccagaatcctggcattatgcacaaggaatcgaacttagccttttggcgcctcaaaaaactacacctctccggtgtatatctggatggcagtttcatgaagcatgtcagttcagggtgcccgtatttggaggttctcgagctcaaagattgcccgtgcacatttgaagaggtcacatcccacacactgaagaacttgattctggaaaattgcggatgcaatgagctttctgggattacatcacccacgctgaagagtttaacaattattgctagtggatattaccacataaataggctggttttgaaggcccctgctgttgcttatctgctcctggatgtgaatgcttattttgttaaacgcgatgtttcatttgatgagatgtcatctcttgccaaggcttcaatttatctaagggacagtgtaggaagtggactcagcaaggaccaattcaagcttctttgtagtgtgtctaatgtgacaactttggtgttgtcaggtttccagacaatggtgatcagtgaagaattcccagaattccataaccttttgaccttgttattggaaaaatgtgatcttactgacaacttccagatgttggcaaactttcttcagcattcacctgatttggagaagctcactttgggccgttgcaagttctcaaaagatcccaagaaaaagaaaggaaaagccagattgagcaaggggtgtctgaaccagtttaacgtccggtgcaagaacctcaagcttactgaaattatctatgaagacgacgatgcgaaaaaggtggtggaacttttgtggagcatgtcaggggacctgcccaagaattacataaaactcaccaaggttgacccggatcatccttagtccaggtcatctggcacttggtcacacagtggcttctatgaactttgcttgcatgcctcccctgtgtttagacgtccttagttgaactgctgggcgtgttcttttggactcatttctagataatttagttctacgagctatggtacttgttttgtgtggtctgcagctcgagactctagtccttatggtgtaagcttgcatgcttcaaagggaacagaaaattgcatgtttgcttcgtttccttgtatatccggtttcaagtttggtggatgcaggctgtttcgaaatgaatcttcgagttcatttcgtatttttgttg

SEQ ID NO: 102891 - DNA, 1704 bp, Zea Mays
aatctactagtatagcaatgctagatcacgtgttcgaaatcattcgtgtgtctcttctgatccagtagcgctagagcatcttatctttcagattgattgagatttcgtgtgaatggatgagttgggcaaacgaggattttcatttttactgtatccgcattttggccatctacagaggaagtacactgagcagggcattccatggagctcgaggcgatcggaaagcgactccgtataagcagcggcagcagcagcttggccggcgacaggctgacctccctgccggattgtctcatccaccacatcatgtccttcttgaaggcccgtcaggtggtgcagacctgcgtgctgtccaccaggtggaggcacctctggcgctctgtgccatgccttgacattgaccaggacgagttcaaggccgccggctcgaaccgcatcacagagaaggaacaggaagacttcgaggactttaccgaccacctgcttatacctaataatatttccattgcgctcctggatacacttcgtctgcatgttagcgatgatgaatattatcatcgtggagcatcagttagatggatccgtcatggcataaagtacagtgcccagaatcctggcattatgcacaaggaatcgaacttagccttttggcgcctcaaaaaactacacctctccggtgtatatctggatggcagtttcatgaagcatgtcagttcagggtgcccgtatttggaggttctcgagctcaaagattgcccgtgcacatttgaagaggtcacatcccacacactgaagaacttgattctggaaaattgcggatgcaatgagctttctgggattacatcacccacgctgaagagtttaacaattattgctagtggatattaccacataaataggctggttttgaaggcccctgctgttgcttatctgctcctggatgtgaatgcttattttgttaaacgcgatgtttcatttgatgagatgtcatctcttgccaaggcttcaatttatctaagggacagtgtaggaagtggactcagcaaggaccaattcaagcttctttgtagtgtgtctaatgtgacaactttggtgttgtcaggtttccagacaatggtgatcagtgaagaattcccagaattccataaccttttgaccttgttattggaaaaatgtgatcttactgacaacttccagatgttggcaaactttcttcagcattcacctgatttggagaagctcactttgggccgttgcaagttctcaaaagatcccaagaaaaagaaaggaaaagccagattgagcaaggggtgtctgaaccagtttaacgtccggtgcaagaacctcaagcttactgaaattatctatgaagacgacgatgcgaaaaaggtggtggaacttttgtggagcatgtcaggggacctgcccaagaattacataaaactcaccaaggttgacccggatcatccttagtccaggtcatctggcacttggtcacacagtggcttctatgaactttgcttgcatgcctcccctgtgtttagacgtccttagttgaactgctgggcgtgttcttttggactcatttctagataatttagttctacgagctatggtacttgttttgtgtggtctgcagctcgagactctagtccttatggtgtaagcttgcatgcttcaaagggaacagaaaattgcatgttt

SEQ ID NO: 102892 - DNA, 3866 bp, Zea Mays
attttgagctggaatgtgtgggggctcaatgaagtggccaggcgtgattctgtgcaagaactagttcgggatactggtagtatcattgtttgcttgtaggagactaaactcactacaatcgatgacgcaaccatccttcgtaccttgggtcagaattttctaaacaacactgctgtgctgcctgcaaatggatctaggggtgggattctgcttgcagcttcgaatgactttttatcactttcgcaagtgtacaccacctcacacattgtctcggccatgatcactatgaaggcagacaattcagcttggtggatcacaggggtttatgggccacagtcgagcgctgagaaacttgttttccttcaagaactaattggcctcgcagcacaatgttggacaaagtggttggccttaggagatttcaatctcatatatcaagccttagataaaaataattgtaacttgaatcggcgcctcatgggcgcgttcaaatcagcactggacaacctatagatgaagaaaatccacctcaatggccgccgctacacttaaagcaacaggcaagtgaatccaacgctaacaagaattgacagatttttctgtacaacggaatgggagctgctttttcctagctgctatatgcactcccttccctccctcatgtctgaccacactctgcttctcctccagggagaattgacgatgacacatagcccctctttccgtttcgaaattttttaggtaaagatggagggattcatggaggctgttctggctgcctggctgaaaccacttcattcctcctttacacccatgaagcgccttcatatcaaattagcgcgtgcagcaaaggccatcaaactatggcataagaccaaagtgggagacacgagattaaagcctgcaatttccaaagaattaatcctccgattcgaaactgctcaagagcagcgtgtgctcacccaagaggaactggatctcctgaaggcactcaaagccagagcactaggacttgctgtaattgaaaaatcgaggatccatcaatgggctcacctcactcacattaggttgggcgacgcgaacactaagttcttccacctatctgctagctccagagcgcgtaagaacttcatccattacctgcagccccccaattggaaacttagcggtagcccatgaggaaaaagaaaagatcattcaagaacacttcaaatctcacctagggacaaccccggagagagggatcaccctcaactggacggctctagctttagcgcagcatgacctctcatcgctaaaagcgtcgttctcccttgaagaaataaaggaaacaatcttctcaatgccgagcgacaaagcaccaggcccggatggctttacatgtttattcttcaaagtattctaggatatcatcaaggaggacgttcttgaggcttttcaccaacttcatagcatgaatggggcggattttcgtttactcaactctgccaacatcgtgcttatccccaagaagccggatgctttgacagtgggtgactaccgccccatcagtttgatacacaacatcgcaaaaatcttctccaaactgcttgctaaccggctgccccctcctcaacactctaatctccaagtcccaaagtgccttcatccagaaaagatgtatacaagacaacttcctttatgtgcataacgtagttagaagactacacaagccaaaaaaaacggcgctcttcctgaagcttgacatctagaaggctttcgacacaattaattgggattatctcgtggaagtcctccagaccatgtgttttggccctcgttgacgcaagtggatttccatcctttttgggtccgcctcgtctcgagccctcctcaatggccgacaaggagcaaacatccagcacaggagaggggttaggcagggagaccccctttcctctatgttgttcatccttgccatcgatccgctgcagcgtatcctggaccttgcagccagaaatgggatcctttcccccattccgctaactacagcaaaactgaggacttatctgtatgccgatgatgctgctgtctttatcaacccctctagagaagacctcctggcggtcaaagacatcctgcacgcttttggctgtgcctcgggcttggtcaccaaccttgagaagagctctatccacccgataagatgtgataacattgacctagaccacgtgctccagccgttccaagggacccgagggaccttcccgtgtcgttacctgggcctccaacttcacaaccgggcgctccaaagaattcatgtccaacctctcattgagaaaatccggaaccgtctggacgaatggaaaggaagcatgctcaatcgggttggtcgtctcacgcttatgactttcgtcttgtccgctatgcccacataccacttgtcgggctttcccctcgcaacatgggcccgtaaacgcatcgataggatccgccgctcctccctctagagaggaaaggctgaatcaaatggaggccattgtctcgtggcttagccactagtcagcaagcccaaaaccctaggcggtctgggcaacctcaacctcaacaaattcagttgtaccctccggctaagatggctttggaagagctggacgacaaaggatcacccttggaaagggtttgatgtgccttgtaaccttgtggacaggctcctctttagcgcctccaccatcgtcaccgttggagatggcaagacaaccaaattctggcacgacagttggcttgatggcatggtgccaagaaacctagcaccacacctcttcgagctagtctcaagaaagaacaagtcagttgccattgagatcaatgacgggaattggattaggtcgttgcgaggcaagattacctccacggtgcagatcgaggaattcgtctccctctggtttagactccatgatttccatctccaaccacaggtgccggactccaatacctggaaatggaaccccgacggtgtcttcgtggtaaaatcagcctacaatgcaaaattcatcggatcgtacagccacattaattctgattttgtttggcgggcacgggcagagcaaaagtgcaagatttttgcttggattcttctacaggacaagctccttactgctaacaatcttgccactcgtgttggccgcaccaaccaaactgctccctctgcaatggccccttggagactggcccccacctctgtttgcattgcccttttgtccgtgtggtgtggcatcagattctagtttgggagggcttgagcctcctggcctaggctgaccctactcacttctccaacataaaagactggtgggaagctacatcctccccgctcccaaagaaccaaaagcgtgacttcaacggcctcatgatatacaccatgtggaacatctagaaggagagaaaccagaggatattcgaaaatagcgccctcacccctatccaattagccttgaagattaaagaggacgtgttcactttcaagagagccatgttcctccagtattagggttgttgcagtggtttagctgatttgtgtgaggctgctggtatagatgtccaaatggaccgagcttgccgggtggcccgaaacccggcacgaatccggcacgacacgtagtgaaccgggcccgtgctagcctggcccggtcaccgggccgtgcctgggtcgaaggcgtggcacgacgggctaggtccgacacgacccgattttatttttttctatttttttcatataaatacatatattatacttgaatatagagtataaaacacaagaaacatgtgtttttgttggttatgtgggtgtaaataaatgtttagagctaataaatatggtttaaacc

SEQ ID NO: 102893 - DNA, 1114 bp, Zea Mays
atttggcaggttttacatgaacatggcataatcattgtaaagacccttcgtacatcaaaagcaatgtatgacagtaatttggcaccacatctaactcagggtagtcactggctttcagagccttgtgtttctggaagaatgactgttgatgaaatgaatcacaaggctggtaactttccctgtgcacacactgtacatacagaaaaacaggcttattctgtaattactccttggatatctccagatataccgttatatgtttctagacctgaagaaagttagttgcgcaactccaactgcaaatagttccataaaaaaggatacaagtcttcctgtgatgccacattctgtgtcacaagggcaagataactccaagtatttgtctaacagaacaggcagggtagctgggctaccatatcagtttttatccctttcagggcaaaaggaagaggcacaaaatagtcaaggtcatgatgataagcaaatgaataccaaggatgctaatttagttggataccctcagagtgatgaagaggaacatcttgatttcacatccctttcatcctttgaaaaagtagaaggtcatcttaattttgttcccctggccagctactgcaatttacttgaaccagggaaggtgattggattcaccaactctaatgcagggatctcttatttgccagcaggacgctttgctccagttggatgtttaagggaagttccagtgagtaaacaagtgaaatctgtgaaggtccatgatggtggctggaacatttctaacatactaaacaaagagaatccagataacttcgctccagtaaagagagggggatcgaagggcacgaaggatacattagagtacttgaggatatacaacagtttcttaattgatggaaggtaacataatttatggataatcattgtggcacttttgtgcttggagctgtggttaactctatacacaatgtcattgtggcacttttgtgcctggagctccggttaattgatggaagttttctggtttaaacatccatttggtatttttaggttgaaggactgcgtggatttgttagaaagcatggaacaaaatggactgcttgatatgaggaaggta

SEQ ID NO: 102894 - DNA, 333 bp, Zea Mays
atggctggctacgccactcgtcggaactggccgtcggcctgggcgaacgccgccggtaccggggcacgagcggggagtcgggtggggctcgcgaccgcgcctgaagcaggggcagggggcaccgtgcagcacaacggtaggagaagtctgcggctacacggcgaagagaatgaagaacgggaagaaaaaacaatgcagatatcgttagagtggaggagaaaactaccgattgccgataaattggaggttcgattgacaaatttaaaatatcaagatggagccttcgacgatactaacacagcggtattcttagattttgttaacatcgcatag

SEQ ID NO: 102895 - DNA, 3431 bp, Zea Mays
acccaaacccccaacctattcgagcgacgaaactggaaaaaagcacgcgacgacgcgacggtgaaggggaagtgtgaagggaagcagaagcgagacaaatccccacccggctccaaaccctagccacctcccccgtcccccccttttcgtcccccagatctcgctggcgtctgctccgcctcgcttcgatgtgaccccaccctagggtttgagacggtgttgcggtgtgtgcgtgtgtcgcggcgattcgcgacgcgagtaggattcgaggtgtcggcggcggtgcgagcgcaaatgaaggacccggcgcaccgcacgaaggtggtgctccggcggctgccgccggcgatcgcgcagcaggccgtcgtggaccaggtcgatgcgcgcttcgctgggcggtacgactgggcctgcttccgtcccggcaatgccagccaaaagaatcataggtattctcgactttacctaaatttcaagcacccagaggatgttgttgagtttgctgaggtcttcaatggacacatatttgtgaatgaaaagggtgctcaatttaaagctttcgtggaatatgcaccatcacaacaggttcccaagtcaaatgtcaagaaggatggccgtgaagggactgttacgaaagatcctgagtacttggagtttcttgagtttatttcaaagcctactgagcatctacctagtgctgaaattcagcttgaaaggaaagaagccgaaagggcagctgctggaaaggaggcacctgttgtgacacctcttatgatgtatgtccgccagcaaagggcagctaagagtatggctcagagacctggaagtaggcttagcagaaaagttgcaggtgttgtaactagcagttccagtcctaaaaggtcttttgagaagcgcagatcctccacgtatgttgtacgagacagtattaaggagaaaccgacctatatcatggtgccaaagagagaggagcatacacaaagggaaaaaattgtttctggaaattcaggtgatgccacaagtgggggggcatctggatctggtcagtcttctgacaaaattgtcattttgaaaggaagaggaagggttgattcgaacacacctgatggagcagctcaacagtcatcaacccctgtgaagaatataccaccatcgagttctagactagacaagcgatctgaagctaatggaagaattattaaaactgttctttcaaacaaggaagttcgcagttcaaatccatctcaacatgagcaggaaggtcaaatgtttaatactgagaaggataagcgtccaccacgggctctcaaccctcggactattgtgaaagatcaggtagttgaaaatgctgagagaagccattttgatgagaagaataattatctccacagctctgctccaattggtgagaaggttgaaaggcatgccagaaacagagatagacctgatcgcagtgtatgggcacctcgccgctatgacaaatctccgcctgggggtgtttcacatgccttgtcgtcagatttttctcaaatgcagtcacattctggagataatgtctcacaactaacagatggtcatggagacagaaagacagacacaaggggtcatggaggtagccgtggtgttcctgttgaaaatggacataggcatgccaaccgtcgtggtaccccatgtgatccaaaggaaaccaaaatatctgctagcgtgcctgatggaaagaattcaaagaggggctctgctagctatggtgctcatgagagacaagtatgggttcagaagtcaagttcaggctcgtgagtttgtccattgatggtatgatgtgctactctagtttattcattcattgtcttcaagcccttctacaaatagctataacactacagtgatccttgtcagcgccataagttgtacattctgctgcttataatattttttgtggaacattgctggtggaatagttgaatccatccctgaagtctcttctcaaaggtctatttgcagcaagtttcattgttggctcaataggatggtctctgcgtacatgctatgagtcttttctaccacatagttaaatgattcctgttagatgacacaacttactaagttgctcttgttccatgcattataccaggtatgtggtaactaggtgacatacctacttatttgtacatatttgtttttttagatggtacaactcgctaaattgctcttgcatactgaattaccagtctaaatctattcttttagacttcgcatcattcccagatatggggcaaatgagagatttcacacatattgacacctaggccacttactgctgactaggtgcatacatggtgctccacattagctaggtgacctgattgagccaaagacaactttgtgggacttggtttaaccatttagaaccttagggaagaaagtgaatctgtagtggaacttcagggaagaattcaccattctttcaacattgttaatgaatgccatttttccgaaagtggtcttgaattatctggaatctccaccagtttcccgctaaattgttaactcttgcagatactcccataaaaaacaggtattgaagtcgtggagaagtcttggattctgcagcgcattcttctttgttagctgttgatcctgtgaagtatggtaacgaaatgtccaatggtcaaatgctaccatgaagtgcaatctcagatctgtcagtcgaagtctcagctgaaaagagggctcggctgatttgattcacagaaatagtgaagtaacataacccggcatgtaggtagctctccgacaactttgggcaagatttgatttatgcccaatgttgatctttctggagcattggatggagattaggttggcatcactacctcattacctcgtgatagtggtcacatatttccaagacccctggaggttacacgcaccctcggcaattcgtcagagatggatgtaaatatctctagagaaagaagaggtctggttccgattgctgtttacaggttagaggtgcaacgtatttacaaagagagataagagttatcacttatcagattacctggtttgttaaataaaggtgaatttagctactagattatgagaccccgtgttttgacttctgcaatcgtggttcacgacagcagaaaggttacctaggagtgtaaaagtgacatctcattttgatgctatggttctgactcaatgggatgtgactttgtgatgtggttttgtcgcctggtgtgtgttttgctgccatgttcctccaaatgacccgggtgttctgtcgtgttagggatgatatgcttggtgtacagcatcaaaggtgcttaatgttttaaatcttaaaagtgatgttgcctggctttaatggttgatgatgtccgttctcctgtgcatttcgtcatgaaggttaaaaatatagatttgcc

SEQ ID NO: 102896 - DNA, 1233 bp, Zea Mays
ccaaacccccaacctattcgagcgacgaaactggaaaaaagcacgcgacgacgcgacggtgaaggggaagtgtgaagggaagcagaagcgagacaaatccccacccggctccaaaccctagccacctcccccgtcccccccttttcgtcccccagatctcgctggcgtctgctccgcctcgcttcgatgtgaccccaccctagggtttgagacggtgttgcggtgtgtgcgtgtgtcgcggcgattcgcgacgcgagtaggattcgaggtgtcggcggcggtgcgagcgcaaatgaaggacccggcgcaccgcacgaaggtggtgctccggcggctgccgccggcgatcgcgcagcaggccgtcgtggaccaggtcgatgcgcgcttcgctgggcggtacgactgggcctgcttccgtcccggcaatgccagccaaaagaatcataggtattctcgactttacctaaatttcaagcacccagaggatgttgttgagtttgctgaggtcttcaatggacacatatttgtgaatgaaaagggtgctcaatttaaagctttcgtggaatatgcaccatcacaacaggttcccaagtcaaatgtcaagaaggatggccgtgaagggactgttacgaaagatcctgagtacttggagtttcttgagtttatttcaaagcctactgagcatctacctagtgctgaaattcagcttgaaaggaaagaagccgaaagggcagctgctggaaaggaggcacctgttgtgacacctcttatgatgtatgtccgccagcaaagggcagctaagagtatggctcagagacctggaagtaggcttagcagaaaagttgcaggtgttgtaactagcagttccagtcctaaaaggtcttttgagaagcgcagatcctccacgtatgttgtacgagacagtattaaggagaaaccgacctatatcatggtgccaaagagagaggagcatacacaaagggaaaaaattgtttctggaaattcaggtggtatgcttgtaccaaatcaagaaattgctaatagtaatacttttgtttttttaactatctctccatgtatgtctaacgctaccaagtattactgaggattttttttgctaccacttacccctgcctatagtgctgctaaatgttgtatctagtgatgtatggactattgcacactgtgttgagggtggataacgatccaactgctgttttttagctttcttcg

SEQ ID NO: 102897 - DNA, 1526 bp, Zea Mays
gcggcggtgcgagcgcaaatgaaggacccggcgcaccgcacgaaggtggtgctccggcggctgccgccggcgatcgcgcagcaggccgtcgtggaccaggtcgatgcgcgcttcgctgggcggtacgactgggcctgcttccgtcccggcaatgccagccaaaagaatcataggtattctcgactttacctaaatttcaagcacccagaggatgttgttgagtttgctgaggtcttcaatggacacatatttgtgaatgaaaagggtgctcaatttaaagctttcgtggaatatgcaccatcacaacaggttcccaagtcaaatgtcaagaaggatggccgtgaagggactgttacgaaagatcctgagtacttggagtttcttgagtttatttcaaagcctactgagcatctacctagtgctgaaattcagcttgaaaggaaagaagccgaaagggcagctgctggaaaggaggcacctgttgtgacacctcttatgatgtatgtccgccagcaaagggcagctaagagtatggctcagagacctggaagtaggcttagcagaaaagttgcaggtgttgtaactagcagttccagtcctaaaaggtcttttgagaagcgcagatcctccacgtatgttgtacgagacagtattaaggagaaaccgacctatatcatggtgccaaagagagaggagcatacacaaagggaaaaaattgtttctggaaattcaggtgatgccacaagtgggggggcatctggatctggtcagtcttctgacaaaattgtcattttgaaaggaagaggaagggttgattcgaacacacctgatggagcagctcaacagtcatcaacccctgtgaagaatataccaccatcgagttctagactagacaagcgatctgaagctaatggaagaattattaaaactgttctttcaaacaaggaagttcgcagttcaaatccatctcaacatgagcaggaaggtcaaatgtttaatactgagaaggataagcgtccaccacgggctctcaaccctcggactattgtgaaagatcaggtagttgaaaatgctgagagaagccattttgatgagaagaataattatctccacagctctgctccaattggtgagaaggttgaaaggcatgccagaaacagagatagacctgatcgcagtgtatgggcacctcgccgctatgacaaatctccgcctgggggtgtttcacatgccttgtcgtcagatttttctcaaatgcagtcacattctggagataatgtctcacaactaacagatggtcatggagacagaaagacagacacaaggggtcatggaggtagccgtggtgttcctgttgaaaatggacataggcatgccaaccgtcgtggtaccccatgtgatccaaaggaaaccaaaatatctgctagcgtgcctgatggaaagaattcaaagaggggctctgctagctatggtgctcatgagagacaagtatgggttcagaagtcaagttcaggctcgtgagtttg

SEQ ID NO: 102898 - DNA, 2024 bp, Zea Mays
cagcgagggccgagcgcccgcccgagtcccgagagggctttggtttcgtcgtcaatcgtcatccattcccaacccaaacactctccgtccgtccctcctctcctgttccctccccgagtcgatatctcaccgtcgtgcgagtaaaacaaagcctcgccgccacggcgccacgcgagcaaagacctagcgcgagcaagcaagggaggcagagaccttagtgcgtcgcgcaacgcggctcggcccgacggcatggagagcctcgtcctcgcctcctcctgctccccgtccccacggctgccgctactctccccctccgcccgcttccgccggctgcccggctccatgccacaggcgccggcgtccaccagcggtgccacgcggaaaggtctcaggaggcacatgctcttcgtcgccgccgccaccgcgactccttccggatccaggaacgttttcaaggaattgagagcaaaaggctttgcaagcatgtcatcttcgactgccaatgagaatatgtctactgaaactggcaccctgcctcccatgcctcccccatcatcatacattggttcgcctgttttctggattggagttggtgtagcattgtctgtggcgtttaccacggtttcttccatgctaaagaaatatgccatggaacaagcatttaagtcaatgatgacccaagcaccaccaaactcatttggctccaactcgcctttcccatttggcatgccaccacaggcatctcctactgcaccaagcagtttttcgtacttggaaccaaggaaaggtacctccccacaggtgtcaactgttgatgtctcagctaccgaagtggatgccgctggaacatcgaaagaggtggatgtgactgagacaccaaaaccttctaagaattttgcatttgttgatgtttctcccgaagatttgcagcaaaaggacctccaatcttcactggagatggtagatgtaaaacatgatagtacagaaagtgaaagtaaggaggatactgaggaaaaggctcccagaaatggagcgacttttaagctgaatgaagatgctgctcgtgggccaactgaatccagtcaatcaggacctatgctatctgttgagacaattgagaagatgatggaagatccagctgtgcagaagatggtttatccctacttgcctgaagagatgaggaacccagattcgttcaagtggatgctgcagaatccaatgtaccggcaacaactacaggatatgctaaagaacatgggtggatctcctgatcaatgggataaccgtatgcttgatcacctgaagaactttgaccttagcagtccagaagtgcggcagcagtttgcgcaagttggcatgactcccgaggaagtggtatcgaaaataatggcaaacccagatgtagctgtcgcattccagaacccaaaaatacagacagccatcatggactgctcgcagaaccctcttaacattgtaaagtaccaaaacgacaaggaggtcatggatgttttcatgaagatatcacagatctttccccaaatcaacggctagctggtcttcactgcgggattgcagtcttgattttttttgtcggcctatcatcccctgtgtctggagggcctgctgcggtaaccatctttgaaggaaaagggaacacctgttgctgttgggccgtgacgctctggatacaccctccctgtgtcgagctttttgagtttcatatgtagtagtacatcgtgtgatgtagcggccttggtctagctatgagtatgattgacccaccctcttcccgcttcataaagtcaggctagtgagcgtagcaggggcaaatatttgttatttacattgcatgggcagccagccggtctgcgctctgacgttgcatggtttatctcgtaggatgtgaaaggcgcagcagacagacatggttcgtatcagatcaattttgatatatactaattgctattgttagtgtgtaatacgtcagtgacacaatggcaatgcaagtaatctgtttcgagact

SEQ ID NO: 102899 - DNA, 273 bp, Zea Mays
atgttatgtcgccggtgtgcttgcctgcgggtcgcccatgatcttttgttggctgctttgtgtagtaggttgttgcctgggcagtggtgttggtttctttggctggcattatctgtgtctctgtctatcttattttctgttgtaagacgctggttattcgcttatgaaagtatgttatggacggtggaagactggttggttcctgtcctcctttcctatcctgtgtacctcatgtgtgacatttatttaagtaggggagctgtttttgattaa

SEQ ID NO: 102900 - DNA, 2760 bp, Zea Mays
ccccgtgctccttaccattctccttcctcgcgccacaatggtctacacaaccacctctccctcttctcctccccgagcctctctcccaatccaatgtctccacctccacctcgccgccacctcctgagcctcctcgctttggtcgctttcttcccaccgttcctcctcgcctcctcctccttcccgcttcccaccatcgccatagccgccgtgagcgccaacaccagcgcctccccgcacaacctcgcatgcgcgctcgtccccttcgggaacgggacggactacatgatctcctgcgccagcgtctccaaccgctccgccgagccccacatctactcttacggcggcgccggcggtggaagcacgccgttctccgccgtcgtcgccggagatgggtacctctgctctgccggaccgactgtttccccgccgatggccatgcggtggtgggacctgacagacagcgaggagccgtccaagcgggtgtactggggcaaggcgctgtcagcggtgtccggcggcggagagtacgtgtgcgggctcgtggaggagaggatacagtgctggaggtggtcttcggggacgtttccgcagagcctgcggttctcggccgtagcggcgggcggcgggttcgtgtgcgggctggcgaaagactccggcgaggtgaagtgtttcggcggccgagaagccgtggggcgagagccgaaggggagccatgccatgctcgccgcgggagagcggcacgcgtgcgcggtgaaggcggggagcggtgaggttgtgtgctggggtgaggcggcggcggtggcggccgcgtcgccgacggtagcggggcgttcggtttcgtcgctggcggtgggagacgcgatcacgtgcgtgctgtgggggaactggacggtcgcgtgctggccgccggaggaggcggcgccgccgcagccggtggcgcagcagcagtttgtcgcgctggaggccagggggaaggtggtctgcggggtgctcatgtccgactactccctcgtgtgctggggccccggcgtgtcgggcggggtgagcaaagtgttcgaccgcgtgctgccgggcccttgcgcgccgtggacgtcgtgcacgtgcggcgtctggtcgggctccgcgcctctctgtggcggcggcacgggatacgcagccgtctgctacccctgcggctacagtccgcagctgatggtgttgacgccccctacttcggactcgtcggcgagctctcactcgaggtggacgaagcggcggccgagcgacctggcgatcgcgttgatcagtgccgggatcggctcgggagtgcttgccgccatcgccgcggtggtggcggtctactgccttcgccggcgacggagcggcgcctctcaggaccctgggcgcatccacgccgagccaattggtccggcgccgcgcgtggagcggcggctcagcgcgctgctctccaagggcccgaacacgacggtggagcagttcccgctggtggcgctccggggcgccacggacggcttctccccgtcccaccgcatcgggtccggcagcttcggcgtggtgtaccgcgcgtgcctccccgacggccgcgaggtggccatcaagcgcgcggagcgccgcggccccgtcgcggagtcctcctccgtggccgcgcggcgcgccaacaaccacgaggtggcattcgtcgcggagctgacgctcctctcccgcgtgaaccacaagaacctcgtccggctcctcggcttctgcgccgacggcggcgagcgcatcctcgtgtacgagtacatgcccaacggcaccctccacgaccacctccacaagcgggcggcgccgctctccccgccgctggcgtcgtggccggcgcgcctccgcctggcgctgggcgccgcgcgcggcatcgagtacatgcacacctacgccgtgccgcccatcatccaccgcgacatcaagtcccccaacatcctcctcgacgacgcctggaccgccaaggtgtccgacttcgggctctcgctgctcatcaacgacctgagcagcagcggcggcggcaacggatgcaatgccgccgccgccgacgacgagccgtgcatgacggccggcacggtggggtacatggacccggagtactaccggctgcagcacctgacggacaagagcgacgtgtacagcttcggcgtggtgctcctggagctgctctccgggtgcaaggtgatccagcggttcgagggcagcggcacgcccaagaacgtggtggacgtgaccgtgccgcacatcgaggcggaccgcgtgcaccgggtgctcgacgcgcggctcccgcttccgacgccggcggagatggaggccgtcgcctacgtcgggtacctggcctcggactgcgtgcggcccgcggggcgcgaccggcccaccatgagcgaggtggtcggcgtgctcgagcgtgccgtggcggcgtgcgaggagcacgacgatgggggcggcgaggcagtgctgtcgcggtcgtgcaccgatgggtccactgcgtgacgtggcacccgcgcgagggcattgcttgggtggatggagtctctggtggcgacaacacgatggatttttctctctatatatctcttaactttgccactgattttgtagtttattttgatttgcaattgctagctagtataggcacattcattaacattttaaattaaaacactgaatatagtggaaattgaatttttttctccttctgtacgtagttctcctttgttttattacgttcgatcctct

SEQ ID NO: 102901 - DNA, 1729 bp, Zea Mays
aacaggaaccacatgtgtctcgagatccttggaataatggatgaatgtatttaccgttccagaaaattttcactatcgtgctgttaggctatctccagcagattcactatcacatcctctatcacattccttatttcaaactcctctcagtgtcatatatagttccgtatctcctattctgcatagtttactagagacagtcttaaggtgccaataagtcactgatccaagaacaacaatttacactgtagttagtacgcaatccattgatggccctgaatgaagttctccgttgaaaagtgtttgacatactgttctggtgtctgactgctccactcaacccttgctgtgtggtttgcaccagggcctcgactgtcaaactctccataatacagtgtactgagagcaaaatcacctcgccatggaagccatccctccggcctgacaactgtccccaagtaacagctgacatacaatgtcctggcatactccttccatggccggcccaaatacagtctgtatgaatctggctttctccgaaacaattccacaaaccctttgttcccatccacagtgcaattcacaaatacaaaccctgtcgtctgccccggatcaatcctcccactagccgccaccacgtttcgtgcgcgcttctgagctccctcggcccgtggtacagtcttaatcacacattcctcaaacactgctgctgcattcccaaatataaaatccactgtccctacaatatggcacctgcggtagaactgccgcattgtgtgagcatacagcgtatcctgatgtccacggaactccacattctccagcactgaccgatcgctgtcagaacggaacgctacagcctgatgagctccagcaccagcgctgttctcaaatgttatatccctcgcacggaacccgtcaccgatcacatccaccgtcgcagtttcataagttcccagcccatcgatccccacgctccgggacgcagtgataacagtagctcccataccctcccccatcagcaaaatgttggccttctcatacggaatcacgacattttccttgtacgtacctgcaccaactgcgatggcgaagtgcccagcgccagcggtgtggttcggcgctgcgtccaccgcggcctgcacggtcgagtagccacacggcttcacaccggaattcggtttgcacaccgtggcgtcggggcggatcctcgcagggaatgcggcggcaggggcggaagagggaggaggtttcagggcggcatttagggtttgtggggcaagggaattgaggaagcgggacgtgagggggtgggagcggaaggccgggagcgagaggaggtgggagcagtcgtactggcactggagcgagccggaggcgaggtggagcgcggcggggacgtcgccggactccagggacgacaacgaggcgcggaggcggtgcagcgagagggcgaggtggtcggcgcagggccgcgcgtaggaattcggcgacgggtgcgcagcgatggccgcgtggaggagcgaggcgggcgcggtggtgtgctcccagggcggcgcggccgggaggaggacgagcagcgtaaggagcaggagcccggacgccgccgcggcgaactggaggaggcgaccgcggcgtgggagcgggtgggggtggccgcgcggcatttggcggacatgcgcgtcggagcggaggcggcgtggcgacactagttcgcgttgtgttcttc

SEQ ID NO: 102902 - DNA, 1311 bp, Zea Mays
cggactttcagaaagacgtttccgcatcctgttggcgtacgccgttaccagcttaaaaggataagctggcctcgtcaccacgctccatggtggctctgaagtcatctgttaaccgatggatttggtcgtcgaaagcgtcgttcatgggcgcttacccgtcaggccatcaagcggtggtgccatttgccaagaagaagaggaatgaatatatcgaagatccgccagatgaggaggtcgcagatgatttcaccgacgagatggaggaggacttcgacgacgccaaagaagacgaaggcgatgtaatggatgatgacgaagagtatgaggacgactatgactttgaagatgattttgagagtgatgatgaacaggatctttatgtaagtttcactctacttgcttgataaatacagtttgattatgtaaacattgaattatgttctggaggctggagatggaggtgctggtggcggtatatcccttgctggtgcatggtgggacaaggaagcgttagctttggcagaacaggtctcagcatcattcaacgacgacttgaaaatatatgctttcaagacagctgcaaatttgactattagagtacgcattgagaagatgtccaccaggtatggttctccaacgatagatgacattgaagcatacacaattgcatatcgtgcaaagttggacgaagcagagtcagcaggaaagataccgaaaaacatatcgttggaggtgtcatcccctggtgtggagagagttatccgtatccctgaagagctcgaacgattcaaagaaagggcaatgtatgtcagatacactacagcaagcgatgaggcaaccacacctcaggaaggtgacggcgtgctaacgctaatttcctatgacatggacctgcgagagtgcacctggggcatagctgatgtgaagataaaccggcagcagtctggcaagggcaggcccctgagcaagaagcagagggaatggaggctgcagacaccgttcgagtcgctgaagttggtcaggttgtactctgaatgttgagatgccagtttttgagtaaattttgagtttccatttgttgcactccttcggcagtttatccagtctcgctgaactctgatatgccactggatgcgcagctcatactaggtagaatgatgttgtactaatgtactatctgtcacaatcaattagttttttttcattgctaacagataacaacagaggtttagccacgcaaagcagaatgttctttgcttcacctttacagtttacaggcacttgatttattgtttgtattctcctagatgt

SEQ ID NO: 102903 - DNA, 1345 bp, Zea Mays
cggactttcagaaagacgtttccgcatcctgttggcgtacgccgttaccagcttaaaaggataagctggcctcgtcaccacgctccatggtggctctgaagtcatctgttaaccgatggatttggtcgtcgaaagcgtcgttcatgggcgcttacccgtcaggccatcaaggtttcctcttctgcccggctcgttgccctccactaccgtggcactgagtgctgccttttccggacgtccatgcccacccattgttcgtcggaatgccccagcggtggtgccatttgccaagaagaagaggaatgaatatatcgaagatccgccagatgaggaggtcgcagatgatttcaccgacgagatggaggaggacttcgacgacgccaaagaagacgaaggcgatgtaatggatgatgacgaagagtatgaggacgactatgactttgaagatgattttgagagtgatgatgaacaggatctttatgctggagatggaggtgctggtggcggtatatcccttgctggtgcatggtgggacaaggaagcgttagctttggcagaacaggtctcagcatcattcaacgacgacttgaaaatatatgctttcaagacagctgcaaatttgactattagagtacgcattgagaagatgtccaccaggtatggttctccaacgatagatgacattgaagcatacacaattgcatatcgtgcaaagttggacgaagcagagtcagcaggaaagataccgaaaaacatatcgttggaggtgtcatcccctggtgtggagagagttatccgtatccctgaagagctcgaacgattcaaagaaagggcaatgtatgtcagatacactacagcaagcgatgaggcaaccacacctcaggaaggtgacggcgtgctaacgctaatttcctatgacatggacctgcgagagtgcacctggggcatagctgatgtgaagataaaccggcagcagtctggcaagggcaggcccctgagcaagaagcagagggaatggaggctgcagacaccgttcgagtcgctgaagttggtcaggttgtactctgaatgttgagatgccagtttttgagtaaattttgagtttccatttgttgcactccttcggcagtttatccagtctcgctgaactctgatatgccactggatgcgcagctcatactaggtagaatgatgttgtactaatgtactatctgtcacaatcaattagttttttttcattgctaacagataacaacagaggtttagccacgcaaagcagaatgttctttgcttcacctttacagtttacaggcacttgatttattgtttgtattctcctagatgt

SEQ ID NO: 102904 - DNA, 598 bp, Zea Mays
catggtgaggatgcatcatcagtagcagtgcagaattatttcggtgttttgattccatatggaggcctccaagattttctgactgaaaagaaagatttaacaattacattgatcaggaaccggattctcccattatattctttggatccttgcagcccatatttgatttcaacggctaattgggttattggtcagcttgcgatatgcctaccagaggacatgagttctagtatttatcagtccttaatgaaggcgttgaccatggagtatgtgcaggacataacttgttatccggtttgtgcctctgcttctggtgctattgcagaactcatcgagaatagttatgttccacctgactggctcattcttctgcaagtggttctgaaaagaataagtactggagatgaaaatgagtctgctcttctgttcaagcttctgggcacaatagttgagggtggacaagaaaaagttgtctcatattcctgaaattgtatccaacattgcgagtattgtaatggagctcctgccccctgtcccagatccttggcctcaggtagtagtgcatctttcttctgtgtggtcaatattttggtacttt

SEQ ID NO: 102905 - DNA, 2055 bp, Zea Mays
catggtgaggatgcatcatcagtagcagtgcagaattatttcggtgttttgattccatatggaggcctccaagattttctgactgaaaagaaagatttaacaattacattgatcaggaaccggattctcccattatattctttggatccttgcagcccatatttgatttcaacggctaattgggttattggtcagcttgcgatatgcctaccagaggacatgagttctagtatttatcagtccttaatgaaggcgttgaccatggagtatgtgcaggacataacttgttatccggtttgtgcctctgcttctggtgctattgcagaactcatcgagaatagttatgttccacctgactggctcattcttctgcaagtggttctgaaaagaataagtactggagatgaaaatgagtctgctcttctgttcaagcttctgggcacaatagttgagggtggacaagaaaaagttgtctcatattcctgaaattgtatccaacattgcgagtattgtaatggagctcctgccccctgtcccagatccttggcctcagaaatgcatgtttccccagtcatgcctggacgatcacctttcatcatatcccagtattcctggtgtatcggattccttgatcgaggttctccgggcaatccttctactcctgttggtggctgccgctatgatagctccctcgggctcttgacaaagttcctgaacttgctaaaaggtgcacctggtggcattgttgatctgaataatgttgcagaaactctagaggttgatcacagctgaaatgttgatcatagttgttcatctactaccacacaactaagcgacctgtagcctgcactgcacggacagaataattaattaaccaagtggaaactgctggtgcctgcactgcacggacggacagtactgcacctttggactgggaacagacggagtcagttctcggagagcccatggatagaaccttgtagctgccatcatcgcctgcgcgagcaatgggagagcgatagctgagaaagaagaggagaagcagcttcggaatagaagaggtcatggatggcttgcggtttagcagctgagatatcagatatgcagtgagttgccgcttcagaatgcacccgctgctcatatagttatatatagagacggaggcagggaacaagatgaacgatgttacaaaaagcttggttgtttcaagctgacaatatggagggctctgcatttttacctctgtcatgcgtaaacgatgcttctgtgttacttgagtttgtcatgagttctgtcacttgcatggaagaaactgaaagtctgaaggtctttgagctggtagctacatgggctgacgctattgccaactgggactcctgggaggagatggaggatcagggtgttttcaacacaattaaagaagctgtcaatttccaccagagatttgacctcgccggtctcttcctgaaaacgcactttgtgagatgtcattccactaggtattcattctgtcatggttctgttttaatacacgcaggtcactcaagcagatctaaagttattcttagtccatatgtggtgaggttggtcgttctttactccaaacacaatctcccttctgtatagctaaaagtttgcagaaatggcaccatcaagatcggtctggagaccaacaagatcatggacttcatcaagtttgacatcggcaacatggtcatgatgaccggtgggaggaacaccaggcgtgtaggagtgatcaagaacagggagaagcacaagggcagcttcgagaccatccacgtgctgcttagagctttttgctatgtctagttttctcctatttgttgtataggaaaacatagaatggaattcaaatttggtggccgcaaaatgtggagacttgaattcatataaagttaggcttaacattagtgcaaacagttgtattttagtttagatttagagtacacttatgtatgtgttgtttgacaatgcttatttatgatatattgaatggtacttatttatattatattaattataatgttgttcaat

SEQ ID NO: 102906 - DNA, 2707 bp, Zea Mays
tatatttcggacaagacaacgccgttgacttcttcacaccaatcgtccaaatcacccctggatcgccggtgatggagatcctgagtccgtcgccgccacccagccactgcccactcctacgctgcggcggtcactgggagcagcaccacggcgagacgtgggtccacgtggctgtcgggaggtcgccggagaagacgctttcgctgctacgatgggccctgcgccgcttcggttgcagccggatcgtcctgctccacgtccaccacccgtcgccgctcatcccaaccctcttaggaaagatccccgcggtccaagccacagaggaggtggtgctctcccatcgcaagtccgagaaggaggagatgaacaagatcctcctcacctacctcgccttctgccacagagccaaggtccaggccaggcttcttgtcacggagaacggccaaatccacgacggcatcctcagtctggtcgaccatcacaggatcaccaagctcgtaatgggttctacacccgataattgcttcaagttaaaatatggcaaagaatctttaatggccagcagtgctcctgcgttttgtcaaatctggttcgtgtggagaggaaggcacatctggaccagagaagcgagtgcagccaccgacaatgctaccccagttcagtaccaatatgatgtgatgactacaaaaagaattaggttcagttcatatactgacaacactggagccatacttgatgaaggatatcctgcgcatgaggcattaacaacagttgatctaaatcaaggtgttgtttcagattgtggtcaatctaatgattatgaagcttttggggaacatgaggtcaaccatttacgcggtatgagcatttcagattggcaagatgatacagaaccagaactcaactcaacattttggtctcgttcttcaatacatgctgatacattacagttagatcctaaggaggtattggctaatgtcaaacaactaatgatggaagctgacagatcaaggaaagaagcgttttctgagttgatgaagcgtaaagaaacggagtcaaaagctgcgagtgcttttgccaagacaaaagattctgattctgccaaaaaacatgaaatagaaatgagggaggaacttgaagttgtattggtagacacaagaaagcagcatgaagaccttataaagaataaagagagagcagtatcagtactggactcttctacgaggagatcagctattctagatgcccatgctgaaaaaataaagcttcagatagatgagttctcggcagagcttgaagtgatccaatcttccatagaaactcttcgccagaagaaactaaaaatgcaaaggctagaaagcaaacatattgacctggataaggggtgcacatacagccatgccacactgtcaaattgcgcctcaaatgcttttggagatgatttatacggcttcagagaatttacagtgttggatatgcaatctgctacgtgtaaattctcagagagcttcaggatgtggtcgcaaggtcgtgggtgtgtttacaaaggagaaattatgaacagaactgtgatgatctataagctgcactgccatagcattgagagcgtgaggcagttccagcaagaggtttatatcctcagcaatgtgaggcaccctcatctagtgacactggttggggcgtgcccggaagcgctgtgcctcgtttatgaatacctgccaaacgggagccttcacgaccgcctcttcagcagacgcagcagccgtcacttgccgtggagaattcgtgcacgcatcgtcgccgagatctcagacgcgctgctgttcttgcattcctgtaagcctcagacgatcgtacacggcaacttgaaactcgagaacatccttctagataccgaatgccattgcaagatagccgatttcggtatctctcggctattcacaggcgacgtgaaggattacccgtcggggggttctgagcctccggaagggtcttttccctacgcagatccggagtacatgagaagcaaagtgttgacacccaagtctgacgtatactgcttcggaaccgtgatactccagctactgaccggaagacaggagcctgcacggcggcttgctggtgaagtaaggtgtgccatggcttgtggcaagctatcgtcaattctcgaccctgctgctgggcattggcctatggaggtggccggaaggctagcggaactgggcctgaggtgcagtgaggacagaagccgggatcgcccagacctgactgctgagaccgtacgagagctggaacagctacacttgacgagggaggaggaacaagcaccctcctctttcctgtgcccgattatgcaggagataatgcatgatcctcaggtgtgcgctgctgatggggtgacctacgaagggcgggcgatccgtgagcggatggagttggagactgggcaggggacagcgcctctgaacaacctgaaactggagcatctcagtctcacacctaaccacgcccttcggttcgctatccaggattggcttcgtcgctctcgccgatgaaactttttgcctggcgtttcttttgggttttcgacctgtacagatttcacgtgtaaaggggtatagcatatctgcatatgaataatttgaatagctgttctaaggttttgtctgtacttcatgaaatgtatcaggatgcatgtacgcggcaa

SEQ ID NO: 102907 - DNA, 2715 bp, Zea Mays
tatatttcggacaagacaacgccgttgacttcttcacaccaatcgtccaaatcacccctggatcgccggtgatggagatcctgagtccgtcgccgccacccagccactgcccactcctacgctgcggcggtcactgggagcagcaccacggcgagacgtgggtccacgtggctgtcgggaggtcgccggagaagacgctttcgctgctacgatgggccctgcgccgcttcggttgcagccggatcgtcctgctccacgtccaccacccgtcgccgctcatcccaaccctcttaggaaagatccccgcggtccaagccacagaggaggtggtgctctcccatcgcaagtccgagaaggaggagatgaacaagatcctcctcacctacctcgccttctgccacagagccaaggtccaggccaggcttcttgtcacggagaacggccaaatccacgacggcatcctcagtctggtcgaccatcacaggatcaccaagctcgtaatgggttctacacccgataattgcttcaagttaaaatatggcaaagaatctttaatggccagcagtgctcctgcgttttgtcaaatctggttcgtgtggagaggaaggcacatctggaccagagaagcgagtgcagccaccgacaatgctaccccagttcagtaccaatatgatgtgatgactacaaaaagaattaggttcagttcatatactgacaacactggagccatacttgatgaaggatatcctgcgcatgaggcattaacaacagttgatctaaatcaaggtgttgtttcagattgtggtcaatctaatgattatgaagcttttggggaacatgaggtcaaccatttacgcggtatgagcatttcagattggcaagatgatacagaaccagaactcaactcaacattttggtctcgttcttcaatacatgctgatacattacagttagatcctaagtatttcaggaggtattggctaatgtcaaacaactaatgatggaagctgacagatcaaggaaagaagcgttttctgagttgatgaagcgtaaagaaacggagtcaaaagctgcgagtgcttttgccaagacaaaagattctgattctgccaaaaaacatgaaatagaaatgagggaggaacttgaagttgtattggtagacacaagaaagcagcatgaagaccttataaagaataaagagagagcagtatcagtactggactcttctacgaggagatcagctattctagatgcccatgctgaaaaaataaagcttcagatagatgagttctcggcagagcttgaagtgatccaatcttccatagaaactcttcgccagaagaaactaaaaatgcaaaggctagaaagcaaacatattgacctggataaggggtgcacatacagccatgccacactgtcaaattgcgcctcaaatgcttttggagatgatttatacggcttcagagaatttacagtgttggatatgcaatctgctacgtgtaaattctcagagagcttcaggatgtggtcgcaaggtcgtgggtgtgtttacaaaggagaaattatgaacagaactgtgatgatctataagctgcactgccatagcattgagagcgtgaggcagttccagcaagaggtttatatcctcagcaatgtgaggcaccctcatctagtgacactggttggggcgtgcccggaagcgctgtgcctcgtttatgaatacctgccaaacgggagccttcacgaccgcctcttcagcagacgcagcagccgtcacttgccgtggagaattcgtgcacgcatcgtcgccgagatctcagacgcgctgctgttcttgcattcctgtaagcctcagacgatcgtacacggcaacttgaaactcgagaacatccttctagataccgaatgccattgcaagatagccgatttcggtatctctcggctattcacaggcgacgtgaaggattacccgtcggggggttctgagcctccggaagggtcttttccctacgcagatccggagtacatgagaagcaaagtgttgacacccaagtctgacgtatactgcttcggaaccgtgatactccagctactgaccggaagacaggagcctgcacggcggcttgctggtgaagtaaggtgtgccatggcttgtggcaagctatcgtcaattctcgaccctgctgctgggcattggcctatggaggtggccggaaggctagcggaactgggcctgaggtgcagtgaggacagaagccgggatcgcccagacctgactgctgagaccgtacgagagctggaacagctacacttgacgagggaggaggaacaagcaccctcctctttcctgtgcccgattatgcaggagataatgcatgatcctcaggtgtgcgctgctgatggggtgacctacgaagggcgggcgatccgtgagcggatggagttggagactgggcaggggacagcgcctctgaacaacctgaaactggagcatctcagtctcacacctaaccacgcccttcggttcgctatccaggattggcttcgtcgctctcgccgatgaaactttttgcctggcgtttcttttgggttttcgacctgtacagatttcacgtgtaaaggggtatagcatatctgcatatgaataatttgaatagctgttctaaggttttgtctgtacttcatgaaatgtatcaggatgcatgtacgcggcaa

SEQ ID NO: 102908 - DNA, 4400 bp, Zea Mays
ccaatttcttcgaccgaacgaaaacacagccgtcgtcgccgtcccgcccgcccacggccgccgccgccgccagctgccgtttcccaaaagcgagcgaacggcaaaccaaataaaaactcctcgaactaccggcttctactaaaaccctcgacgtcggcagcgcggcgtcggcgagatgaagaacctgcgccttgtgacgaggctcccgcagcagctccagctccagatagacggcgaaaccctcgtcgcctccgccatcgacgcagagagccgccgcgctttcttcgcttcctccgccaacttcatctacaccgtctcactgccctcgtcctccacccagcaactactgcaatggagcaaaactgctactcaacactctgacatggaggaggttgttcttgatcctggagatcgcattgttgccatggattatcttatggagagggagtctctactccttgggtcgtcagatggttgtcttctcttatataacgtggaggagaaaacaactgaagttgtcggaagactggaaggtggtgtcaacaccattgcctctagccccgatggggcccttctctctgtcaccactggactcggccaactgcttgtcatcacacaggactgggaagtgctgtttgagacttcacttgaccctcaagacgagaccattgacaacacagacagtaccggtggtcagagtcgaagtgcaatttcttggcgaggggatgggaagtatttcgctacacttgtagcccctgagagcttttctagccctacaaaacttaatgtctgggaacgtgaatcgggaaaactgcattcttcttcagatgccaaaacttttatgggagcatcgctagattggatgcctagtggagcgaaggttgctacagcccttgataggaggacagagggaaagtgtcctcttattattttctatgagaagaatggcttagagaggagtcacttttctattgatgagccaggagaggttgccattcaagctttaaagtggaactgcaattctgagatccttgctgctctggtttcttctggtcagcatgatgttatcaagatatggacctgcaggaacaatcactggtacttgaaacatgaactgcggtacacaaaggaagagggggtgaagttcttttgggatccaacgaaaccaatgcatctgatttgctggacactgagtggccaggtcattattcacaagtttgcttggactacggcagtcagtgagagttcaattgcacttgtgattgatggttctcatgttcttgttactcctcttattttgggcctcatgccacctcccatgtctctgttccaccttgcatttccttgtgcagtgaatgaggtttcttttgtgaccaataactcgaagagccatttggctgcttatctctcaaatggcagcctgtctgttgtggaacttccagcacctgatacctgggaagaatttgaaggcaatgggataagtgttgatccttgctgttctgacttcactttgaataactgtatgcacctcacttggatagatacacgcaccttgatcggtatctgttgctatagtgaacacctctcttcaacaaaaatcaggtccagtgaagccagtaaccttgtagataaacatgattcgctgtttttcatccatgagattgaacttaaatgttcagagagttctgtgccaggttcagtgtgttcatctggttggcatgctagagtatcaaagaaagtgcagttggagagttcagtcattggagtctctccaaacccagcaaaaagaggttcagccttcattcaagttagtggtggaaagattattgagtactgctcaagtttaaatctgttgaatatgtgtccaccagcacaattcagtggcattggttctgacctttgttttccagcatcatgtccttggatgactgcagttctgtgctatgaaaatggtatgacagaaccgcttctctttggacttgatgaaagcggcaagctttatatgggcaaaaggttattgagcaacaactgcagcagcttcacattatactccagtgtttatggagccactgagccagttatgagccacttgcttgtgactactaagcaagatcttctattcattgtggatgtcaatgaggtcttacttaaagacatcgaggtcacaattgatggccttgtcagtagtcctgctcgcggtaagcaaaacaaagagtacatcactgtgtgggaaaagggagcgaagttggttggtgttctccatggtgatgaagcagctgtcataatgcaaacaacacgtggtaacttagagtgtacctaccccaggaagctagtccttgtttcaattgttcaggcactggttcagaagcgtttcaaagatgcaataggcatggtgaggaggcatcggatagattttaatatcattgttgactattgtggtttgaatgcttttatggattcagctgcagacttcgttaaacaagttaataaccttacccatgtcactgaatttgtttgctcaatgaagaatagcaatgtcagcagcaaattgtatgaagcctatatatcatttcctgatcagtgtgcaatcccaatggcggataatgaaagttcacctggtttatttttgggtaacaaagtcacttctgtacttatggccattcgaaaagcccttgaggaacaaatagaagagagctcatcaagagaactttgtatattgaccactttggcccgtagtgaacctccattgttggagcaggcactgaatagaataaagctccttcgagaatcagaacttcttgggcttgacgatgccaagcgaaagctctacccttctgctgaagagtcactgaagcatttgctttggttaacggacactgaagctgtttttagtgctgccttgggattgtatgatctgaatcttgctgctattgttgctttgaattcccaaaaagatccaaaagagttccttcctttccttaagagtcttgaatgccttcctcctgctatcatgaggtatacgattgatttaagacttggaagatacgagagtgctctcagaaacattgtttctgctggcgacgcgtaccatgaggattgcatgaaactcctcaatgataatcctcagctgttcccactgggcctccagttatttaatgaaccagataaaaggaatcaaattcttgaggcatggggtgaccatctctctggagagaaatgctttgaagacgccgctttgacttatcagtgctgttcatcatatcagaagtcactgagagcttaccgtgcctgtggagactggagaggtgtttttaccgttgcaggtcttctggagttaaaaagggaagaaatcgttcaactcgcacacgagttatgtgatgagttccaggcacttggcaagccaggagatgctgctagagtagcactggagtactgttcagatgctgaaagaggtgtaagctactatatcatggcaagggaatgggaagaggctcttagagtcgcttacatgcttagcacgcatgatctggttgaagctgtcagagacgcagcttcagaatgcgccgcatcactgatagccgagtaccaggaaggactgttgaagatcggtaaatatgcagcacgctatttggccgtacggcagaggagattgtcgctcgctgccaaactccggtcggaagatcggtttatggatgttgaagatgacagcgtttcagaaacgagcactagcttcagtgaaatgagcgcatataccacaagggagtcgagcgcttcggtcatgtccagcaacgccagcaaatcacgggcggcaaggcggcaaaagaagggcggcaaaatacgagctggaagccccggggaggaaatggccctcgtggagcatctcagggggatggcgttgacaggcggtgcccaaaacgagctgaagagcctgctcgtggctctaatacagctggggaaagcggagacggcccgtcgggtgcaggaggctgcagacagcttcgaagtgtcccagagggccgcagtgaagctggccgaggacacggtgtccagcgaccgcgtagaggagagagcgcacaccctcgagcgttacgtgaggatgctgagggatcgggagtctggccatggcgaggctggtggtacgtggcggatcaatgcgttgtctccccccgtgacagggtgagagggttttttttttactggttagcagtttagcattgtttaaatcgggacgaagagtgctgtgttctttcttgtgggtggcatcgtggcgtgcgtcaggctttgaccttgtcgattaactgctgtagcatcagttggaattcttggtgcctggtggggctgttgtattggatctatgtttgccaataccagatttgtccggttttttttctgacaggaac

SEQ ID NO: 102909 - DNA, 708 bp, Zea Mays
gcgctgtttaaataggataattaagcgagtgctatgagaattgagatgttgttttggcggcgacgacaaagggctaaaaaacaatcttgccgctccaaccaattcgtcttggttgccgacacggcacctcgtcggaatcaggtggcgcgacctcctcgccggccggcgcgacaccaccatgggcccggaagcagtgcggaaaagcctggagcccaccgcaaccgccgaggaaatcactggctccacccctgcgcggctccacttctacgaccccttcgtcctcagcggcgtccgtatcgaagccgccgagcacggccgcctcctctgctctttcgtcgtcacccctcgcctcgcgagtcccgtgggatacctccgcagcggtgtcacagcgacgctcgccgaccagctgggatcggctgtgttcttctgcagtgggatccccagcagcggggtctccatcgagatcagcgtctcctttgtcgactcggctgccgtcggggtaagaccctctctcttggatcacatttcatgttgtcttcgattatggtataaaaaaaagtagctcgtgtggagatcggaatctatgattgaactggatcgattttgcacttgctagcgctagagctaggcaattggggaaaatccctttttttgctgaagaaaatggcattcactgcaagtaattgctaaggtgtgtagtttgtatta

SEQ ID NO: 102910 - DNA, 1202 bp, Zea Mays
gcgctgtttaaataggataattaagcgagtgctatgagaattgagatgttgttttggcggcgacgacaaagggctaaaaaacaatcttgccgctccaaccaattcgtcttggttgccgacacggcacctcgtcggaatcaggtggcgcgacctcctcgccggccggcgcgacaccaccatgggcccggaagcagtgcggaaaagcctggagcccaccgcaaccgccgaggaaatcactggctccacccctgcgcggctccacttctacgaccccttcgtcctcagcggcgtccgtatcgaagccgccgagcacggccgcctcctctgctctttcgtcgtcacccctcgcctcgcgagtcccgtgggatacctccgcagcggtgtcacagcgacgctcgccgaccagctgggatcggctgtgttcttctgcagtgggatccccagcagcggggtctccatcgagatcagcgtctcctttgtcgactcggctgccgtcggggaggaaatagaggttgagggaaagttattacgtgctggaaaatcagtcggtgtcgtctccgtagatttcaggaagaaaaagacagggaaattgatggcacaggcccgtcacaccaagtatcttgtggcatcaagcaaactgtgaggcgctccccttttgttaacaagatatcaacatcaattgcgcccagactctccatactggtgccattattagtagtcagcaatcatgaaatgtttgtggcatatctttttttttcaaaaaaattcctgtatatattatatatatgaaattcaagtaagtatcattggtgcctctgatgcatatcggtctagtcatgttactttcacttgacagccatgatcagattatatatgttttcaaagaaggcaccgggttgtaagtaacttcgcaggaaactttcagttattgttggctcagtctgccaccatcttgggagattctctccgttaacaaaaggaattgatcgttgctgcatcactctattattgccctagaagatgcatggtatttaatctgggtccacacatcggcctgagatagttggtgaaagtaggcccgactgccaccatgctgtgtttttgtgtgtacgagttctaggtccttgtgggctatctcctgtctgttctgctgttggttgaccccaaattgttatcgacttatgatgataggatcccaacaa

SEQ ID NO: 102911 - DNA, 1314 bp, Zea Mays
gcgctgtttaaataggataattaagcgagtgctatgagaattgagatgttgttttggcggcgacgacaaagggctaaaaaacaatcttgccgctccaaccaattcgtcttggttgccgacacggcacctcgtcggaatcaggtggcgcgacctcctcgccggccggcgcgacaccaccatgggcccggaagcagtgcggaaaagcctggagcccaccgcaaccgccgaggaaatcactggctccacccctgcgcggctccacttctacgaccccttcgtcctcagcggcgtccgtatcgaagccgccgagcacggccgcctcctctgctctttcgtcgtcacccctcgcctcgcggtaagcctcgcactcccctccctttgcgacctcggtttgagatggtggcgactgagtgactgacgaaacatatgagcttgcctacttggttcgatctgtggtgcccttgcagagtcccgtgggatacctccgcagcggtgtcacagcgacgctcgccgaccagctgggatcggctgtgttcttctgcagtgggatccccagcagcggggtctccatcgagatcagcgtctcctttgtcgactcggctgccgtcggggaggaaatagaggttgagggaaagttattacgtgctggaaaatcagtcggtgtcgtctccgtagatttcaggaagaaaaagacagggaaattgatggcacaggcccgtcacaccaagtatcttgtggcatcaagcaaactgtgaggcgctccccttttgttaacaagatatcaacatcaattgcgcccagactctccatactggtgccattattagtagtcagcaatcatgaaatgtttgtggcatatctttttttttcaaaaaaattcctgtatatattatatatatgaaattcaagtaagtatcattggtgcctctgatgcatatcggtctagtcatgttactttcacttgacagccatgatcagattatatatgttttcaaagaaggcaccgggttgtaagtaacttcgcaggaaactttcagttattgttggctcagtctgccaccatcttgggagattctctccgttaacaaaaggaattgatcgttgctgcatcactctattattgccctagaagatgcatggtatttaatctgggtccacacatcggcctgagatagttggtgaaagtaggcccgactgccaccatgctgtgtttttgtgtgtacgagttctaggtccttgtgggctatctcctgtctgttctgctgttggttgaccccaaattgttatcgacttatgatgataggatcccaacaa

SEQ ID NO: 102912 - DNA, 841 bp, Zea Mays
ctggaatttttttttctggtagttataaaaagtaaccatcttggtagttgatacaaccagatgccgcgttgtatacgggctgatggtcctttggttaactttcggcattacatttaactttcggggttaattgtccaggaggaaatagaggttgagggaaagttattacgtgctggaaaatcagtcggtgtcgtctccgtagatttcaggaagaaaaagacagggaaattgatggcacaggcccgtcacaccaagtatcttgtggcatcaagcaaactgtgaggcgctccccttttgttaacaagatatcaacatcaattgcgcccagactctccatactggtgccattattagtagtcagcaatcatgaaatgtttgtggcatatctttttttttcaaaaaaattcctgtatatattatatatatgaaattcaagtaagtatcattggtgcctctgatgcatatcggtctagtcatgttactttcacttgacagccatgatcagattatatatgttttcaaagaaggcaccgggttgtaagtaacttcgcaggaaactttcagttattgttggctcagtctgccaccatcttgggagattctctccgttaacaaaaggaattgatcgttgctgcatcactctattattgccctagaagatgcatggtatttaatctgggtccacacatcggcctgagatagttggtgaaagtaggcccgactgccaccatgctgtgtttttgtgtgtacgagttctaggtccttgtgggctatctcctgtctgttctgctgttggttgaccccaaattgttatcgacttatgatgataggatcccaacaa

SEQ ID NO: 102913 - DNA, 560 bp, Zea Mays
cacatcaaccctcatatacccatccaccatggagggtcagcagtgaggcatgttcccctatctcagaacaatgatggtgaggcaagataagatagtttaagattcagttatcctctcaacaactaaagttgggcatgtcacatgtgtagtgttctattgttcttggtctgtattaatcgtagatgctcagtagatagttcactcttgactcctccaacattttaaatcgtataaattagggtttttcagaagatcacaagggtgggattaagtttttatttatctttttttaaaggccagagcatggacatgacacaaggtgatggtgatgcaactacgtcgatcatgagtatgtcatcatgcttatctgcttcgtcgatcatgagtatattctgctatttccacacaagttgatggtgatgtagctacaaagcttgtgaggttttcaaatattctgaactctgatctcaacaattaaaagagctaaggattctgccaacattcagagatcatagttccatgggaattttgtatgaagatatttcaaagttttataaaat

SEQ ID NO: 102914 - DNA, 255 bp, Zea Mays
aggccatccatggattcgtgaccatggagtagctcctgaccgtccactggatccagctgtcttatctcgcattaagcaattctctgcaatgaataagttgaagaaaatggctttgcgagtaatagcagagagcctatcagaagaggaaattgcggggttgaaggaaatgttccagaccatggacactgacaacagtggcgcaattacctacgatgaactaaaagaaggattgagaaaatatggttccacactgaa

SEQ ID NO: 102915 - DNA, 1450 bp, Zea Mays
gttccctttcccgggggcccgcagcgaggtgtcttggatagcccaacctctccccaggtcaccgaccaggcagggaggtgtcgttgcgattgcgaggacgcacgcaaaatggaagaagcttttgcatcgacccaggccgtgaaaaggtgccagtgaggacgaatccaaccacacgcccccactcgcttgaaactgccgcagagccccgcaaaggcaacgactgaaactgctccggcgactacgagcgcacctaaaccccgcctgcgtctcgtcgccgagaagaatcttcgccttcgcgaagcctctccatctcccctctccgccgccgccgccgcttcctcgccgggactcgggagcaatgcagctgtaccaccacccctattcgctggacagccagaaggtacggatggcgctggaagagaagggcattgactacacatcttatcacgtcaatccactcaccggcaaaaacatgaatgtggacttctttcgcatgaacccttccgcgaagctccctgtcttccagaatggagcgcatgtcatctatcgcgctatcgatattattcagtacatagacagacttgcagtgcatttaagtggtgaaatcccccctgtgaacactgaggtccaccaatggatgcagaaagttgatgcttggaaccctgagatgttcaccctcacgcacaccccggccaagcaccgtgcgtttgtctccaagttcataaggcgggtgctgattgctcgcatggctcaagcccctgatttagccagcatgtatcatgtcaagctccgtgaggcttacgagacggatgataaagtgaaggaccctgacatcatgaagcaaagcgaggaagaactaagcaaactccttgatgatgtcgaagctcagctcggcaagaccaaatatctcgctggcgatgaattctcacctgctgattcgatgtttgtccctgttcttgcgcgcataactattctggaccttgatgatgagtacatcaactgcagacccaagatacttgagtactacaatttggtgaagctacggccaagctacaagattaccattggcagatactttagtgggtggaagaagtaccggactctcttcaagacatctttcttcctttgtgttcgaaccctgttcaggaagtactagatagttcggcggatgaaatatctgaatcagtaccttgtgaactgacatgtatagtgagtttcggttaaaaaataaactgtatatcttccatgtgcctttttgtggtcttgagttcatttttacctgtaaaatcaatatgtttgtttgattatatatttctgcttcatgttggatgcaaaaatgaaggttatagaactgtatacagaataggactaagtatatattttggatttatcacttgttctagtccaattcatgtctaaaataaattgttgttagcttgtgattttggca

SEQ ID NO: 102916 - DNA, 100 bp, Zea Mays
tttttttttcttttatgtttgttttggcatgccttagtagatgcatagtttacggtgttggctttgtttcctggaatgttttaagttcaaaattttggca

SEQ ID NO: 102917 - DNA, 795 bp, Zea Mays
atgtgcgacgccgccgccactctccttcatggccttcgtgtgtccctccttccctgcccgctgcccctgcctacggccgcgtcctgcccggcgcttgtccacgccagacgcccacaccagagaccaccgccggtcagccacacgctcgagaataggcggcggcgcaggtcctcctccatctctatcatggatcagaaggccaatgaagctattttggaagtgttagaccttcgatgtttgggtctagaaggtgaagctgatcagttgctgctggatgagcttaacctgaatcatcatattattggaggagagcttctagaattgtcaaaaaatgaagtgcctcctgaagatattgttttccaccgtttatatttgaacaagactggcccagttaatcagtatttttgtaggttgcagattcctaaggaatcaaatgtcatgaatcagatacttaaatccaactacattgtcagaatgaggtcctataatgaagctgaatgtggtagagccacaacaggcaatggttatgggttcacctttagaggatgcaagacatttggcccagagtcaaaggttgttgagatcttggtcaaggaccttaaggtctttgcatccttcaatgagttgttgtttaaggagatcacacagtttctgaccttggacaactttagggaaaataagcagctttctaagtatggtgatacaaaatatgcacgagtaataatgcttgttgaggtgcagaagctgattgaagcttacctctgtactgtgacaagctacaatttcccagactga

SEQ ID NO: 102918 - DNA, 577 bp, Zea Mays
agagttagatgaagatgaagttgaaaatttggagggtgagccaggaaaaggatgaaagattctaagagcactaggaataggaacatgaaggaaagcattattgtgcatggagatttaggcctgatgttttcctgatgcctcctattcctaaggctcttaggttctccttccctttccttatggcttgcgaaatcaatgttaatcagatcaaaagagatggggtcagggtacactatgctggttgcaagcaagcaagagaaagaatgagagagggactgagaacagtggctagtgggaaactgggaatgggaacatggaggaaagctaagttaaatttcttcgtttcttctccagtaatggagggtttaatctgctttggtctttccctgtgcctctcattcctattactctcaaccactccttcctcgtcctttttttgcttacaatgttgtttcaaacgctaaaacaaaataatgaactctttcccatgtgaggatgatggatgcatggtcttgacagtgatttagtaaaagctaagaaagcatatataaaaacgcttaccataacagcagtgggc

SEQ ID NO: 102919 - DNA, 102 bp, Zea Mays
atggtccaaatattttggaggattatatgtggacatatggtatgcctccataaattttcatgaatttctgaggctatttgtgtattattaatttctttctaa

SEQ ID NO: 102920 - DNA, 462 bp, Zea Mays
atgctatcaggggcaattaccagcacctggatgtatcccttggtatgcccaaccaagcgaacaccaccggtcgcgatctcagtgatccagatcctctctactttgcctaccattccttggtacggtgacaatgattcgaaaactgaagtcagttcacgactccgcttttttcacttcattgctcgataccttcttcatcctagcagcagggcgtccctagaaaaaccacgttgtcgatgtacatgtaggaaaagaatgtcaacaaccaaaacttgtagatttacggaacgttgtgtattgagggagttgatattgctttacgaggttaacagtctcagagaaatcctcatcagtctcacctcaaaatgggatgtcagtttagtgcaaactattagcagcaacgtcttttggggcattcagttaataaaatgtcgttcagatgtactcataaatgataactaa

SEQ ID NO: 102921 - DNA, 405 bp, Zea Mays
atgaaaggtggatttgtcatgcctatgcggagcaatgtgcttcggtcaacaggatgctccgcaacaatcgtgtttaacaaatttggaagattgtaccgatatcctgtccataagcaccggtatcttcgctactggctactcaaccaaatctcccggacacttggagtttcaagcagcggcagcattgcttcacaacagacatattttgaatacatacaagctgtcaatagtatagcttcccaaatgtccacgagcatgctttgttttacagtatgtgcaggcacccaagcatccaacattaataggaagaatctcaataaacttgttctttcttacgtgttaattagccacaaatctgctccttcgggctcttcaatgattgcatatccaaatgcagagagctga

SEQ ID NO: 102922 - DNA, 4559 bp, Zea Mays
atggatgggaaaggattgtttgcggagatagggatgaaggaggaggacattgccacaatgctgtctgggaagaaagtttccgagctggcagaggatgcgtttgatggttccaaggaagaaagacagatctttgagggtgtcttctgcctaacaaacgttgatggtggattgaatgatcattatcatggaggcattggacatactgttcatgcagggaaagtggtgacaagttctagaaaaccatcaagctctgccgacaattacaaggcagcacactgtcgcatagtagagtccttcactgctggcaacttatcaagctatcgtgtctcctgtcttggtgccgatgagcaggctcatggagcaatgcattctcctgatgctgtccgtttcaagcttgcagtgcagtggacgcctcctcgccctgatcgggtgtacactcgtagggtggtgactcgcaggagcgagagggcaagaatttgcagtgcgatggatttggagagcatcgacatttgcaatttcagtcgtcagagggatggtcgtggccatggacagctttggaaccatcttcggatgcatgcacatcttctgatggtggatgccgggtggaagattgaggccaaggaaagagacaacaggagtaaagttgatcatgtttatgtggcgccagacaatgtgacacgcctgtattctcttcccagagcatggaaatgctttggccagtggttgcttatgacaacaccctgcgtcaatggaaatgagtcaattgactacggaaaggagtggtcgaacatgcatgaatttctgtatgatctgaagaacacactgctatgcctacagtatgaggtccaacgtacgaagccagcactatctttcctctaccagtggcagctccttgatcctttcatggctgttgtttgcatcgataagaaggttgcagctcttaaagatggagtggcactgaaagctgttaacagcaccgtgacttgcctcaatcgcagtgagtgtaagatgttggatgccaagaattcaaataggtcacttggggtcaactccacaagtaaatatatgaatccatatctcagctcctgcaaaaaaagtcttctgccgcttctctctgaatctgattatcagcctgataaggaagggaatactatgcctaatgaagaagcttctctattttgtacaaacaagactagcgaagatgaagctgatcggcggtcattgtgtatgtcagaaatgaatgaaataggcataagaagcacagctcatcacatagttatgggtttacatgatgcaacagcttttcatggctcaagccaaacttgttcggggaggaaaagaaaatttccgtgcatcaagtctaaagaggataatcaaactgaagacaagtctgacccattattctttccacccagctattcatccacattaagtcatctggttgaaaatgttcaaataaatgatgttagccctcatggctatgaaaccacggagattccaaacatgggcaatcgtacagatattcttgataagatgtacctaggagagaatttattgtttgcccccgaaactggtaatatgctacttgaaactacagatgatatcaacaatgaacagcatgatgatgcagctgtctctgagccccaatcggcagataatgatggaagtggaccttctggtgcatcatcactaccaccagagaaagatgcatacatgggatctaaagaggattctattaacgactatcatgatccttcagttgtctctgagttccaaattgctaataatgatgcaaaatgtgaaccttctattgcattcttgccagaaaaggataaagatttggaagctaataaaacgagcttggaaggtccagcaaaaacaggccaattgtcatctgaagctagtggcagcactttgatgatctcagagccacaagtattgtttgtgtccccacaagatgggactctgtctttcatgaacaataatacgaacaaccaagagatgtggaggttcctgaatgtttcccctgataccatggataccgaaatgcagatggactctaattcattggtttacgaggcaagcttgattcagggtttcttgtaccttgacaatgagggttctccaatttgttggacagtgatgaacccggaacctcctaggcgcttgatatgtgctactgctctggaaccaaactcaaagctgtcgaaacagtatgttgaaatgaggttggagaatgatgcatcaacgtctgaacacaagaagggaggaaaattgtctgataaggctgcagatatccaagacaatgttcctgttcctttgaatctagtgcttgagaacaaaaatgacaaggaccaaggtgagcaaagcagtgaaacttcagaacaacttatgtccaaagaaccacaaaaaagggacatcaaaaggcaaaagagaacatggtctcatacatgcaagtttgatgatgatgaccttctgatgacagctgtaatatataagctgacagcacgttacaggaactcttttcatcggaagctcagaaataaattcggtttcaggcgtcttccaacataccactgggagaatgaagataaaggtgacaggaagaagtttcctggagaagcaaggacggtgttgaacaagttacttgaaatgggcattgttgctagagtggatattcttcaatgtcatggtccaggaggcaaaaatgtgttgaaggatgggaacataactgcgagtggcattcaatgccagtgctgtggtaccacattcacaatgtccaagtttaagtgtcatgcaggtctcaggcaagaagtcccatctctgaatcttttcttggatacaggcaaatcttacagtctttgtcagcttcaagcatggtctatagagcagaaggtgaggaaagagcatgcaaaggatacaatgtcccttcaagcagaccaaaacgatgatacctgtggatcatgtggcgatggtggtgaactgatatgctgtgacaattgtcctgctagttaccatcaagcctgcttgtcttgccaggatattccagatggcaactggtactgctctagctgcctttgcgacatttgtggtgaagtaatcgattcaaaggagcttgtaacttcccttcctgctttagattgctcacagtgcgaacgccaataccatgtaaaatgtgtatctgccaaagttccgtgcaatgaggatggatctggtacctggttttgtggaagaaaatgtcacgagatctatatgaccttccgttctcgtgttggagtgcctgatcacatggacgatgatctgtgtttcaccgttcttcgtaacaacggtgataagaaggttcgcacggcagaggagattgctctcatggctgaatgcaacatgaaactcatgatcgccacgagtatcatggaagagtgtttcctgcctattctagatcccaggacagggatagacattattccctccatattgtataactggaggtctgatttacatttcaattacaaggggttctatacagtagtcttggaaagtgatgatagcatggtatctgttgcctccataaggttgcatggtgcaattttagcagagatgcctctggtagcaacttctaaagagaatcgtcagcaggggatgtgcaggcgcctcatggattacattgaggagatgctgaaatccctgaaggtggagatgctgctcctatcagcaatcccgcacctggcggagacatggacatcgacatttgggttcagagagatagatgagtcggacaagaagaggctgagtaaggtgaggctggccgcagttccggggaccgtcctactgaagaaggacctgctgtgtgaatgttcaggcgcggacgccggtgagccgccgagccctaagcccttccaagtttactcgcgcgtgccgagaggccgcaccggtttggatgcagtgtgccaataaagatgacgcagtggatcgaatgcgccgcggtcagtcgtcgtcgtcggtgacagggggcagctggtggtcgtcacggggcctcgtctccggttgctgaagccgaggccgagcacatcagcacgcgccggtttgtgtggtggaaatggaaagcctcgttgctctggtaggagctctgaagatcgctgtcgtctgcttgtagtctgtaaatagcttctccgtcggcgagaagcccagggtccacggccattgtagaaccgaacctgtatgataaaactagaccgtgttggcgccccaccagcgtttagtagtttccgttgccctttgaactcaaagtttcaggctagtccattgtgttcgtttcagaagcctgcggttttcagggggaggggaggtgccagaaagggaggacataacgcacgtgcagaccgagtattatgtggtggtgtcgtagacacgcacgagttgacgaagctataggagcagctcgtgatgagcaatggttggtgcagatgatgatgtcaatgagctcctcccgcagggaccggacctgtggacacggatggagctgaacttgtttgaaggatgcgtagtactaataatatatgcag

SEQ ID NO: 102923 - DNA, 1687 bp, Zea Mays
atggctggatttggcaaggcagtggagattctagacacattaggctgcttgatgacgaccttgagctcagatggtggctttgtttccaggaccaagaccaaagggtgcaaaatatcaattcttgcttttgaggttgccaacacaatacttaaaggtgctagtattatgcaatcactctcagaagacactgtcacatacttcaaacaagttgtgcttccttccgaaggtgtacagaatttggtgtccagtgagatgagtgaattgatgcgaattgcagctaacgacaaaagagaggagctgaaaatattttctcaagagattgttaggttcgggaaccgctgtaaagatccccagtggcataacctggatcgctactttgtgaagttagaatcagaaaatgcgccccagaagcagttgaaagaaacgtcaatagcagagatgcaaaagttaatgagtcttgttcaacgtacaactgatttgtatcatgagctgcatgcattagacagatttgagcaagagtacttctctaggataaacggaaagggtcacacagatagaattgaaaaaggttactttgcaggaggcaatattcaaattgtgaaactggagttgaagacccaaagtagttatgtaaagagcttgaagaaaagatctctttggtccaagacgttggaagaagtagttgagaagtttgtagacattatgcactacttacatgttgagatcaacaatgatttcggatcttctggtacttccacagcccaacttttcgtgttgaatcagtcaatcttatttccagctgaccgttttaatgcatttgtagatggagggtatgtgccatcaaattcaagagatgcactgtaccagggattgccaccaaggatcaagtcagcactaccaaataaattgagaacgacctcggtgcctcaggagctcactattgatcaaataagggctaggatggagaaaactctgaaatggcttattcccatggccgtcaataccacctgcgctcgaggtttcttgaggtttagcgaatgggcgaaatcagggactgagagggttggtaggcgaccgggtgtagcagatcggattgagacgctataccatgctgacaaggcaaggactgaggactgcattctagagttgctcgtctggctccatcacctcgtcagccagagtaaccggttggcaatgcaaaaagtcactgaccaatgtatctaaccaaaagtcaggaattgtcatatgggccatcacatgctagcatcgcacggcgacttctatccagaaaaaaagaggctgggtttgtcgagtggtccaaggtatccaaaattatatggaaaagaggggacatcaaaattttctgatccagcttgctggttgttttcgtctttgttattaggttgtagatggaatctagagttgttcttgccatggaggtcgtgtgtttttcttctttccatggaggacgtgcggtttttcttgtccggatacagtcgggcatgcagcatgcttatatgtgctccgtacattagctgagtaggtgtagtataagaagagccctttttttttcttctctttgatctgcttgttatttgtaagtgtagttgtgacaatcacattatacaaagaaaacgcacgtcatgtcagtgcagtgaaaaacaaacaaacatgaatctcttttcat

SEQ ID NO: 102924 - DNA, 117 bp, Zea Mays
gaacatataatccagagcaaactagttagtccaattatttgtgttgggcatttcaaccaccaaaatcatttaggaaaaggtttgaccctatttccctttcagtatgtacatagttag

SEQ ID NO: 102925 - DNA, 605 bp, Zea Mays
cgcggcagtcgcgtgaccgcgtccgcgtgcacgagcggtagaggctgagcacggcgagccagtcggttagagtggcggccagcgccggcggccgcctgcgccgccgcgtggccttggcgccgtcggcggcggaggaggagaagggcccgtcggcggcgccgaccttgctggagaggagggagggcggcagcggcagcggcagcgccgccgccgccgccgtcttggccttgccgctggcgcgtgccgcctggcgcgcgggcgtcttggggatgcccgggcggtgctcccaggagaagggcaccgcggaggcgcgcagcggggagaggaagcggtggtggaacggcgagggcgccggcgagaaatacgggaaggagaaggagaggccggaggacgacgacgaagaggaggcggacgtggcgaccgctgaggatgaggaagaggacgtcgacggaaggagcagcctccgtcgccggcgagtggcgacggcggggggcgccggtggtggggttgaggaggggttgggcattgctgtgcagcctgtgccgtgcccgtgcggccaccgaaacaatgcggccgacccagacacgcgcgcgttaagaatttag

SEQ ID NO: 102926 - DNA, 562 bp, Zea Mays
acaaatgataatggcaaaattgacaatgctcatcgtcgaaggcccgaccgcaacaaatcacaccgaatcaccctctcgcccaccaggccaccaccacaccacaccacaccacaccaccggcggcggcggcgacccagtcgagaacacgaaggcgatggcgacagcgctgaaccgcgggctccgcctcctcgccgccggcgccgaggcgtccaagccagcttctcgtggattccatgccaccggcgtgaagagaatgggagggcatggccatgatgagccatactacatccatgccaagcacatgtataacttgcacaggatgaagcatcagggtttgaaggtgacactctccgtgctgggagcggttggcatcggtgttggagtccctgtgtatgcagtcatattccagcagaagaagactgcctctggctgagatgatgcctctcgctgcctgcatatggagacttattttgagcgacatttttttgaagttaaaagcttggacttcatcctatcttggctgtggagattggggaaaactcagcgctgataccatttgtta

SEQ ID NO: 102927 - DNA, 830 bp, Zea Mays
acaaatgataatggcaaaattgacaatgctcatcgtcgaaggcccgaccgcaacaaatcacaccgaatcaccctctcgcccaccaggccaccaccacaccacaccacaccacaccaccggcggcggcggcgacccagtcgagaacacgaaggcgatggcgacagcgctgaaccgcgggctccgcctcctcgccgccggcgccgaggcgtccaagccagcttctcgtggattccatgccaccggcgtgaagagaatgggagggcatggccatgatgagccatactacatccatgccaagcacatgtataacttgcacaggatgaagcatcagggtttgaaggtgacactctccgtgctgggagcggttggcatcggtgttggagtccctgtgtatgcagtcatattccagcagaagaagactgcctctggctgagatgatgcctctcgctgcctgcatatggagacttattttgagcgacatttttttgaagttaaaagcttggacttcatcctatcttggttgttgcctgatactgcattttcttaccataagttgtaacctcgtttcttgcggtttggtgtaggacacgacttttctgttaataatgttgtggcttgaactttccaggctgtggagattggggaaaactcagcgctgataccatttgttacttttctgtttcttgtcatgcttcttgtgttgactgctgagcatgtttagctggtgtgttgccttttgaggtgtcacttgcttttgtatcaggatgcttacaatttaatggaaattactgtgtagtagcaaggggcttgacctggatcttggaaaccag

SEQ ID NO: 102928 - DNA, 1476 bp, Zea Mays
ttgttggtgcagttagatgaagctgcaccggtgttgtcagggttgagtgagcctattgttgttgccaaagtcaacgctgataaatacagaaaactcggatcaaaatatggagtggatgggtccctaccctcatgctcctttatccatggggttccaattgaatacactggttcgaggaaagctgaccagcttgtccgcaatctgaagaagttcgtttcgccagatgtttctatccttgagtcagattctgcgataaagaactttgttgagaatgctgggataagctttccgatattccttggttttggggtgaatgactcattgattgctgagtatggaaggaaatacaagaaaagagcctggtttgctgttgctaaagatttctctgaggacatcatggtagcctatgaatttgataaggttcccagcactagttgctatcccatccaaagtataaggaacagagtttgttctatggccccatttgaagaaaatttcttagaagattttgtacggcaatcccttctccctttggttgtcccaatcaatacagagacactaaaaatgctgaatgatgatcagaggaaagttgttctcacaattttggaggatgattcagatgaaaactctacgcaactggtaaagattttgcgatctgctgctaatgcaaaccgtgatttggtgtttggatatgttggaatcaagcaatgggatgggtttgtggagacttttgatgtttccaagagctcacagctgccaaagctacttgtgtgggatagagatgaggagtatgagctagtggatggttcagagagattagaagaaggtgaccaagcatctcaaataagccaattccttgagggatacagagcaggaagaacaacaaagaagaaaatcaccggcccttctttcatgggtttcctgaactctctggtcagcctgaactcgctgtacatccttatatttgtcatcgcccttctgtttgtcatggtgtactttgctgggcaagatgatactcctcagccaagacgaattcacgaagagtgatgaaagcttgttgggcttcttgcacctaaagatggctaatctaccgggagattagcttttgtattaattgtacaaaagcttcaactgacgcaagtcgtgaagagtggttttggcaatttggccattcatgctgagtttcttcaatctctattggcgacatcaatttctgcatcctgcctatttgtgtttctgctttgtgcccttcaatttgttctttaatttagagcttagaaattagcctctgcctgtgtattctggaacctgccattccagagtccatttctgtgaaaatatatttattattatcatactctgctaccgagcttttgtacaattaatacaggatatatagactgttctggtgctatgttactcgctagttgtgaagttgtcactaaaatgtaaaagaaatcaaatcattttgctgag

SEQ ID NO: 102929 - DNA, 1398 bp, Zea Mays
ctctaatgataatggactcaagaaacggctgctaaccttagctcttgtcagaacaatcttgctggaaacaaaaatcagcagcatgatttttggctgcttcattcgatagatcaagcccgggaagaactttgcttcatactgggaagtgaaaggttgagcaaaatgtgaggaaagtagcaggaaaaaccaacaaggtgactgagagaattatgttaaaagaggaatgcaacttacccttaaatcaattcacaattaaaataaagagaggtcagaaatttgtgtagcagcctgatagatgaattggaaaaaatagtgatatccttaaatcaattcacaaaagtgtgaagatagacatagttgactcacaattaaaataaagagagatcacaaatttgtgtagcagaccgatagatgaattggggaaaaacagtgacacccttaaatcaattcacaaaagtgtgaagatagacaactgtgtcgtgacacattttctttctaattcaacaatttacagtgaccaagaatggcattagatgggtgtactttaccatagacacataagttcaggatagagacaccaaactgaatgaccttaacaatccattatcatatcatgatatcatggctactatacacaatattcacatggaagtaaatggagttacaagaatgaatatacaaagtaacataggagcaattcagatattcttagttacaataacacatttttctacaagttggtcaggctaaatttattttgtctgtacagtaacttagcaacagatatataatttagtacatggtcacaattaggaacctaccctctatagcctgagcatctaatgcaaatctgtcaagtatcggggcagttgcaacaaagctagagtagcataaggtacttaagctgtaacaagataggtcttgaaaatatctcaaaagcacttaacattcttaagcggaggtgccagaggaagccttggcggaggtagaaagcttggatcttctcttggccaagctctcgttgtggcggtctctattccttcagcctatgggaagaagcttttggtactcgacagcctcagactttctcttcttggcaatcttcttgtcaatgattctagtgtgcttcctatgaagggtcaagggttcacaagccactggatcttacgtgccttgctcaccttcttgcctagaaagcaaataggttagcttggaaaacttcagaaatcaatggctcattgtcatgaatcctattcctaaggtacttgaggatataagagtaaataaccaagacatttatccaacacataacaagcctagagtactaatagaatagtaaataaccaagatatttatccaacacataactgattctaagatacttgaggatctccatat

SEQ ID NO: 102930 - DNA, 348 bp, Zea Mays
aggcttttgatcagtatcggtttctgccgatgtgcacgttagtctgcacaggattcttattgcacaatgtggctgattgctaatgtggaagctgcaaagcggaaaaggagtttaatatattattcggctggctggttgttttatatggaacaagtttgtgtcggtctagtattagtgtaatacccttgtcctaattttggagcttacgtgcatcaacgtacagagcagataaaactcaaaagcctgaattgccgtcaattttccatctgacactttggacagaaaaaatgaaaaaaaatgaagagggaaaaaccatatacatatatgaaactgtagcaaatactatta

SEQ ID NO: 102931 - DNA, 484 bp, Zea Mays
tggagatggtggggagcgtccgagaggagccgaaagtggagcaccacttgcgcatggaaaaggcctgtggctctctacggatttactcgaccgaggtgcttggccctcgcgggggcttccctttgcgtaggggcaccaatgaggattagtcgggaccttgtgtggtttcggatacctctcttaggtgtcacttgtttccttcacacgcctctaccatattcggggcaagatgcacaagaaggtctagatcacggctggggacatcatccttgtcggcctccgggactactaggatgacaaggctggtgtcatcctcaagtacatgaacaatgaggcgtgcctgctcaaggcctatggggagcctcccgacacactcgggttcagcgagggcatcgacattgatgggcccgaggacggcgatgaagagaacaactacatctagttcgaggacgaggacatcgacaagatttagggttacttgttc

SEQ ID NO: 102932 - DNA, 1506 bp, Zea Mays
aaggcgtgcatgaacctgacgctgagtctagccaccaatggcggcgccacggccaagaagcgcaagctactgcgggacagcgtcgtcgtcgacgacgacgtgacgacaagctgcgacgggggagaccgccgccacggcagggtggcgaggcttctactacaggccggcagggaacgggtgacggccaagctggaggccgacgacgaccggctgcggctcctgcatttgctcctcgcgtcggtgtccgccgcggaggccggcgacgcacgcgcggccgccgccgccctgcacgaggtccgccggcgcgcgtcgttccgcggcggcgaccccgcgcagcgcgtcgcggcccacttcgcgcgcgcgctggcggcgtcgagtctcgtcgtccggtcgccgcccggggccgaggccgaggcctcgccgccgacgcgcgctgagcggttcctggcgcacaccatgttctaccaggcgtccccgatctaccagttcgcgcacttcacggcgaaccaggccatcgtggaggcgttccagagcggcggccgccgccgccggcgcctccacgtggtcgacctcgacgtgtcgtacggcttccagtggccctccttgatccagtccctgtcggccgccgccgccgcgagcgcgagcacgagcacgagcagcgcatcacacgacggcgacgagccggtttccctgcgaatcaccggcttcggcacgagccacgacgagctgcggcgaaccgaggcgcggctggcgcggttcgccagcgggttccccagcctgatgttcgagttcgacggcattgtggacgacggtccagacagtgtcctccgtgatgaacgcatcaaggtcgtcgaccacgacgcgaccgtggtcgtcaacctggtgctcccgggatcacggagctcgatgacgacgggcacaagacaaaaggcgcgcagcgcgttattggcgcgcaccatccactccctcaacccttccctggtgttcttggtcgagaaagacggcggcggcggaggcaataataatgctacgtcgagaggaacaggacgctcgagcctgctgcttccagcgttcacggccagcctccggtacttctccgcggtgttcgactcgctgcacgagtgcctccccgccgacagcgccgagaggctcgccatcgagagggaccacctgggcgtggagatcagcgacgccatggcctgtttagacttcaacagcaacggcggcgatgacgatcacatggcagagcctagctggaggcagatgatggagcgctcggggttgttcgagggcgtggagctgagcacgcgaacggtgagccaggcgaagctgctgctgaagatgaagagcgcggggtgcggcggcggggggttccgggtcgtggagggggaaggtggcagggccatgtcgctggcgtggagagatagagagcagctcatcaccgcgactgggtggcggcgccggcgtccatcgatcgaccatcatgaagcacgcgttcatggataa

SEQ ID NO: 102933 - DNA, 1508 bp, Zea Mays
cttcttgttcgccccgactccgccgccgcacgccggggctcaatctgctccgcttccctccagcctttgtttcctccattccccgcgccaatcctgccgcctcctgctcgcgcgcttactgtagccgcagctttctccacccttggcaatggaggccgcgatcgctcacgctccatctgctccggccctgcgccgctcgctcaacctcaaccccacgcccgccgtccggccgcacccaaaaccctggcagggggtgctttcggcgaggcacccgtcgaacgccgtcaggtgcgagccgtcccagcgcccagaggcgcgcccgcgcctgcgcgctgcgcagccggctggcgctgacgcggcggtcgggaggaagcggctggcagtgttcgtgtccggagggggatcaaacttccgggcgatccatgaggccgcgctgggcggcgccgtgcacggagatgtcgtcgcgcttgtcaccgacaagccaggttgcggtggcgcggaatatgctacgaacaatggcatccctgtgctcgtatttcccaagtccaagtctgcgcccgaggggatttcggttgctcaactgctggatactctgaggggaaacaatgtagactttgttcttcttgccggttacctgaagcttatacccactgaattgatccaggaatacccaaaatccatattaaatatccacccttctctccttccggcattcggagggaaaggtttctatggttcaaaggtgcataaagctgttattgcctctggagcaagatactcgggtccaaccgtacattttgtggatgagcactatgataccggtaaaacgttagcccagagggttgtgcctgtgttcgcggatgacacgccagagctattggctgcaagagtcctccatgaggaacatatggtctatgttgaagcagttgctgctttgtgcgaggaccgcgtcgtatggagggaagatggtgtcccacttatcaaaagtcggacaaatccagctgtgtacatctaattgacaatacggcaatagtagcactattttggagtaataatggaatttgtagagcccttgccacttttcccggtaaaaggggtacttagcagttgacgtagggttgatatacagggcacaacttatttgccaccgaaacatttccatgcgttggaagtgagaaacattgcccccaataggccgcagtatccattactgcatggaacaaggttgaaattttaccttgatttgagataactatcaaatactgcgaatgcattattcttccggaattcctttttttcttaactatcaaacggttgctcgatcttgtgatggtcttttattgattgaaggtcttgtgatggccaccaaacagttgttttgtcttgtcctccaggaattctttattgctgttcgtaatgtttagatgagcaaatctgtaaatactccctggatcatgtgattgtcttctattgattgaagatcttttgttatattgttatgtgtttgt

SEQ ID NO: 102934 - DNA, 609 bp, Zea Mays
ccataattatgttccccatgctagcttgaatgagtcaatacaagggcaacgctggaacccccttcaataatttacaactgttgcagtcatgcggcaccacagcaaaagaaagaaaaaaatgaaagaaaacttgaaaacaagaccacagactagcaggtccatcatcggctggtaccacagactagcaggccggcgaaaaccctcagcagctgagatgaaactccccgctggcgtggacttgcttcacctgcttctcgtactcgtcctcgccgtcctcgtgttcctcgtctggatccttgctgtcctcctgctcgtcctcctccgcccaaccgaagccagccacgggggtggaggaaggaggcggcgtccgcgccttctccacgatcttcatgatctcctccacggactggacggagtaggtcggggcgctgttgtctttcttgtagtacatggcctgcgcagcctccgtgagctctctgggcaggttcttcaggaaccaggggtggttcctgatctccctgatcgttattctctgcacgggtttggagatgcaatgcgatgaaaccaacctcgtaccaaataagaaccgcttaagatgatcctgagttt

SEQ ID NO: 102935 - DNA, 894 bp, Zea Mays
gcctggtttcccctagccgacgtcacgactcactcacaagcacgacgacggggcacacgagctcacgggtgatggcgaacgagggcgtcgcggccgagcgggcggtcaaggcccctccaccggagacggagagcatcgtgtggagggaggacaaggggaggttccagacgcccgacggcgaggccttccttcagtaccgcctcctcgacggccgcggggcccccgctgcggcagtgatggacctggtgcacacgtacgtgccgcggagcaagcgcgggcaggggctcgcggcgcggctctgcgacgctgccttcgcccacgcgcaggcccgcggcatgcgcgtcctccccacctgctcctacatctccgacacgtacctgcctcggaatccggcgttgaaggagctcgtggacaaggatcaagaaccccatcccaaacccagcagcatgtagatggttggttgttcaagaaaccagctgccacttaaataagcagatatccagaaatacctgtcacttgatgaacgtttgcttcttcgaaggcgttgatgtcagatgttacacgttggatatctcgtgcagtgtttcagaaccatttgattttggagaagataataataacaaagcttgaaatacatgtagctttctgctgaacaacaagtataatgccgatcattcagtgctcaagtagctaaacatcgtcccaataaataaaataatgtaaggaaggtgcaaaggtttaactgtacaatcagaaaaatatatattcacactacagagttttacaacggtagactgattgtttttgtagtacagaccccacattactacaggagggtggttccacttgttttgatagtgagtttgtttcctcccacgctgttttcaagcacca

SEQ ID NO: 102936 - DNA, 1196 bp, Zea Mays
ctttattcatttttttttcttttttggtattttccggacagtggagtggagggcgatagatagggcagcatggcggcaaccttctgcgctggacccgccgcatccgcggcagtaaaccctagctccgccggctgccgaccccagaacctaactcgggctgccgtgctgtctgcttgctggcggcccagcaggccgactcccgctttcgtctccctccggcgccccaatgccgagctgcggccgctgcgcgtggccgccggctccggcgttgacccgaaggttgtcaacggggaagattttcctcccatgaaggacctaattcagctatacaggacagcttttctagaaggaaatgaggaggttcttggtgtagttgagaaggcaatcactgctgtggaaaaagagaagagtacgatagcttcccaatttgaaagtattacaaccgaaataacttctgggaaggaaaagtttattcgcttaaatgccgacctggagaatttccggaaacagactgaaaaggaccgtgcaaagttaacatcaaatatacgggtggaagttgttcagagtctgttacctctagttgatagttttgagaaaacgaatctagagaacaccccagagactgagaaggagcaaaagatcagcgcaagctatcaaggcatatacaagcagttagttgaaacactaagatatttgggtgtgggagttgtggaaacagttggcaagccatttgatccttcggtccatgaggccatctcacgagaagcatccatgcaattcaaggcagggattgtcatgcatgaagtccgcagagggttccatttgaaggagaggctgctaaggcctgctactgtgaaggtctctactggctctggcaaacaaagtgcaagctcataggcgggggacaaagatgctgctttgtgaatctgatcaaacgaccaacaggaactgatagacacacatttttctgttcataacatgccgaatgtgtttgatctcaaatgagacgggatcagctatgtatggtgttgacagggagcaccagcttgaagttttgctgttgcttgtaatctgctagaattttgtccaccagaagagagagaatgaaacattggacattcataccggatttatattgagttccttgctcacttcattggacatccataccggatttatattgacttccttgctca

SEQ ID NO: 102937 - DNA, 282 bp, Zea Mays
atgtctgaacacatatgtatggcctggaacatacaagtgcatgaggtgctgctgtcgcacgagtacacgggattctatttgttaggcacgatctactgctttatttctgcctatgcaagtataactggtatttatcagtcgaactccagaacagtttcagcaacacgagttggtgcctcagaagaacttttcatagtcttgaggttgctggtcccaaacctccataaaacctatgtcactaagagaactgtatattggatcatccatcacagtaatgccctg

SEQ ID NO: 102938 - DNA, 919 bp, Zea Mays
caactgcatttctccgcgacgactcgagctcgacacacgaaacagacatggccgccgtcgccgctctttcctgccccgcgcctccgcgtgtgttccgctgcgccaagacgctgcctgctccctccgccgccacatccagccgcggaagggtcggctacggctcctcctacgcccgccggtggcagtgccgccgctggacccaccggccggacgctacgacgacgcggatcaggcgggcaacgccgcgccgcacggcggtggtgagggtgaactgcgcctactctccccgcgctgaaacaatcactgcatgctcttggaatgaatatgtgatttgcagtgatgtacctgtgcttattgagttttgggcctcctggtgtggaccttgcagaatggtcacacggattgtcgatgagatagcacaagaatatgttgggagaataaaatgctataagcttgacaccgatgattacccacaggttgctacagcttacagcatcgagaggattccaactgttttactctttaaggatggagagaaaatacatagtattaccgggacactgccaaaggctgtttatgtgaaagccattgagaaatctatttcagaacaatgacatatttggttaatattctttggtccatagatattaaactgtacactccattttataccagatagtgcagagagctcaaggtaaaatttgagtttacagcacaagcatcttatctagaagtatggaactgatggtgatccttttgctatcaatagcagtgtaaatatatgtatttcttaaaagccagagtgttcccttttttaaccaaaaaaattcctcaaaggctgtaatgtattacagggcagaatatttgaggccctcagcgataccttatttaatgaaattaaagttttgtttccttaatt

SEQ ID NO: 102939 - DNA, 92 bp, Zea Mays
gaacaaatgattcacggagctatttgatacggcaccatagtagcattggttgtaaagggtggcaactgtcctggcaaagcctctctctctct

SEQ ID NO: 102940 - DNA, 1773 bp, Zea Mays
cgagcggggcccacggcggatgaggcactccccagtccccaccaaacggccaacatccgcggggggcgcggggcggaaggaaagacgaaattagagcgaccgggtccgagaaaaaccacgcacggcggggtgccgtgccgacgccactggcatgtccggccttgcaagccacacaacaagcaccactcggagacgcgagcggagcgaagcgacgccgcccacgcaccagcctgcttgctcctcctcctcctcctggcttctttggctgcaagctgaaagttccgtgctcaggccagcaacggagcacaacatacagatacagctcggccggagctagagtagcgggcggcggcgagaggagaaaacaaggaagcgaggagatggcgggcgggggcagggatgggccggcggcgcgtcttctccggcgcgtccccgccgccgtgtccgtcctcttgatgctgacgctgtgctcccccgggccgcccggcgcggtggtggtggtgtcggcccggaaggtgggcgagacgtgcgcgctggaccggaactgcgacgccgggctgcactgcgagacgtgtgtggccgacggcaacgtgcggccgcgctgcacccgcgtcgctcccgtcgacccacaaaccaaggcgcgggatctgccgttcaaccgctacgcgtggctgacgacgcacaactcgttcgcgcggctcgggcagcggtcgcagaccggggtcgccatagccacgccgtggaaccagcaggacaccgtcaccgagcagctcaacaacggcgtgaggggtctgatgctggacatgtacgacttccgcaacgacgtctggctctgccactcctacggcggcatctgccagaacttcaccgcgtttcaaccggcggtgaacgtgctccgcgaggtggagcgcttcctgtcgcggaaccccgccgaggtggtgaccatcttcgtggaggactacgtggagtcgcccatggggctcacccgggtgctcaacgcgtcgggcctcgcgcgctacgtgctccccgcctggcgcatgcccaagagcggcggcgactggccgctgctcagcgacatggtccgcgacaaccaccgcctgctcgtcttcacctccaaggccgctaaggaggccgccgagggcgtcgcctacgagtggcgctacgtcgtcgagaaccagtacgggaccaaggggatggtgaaggggacgtgccacaaccgcgccgagtcggccgccatgaacgacctgtcgaggtcgctggtgctcgtcaactacttcagggacctcccgaacctgccggcggcgtgcaaggacaactcggcgcagctgctggacatggtcaccgcctgccacgacaagtccggggaccggtggcccaacttcatcgccgtggacttctacaagaggagcgaccggggcggcgcggcggaggccacggacaaggcgaacggcggcctagtctgcggctgcgggagcatatcggcctgcaacgccaacgggacatgcactccccggcacggcaggacgcccagaggcatcttcaacgcctcatctgacgcagcggcgtggaggccgccgccgccggtgctgcaatggcagaggctcatcctgctgccttctctccttgctcttcttctgggcctgtgaattctacgtattttgttgtatagaccgatacggatcggtttggttgcaggcaccgagcgcattttgttgtgtatatatacacacagatgacagattggttgaagccagctagcagcttagtccatgg

SEQ ID NO: 102941 - DNA, 831 bp, Zea Mays
atgccatcttaacttacatctctgtacgggaaatcgtcaacctcaagcatgtgaatgacatgcccaatctttggcctcttgcgagcttcagggtctacgcaccgcagagccactagcaaagccttcttcaatgccctagaagtaggcttctcagtcatctttggatccaaaaccccctcagaatttctgttgctgaccatcgtcttcagccactcaactagattaatctgaaaagattgctccacaaagttcatatatgcacttctcacgttcattattcagcgaatgcaaggaggtactgccattactaacctcccctggcggcctgttgtaatcaacaggtacacggccagatattatttccatgataagaattccgaaactatagacatcgctagtttcattcaacatgccagtgcccgcatactctggtgcaacatacctgcaagcaacaaaatttaaaataagccaccacaaacttgtttatcttggaggatcctaatcttataagcagcgttgatgtctaacccaaacgtccccatgaccctggttgtgacataactcctttctgaacccaaaagtttcgctagcccaaaatcagaaagctttgcattccaatgcttgtcaagaagaatattgctcgacttgacatcacggtgaacaacctttggctcaagtccctctcagcaaagtgcatacccttttgctgttcccagaataatcttcattctgatatcccatgtaagagggctcacagggccaacatccccatggagccattgctccaagtttccattattaacgtactcatacacaagcatcctggaatgg

SEQ ID NO: 102942 - DNA, 2570 bp, Zea Mays
tgttttcttgtggttctcgcgtgctactgtgctgagaggggaccaggaagaatccgtcgtccggccggctcgctctctgccggccatgacgagcgccaataaggcgaagctccagctgcaggagagggtcccgctcccccgcacggcgtggaagctggccgacctcgccgtcctttccctgctcctggccctcctcgcccgccgtgcgtcctcgctggtgtcgtcgggcggcacggcggccgcgtgcacgtggtgctgggtcgccgcgctcatttgcgaggcgtggttcacggtggtctggctgctcaacatgaacgccaaatggaaccccgtccgcttcgtcacgcaccctgaacgcctcgccggatattgggcgggcgacgacgagctgctgccggcggtggacatgttcgtgacgacggcggacccgaagctggagccggcggtggtgacggtgaacacggtgctgtcgctgctggcgctggactaccccgcgggcaagctgtcgtgctacgtctccgacgacggctgctcggcggtgacatgctacgcgctgcgcgaggccgccgagttcgccaagctctgggtgccgttcaccaggaagcacggcgccaaggtcagggcccccttcgcgtacttctcctcctcctccggcggcggggcggcggagcgtggcggtggcggtggggccgccgacgccgacgccgagttcctgcgcgcttggacgtccatgaagaacgagtacgaggagctggtccgccggatcgagagcgccgaggagaagtctctagtccggcgcggcgacggcgcgttcgccgagttcgtgggtgctgaccgcgggaaccacccgaccataatcaaggtcctgtgggacaacgacagcagcaagagcgagagcgatgagcaggcggcaggggatggagtcccaagcctcatatacgtctcgagggagaagagccgcacgcagccccaccacttcaaggccggggccatgaacgtcctgacgagggtgtccgcggtgctgaccaacgcgccgatcatgctgaacgtggactgcgacatgttcgccaacaacccgcaggcggccctccacgccatgtgcctcctcctgggcttcgacgacgaggtccacagcggcttcgtccaggcgccgcagcggttctacggcggcctcgcggacgaccctttcgggaaccagatgcaggttatattcgagaaagttggacacggaattgccggactccaaggcatattttactgcgggacgggttgctttcaccgcaggaaagtcatgtacggcgtgccaccgggctccggcaccggcgccaccaaagcagattcaccgtcctacaaggagctacagaagaagtttggcagttcgaaagaactgatcgagtcggcgaggagcatcatcacgtcgaaagaagcgccagctgcggtggcagatctaacgagccgcgtcgaagtggcgaagcaagtctctgcctgcagctacgagacgggcacgagctggggtcaggaggttggctgggtgtacgggtccatgaccgaggacgtcctgacggggcagcgcatccacgccgccggctggaggtcggcgctcctgagcccggacccaccggcgttcctcggcggcgcgcccaccggcgggcccgccagcctcacccagtacaagagatgggcgacgggcctgctggagatcgtcctcagccgccacaacccgttcctcctctccgcgtccaagcgcctccgtttccggcagtgcctcgcctaccttgtcatcgacgtgtggcccgtcagggcgcccttcgagctctgctacgcgctgctcggaccctactgcctcatcgccaaccgctccttcctgccaaaggtaaacttagtaataaatttccctctatcatcatcgtcatcgtttcagtggaaacggcgtgtgtcatgcacattaattaatcagctgcacctgcatgcaaattttttttttttacaaaaaattcttcgtccaggcatcggagcccggcttcgtcgttccgctggcgctgttcctggcctacaacgcgtacaacctgggcgagtacgtggactgccggctctcggcgcgcgcctggtggaacaaccagcggatgcagcggatcacgtcgtcctccgcatggctgctcgcgttcctcaccgtggtcctcaagacggtgggcctctcggagacggtgttcgaggtgacacgcaaggagcagcagcagcagcagggctcgcccgacggcgacggcgccgacgccgacccggggcggttcaccttcgactcgtcgccggtgttcgtcccgccggcggcgctcgcgatgctgagcgtcgtcgccgtcgccgtcggagcgtggagggcggtcaccggtggcggcggcggcccgggcgtcggggagttcgtgtgctgcgcctggcttctgctctgcttctggccgttcgtgaggggcctcgtcggcggcaggggaagctacggcatcccctggagcgtcaggatcaaggctgccctgctcgtggccgcgttcgtgcacctgtccacacgcaagtaacttgcccgg

SEQ ID NO: 102943 - DNA, 1739 bp, Zea Mays
gtgactttgttgaaaaatggaaagacacgaggtgtaggatgggccgttgtttttgttagctttgtaactacgaaaaaagttacgtttttttaaaaaaaatagaaagtcacgacggacgtataatcggtggtcgcttgtatagttgacaacggctataaattttacactataaaatttaaaaaaacaattcagattaaaaccatgctctatttttttaactaaattaattataaaaaacatttagatcgtgatcgattacgatcgcgatcgattacgaccgctcgtctcgtttggtgtcaaacgagtgtggttcgcggatgagcaggactgggtgtttatcgggaaaaaacttcgaatgagccgctatccagtgtgatgatttgcccagtgtattctgattcagtccatgaacttgactggttgtgcaatacaagctctggcagcagcagattcaccgtcctacaaggagctacagaagaagtttggcagttcgaaagaactgatcgagtcggcgaggagcatcatcacgtcgaaagaagcgccagctgcggtggcagatctaacgagccgcgtcgaagtggcgaagcaagtctctgcctgcagctacgagacgggcacgagctggggtcaggaggttggctgggtgtacgggtccatgaccgaggacgtcctgacggggcagcgcatccacgccgccggctggaggtcggcgctcctgagcccggacccaccggcgttcctcggcggcgcgcccaccggcgggcccgccagcctcacccagtacaagagatgggcgacgggcctgctggagatcgtcctcagccgccacaacccgttcctcctctccgcgtccaagcgcctccgtttccggcagtgcctcgcctaccttgtcatcgacgtgtggcccgtcagggcgcccttcgagctctgctacgcgctgctcggaccctactgcctcatcgccaaccgctccttcctgccaaaggcatcggagcccggcttcgtcgttccgctggcgctgttcctggcctacaacgcgtacaacctgggcgagtacgtggactgccggctctcggcgcgcgcctggtggaacaaccagcggatgcagcggatcacgtcgtcctccgcatggctgctcgcgttcctcaccgtggtcctcaagacggtgggcctctcggagacggtgttcgaggtgacacgcaaggagcagcagcagcagcagggctcgcccgacggcgacggcgccgacgccgacccggggcggttcaccttcgactcgtcgccggtgttcgtcccgccggcggcgctcgcgatgctgagcgtcgtcgccgtcgccgtcggagcgtggagggcggtcaccggtggcggcggcggcccgggcgtcggggagttcgtgtgctgcgcctggcttctgctctgcttctggccgttcgtgaggggcctcgtcggcggcaggggaagctacggcatcccctggagcgtcaggatcaaggctgccctgctcgtggccgcgttcgtgcacctgtccacacgcaagtaacttgcccggccccggcgtcgactcaccactgctactgctgcggaaggttttcatgtcagagacccgtaataatgcagacaacagcatgttccgcctaagatttgtacacaactctctgcttccactgcttgtatagaattcttgctcaagattacaagtcgaggccagtggtcggcgatagaaacagcgagtattattt

SEQ ID NO: 102944 - DNA, 1173 bp, Zea Mays
acgacccatattttaaatggagtactggatcgaagcattccggtccgacgtgattaaaactctcgcaccggagacccctttagagcttgacctctttaatcctctcaaaccactaggtttacgcgcattgtggctcctcacttccgcgccgccacccctacaggtgaatataacgaatccgccgccggcgtcatctcctcctcccacctcgactcgccttgctcgccgtcggcggccatttcgtcgccgcgcggcgagccgcccatgttgagctcgcggcggatctgatgggcttgttgtgatctcctgcaggtaaggaagaggaggagggcaggatgtcgcaccgtaagttcgagcacccgaggcacggctccctcggcttccttcccaggaagcgctcctcccgtcaccgcggcaaggtgaagtcattccctagggatgaccccaagaagccttgccatctcactgccttccttggctacaaggctggcatgactcacattgtccgtgaggttgagaagccaggatccagtatgtccacccccttcgtttttgttaatcaattaagctgatgacatagtccagtttgtttatatctgaaaaatgaattgtaacataagcatgatttgatttctgaccagcagttttagtttttttatgaatttgagggcacttaattttagatgataagccacacaactatctcttcacaggcccatagacttactcaaaacaatagatttttctgtttgaatatccacaactgcttgcacccatgaatctcgagtatatggataccatttcactccattatcgtaactgctctgcctacttgatttctacagaactccataagaaggaaacttgtgaggctgttaccatcattgaaacccctcctcttgtcattgttgggctcgtggcatatgtgaagactcctcgtggcctccgcacactcaactctgtttgggcccaacatcttagcgaagaagtgaggagaaggttctacaagaactggtgcaagagcaagaagaaggctttcacaaagtatgctctcaaatatgaaaatgatgctggcaagaaggaaattcagctgcagcttgagaagatgaagaaatatgcttctgttatccgtgtcattgctcatacccaggtaagaagcttaattgtgctttg

SEQ ID NO: 102945 - DNA, 1348 bp, Zea Mays
acgacccatattttaaatggagtactggatcgaagcattccggtccgacgtgattaaaactctcgcaccggagacccctttagagcttgacctctttaatcctctcaaaccactaggtttacgcgcattgtggctcctcacttccgcgccgccacccctacaggtaaggaagaggaggagggcaggatgtcgcaccgtaagttcgagcacccgaggcacggctccctcggcttccttcccaggaagcgctcctcccgtcaccgcggcaaggtgaagtcattccctagggatgaccccaagaagccttgccatctcactgccttccttggctacaaggctggcatgactcacattgtccgtgaggttgagaagccaggatccaaactccataagaaggaaacttgtgaggctgttaccatcattgaaacccctcctcttgtcattgttgggctcgtggcatatgtgaagactcctcgtggcctccgcaaagttgcttgtatcggtgcatggcatccggctagggtctcctatacggttgcccgtgctggtcaaaatgggtaccaccaccgcactgagatgaacaagaaggtttacaagatcggcaaggctggacaagagacccacgatgcctccacagagtttgacaggactgagaaggacatcactcccatgggtggcttcccccattatggtatcgtgaagggtgactacctgatgatcaagggctgctgtgtgggtccaaagaagagggtggtgaccctccgccagtccctcctgaagcagacttcccggctggcgctggaggagatcaagctcaagttcatcgacacatcgtccaaatttgggcacggtcgtttccagactaccgatgagaagcagaggttctttggcaagctcaaggcgtaaggtgctgcggtgcagcgacaagtcccatttctcaaaatcatcaaactgtgatacttttgtttgtaaccttgctgtactaagttttgtagccggatggtttgggagcatggtccggtcttctatggattgttccatgcttctgaactgcaatgtctatgttttgtgctactttggttgtttaatgccctaatcattgcatatagattccaattgttttggtgtttgatgatcaacataactatttatactaattgtgtttgctagtgtttataaatatagtttagagggtgcaacgtggactgatgaagtcaacaacatattaaagtaatacattaggatatttattgaagacttatgaagatcatgtaagagtccacacaagaagaaacacgaaaaaaataaagtcataaggtcaaagagcagcaccaaaaaatcaaagaaa

SEQ ID NO: 102946 - DNA, 684 bp, Zea Mays
atggggagctcgaggacacgcccgcacgacaccagggagcgagcaggacgccgcggcatggacgagggagaagcaggggcgtcgctggctgcgacggcgagcaaagcgcagagcgcacgagcgcgcgcagcagggggcgcggtcgagcagagcatcggccaacagagaaccgagagggagaggaaggagctggagggaaagctccgtgatggtgacaaaaaagtaaacgtggatccagatgatgatagcgactggctgcatcggaatgagacattccagtcaaacgactatgtcgcaatgacacaccttctgacaccaggcagtgtgcatgattctgttggtgtcattggggaaccgggtatcgacgtgagggagtataggcttgaacaccttaggttgtataatcagacaccaaagcagaaagaggcaaagatagagtacatgataaaacatagagcgctacaggctgacactttgaatgttgcgtccatcgccatggagaacccaacatatacccctaaggttgtacaccttacaacagatgcaacagaacctgatcgatcctctagttatcgcctgcgactgggtttccctgaattcatcaggacgccgcggaagctgccgcagggggaagaagacagactgggcagcgggatcttatcccagaccagagcggcggcttga

SEQ ID NO: 102947 - DNA, 876 bp, Zea Mays
caaaacacttgcagtgattagggcattaaaacaaccaaaatagcacaaaacatagtcactgcagttctgaagcgtagaacaatccattgaagaccggaacatgctcccaaatcatcctgctacaaaacttggtacagcaaggtaacaaacaaaggtttcacagtttgatgattttgacaaatgggactttcgctgcaccgcagcaccttacgccttgagcttaccaaagaacctctgcttctcatcggtagtctggaagcgaccgtgcccaaatttggacgatgtgtcaatgaacttgagcttgatctcctccagcgccagccgggaagtctgcttcaggagggactggcggagggtcaccaccctcttctttggacccacacagcatcccttgatcatcaggtagtcacccttcacgataccatagtgggggaagccacccatgggagtgatgtccttctcgtacctgtcaaactctgtggaggcatcgtgggtctcttgtccagccttgccgatcttgtagaccttcttgttcatctcagtgcggtggtggtacccattctgaccagcacgggcaaccgtatacgagaccctagccggatgccatgcaccgatacaagcaaccttgcggagacccctgtgggttttgcggggaaggcgggtgacaccccaacgagtgaccacaccctcataacctttacctttggtcacaccaatgatgtcaatcatctcatccttctggaagacagcatcaacagggacctctttctcaaaaaatttatagccgtagtccaccttgtcagcaatggtaccaccattgacctgaatctccatcaggtgagccttcttctgcttcaaacccttcatcttcctaat

SEQ ID NO: 102948 - DNA, 960 bp, Zea Mays
aagaccggaacatgctcccaaatcatcctgctacaaaacttggtacagcaaggtaacaaacaaaggtttcacagtttgatgattttgacaaatgggactttcgctgcaccgcagcaccttacgccttgagcttaccaaagaacctctgcttctcatcggtagtctggaagcgaccgtgcccaaatttggacgatgtgtcaatgaacttgagcttgatctcctccagcgccagccgggaagtctcaagctgcagctgaatttccttcttgccagcatcattttcatatttgagagcatactttgtgaaagccttcttcttgctcttgcaccagttcttgtagaaccttctcctcacttcttcgctaagatgttgggcccaaacagagttgagtgtgcggaggccacgaggagtcttcacatatgccacgagcccaacaatgacaagaggaggggtttcaatgatggtaacagcctcacaagtttccttcttatggagtttggatcctggcttctcaacctcacggacaatgtgagtcatgccagccttgtagccaaggaaggcagtgagatggcaaggcttcttggggtcatccctgggaaatgacttcactgcaaaaacaggaaaacgagtatcagattttggacattaagtaaacctgccaaaggaatatgcataccatacaaaacaggtaaaagcacttagcgcagcatggcaaaacaaaccatagtttaatattcatagcaacaaaaattcaattgtacaactcgttttcagattatacataatgttggattgaacttatatacaatagataatccttcactgacggaagacaaccctatgaaaattattacttaacaccactaccggagtacagtttgtttaaatagaaggaagataaataatacttcaagttctaaaggttgaagggtagaacatttcagataacatgaatcggg

SEQ ID NO: 102949 - DNA, 483 bp, Zea Mays
atggactcgcccccgccatcgtcgaccgctccggccccaaccagcagcaccctcggccacgccaccccaaccccaagaacagtgcgtccgcatccaagcttagatgatccacatgggcaagatttagataaactagagtctgatagtgatgattgtcaagaagtagctgccctcagtgtaactagtagccaaatttcttcatatagtatcaaggctaaaaagatgaagttcaagttgggtgagtgctttggaatgtgtgcactcgataaaactaagacttccatgaatttaatatcaacaactaaggaccaatgtagaatagaatcttgtgatgatacaatcaagtacgaacatcagacccctccagctaccttgtcgacgcatgaacgagaagacgagttagactttgtagaagccctcttcgctagtggaggtatcgaccatcactcgtcactataccccgatggtgatcggcgatcatga

SEQ ID NO: 102950 - DNA, 1405 bp, Zea Mays
cggagccggactcccacgacgcgctgctcgacccacccggcaaccaaaccctatccaccccgcgtcctctctcccctcatttaaaccgccaccacgacggcacgccgcctcgtcggaaaaaccatcatctaaagttcaacgcccgcaccgcaagcgcaacacgccaacacccgagacccgacgcggccttcgccttccctccgcgcgagggagattcgaggggagagaggttctcaccttcgcgcctgcggttgcttggcgcagagtcgtcgcagatggaccggtaccagagggtggagaagccgcgggaggagtcccctatcggcgccaacgagatccgcatcacggcgcagggccggccccgcaactacatcacctatgcgctcgccctgctccaggacaatgcaacagatgacattgtcatcaaggccatgggaagggcgatcaacaagacagttgccatcgtggagcttcttaagagaaggattgctggtctccatcagaatacctctattgaatccattgatataacagacacttgggagccattggaagaaggccttgtcactcttgagaccattcgccatgtgtccttaatcactattaaattgtcaaagaaggagctggatacatcatccccaggttaccagccgcccataccagctgaccaggtcaggccagcagctgactttgatcaggatgcagaggccgtaccaagtggtcgtggaagaggacgtggtcgtcgcagcaggggcaggggaaggggaagggggttcagcagtggagtagactatgatgatgagattggagagccagaggaggctccgcgtggatatcgtggcagagggaggggccgtggagggcgtggatcttttgcagttggaaggggctatggtggtgataattatgcgatggaagaagctggtagatatgatgatgatggatataacgcaccacctatgcaacgatatgaaggtggcagaggaaggggcagagggcgtggacgcggtcgtgggcggggaaggcaaggccatggacctcctccgcagcagtagattggttggcacatcacctttgggatgtcataacctccatttctttccataagataaatgttaccgtccattatattttttatctggttattaggttcatgttgaaagttgacatagtgactctagtgtggaggatgcggctagttaagatttggtagctaggttgttcgtccatttgcctatttattatctcagatcagacttggtgccgttccagttgtgcattgtagcctctttttaccatgaaagttagttcagaagattcttttatgttgttgcaaatcacagactgaaaacgtttgttttcaacttagtaccatggttctgtaattgaacatggtacctaacaa

SEQ ID NO: 102951 - DNA, 1761 bp, Zea Mays
gaacccatcgcaaccaatgctagcatgaccacgccgcgcggcacccagcgacgcgcggccgcccctgcggcggccgcgggcggcgagccctacaacatcctgcccatccacgacctcctcgccgagcacccgtcgctccggttccccgaggtgcgggctgccgcggcggcgctccgggcggtgggcggcctccgcccgccgcccttctcgcagtggcgcgccgaccaggacctcatggattggctcggcgccttcttcggcttccagcgcgacaacgtcaggaaccagcgggagcacctcgtgctcctcctcgccaacgcgcagatgcgcctctcctccgccgacttctccgacacgctcgagccccgcatcgcgcgccaaatccgcaagaagctgctccgcaactacacctcctggtgcggcttcctcggccgccgcccctccgtctacgtccccgagggcgacccgcgcgccgatctgctctacacgggcctgcacctgctcgtctggggcgaggctgccaacctgcgtttcatgcccgagtgcctctgctacatctaccaccacatggcgaccgagctgcaccgcatcctcgagggcttcatcgacaccgccacgggccgccccgccaaccccgccgtgcacggcgagaacgccttcctcgtgcgcgtcgtcacgcccatctgcgacgtcatccgcgccgaggccgaatccagccgcgacggcaaggcgccgcacgccgcctggaggaactacgacgacatcaacgagtacttctggcgccgtgacgtgttcgaccgcctcggctggcccatggagcagtcacgccagttcttccgcaccccgccggaccgcagccgcgtacgcaagacgggcttcgtcgaggtccgctcgttctggaacatttataggagcttcgacaggctgtgggtcatgctgcttctctacctgcaagctgcagcaatcgtggcgtgggagggcgccaagtggccgtgggatgatctgctctcttcccgtggctcagagtccaaggacacacaggtgcgcgtgctcaccgttttcatcacctgggctgcgctccggttcctccagtctctgctggacatcggcacacagttccgccgcgcatttagggatggccgaatgcttgctgtgcgcatggtgctcaaggccgttgttgcagccgcttgggttgttgcgttcgctgtcctatacatgagggtctggaaccagaggacagacaatgggcagtggtcgtcagcagctgattcacggatgaggagcttcctctatgcagctgcagcgtttgttatccctgaggtccttgccatcgtgctcttcattgtgccttgggtgcgaaacgcattggagaagacaaattggaagatctgttacgccctgacctggtggttccagagccgcagctttgttggccgaggactacgtgagggcacatttgacaatgtcaagtactccatcttttgggtgcttttgcttgccgtgaagtttgccttcagctattttctccaaatcaggccacttgtaaaacccacaaaagagatatacaagctgaatggaatccagtacacttggcatgagttctttggccaaagcaatcgttttgcagtgtttgtgctctggttaccagtggtgttgatctacctcatggatatccagatttgccaatttcaactattctactatgtgtttgcttttaatataacagtgaaaattgacaggagaacaaaggatcaagtttga

SEQ ID NO: 102952 - DNA, 551 bp, Zea Mays
acaaacaaacttctcgagctaattccgagaatctagccaaaaaacacagcaataaaactcggaaccctaatctgttctgcgcacgcgcagaccgtccggcccatcggaccgtccggcctcagggccggaccgtccgccctctctttttggtgtcgaacaatgaggcttccctatattgtgttccgcagcttctggcttgacgctttggtacaactgaattccagataccacccaagctcatctagcttatgccaacgtccttgatatctaaggacatttccaccctctggttgctcttcctctttccaagtatttgtccactatttaaattgtatcctactccgcacacatgcatatctcatacttctgatttatgacagcacgtgctctgtacagcaaacgtgcaatcataattcagaagctgtacctcataataagttcacgatcataattcatggttgcaggcaatgcctgttgcatgatcgtgaacttagatgctagtagcatgtggacacatttatatttctacttcaagttgtacttttgagtta

SEQ ID NO: 102953 - DNA, 108 bp, Zea Mays
tttttttccataccacagaaactgcgctgacacaaacctagcaaaatacagtccgcattacagtactttcaacactgaggagaccaaactgcagagcatttaactgcc

SEQ ID NO: 102954 - DNA, 1199 bp, Zea Mays
tacgacggaaagcagtgctcctgagctgtgtggatctttctttagtaaggtacccattttttctcatactgttgttttattaagccttattggtcttttttttgttttctccaccttcagcgttaactttaaaatgcttatgttatccccatgatattaacacgattctcttgtgcattattcaccggctatcgatatgtggagcatcggttgcatttttgcggagattttgactgggaagcctttattccctcgtaaaaatttggttcaccagttggatttgatgactggtctcctgggtacaccatcagcagatactatttcacagattcggaatgagaaggcaaggaggtatctaagcagcatgaggaggaaacagccaatacccttctcagagaagttccccaatgcagatcattcgacgctcaagctcttacaaaggcttcttgcatttgatcctaaggatcgaccaacggcagaagaggcattggctgatccctacttcaaaggcattgcaaaagtagagagggaaccatcctgtcagccaatttcgaaaatggaatttgagtttgaacagaactttaccaaagaggacgtcaatgaacttatattccaggagatactgcagtaccatcctcaacttctgaaggattacaagaacggctctgaaaagacgagttttctatatcccagcgccgttgacaggttccgtaggcaatttgctagcttagaagaaaatggagagaggaatgtcgcgcttgacaggaaaaatgtttctctctcaaggacaacaaccgttcactccactccaattcctgcaaaggaaggtccagcagcaacctcccaggttgctcaaaggattccaacagctagaccaggaagagtggtaggccggggactagatggtacagggctcctaagctgtgtggatctttctttagtaaggtacccattttttctcatactgttgttttattaagccttattggtctttttttgttttctccaccttcagcgttaactttaaaatgcttatgttatccccatgacattaacacagttctcttgtgtagtattcaccggctatcgatatgtggagcatcggttgcatttttgcagagattttgactgggaagcctttattccctggtaaaaatgtggttcaccagttggatttgatgactgatctcctgggtaca

SEQ ID NO: 102955 - DNA, 107 bp, Zea Mays
ctactttcattaaccttagatattttagggtgtcagcacgcctcagttgtcaatgggaactttcaatacaaattcagatctagaaatttcaagtagtaaagctatgc

SEQ ID NO: 102956 - DNA, 416 bp, Zea Mays
ttttttctatagctgttagaaatttactttgctcatagttcatactataattaatatgagactcttgttttgtggtccaagtgttcagcgctcagggtgccttggaagtacgctagcttgttgtcatgaagaagtcattcaagttccttccaggtgttctagacaaagaaagcttgtaccttaaaacaggaggatacaagaagctagagtggttgtctgaaggcttttgaactgcttgaagcattagtgtagctttggtgcttttgtgactgatcagctctggagcagctagagtgatatagttgtgggcttttgaacaatagttggagtgatatgaaacattagtgatctagttgtgaatgatattataattgtgatgcttatgtgaatatataattgtggtgcttttgtgttta

SEQ ID NO: 102957 - DNA, 707 bp, Zea Mays
acaatgggcacgactggacgaagacacagggagatggtcagctgcgacgagtgcagcgtgtgggtgcacacgcggtgcgcacgctatgtccttggcgtccacacatccttctcctgccacaaatgccggaggtccaagcgcgtgtcttcctccaccgacgaggccgaggttgctgagctcctcgccgagctgccaacccactgcccgcctccgctgtaccgccgctaggccgaggtcctgctcctagcccgcgtccgcgtccatgggcttcctggctggggcaacgacgctcttttccgcggcaccccgaccttttccgctgccctgtggcgctgcaccggctacgtccccaagagatttggcttccgctactgcgagttgccctcctaggccgatgataatgatggggctgatgctctttttgtgctggccagagagaagcccaaggagatgccagatgatgttttgataggtactgaaccgaagaaggagaagcattacgtccgaagcctgagttgtcgtggcaagaagattgacagcgatcagcaagcaatgactcctctaaccaaggttaagaagagaggtaaatagtttgggcatgatttcctgtttaattgctgcacaaagaacactctttttttaatacattgttttttcggttcctatgtgctacagagcctgatagttggaagaatgggtgtcagcgg

SEQ ID NO: 102958 - DNA, 920 bp, Zea Mays
cttcaagtttaggaaaggaagcaccggagcaggcgatacggcgccgacgacaatggcagcaacaagggcttccccagtgcttctcttgctgctcaccgtccagctcagcttgctcttccgcctccccgactccccctccaccctcgccctcgccctcgccgcggaaccagagcaacagaacgccaagcagcatcgccagcccgcgctgctggtgcagtcgacgtgcaactccaccagcttctacgacctctgcatcgccgcgctcgccgccgaccccgccagctccaccgccgacgtcccgggcctcggcgccatcgccgtgtccgccgccgcaaacaacgcctccggcacggccgccttcctcggcaacgccagcgacgccgcggccaccccgcaggcggaccgcgcgctcctccgcgcctgcgccggcaagtacgccgccgcccgcgacgcgctcgtgcaggcgcgcgcgtccctcgccgagcaggcctacgactacgccttcgtgcacgtgagcgccgccggcgagtaccccgcggtgtgccgcacgctgttccggcgccggcagcagcagcagcgtggggcgagtaggtctgcgtacccggcggagctggccaagagggaggaggcgctgcggcgcctgtgcaccatcgccctcgacatcatctccctgctgcaaaaccaggagacctactagctccatgcatctcaattctcaactctcacagaaatgcagttgtcagtcggttagtcgatcttgttgatgcacaagagtagtaaaatggaccggagcaatgaacattgatcaagcatgcatggatgcccgtacaatgtagtgccgacaccaatacgatcgacatgaatagtccgcggaatgaaaaaggttgctcacggacttttgtttgcggacgggcattagc

SEQ ID NO: 102959 - DNA, 445 bp, Zea Mays
aagtttaggaaaggaagcaccggagcaggcgatacggcgccgacgacaatggcagcaacaagggcttccccagtgcttctcttgctgctcaccgtccagctcagcttgctcttccgcctccccgactccccctccaccctcgccctcgccctcgccgcggaaccagagcaacagaacgccaagcagcatcgccagcccgcgctgctggtgcagtcgacgtgcaactccaccagcttctacgacctctgcatcgccgcgctcgccgccgaccccgccagctccaccgccgacgtcccgggcctcggcgccatcgccgtgtccgccgccgcaaacaacgcctccggcacggccgccttcctcggcaacgccagcgacgccgcggccaccccgcaggcggaccgcgcgctcctcgcgtccctcgccgagcaggcctacgactacgcct

SEQ ID NO: 102960 - DNA, 642 bp, Zea Mays
gggcacatttccctttcagggggcaacgggactagagcgagatgggcagcaacggtgagaggaggaagggcagggggcggaggctggccaaggagagctcatcatcgtcggcgtccgtggcatcctccacggcgtcgtgggccagtggctccacggtgatggactgggccagccctgaggtggtcgagatgcagcgcggcgatggcttctcgctgctgatctacgcttggaagagctaacaccggcgacgacgatggcaacatagttctgatcaactagcggtgatggtaatttttctctggactgttgtagtttgcagtgttcttgtgcagttaaagcctggagagattgaattgaccttgaattatagtagtgccatttctaagtggaacgagcgattagtgttatttttttcgttactagaacaatttttcttccctggattagcattaatgactgaaatgaacccaacaccaaatctatttgcctacaatctagggcaatgggtcaggatattttgagcagcttggaatccatccaccgtagcgatcaacgtcaataactccagtatcttattctatgtttctcttgtgtcacctgctcaaaagagaatctatccgtcattcaattagctattgctgc

SEQ ID NO: 102961 - DNA, 1340 bp, Zea Mays
ggaaacatagtgcagcaagcaactgcaaagcagcaagctctactcttcttctgtactgaacgtgtgactagataacaataagcgtgaaccatggcggacgagtacggccgcagcggctacggcaggtccggcgccggcgacgactacgacagcggctacaacagcaagtccggcactgatgactacggccgtggcgaaggtggctacaacaagtcgggcggcgatgacgactacggccgcagcggcggcgatgggtacggcaggtccggcggcgacgactacggccgtggcaccggcggcggtggctacaacaagtccggcggcggcgatgactacggccgtagcggcggcgacgactacggccgtggcaccggcggtggcgggtacaacaagtccggaaacgacggctacgacagcgggtacaacagatcgggcaccaccaacgacgacgaatacggccgtggcaccggcggcgggtacggcagcaagccctctggcgacgacgcgtacgccggcggcggcggtggcgggtacggcaagcagtccggtggaggcgcggacgagggcggagagtacggctcctcccgggacgactcggagaagtacaggaaggaggagaaggagcacaagcacaaggagcacctcggcgagatgggcgccctcgccgccggcgccttcgccctgtacgagaggcacgaggcgaagaaggacccggagcacgcgcagcggcacaagatcgaggagggcgtggcggcggtggctgccctgggcagcggcggcttcgcgttccacgagcaccacgacaagaaggaggccaaagacgcggcggaggacgccggggaggaggaggagtccggccgccgcggcgaggggaagaagaagcaccacttcttcggctgatcgggctgctgctcgatcgatctacttgcgtacgtaggctgctccccaggaccagaaggagcatgcatggagggcgaacgaagtcacgggggtttgattgcccgtctatgtatatcatgtgtagttactgatgatgtgtgtgcatggtacttcgtacgcgtgtttggtgatcgatgtgtggtgtgtgtgtctctgcatggacattttcctactctgcgttttttctctctctactgatatagtatatatgtggtgtgtctatatatgtgtgcacgtggttttcgctcggctttttatcaacgctttgagaataaaagctttctcttcatctgtatattttatttttaatgaaagaaataaaccactatatatttcgacactcttacatacgtgtgtgtatatatatataaataatggtgaagcctgcgattagcggatac

SEQ ID NO: 102962 - DNA, 187 bp, Zea Mays
tcctcgatcgatcccccgcgccttcccagcttgcttgctatatgcatcacagtcacggccaggccaaggcaatccttacctcctaaccaacccaaaaggtccggccgtagtagcagcacatgcatgtcgccgtcgtccggctgatgagacgcgcggcgacgacgttcaactggtgcagggaccgact

SEQ ID NO: 102963 - DNA, 585 bp, Zea Mays
cgtcctgcaatcgccgtgagctgagagggagattcacgccgctgccgtgggattcacaccagcgcctccgcttgggtgccaatcgcccgctcgcaagcttcgccgagtcgtggggaaggtttccgaaggccaacgctaaggatttgtcgtcgggacccagggaattcatcaccggagttgcgcccgaccgcggagccgctcctcgccgtggttctccctgcactgcgaccctcgttgtcggctcccaggttaaattacctccccaccaatcaaaattcgagcatatgaggatcaacatgactactttctagctcaatttcagaaggctccaatgcacaaatccaagctagataacttgacatagtcaatcattcctaacgaagccaaaggcaatgatttcacagggataaaaagccttgggaccatagctagtggaagcttcatgatgagccagtttcgaagtggtgcaatggtatctcagtacgaatttaatacactataaccccgagtacatttttgaaactgatcactactcttccatttgtgattaagtatagaatatttaaacacaaatgcatgcaggtt

SEQ ID NO: 102964 - DNA, 3817 bp, Zea Mays
tgaaaaatccgctgtggtctgtgggcttgttacagctccgatccacgcaatttcaagaatcaagaccatcaaaatcgtgaagtttctctctcttcgtatactgtacacacgcgcgcgcgctctctctctctcctccccttctcctttctcccgcgccccagatccgagccccggcgcctgaggccatggcgagcgacagcgacgtcgacgaggacgagctcctccagattgcgctgcaggagcaggcggcgcgggacctcagccaccagcgcccgcccgccgccaacaagcccgtcgtcaacctcgtccgcccacccgcccccaacgcccgcggcggcaacggcagagccgggggcgccgcagcgaaggcgcgccagcccagccgcggcggagacgaggacgaagactcagatgttgagctgctctctatctcctctggcgaagaggacgacaatccccgcgctcgtggcccgccgccgccccgcgggggtgggggtgggcgcgctggggcgcggagggccgtggcacgggacgatggggacttcgacgatgaggagcccaggagctggaagcgcgtcgacgaggcagagcttgctcgtagggttcgagaaatgcgtgaagcaaaggtggctcctaacattcaagaacttgatcagaaagcagcagcagcagctgctgctgctcgaaaggccctcacgtctgtacagactttaccaaaaggagttgaggttttggatccattgggccttggtgtcatagataataaatccctgcgattgatcactgatgcttcagtaagttctccaatttcaagggagaagtctcaaggtttagatcccaatatgcgagacaaagttatctattcatctccaagttttgatcccaaagttttcctttcgtgggtccacaaagacacaagcgctgctgatttagaggctggtgctctcactttgaaaactgatctcaaagggagaacacagcagaaaaaacagttagtcaaggagaactttgattgttttgtctcgtgcaaaactacaatagatgacattgagtcaaaattgagacagatagaggaagatcctgaaggtgcaggtactgctcacttgtattcagtgacacaaaaaattagtggtgtggcgaatcgtgcatttgagcctctatttgagaggcaggcccaagctgaaaagatcagatctgttcagggaatgcttcaaagatttcggacactatttaacctcccaagtgcaatccgtgggaacattagaaaaggagaatatgatcttgctgtcagagagtaccaaaaagcaaagtcaattgttcttccttcccatgtggggatactaaaacgtgtactcgaagaggtcgaaaaggtgatgcaggaattcagaggcatgctttataagtccatggaggatcctcaccttgactttgctgagcttgagaacattgttcgtctactgttggagctggaacctgaaacagatccagtgtggcattatctaaatattcagaatagcaggattcatggattgtttgaaaagtgtactcaagatcatgaattgcgaatggaagttttgcaaaataaaattcgtgaaaaagtgctctctgattcaaagtggaggcagctgcaacaagattcaaataaatctctggaagttgattctgccatttgtgattctcctcgagctgatcagttgtcaacaaactttatggctgaggaagctgatagtttaagggccacctacactcgtaggctaacttctgtgcttatacagcatgttccagctttctggagattagctttatctgttttcagtggaaagtttgccaagacagcttctggtaatgtagtttctgattctgacatgaatgcaaagccgtctgcaaataagaacgatgacaaaggtggagatgtgaagtacacaaaccacactctcgatgaagttgctagtatggttcgggatactatatcggcttttgacactaaggttcagagtaccttccgtgatttcgaggaatgcaacattctttgtccatacatgagtgacactataaaagaaatagctaaggcctgtcagactcttgaagggaaggattcatctccaactgctgtaaaattgttgcgcacccttcattttcaaatgacgaagctttacgttctacggctttgttcatggatgcgggcaacaactaaggagatatcaaaagatgatacttgggttattttatccacccttgagagaaacaagtctccatatgcaatttcatgcatgcccctggaattccgtgacataataatttcagcaatggaccggattgatactatgattcttaatctgatgagcgagactgcgaagtcatatgacatttctcaaccacttcaggaaattaatgagtctgtcagacttgcatttttgaattcctttctggattttgctggttatctggagaggtttggaggtgaactaactgagaacaggccaaacaatgaaaacaattatgttcaaaatggatacataaatggtactagagaaacatctgctaacacagatggagatttgcacaaaaagctgctggttgttttgagtaacattggatattgtaaagctgaactttcagaagaactgtacaccacatatagacacatttggtctccagtcaggaataatgatgagcgaagttctgacatgcgagatctgatgacttctttctctgcgcttgaagagaaagtcctggaccaatatacttttgcaaagtcaaacttgatcagaagttctgcacaaagttatcttttggatcctgggatttattggggagcagcaccaatggtaaagagcattcgagatgcaactcttgacttgctgcacatccttgtagcagtacatgcagagatatactctggtgctcggcctttgttggagaagacaatgaaaattttggttgagggtttggtcgacatctttcttagtgtttttcatgagaataagaccaaaggtattaggttgttggatgcaaatggtttttgtcaactcatgcttgagcttgagtattttgagactgtgctacacacatacttctcacccgaggcacagcaggctatgaaatccttacaagagaatttgttggaaaaggcctgtgaaagtattgcagaagccatggaaaatcctggacaccaacggcgaccaacccgtggcagtgaagatgcatcgtcagatgatagacagccatcagtatcacctgatgatttgcttttgcttgctcaacagtacagtagtgatctgctgcaaggggagctggagaggactcgattgaacatagcctgcttcatggagtcagcccttcaatcaacgtctgcgccagcaggctcaaagcctgctgcatattcttcttaccatgcgcaagtaccacagcacgcccccattcaaacgtcctcgcctagttttagaaggcagcagactggtacaagctctcctgtagtctccagacggcgacggtgagcgtagtgcatcttccctggaatttcctaccacccctcatgtttttttttatttcttgtaattatcatcctgttgtcatgtgttatgaattttgatccattcttttggtgtcgtaagataaaaatggtggtcaagtgcttctgcacgggaacataaaattgtataatatgcccacgaatcaaatactgccttgctgactgaagatagcaccacagctgtatctgctgcgccagtctccttcggtcctcactgcttgtttgtatattcatttggacagtttatgtatcccgacatttgttaatgttgtatcaggtggttca

SEQ ID NO: 102965 - DNA, 716 bp, Zea Mays
ccgccccccaccccacgtattaacaaaacgcctcccgaagcagacagagcctcactccgcgcgcccgcgcagcgaagctggagggagcatggagctgaggccgccgcgcctgcgaccgtgagcacgctctgtagccagccgggtccggctgggcggccatggcagccaccgttctcttcactccggcgcagtgccaccgcgccaccgcgacgacgagcgggcggggagccccctcgcattgcgccctggcccctgggcaccggcgcccggggcggggatcggtgagggcggtgcctcccgagcagagcagcttgcctcaggcggcggcggctgctgtctacgggactgctggcgacgtcaaggccgcgctgtaccgagcgctggacggcgccaacagggggatattcgggatgacgtccgccaagcgctcggagatccatggcctggtggagctgctcgagtccaggaaccccacgccggagcccaccgccaagctgcaggacaaggtggatggatgctggaagctcatctacagcacgatctccatactggggaagaagaggaccaagttagggctgcgagatttcatcagcctaggggacttcctccagataattgacgtcaaacaggtcagtaaaggccacacctgctgtaaagttttccccctccgagtccttgtttggatgctctctattgacctcaatccacatgtatta

SEQ ID NO: 102966 - DNA, 1118 bp, Zea Mays
ccgccccccaccccacgtattaacaaaacgcctcccgaagcagacagagcctcactccgcgcgcccgcgcagcgaagctggagggagcatggagctgaggccgccgcgcctgcgaccgtgagcacgctctgtagccagccgggtccggctgggcggccatggcagccaccgttctcttcactccggcgcagtgccaccgcgccaccgcgacgacgagcgggcggggagccccctcgcattgcgccctggcccctgggcaccggcgcccggggcggggatcggtgagggcggtgcctcccgagcagagcagcttgcctcaggcggcggcggctgctgtctacgggactgctggcgacgtcaaggccgcgctgtaccgagcgctggacggcgccaacagggggatattcgggatgacgtccgccaagcgctcggagatccatggcctggtggagctgctcgagtccaggaaccccacgccggagcccaccgccaagctgcaggacaaggtggatggatgctggaagctcatctacagcacgatctccatactggggaagaagaggaccaagttagggctgcgagatttcatcagcctaggggacttcctccagataattgacgtcaaacaggaaaaggcggtgaatgtggtagagttcagcgcgagagcactgaagatactgacggggaagctcaccatcgaggcttcgtacagagttaccagccaaacaagagtggatatcaagctcgagagctcaaccatcacccctgagcagctgatgaacatatttcagaagaactacgacatgctcctggacatattcaatccagagggctggctggagataacatatgttgatgaatcgctacggattggacgagacgacaaagaaaacatattcgtgctggagagagcagacctgccagacgtctgatgacgcgcagttcatgcgcacaggcgatccgtaattttgtgacgaggagcgagtgtatgtaacacgcagaaaacatagcctgcaaatatataaatatggtatatccgacagctaggactcttgcatggttattggcagttcgatgcagacaatctaccactcgaagtaaaaacaaacaaaaaaaaa

SEQ ID NO: 102967 - DNA, 308 bp, Zea Mays
tttccactaactaaaattagttatattgattcaaatgaaatcacacatacaaggtaaaaagtatacaaggtttgttctgcataatcaaaatacatgcttttcacatggtgaactgtgtatagtcttcatcaattacaatgattttaggactaccatcaaatcaacttataatgctccatcaaatacaaaagaaccatccgaaacatcgtaatttcatgagctatgatacaaatggaacaaattaaaggaaaagagtcctagaaaatgggaaaataacatttcgtttctgtttgagtattttggtacat

SEQ ID NO: 102968 - DNA, 1110 bp, Zea Mays
atgccgccggggagcgtccgtggatccttgggcatagaggaagagtacaggagcactctgccaaggcaacctgatgcagaaatggaggagcgcactactcaccaacaggacctcgtctctccagtccttcacggggggagaacatccgcatgggttcagctcgccatggcggactacttcgacgccagcgccgaggcctcggagatgtgcaggcagctgctcaggaacatcaagagcacccagagcaactaccgatccatggacaccttcctttcgagcatggcagcagacgacgccaccacggccggcgagcccgtcgccagaatcaaccctttccgcaccacgacgagaggcagcttcaggcagatccacgacaggtactccggcgtgctccagagcatccgagcaggccacaggcgagtggcgagggagctgaaggtgctcagggccgtcaggaggctctcgaggacgtgcctcgtcgtggcctgcagcgcggccgcggcggccgccatcggcgcggcggcgcacctgctgctcttcggcctgctcatcgggccggcggcagccgcagccgggggcctctacccgatggcactcaagaggcggaccgcggcggcgaggaagcagtcgtccagcaggagcaggaccatgtcgtccctgctccgcctgcaggagcagctcgacaccgcggccaagggcacgtacgtcctcgggagggacctcgacacggtgagccacctcgtggcgcgcctctccgacggcatcgagcgggagaacgacatggcgtggcggtgcgtcgggagggcgggcgagacgtggccgccggcggcgctgcaggaggtggttggcgagctgaggaggagctgctcggtgtcctcgaggctcgccgaggagctgcaggaccacgtgtgcctgtgcctcgccaccatacagaaagctagagttttgctgatccaggagatcaatcagcctgccattgaacccattgttgagcggttttttcttaacatacaaatatttgatatggtacagattaaactgtggtcagaggacattcgtagctttccgcatagttttacttttacttatgctgcatcagtaggtacttaa

SEQ ID NO: 102969 - DNA, 755 bp, Zea Mays
agattgaccccttcccccaaccagaacctgcgacaccagagaggcagagacagcgacttcgcctcgtgttcctctccccggcggcgctagggttgcacgcccggcggcgctacacctcgccggcggcgctccaactccccggcggcgctcctagccggttgctcctctccggcgaccaccccttcgggcctctgttctcatctggacgcaagcaacaacagcaaaatggctgataaggcagattggtgtgatgccaatgtgaggcatttcattgatgtatgcaaaggagagatagatgctgggaatcggccgatgggaatgttcaccaaaactggttggaaaaatcttagaactaagcatgaagaaaaaacaggccagaagctaaccaaaaaacaattaaagaataagttggacaatatgaaaaaggaatatacatggttcatggagttcaagaattatgccactgggcttggatgggatgaggcaaagcaaacaattgactgttctaaggaatggtgggatgaacaccttgctagatgtaataatcctggaaaaggtattaaatgcaaccatgtgaggttcagaaaacaaggacccaagcaccttgatgatctacatataccgcttcagggagctaattatgttgatagaggacaacattatatgaagcatatatcttttgtattaatgtggaccatatacttcgttgtattaatgtggaccatatggtagtgatggatgcaaaatttgaaaaa

SEQ ID NO: 102970 - DNA, 504 bp, Zea Mays
cctctcgcccctgatgcgccgcgcgagctggatgtccttgggcatgatagtgacgcgcttggcgtggatggcgcaaaggttggtgtcctcgaagagccccaccaggtacgcctcggcggcctcctgcagcgccgcgacggcggaggactggaacctcagatcagtcttgaagtcctgcgcgatctcgcggacgaggcgctggaaggggagcttgcggatgagcagctcagtgctcttctggtacttgcggatctcgcggagcgcgacggtgccggggcggaagcggtggggcttcttcacgccgccggtggccggggccgacttgcgcgcagccttagtggccagctgcttccggggggccttgccgccggtcgacttccttgctgtttgcttcgtgcgggccatcggagcggcgagagaggattcgagacaggaatacggctgcgagctgtggatgagtgatgtgggatgcgggttactgggtctctgtttcggggtgggtgg

SEQ ID NO: 102971 - DNA, 258 bp, Zea Mays
gttggcaactttggaggtccaagagttccctgggcggatgtacgtcctctgaaagttccctctgaagactcggaccaggtcttcctagtcgtggatctgtgccagcggaaggtgctcgagccaggctcaggtagagtcggagagaagcaggtggaagttctgaatgatgaggttgtcatcgttcgtcccccccccccccaagctgacaggcgagatggtagttcgcaagcaagagctccggcttcgtctcccccgagt

SEQ ID NO: 102972 - DNA, 612 bp, Zea Mays
atggacaggaggatatcgatcccgactgtctcgcagctgtgcgcgctggcgacagcctaccggccaccacgatacgatcgcgtcgccgatctgtcaggctcgatggcggcgtcccaaacgaaaaggggaaggaccgaaggaatcaggcggcatcgccaagctgcacctggcgcccgcctcgcgccgccaccggtagccgctgaatcctcggtggtggagttgttgaaggacaagggcatggcctccctcgattcgaccaccacccggtgcctgcgtgcttggtcgcagttgccgccgttgaagccgtgctcggaggaataccaagtccctgtcgcaaagaacgtggaaggaagaggtaggggagagataggtacagggaatcagcaaccacgggagggcggtcatcctgctcaccagagttggggaaggggctcgggcgggggcatggccgcgcccttgttgcccttcttcttgagggactcgagcgccgcgaacaacttgtggcagcggttacgcattagcctccgcgccaccgacttacgcattagcctccgcctctgcttccgccccaggaaaagccggagctgtgtcctcctcgtcctcttcctctag

SEQ ID NO: 102973 - DNA, 2752 bp, Zea Mays
ccaagaccaccagagacgacggacggacggacggagaccggagcaaacgaggcggccggggtccggagcagaggacgcgtccaatactacaacaggagcgcccgatccttcccatcccccaagctcgcccgcctccgattcccgctgtcctgtcccctccaaacaccctcccgccgaaggcctccgatccaggccgcaaccgggatggcgcgtgccggcgggaggaggtcggcggcggcgccggcggcttcgggagagccctccgtcgagtgctctcgcggcggataacagtctgatacccccccacccactgccttcactgactgctagagcccctccttgtcagtacagtgtttggtgctgaatcaaatccactgaagatgccaagttctgaaccagacagtgatgatgttttctttgacgcatttgaagatgttcgatctgcaggggaaccttcatgttcagaggattgcagcaccagcgatgaagtttcagtggtgaaatttgagtatgagatttgggcaaacgagccgatgagcgttcaagaaaggcggcaaaggttcctcaagggaatgggattcgatgatttcgtgtctagtagaacagattcttttcaatgccatggtgaaatcacagccgttgagtcttccactggcatggaggtgagaacggccagttgccattcttccgtggattcatctgtttgtgacaatgaatcggagtttgacggtgcctgttgcataagggatatggatagtagaaagagagatattgtcaagggtggacatagcagtataactgacatgctcaaggaggttggatcagataaggtgatgtctcttctggagttccagagtttgcctggcctctctcgggctgttcaaaatttagttcggagggggtgtggtaaaagtcctgcaaaagaaacgaaaagtgctaagaaaatggatgccaaaagcttgtggaagaaattcatgataaagagaagctttggtagcgtgtgcaagtatgatgtccatgtgaaaaactgcacaaatagtataccaaccagaacaagagttcaacatcggaagaaaaatttccttgaattctctgctgtctacatggatcaagaaatcagagctcacaagggttcaattcgggtcatgaaattcagcccatctggctggtatttagcaagtggtggtgaggattgtgttgtacggatatggcaaatcatacaagtagaagcatctcctaagttgtataggggagaggacccctatgaaaaagtggagaaagttcaggtctttaagacaagtatagaaaaggggcagaaccaggcacttgcagttatacccaataaggtttttcgtatatcagagactccattacatgaattccgtggccatacaagtgatatccttgatctggcatggtccaaatcagattatctcttaacttcatccaaagataagacagtgcgcttatggaaacccggctgtgatggttgtcttgcagttttcaaacacaaagactatgtaacatgtgttcagttcaaccctattgatgagaaatacttcatcagcggttcagtagatggtaaagtgcgcatttgggacgtgttggacaagcgagtaactgactgggccgatacgcgaaatatcataactgatttgagttaccaaccggatggaaagggctttattgttggcacgattgcaggcacatgtcgtttctatgatcaatcaggtgaaagcatccagctagagaaagaattgtttgtgcaagggaagaaaaagtcagctgcctgtcggatcaacagcctaaagctatgtgcaattggttccaacagggttataatcacatcaggagattccaaaatccgagttgccaatggtgataccatccaaaagtttgaagggccttggaagtcgaaggctctgtcattaccgtctctaacatcagacgagagatacctcatatcggccggcaaagattccaacgtctacatctgggacttggccaactcgagagacgacgcaaagccagtccactcgtgcgagctgttcttctccaaggacgtgacgaccgcagtgccatggccgggagtgcggcaacaagacgggcacgcgagcgcgaaacctgcctgtgtggccgagaaatccgccagcgcgcccatcctgcgccagtcggcccccgggccgtggccgttcgtggacggcggcggcagcagcagcaaggggtcggcgacgtggcccgaggagaagctcctttctgcagcgaagcctgtggaaagcagcccgcggctggacgactgcctctccatgctatccgccgcgtggagcacggtcatcgtgaccgccggccgcgatggcgtcatccggtcttttcccaactacggcttgcccgtcaggctgtgagctccgtcaccggtctgggctgctggtcagtggaggcgcagcagccgtggttggcgactgatgatagataacctgctaacgtcttgaagtttttttttctctctctcgtttttctgggcggagttactagaaattcttttttatgtaagcatttgttagatcatgaaccttgtcatgaagagatgatctgtagtagtcagttcaagtccaaacacttgtgctctgtgtgtgtgtgttttttttgctggatggttgtgacaaggtaaaaaaacgcaagcattcagttagatgtgaccagccttttttttgccctctaacatcaggatgtttatattgaaaatatatttaaa

SEQ ID NO: 102974 - DNA, 1809 bp, Zea Mays
cccgttttgaccacagactctttctctctccactttctagccttgtagctagctagctagcttcatgcgtagataggtgcgcagcaggtaaacgacgcgcaaggtgtgctgcgtgctgcgcaggcaggatcaatagaatccatggagcgggcgcgggcgcgggcgccggctctggctctggcgccggtggaggttcccaagttcttcgtgtgcccgatctcgctggaggtcatgcgggacccggtcacgctgtcgtcggggatcacctacgaccgcgacagcatcgagcgctggctgttcaccgacgggcacggcgactgccccgtcaccaagctgccgctgggcgccgacgacctcgagcccacgcccaaccacacgctccggcggctcatccagtcctggtgcgccgcgcacgccgtcgagcggttccccaccccgcgcccaccggtcgacgccgaccgcgtcgccgcgatcgtgggctgcgccaagaagggtggccagcaggaagtgctggccgcgctcagggagctcgcggacatcatcggggagagcgaccgcaaccggcgctgcgtcgagggcgtgccagaagccgtggagttcctcgtgtccgtcgtcaagaaacacgccgcaggcacgtcgtcgtccaagcctctcggcggatgcagatcccaagaggagccgatgtgcggcgtgccggactcccctaaggcgtgctcgccggaggaggcggctctgagcatcttgcattctctcaagctctccgaggcgagcctgaagagagccttggagagcagcgacggtttcgtggacaccttagcgtccgtgctgcgctggccgccgaactaccgggcgcgcacgtacgcgatgcacctgctgaaggcggcgctgtcggcgatgcagccctcgcagctgagctcggcgagcacggatctggtcgagggcgtcgtgagggtggtggcagaccggacgttgtcgcccaaggcgatcaaggtggcgcttcacgtgctctgccggctttgcccgtggggccgcaaccgcgtcaaggcagtcgaggccggcgccgtggcggcggtggtggagctgctcctcaacgtggggtgcgggtgcggtggcagcaacggcaagcgggcggtggagctcgcggtggttgccatcgatcatctgtgcggctgcgcagaagggcggttggagctcgtggcccacccggcagggctggctgttgttgcgcgagccgcgacgcggctgtcccccaccgccaccgagagcgcggtgcgcgcgctgcacgcggtggccaggcactccgcgacccccgcggtgctgcaggagatgcttgccgtcggagtagtagcgaggctgctgtacctggtgcaggccggcgcatcgggcgagcgcccgagggagagggcgcgggagatgctcaagatgcacgccagagtttggaggggctcgccgtgcttggcgtcgcacatggcatcctacccttgttgatatcgcatgccagcgttccgcagccaaccaagaccgatcaccatttgcatttggtcactattctcgcgtttgatctagtcgtctgtttgttcgtcgtctcatacctaatcatacgtagagatacggcaaaacctttttctttgctcatttttttttcatgtaaagatttttactcttaggtcgggactcgggaggtttgataagtaattaagttccctaaaatggggttcggataagatatgcgttagtgtaaataatgtatgtattacattttctatgcaaaaacaacattatttcaacctgctgatcaattttcttttc

SEQ ID NO: 102975 - DNA, 102 bp, Zea Mays
gttcgtttctgtcggattgcacccggaatcgttccagctaatcaaagtttatataaattagagaagcaatccggttaggaatcgtttcaacccaccaatccg

SEQ ID NO: 102976 - DNA, 1395 bp, Zea Mays
atggagattgatgagatggagagcggtgtcgtcaatggaagcggcggcggcgggtcgttccggcgggcgaggtgctgggagctgctgtgctcggcggcgggcatgctctggggcaaggtcgtcgggttcgcccgcaagctgggcaggatcgcgagggacgacccccggcgggtggcgcactccatcaaggtcggcctggcgctcacgctcgtgtccgtgctctactacgtcaggccgctcttcaacaactggggggtgtccaccatgtgggccgtgctcaccgtcgtcgtcgtcatggagtacaccgtcggtggcacgctgagcaaaggcctgaacagagcgtgcgggacgctggccgccggcttcatcgccgtcggggctcacaaggtggcctacctgtgcggcgacaaggccgagcccgtgctgctcgccgtcttcgtcttcttgctctcgtcggcggcgacgttctcgcggttcatcccggaggtgaaggcgcggtacgactacggcgtgaccatcttcatcctcaccttcagcctggtggccgtgtccagctaccgcgtcgacgagctcatccgcctcgcccaccagcgcttctccaccatcgtcgtcggcgtcggcacatgcctctgcaccaccgtcttcgtcttcccggtctgggccggggaggacctccacaggctcgccatcggaaacctcaacaagctggccgagttctttgaaggactcgagtctgaatgcttcagagagaacgccacgttcgagaatttggaagcaaaacccttcctccaagtgtacaagagcgtcctcaattccaaggccaccgaagactctttgtgcaattttgccaagtgggagccctgccatggcaagttcaagttccggcacccatggagccagtaccagaagctcggcgctctctctcgccagtgcgcttcctcaatggaggctctcgcttcctacgtcatcaccctcacaagaaccgaggctttctttctccctgcccattattcacagtaccctgaagcgcggcccgagctacgctcggaggttcgaacagcgtgccgccagatgagcctgcactcggccaaggcgctccgcgagctctcggcggcgatgcggacgatggccgtgccgccgtccccggccaacgctcacatgtccgcggcagccaaagcggccaaggacctcagggacgagctagaggacgcggacctggcgcaggcgatgcacgtcgctgttgtcgcgtctctgctctcggacctggtgaccaaggcgaagcagatcacggaatctgtcggtacccttgcgcgacttgcccgcttcgtcaagaacaacgaccatgagaacaacgctgacgacaaggatattgcggctatcgatgctgtgagctga

SEQ ID NO: 102977 - DNA, 1223 bp, Zea Mays
cctttttaaaacacgcacaccacctcaccatacacctcttctcttctaccagtagttcattcattattagtacggtaccgggttggagtaattaaaaggccaccctccactcgcaccaccacactttagctccccactgctataggcagcccacatgcgcgcacactcctaagctagctatagcagcaaggcagccagctgagctcagagctcccagtccagcgccggcgccaccaccgcagctgctcgctggtcaccatgagcaaggagaagcaccaccgcgactggatcctccggcgctgctgcggctccatcgccgcctgcatcctgacgctggccgtcgtcgtaggcttcatcgtgctcgtcatctacctggcgctgcgcccctccaagccgtccttctacctgcaggacgtgcagctgcgctccatcgacctcagcgacccggcgctctccctcgacctccaggtgacgatcgcgtcgcggaacccgaacgagcgggtgggcgtgtactacaagacgctggacgcgttcaccacgtaccgcgacgaggcggtgacggtacccgtgtcgatgccggcgatctaccagggccacaaggacgtgtcggtgtggtcgccggtcatgtcgggcgacgcggtccccgtggcgcagtacgtggcggacgccatgaagcaggacatcgaggcgggatacgtgctgctccacgtcagggtggacggccgcgtcaagtggaaggtcggcagctgggtctcgggcagctaccacctcttcgtcaactgccccgcgctgctcgccaccagcggcagcgccggcgccgccgccggcggaggcgtcttcgccgccagcgccgcgtccggggtagtccccgccggcgtcaacaccaccgtctccctcaagttcacgcacccggccgactgcaccgtcgacgtgtgagtcgtcgctgcgccacgagcccacgacgacgaccggcgcgcgcttcgttcgttcgttttcgttcgtactggctagtgcggcgcgggggatcaacatcgccccctcgctcgcgcggttatcgagcaattagtttttcttttgtagcaaatgttcgttctcatatattttcccttccgaagctgtgcagaaataagttaataagctatacatacatatacatgtgtactagatttgctatatattattaccccatatatatttaatatgaaaacctcacagtttgaatc

SEQ ID NO: 102978 - DNA, 486 bp, Zea Mays
atgcctgagaaggcagccaacattgagtccactctttcagaacaacccattgctgatcatatgcaggatgactattgggctgacattctcattaatgtggaggagccgctatctagcctgaaaaggaagatagatgagagtaagaaaagagtaaacaagatggcacctcaggttaagaaacctcctgttaattcattgtcgactgcagaaaatgtagacgagccaaggagtgaaggcaaccaagatacaagaaatgaggaacaacttaggaacgaaacaaagttgttttctgcaaatggatctcagctgaacttcggaaccaaatttggtcaagagatggaaaattgctttctgtctggactggtgctgcacttcagcaggccatgcgctattccatcacagtgtgaccttatcaagatctttagccaatacgatcctatcaatgaagtaaaggcagatgttgcaaacagtgccagctctgcctag

SEQ ID NO: 102979 - DNA, 218 bp, Zea Mays
cgcgtcctcgaatcacaacatccatgggaccaaccgagtagcggccggaggaatccagctccatcctatgcggcggcggccattccaatgctccctgatccaactcctctccggtcaatcggaattggggcaaggacggacgaccaagccagaggggatatctactacaggttggactggactggacaccggatttgggatccctttgtaggattagg

SEQ ID NO: 102980 - DNA, 132 bp, Zea Mays
caagtttttcaattagtattttagtttgaatttagagtacacatatgtatgagttatttgacaatgcttgtttatgagagattgaatgatacctatctatattatattaattataatgttattaaataaata

SEQ ID NO: 102981 - DNA, 677 bp, Zea Mays
ggcggcactcccgccccgattgtgcaccctgctccgcgcgataaggaacccgagcgcgtggccggccacggcggcgaggagcactccgccgttgaacgacatgacggccagcatgacgaggtaagccgtccccatcctggcagcgtgcgccgccgtgagcagcgcggccgaggacgccggcacgcggcctgcccccgcacccgcgccacggcgcgcgacgcagcgcgaggccgcggcgagcgcctcggtgagcgcggcgagcgcgagcacgaggaggaggcagagcaggtacgcccccgcgccgcgcgcgccgggccatcccgggaacagcaccaccgcgcggttgccccagaagaaagacatgtgcatcatcggcatgcgcgaggccggagctgcagccgccgccttgcccgcgcccgccggcgccatctccatcggggccatgcccttgatttgttgcatctttggaccggatccgataaggacgagttctaggctacagcgaagcaagcggaactgtgcaaccaagtaaccaactccggtcgaaacaggctgaactaaacaaaaaggcctgaggcgcgcgaggacgtgaccaggggggacagcgaagcagggttttggcctcgggcactggcagcgcccgtctcgtgaccgaactgaacgcaggcacaccgcac

SEQ ID NO: 102982 - DNA, 248 bp, Zea Mays
agccagcggttgccggttgtgaccgtcgtcgttggaaggcgacgcgaagcggcagtgcagtgctcgtcttcgtcggcgcgtcgccgtccggagggcggaggccaaagcttgtacttgtcttcggcggaggggattctgaaatcgaggtgcgcaactaggagagccagttgccacggttgcgcttttgctcatcatcggaggcggttgaagtgtcgatgtttctgtgccttcctgggggtattctggag

SEQ ID NO: 102983 - DNA, 640 bp, Zea Mays
tttttttcttgatgtcgtgccgcctatggaaccatattgctcatcccctcctgctcctcctgctgctattattactgttgttcttactgttgttgttgtcctgcagaaagtcaaggagaacagggctcttgcactgggggcaccgagggtcatcttgtgggagcatgacgtagatgaagcagcgaggacaggcagcaagaaccatggatgtggcctcagggctgttggaccactgcaggccatgctcgttctctgacgataggcaggagctcggggatgactcctcatcagccatcgccctcctggaggagtcccctgttgcaggaagtgagaggttcagtttcaggtcaaggcccctagagctcttcctgttgctgcggctcatcctttggagagtgacgaggcgctggatgcaagcaggtggagatgagagcgatgtgaaatgctctggaaggagagggctatgagctttagaatgctcagaggtgtttctctggtgttgctggagaagggatagatggtatttatagggggtgaggatgggaggtcaattggttttctttaatgtgacataagagctacgctcccatttaattattactcactactatctcatagtagtagcaatagtacaattgta

SEQ ID NO: 102984 - DNA, 735 bp, Zea Mays
ttgcgacttaatcgcctttcgattaagaaaagggcgaaaatttgttcctcaagtcatagtagcaacccactaatgtaatcccccaagattgcttccatatcccaccttggttaatgatgatgacacacaactcacttaaagttgttttggtttgtgtgttgcattgggtctggtcaatggtactgcctgctaatatctactactacatggttaagagagagtcatctgtgcatttcttttttcctgtggctttgctggaactaatcccagcattaatgccacttttgggggcaaatagaagcagtaatcaatggttttgggatccagagccaaattgtattcgccttgggttcaaagattaaaattcgctttaccggatcgcatattattttgccaccattcaccatgattcgatgctgacgtgtttaacattgcacttgaatgcaagttctgcccaactacggagacatgaggggttgacctgaatctgggctcaggctcataactgtggcactaggtttgtattagtacaggatatggtttaaaaatgattttcatggattagttgtgattagtttgtgttttgagaccaatgtgccctttgatttcatggagcggtctaaggtgttaattaaagtttttttttgctagtttggaaacttaaatccatttgagatcctccttatcatatcccagggtagcaacctcgaaaagtgtcatttgaataagatattt

SEQ ID NO: 102985 - DNA, 845 bp, Zea Mays
gacattatgtccagcaatcaaaacacgccacctgtgcgtacactccacacctcgcctccgtgcttccgtctcgcacttccggacataaagtgcgaccatggccatggcggcgctgcgggaaacctcccgctgtttggcgtccagggggagatctgcggcctggcgacccgtgctcctcgcgcagtcccgcggcatcacttacaagctcttcgtcggaggtttatcacagtttgcgacggaagcaagcctagcagaagcattctcacgttacggacaagtaatagaagctaccgtcgtcagggataaggtgaccgacgtaccgaaaggattcggcttcgtgaagtttgcttccccggaggaagccaataacgcgagggaagagatgaacggcaaggcattgaacggtcgggtcatatacgtggacattgcaaaggccagacaggaccgtgctgcagatgccctcccaatagcgagaggccctcctaagcctatcagcaacgactgatagaggaaggccttggtgtgcgctcccaatagcgagaggtcctcctaaaccaattagcaacggctgttcaaggaatgcctggtgtgtagttccctcccgtcctcagctggcatactagttcgattctcagatacggaggctcttagatgatgaaacgtgccgtgaaatattctgcggaactttgaggttctggttgaacacaagtagagtttatttagatttaattacccggagtactcgtgtcatgcttgtccggatcagacactgcgtttgcttgtcatgacaggtgctgctttaataaatccgtggtgctagccacacgaaacatcttgatgttaca

SEQ ID NO: 102986 - DNA, 1466 bp, Zea Mays
gtcccgtgcagcgtttcccccctcaccctcaccctcacctagtcacccccgtgcgccgcgccggttcccataaaaaccaaaccccccgacgcctcgccctctctttcgttcccgaccaattcgcctggcttgccctcgcccgcccaccgctcggagccgatacaagacgagggcaatcgatctgttccgaatccgcatgcgcccgcggccgccgccgcccgtcgccacctgaactcgaacccctggccggagcgtgcggcccgcgcccgcctatggacgagtaccagacgcgccggtcgccggcgggcgagcggttcatcggcatgttctcgtcgccgtctacgccctcgtcgtccccgaccgagccttcgttcgtcgctggggacgaactccacgaggacgacttcctcttctcgtcgccggacgccgcggcgccgcagcccgacgggcctaggagcccgggccggggagcgccgcaggggcatctcggtcttcttgccgccctggcgctacacgagggggacaggaggctcctggttcgcggtggccacggcgggggagtggcggccgcggccagcgcggggacgctgctccggcgcaaggcgaccatcgcggcggccgccgcatctgcctcggccacggtggcgtcggggaacgggggcgcgttgtcgcccacccagtccccgacctcctccgcgcgggccatcccggcgaccgcgaagccccagaacgccgggcccgcccggccgtaccaccagtcggcgcccgtgaaggtgcccgtgcgtccactccgaaagccagctacgggccggtgggacgaattcgatgacgacgcggacttcgggcgcggcgacgccgccatgctgcccccgcatgagatggtcgcccgcgcatccgctggtggggctgggcccgccgctccgttctcgatgctcgagggcgccgggcgcacgctcaaaggccgagacctgcggcgtgtgcgcgacgctgtgctcaggcaaaccggattcctcgattgaatccggcaaggtgacgtggttcttgccttttgttcagcaaccgtgtgctcagtcagagtcgaagatgcgttacattaggtatgtgtagtgggttctactgtgtgagcactgagcaaagcgggaaggtaagataacaagattgaatttcccggcttgcaattttggtgttcttggatgtctgcgtgtcatattaccgcaagcttcagcagtaataagaactggtgtcctgtgtgggtctttctctgcgagctctctgtaatccaggagggaagagattttttttgtttccgtcaaggttgtctgttaggcgtagtacatatgaattatcgttatgttagtcgagactaatgctttcagctcttagtgaaagttttgttagttttgtttcttactcttttgttgatggtactgaattacctatggtgatgaaaatatgcattgtttcta

SEQ ID NO: 102987 - DNA, 2191 bp, Zea Mays
tgtatattcgtcaaaaagatccacagatttgtggtagagagtatgttttagtagtagtggtatatctcccttgtgggacgacgaagcagccggtcagccggcgctccggccggccggccggcctgcgcctgcacagtacaaatagcaccccccgtcctccagttggctgcatccttctagcttcgatctctatatacctctgtatgtgagtgaggccaatgagagccctcgtagtcgtaagtttcgcttcggcgtgcttgctgctgctgttgcagctcgcaggagcgtcgcatgtcgtctacaactacaaggacctcgaagccgaggctgctgcggcgacggaccaggtgccgccgtccatcgtcaaccccctgctcaggacggggtaccacttccagccccccaagaactggatcaatgatcccaacgcgcccatgtactacaaggggtggtaccatttcttctaccaatacaatcccaagggcgccgtatggggcaacatcgtgtgggcgcactcggtgtcgcgagacctcatcaactgggtggcgctagagccggcgctcagaccaagcatcccgggcgacaggtacggctgctggtccgggtcggcgacggtgctgcccgacggcggcggcccggtgatcatgtacacgggcgtggaccacccggacatcaactaccaggtccagaacgtggcgtacccgaagaacgtgtcggacccgctgctccgggagtgggtgaagccctcgcacaaccccgtcatcgtccccgagggcggcatcaacgcgacgcagttccgcgacccgaccacggcctggcgcggccccggccccgagcagtggcggctgctcgtgggcagcgcggcggggtcgtcgccccgcggcgtggcgtacgtgtaccgcagccgcgacttccggcggtggaggcgggtgcggcggccgctgcactcggcggccacggggatgtgggagtgccccgacttctacccggtgagcaagggcggcgcgccgcgcgcggggctcgagacgtccgtgccgcccggcccaagggtgaagcacgtgctcaagaacagcctcgacctccggcggtacgactactacaccgtgggcacgtaccacccgagggccgagcggtacgtgccggacgaccccgccggcgacgagcaccgcctgcgctacgactacggcaacttctacgcgtccaagacgttctacgacccggccaagcggcgccgcatcctgtggggctgggctaacgagtccgactccgccgccgacgatgtggccaaaggctgggctggaatccaggcgattccaaggacggtgtggctggaccccagcgggaagcagctgctgcagtggcctatcgaggaggtggaggcgctgagagaaaagtcggtcactctcaagaacaggttaatcaaggcaggacatcacgtcgaggtgaccgggatacaaacggcacaggctgacgtggaggtgagcttcgaggtgtcgccggcggccctggccggtgccgagacgctggacccggcgctggcctacgacgcggagaagctgtgcggcgtgaagcgcgcggacgtgaggggcggcgtggggccgttcgggctgtgggtgctggcctccgccaaccgcaaggagagaaccgccgtgttcttcagggtgttcaagcccgccgccggcagcgacaagcccgtggtgctcatgtgcaccgaccctaccaagtcgtccctgaacccgaacctgtaccgcccgacatttgcaggatttgtcgacacggacatctcgaacggcaagatatccctgagaagcctgatcgaccggtcggtcgttgagagcttcggagccgggggcaagacctgcatcctctccagggtctacccgtcgctggccatcggcaaggacgctcgcctctacgtgttcaacaacgggagggcgcacgtcaaggtgtcccgtctcaccgcgtgggagatgaagaagccggtcatgaacggggcctgaagatcttgaataaatatatcacccatgcatgacatagtggcgcctgaggaatctttcctttttttaaaaaacatattttagatgtcgtttattaagagttgattgtccatactaaagggcgccccgttatatgttacaatggtaccagctgcacttctagtaacaaagacaaattgactatttgttgttca

SEQ ID NO: 102988 - DNA, 2626 bp, Zea Mays
atccttctagcttcgatctctatatacctctgtatgtgagtgaggccaatgagagccctcgtagtcgtaagtttcgcttcggcgtgcttgctgctgctgttgcagctcgcaggagcgtcgcatgtcgtctacaactacaaggacctcgaagccgaggctgctgcggcgacggaccaggtgccgccgtccatcgtcaaccccctgctcaggacggggtaccacttccagccccccaagaactggatcaatggtaatgtaaagctactaactaatccaccacccaacgtcgtttgaaggtgatgtgtgtgttaagcatctcctgaaatatataagagagcgaggctagtaatcggcttgttgttcagggttttggtttaccacttgtagcctcaactaataaagctatatatatgagagcgacgagagagaagagacaaaacattcatgagtatggtcagacagactagctagctagacacggcagagaaattacgagagttaaaaaaaatgcgcttgaagggtgaaccaaaacaaaacaactttagtactatgcgtcaacaaagctgtgttcatgtgtcagctagcactagagtcatagtgcgtggccagtgagctgttgtctagcaaccaacgcgaactgaagtttgagagcgtactcgtgttctcgatctcttgcagcgcaaaggtcttcgtacgtgatcaggaatattgcaccatttactgcttaattaattaagtacgtacgtactgtacgtttggctctacctcatcttctaatcttttcggtgctgtcttgtgctctctcggctctgattgcatcgatcggcggcggcgtgaactttgcaacggcggcagatcccaacgcgcccatgtactacaaggggtggtaccatttcttctaccaatacaatcccaagggcgccgtatggggcaacatcgtgtgggcgcactcggtgtcgcgagacctcatcaactgggtggcgctagagccggcgctcagaccaagcatcccgggcgacaggtacggctgctggtccgggtcggcgacggtgctgcccgacggcggcggcccggtgatcatgtacacgggcgtggaccacccggacatcaactaccaggtccagaacgtggcgtacccgaagaacgtgtcggacccgctgctccgggagtgggtgaagccctcgcacaaccccgtcatcgtccccgagggcggcatcaacgcgacgcagttccgcgacccgaccacggcctggcgcggccccggccccgagcagtggcggctgctcgtgggcagcgcggcggggtcgtcgccccgcggcgtggcgtacgtgtaccgcagccgcgacttccggcggtggaggcgggtgcggcggccgctgcactcggcggccacggggatgtgggagtgccccgacttctacccggtgagcaagggcggcgcgccgcgcgcggggctcgagacgtccgtgccgcccggcccaagggtgaagcacgtgctcaagaacagcctcgacctccggcggtacgactactacaccgtgggcacgtaccacccgagggccgagcggtacgtgccggacgaccccgccggcgacgagcaccgcctgcgctacgactacggcaacttctacgcgtccaagacgttctacgacccggccaagcggcgccgcatcctgtggggctgggctaacgagtccgactccgccgccgacgatgtggccaaaggctgggctggaatccaggcgattccaaggacggtgtggctggaccccagcgggaagcagctgctgcagtggcctatcgaggaggtggaggcgctgagagaaaagtcggtcactctcaagaacaggttaatcaaggcaggacatcacgtcgaggtgaccgggatacaaacggcacaggctgacgtggaggtgagcttcgaggtgtcgccggcggccctggccggtgccgagacgctggacccggcgctggcctacgacgcggagaagctgtgcggcgtgaagcgcgcggacgtgaggggcggcgtggggccgttcgggctgtgggtgctggcctccgccaaccgcaaggagagaaccgccgtgttcttcagggtgttcaagcccgccgccggcagcgacaagcccgtggtgctcatgtgcaccgaccctaccaagtcgtccctgaacccgaacctgtaccgcccgacatttgcaggatttgtcgacacggacatctcgaacggcaagatatccctgagaagcctgatcgaccggtcggtcgttgagagcttcggagccgggggcaagacctgcatcctctccagggtctacccgtcgctggccatcggcaaggacgctcgcctctacgtgttcaacaacgggagggcgcacgtcaaggtgtcccgtctcaccgcgtgggagatgaagaagccggtcatgaacggggcctgaagatcttgaataaatatatcacccatgcatgacatagtggcgcctgaggaatctttcctttttttaaaaaacatattttagatgtcgtttattaagagttgattgtccatactaaagggcgccccgttatatgttacaatggtaccagctgcacttctagtaacaaagacaaattgactatttgttgttca

SEQ ID NO: 102989 - DNA, 1945 bp, Zea Mays
cgggtcacgtgagtgacgtggcacgcaagcagttcagctttcggttctcctgccggcggcgccgcgtcttttcccgcaccttcgcatcgtatgccacttcagacgccatggccgtggctccgcctctctcaacccacgtctcccgaactctaacctcaaacctgcacctctggccgcggacccacggtggcgtggctcatgcgcggacgcgggctctgatcccgacaccggctgcggcgtgcgccttccgtttcagtttccgtgttcgcgccaccgccagtggctcgaagctgccgccttatcctctacccgatgtcttcccctacattaccgccgagtgggaggccgtcgcgaagggttgggcgtgcgccgccgtcgccgtatactgcctctcccgcgcagtgcccgccgcggggcgcctgccgcgcgcgctcgccggcggcggcgggggagggggcgcggctgttgtggtggcagccaggggcggggtcgccctcgctgcgtttgcatcggcgcgtgccgccgctacatacgcgcagcaggcgtttctctgggaggcggcgctgcaggcggcggggcggctgcgggagcgcgccttcgagcgcctcctagagcgcgatctcgagttcttcgagggtaggggaggggtggctgcgggcgacatcgcgcacaggatcaccgacgaggcggacgatgtcgcggatgccttgttctccgtgctcaacgatgcagggaaggcatacaatgaatataagcaaggacagccagcattagaacgcatatttgatcttatgaggttcaaccctaaggtgactgataagccaagggcaattcatttacaaagtattaatggggacattaagttccatgatgttacatttagatatgttgatgacatgcctccagtagcagatgggtatatacttctggacaaccatgatattcaggacattcaatcgcaatgcctgagaacacatatcgcttttgtttcacaggacactatgctattttctgggacaattgctgaaaacattgcttatagagaccctgtgggagatattgacatgaatagggttgagtacgctgctaagattgccaatgctgaggagttcattaagatgttgccagaagggtacaattcaaatgtgggacagagaggttctagtttgagcggtggacagaagcaaaggtaaaatgctcactttccagtttccagactaccttgtatcacaaggttatctattgccagggcaatctatcaaaattcctccatattgataatggatgaagcaacttctgctttggatatcagatctgagctgctactgaaagaagcgcttagtaatctaattgcaaaacactcagtaactgttatcatcattgctcatcgacaggaaatggtcctaatggctgacaggattatttcactagagcgcggtgaattgcgagagatgtcgaaacaggcatttttgtctcaagatggtcacttcagcttaccaaggatcaggagtccaaattagggtgtccaaactagggtgagacttggcatgggtaatggtagtttctctcgtgaagatttgttcatatatttggccatggaagaaaacgattgatagaatcacatttcttgcctgagccctgctcagaactttggcttcttggaaccttgtttcatcccaacagcaacaaatctgtcaacattatcgaaggtcgtctgccggagagaatagcaggctcctcagcggcattggctcctacctgctgcaagattctcctcaagacctcaacaggaaggtcaaagcaaggtatagggttttaccaatttttgtacacatgaaaaagcacaggttccttacatcccccgcccccgcccctgcatacatgcaggatgcagtagttgagctgtatatatgccaaaataaagttattcgttttagattttttt

SEQ ID NO: 102990 - DNA, 1389 bp, Zea Mays
cagatcgtcaaccgccctcatcccctctctcctcacgccaatccaaaccctagccatcgccgccatcgccgagtaccaggcctccggggaacgcctcatcggcctgcatgtcgatccacaccgccctgctctgtgcgtcaccctccccacggaggcgaaggcgccctgcgccggagatcgcgggatggttccacgcggctcctaggctaccagctggccatacggatcttgccaagatcgcttcctcactcctcttccctgaaggcgacaacgactgtggaggaggcagcgggggtcagcgaagaggtggtcgcgttcacgcggggcgcagcctcgcggcccgagttatgtctcatcttcccccctccccgacgacgcggactcccatggtttgtggcttcgtgattcatcatattggaacccctcgccgccttcccagccagcgccagcacccccacccagcgaccccgccgtcgccggtgaccagccccaaccccatcacaaggccggcgacaaggaagcggatgttgccaccgccgaaactgatgggtacaaggcggggtcgtcctcatcgcacctgtctcaactgctccgggaggtaggcatcgacgactcctggctgcttgtgctgctgttacttgcaggcaggctctgaatgttgccaataggctctgaatgctgctgctacatagccaagcttgtcagcattgcgacccttggtggatgaatagggtctgcaataggtgaatgttcttgtttttcatcttcagatgatgcatgttccattggacgtatcagtatagttgcaaccaaggatttgttcattttcttttccccttttgactgtgtcagggaaattggaattaagggcttcagacattttttaagtgcattgtactttttttcatggcctactctttgtgaattatcatgtcaatcatgggcattggtaatatcttgcccgtcaggtggcgttaacacattgtgttgatgaacctaaagacgtacggagtgctcgaaagggtgttgtaaacatgttctgagatgtggctatgataatctaaagttatctcctatattgcagttatccagaaccgcgtcgcccctccattcatccttgacaacgctgcctgtgttgctttacgtgttcagggcttcagcaatccaggtgccaccagtgtgggcgcgacccatcatgagtcgatgctggcgagccagccatagcgcgacatctgatgcttctgcttccttacatgaacatgcatcaataagtcagccatctagccctacttactgtaaccagcatgcatgatccacctctgtaatttttatttcctaaatatgtgtttttatgctaatttgaatacgctattacgcccaattactaga

SEQ ID NO: 102991 - DNA, 974 bp, Zea Mays
cagatcgtcaaccgccctcatcccctctctcctcacgccaatccaaaccctagccatcgccgccatcgccgagtaccaggcctccggggaacgcctcatcggcctgcatgtcgatccacaccgccctgctctgtgcgtcaccctccccacggaggcgaaggcgccctgcgccggagatcgcgggatggttccacgcggctcctaggctaccagctggccatacggatcttgccaagatcgcttcctcactcctcttccctgaaggcgacaacgactgtggaggaggcagcgggggtcagcgaagaggtggtcgcgttcacgcggggcgcagcctcgcggcccgagttatgtctcatcttcccccctccccgacgacgcggactcccatggtttgtggcttcgtgattcatcatattggaacccctcgccgccttcccagccagcgccagcacccccacccagcgaccccgccgtcgccggtgaccagccccaaccccatcacaaggccggcgacaaggaagcggatgttgccaccgccgaaactgatgggtacaaggcggggtcgtcctcatcgcacctgtctcaactgctccgggagttatctcctatattgcagttatccagaaccgcgtcgcccctccattcatccttgacaacgctgcctgtgttgctttacgtgttcagggcttcagcaatccaggtgccaccagtgtgggcgcgacccatcatgagtcgatgctggcgagccagccatagcgcgacatctgatgcttctgcttccttacatgaacatgcatcaataaatatggacctcggtggttttctccacattaggaaagctggaagagccttttcaactcagtttttttgctaacagtggtgttatggtgaaacagagttttgtgtgtatgtaccaacagctaaaatgtaaacacgacattatcatagttgagtataggaataattatctctta

SEQ ID NO: 102992 - DNA, 105 bp, Zea Mays
gtatgtgactatacagggatacttggtacaaagcttagcgtataaaaaagttcaattaatttcatctttatttatttatgttctcaatgctggtaataaatatgc

SEQ ID NO: 102993 - DNA, 351 bp, Zea Mays
atggaggaagcaataaaaaaattaggagggagtagcccggcctgcggagtgcgggcctggcctggcggcgagcaggtgctggtactatgcggcacgcagcgactggcctgggcgccagggccggtggccgcgcgggagccgggcgcgggaggagggaaccggctggccgctggcctggagcgtgagcgggagggctacaataccaacctcgacgtggctattgctctagcagtgggtgccgcagcccgtggcggctgtgaggctgtgagcagtggtgggatgtcaggatgtgagacgggcagacgaccaatgtgttgcccttgcctgtggtgggccgatgtgagcccatga

SEQ ID NO: 102994 - DNA, 180 bp, Zea Mays
ggaggaccgcgcccgcctccctcccctccttctccctcacgcccgactccctcgttgcccctttatcctggatctcgtcatggacgctaccacgaccaacggttcgacggagcaggtgccgcacgctgcgccacgggacggagcccgtccccacccgacaccgaccacctccaccccgag

SEQ ID NO: 102995 - DNA, 297 bp, Zea Mays
ccccgtcgctaccgcccgcccgcccgccgcagcgtacgctccacgaatcccgcacgcccccgcggtccgttgtctgctactgctgttgcgcgcgcgccgcggcgggacccgggaggagcgcaggtggtggtgggcggcccgatggagtgggggtcagcggcgtacacggccgcgatgctggtgtgcgccacggcggcgagcgtggtcgcgctcacgcacatctaccgccacctcctccactacgccgagcccatctaccagcggttcatcgtccacatcatattcttggtcccggta

SEQ ID NO: 102996 - DNA, 613 bp, Zea Mays
ctccgctctctactcgccccagatcgtcgcccccgttcgcgtggattgggtaccggtcccaactatctccatggattgcgcgtccgcgacaacccaatctcctcccgatctccatggaaggcgcgtcctccccccgtgattctcgattccccgcgtccgcgccccagatccattctcctctctcccacaatccccacggactccgccccgtatcaccaccccggctccttagaacgtgatccactctcctctctcctgcaatccccgctacctcaacccagatcgccgccctcgctctcgatcctcacccacgctctccatggaaggcgaggtcgcgatcctcgcgtggatctatgtagaggctgcgacgctctcccaggaagactactgccagtgctccgtgctccgtgctccgtgcgccgcgctggaacgccaccgtgcggtccatgtcctcgtagtatcgcccagactcgcccatgtagtcccacctgcatccaccgaccaccaagcacactctcactgcagaccggagaggattgccacgaataggtgtgtgcagttctactctacccctgcatcgagccggtgtgcgtccaccagaggccggagttga

SEQ ID NO: 102997 - DNA, 968 bp, Zea Mays
atgaggttcgacattatgtcaggaagcattcggatcttggtcgtattgtgcttgaagttgctaaggactcgcaaatccccggccaagcaaactgctagaaatcttttcagaggtggagatgatgaagatgatagtgctgatgccgacacaaatgatcctgctgttcctcggtcattaggtagagtaggagttgggcatatggtgtacatctccggtttgacttgtgccttgagttcaacaaatatccttgaagtctcatggcgtgaaaaggagccagggtctctgtttgttaacttaagcttgctgccagcactcctaaactcatcgtgcctgcataatttatcacccttgtcagatcttccccgttcgacaaacagaacacatatatcccatgttcggttagatggtatcgattgtgacagtttaaaggtgtcactgttccacaacatttgcggcagtgttgtgaatgaacattcaggtgtactccagtgttcattctgtaagtgtgcctgcgaaagtgtatgtgtgtgtggctttcagctgcacttgaccatcgcagacgacagtgcggatgtcttggcttggtgcgttgggcaaacggctgtcgagttccttcagatatctcctgacgaatacctggagctccccgaggatgaacgggcaatgtatctctacactctccagaacgaaagcttcgtggtggctattgcgaataccaggaagcgagtcgatggatgtgctgtgggtgatgaagccgtcccagcttgggagatcacgagagcccagaaatgtgaatgagttcgtatagtgctcgagaaagaaatgttgatgctaaaaaagtaattgtaacacgtgtttcaacctccgtttttcatcaaccaattcgtcgttcagcaatgcagccatatgcatgagttgtccattgactccaaatgatgcttaagcacgacggttaggatgggttcttc

SEQ ID NO: 102998 - DNA, 665 bp, Zea Mays
gttatttctcatgtcttgtccatatattcaaaccaatatagagatcatattatatccatttgcattgtctcattggttatttgaccttgtgttgaaccttgttcactgatcattatacactattcaagtatgttcatcatactgaatttcttgttcaacacttaacaaacttgttagatctttaaatgtgttgttatccaaatcaccaaaactcacaaaagggatgactgcactttcaatctccccctttttggtgattgatgacaacacatttaaagcttacataaggtttgataaataagattttgaatcctatgatatagtttcctccccctaaatatgtgcatttcagaaaataccaattttgtactcaaatgccaaaagcacatatttgggtcaaagagtgaagacaacttatatcatactattcatagggtgctttgtgtcataaaataaatgtgatgctcatgacatagaatgcactaatcaactttctacatcttatgtttttcttatgattcccccttttgttaattatactcctcttttcaaaagtcttctaacacttagttacataggactaaaggtaagctttaatgcacaatttctccccctttgtcataaatctccaaaaaaaatataaagaatataaagggtagaaatta

SEQ ID NO: 102999 - DNA, 523 bp, Zea Mays
cgataagggaattttaaactgcatcaagagtagctatttagaaaacaaagattacaatccatatgaatgagatacaaatttaccattttggattgtcttagtataggttactcaagagaaacttattctctacgacacaagatatataatattctcccactagatatgtgcatcaagtatttgaatgacttgccacatgcactttcaattcagttaagagtctcatgaggagtacattacatatcatggtcaaggcatgacaaatttgcaatgaattaacttatgcctaaaaatacttaccaccatatagaacgcaccatttgttatatcaattgaaagatcttactatatgagatggtgtcatctaagtattcttcttttcttcaattgtggagactttcttctttagcttgttatctcttttccttttaaaactagtcgaaaaagcactttgaaaagagatattagtggtacaaggaagtatttaatgaatgatgatatttatatatgaatggcaaacaaa

SEQ ID NO: 103000 - DNA, 785 bp, Zea Mays
tgtcacaggtaccgtcgacctatttgatatatcgctaaaatctgaattcacaaatatctgcgaaattctttaaagaaataaaaaaagaatcttcttctccatccctataccctatctaccaccgccctctacccctaatttttctccagccgccgcgctcctgatccttatctctgcgcgcgctgcatcggcgcccgccgggaggcggatcccgcccgcctcgtccatgttgtgggtccgcaatatccgccgcttcgtcgacacgggcgccggcctcggatccgaggccatcatgggtcagtgcctctcgcctctgttcctcccttagcccccaacctccgctctaggctcggtcggagttgcacgctttggattagggtttacgtgcgccccagtttggaatgcgtgcggtaggaggatgagatctgtgcaccatagggtgtatggtgatgtaatgcagtcctactacgggtacctgaaaaagttggatgctgatttgcagctgttgattttggtggagattcacttgggaagaaaatggtgatttctgaagaggtagggatgtttaggaaggctatagattttggatgtgtgttgtttaagtttttttactcgtaatttcatgatagggtgatatctggtctcaggacagtgggctaagtgctagtacttctctgtcactgcacctgtacggacagctagggccctttttcttttgtaatttgtcacaattattgaattatagttgtttggtggttccttgcatgttctgggtgatgaaagtg

SEQ ID NO: 103001 - DNA, 869 bp, Zea Mays
aaatatctgcgaaattctttaaagaaataaaaaaagaatcttcttctccatccctataccctatctaccaccgccctctacccctaatttttctccagccgccgcgctcctgatccttatctctgcgcgcgctgcatcggcgcccgccgggaggcggatcccgcccgcctcgtccatgttgtgggtccgcaatatccgccgcttcgtcgacacgggcgccggcctcggatccgaggccatcatgggtcagtgcctctcgcctctgttcctcccttagcccccaacctccgctctaggctcggtcggagttgcacgctttggattagggtttacgtgcgccccagtttggaatgcgtgcggtaggaggatgagatctgtgcaccatagggtgtatggtgatgtaatgcagtcctactacgggtacctgaaaaagttggatgctgatttgcagctgttgattttggtggagattcacttgggaagaaaatggtgatttctgaagagaactggagactaaaaggatattgcttgagattttcaaggagcggcagcggaagagtgccgaggctggttccatcccaagtttttacaagaaacctgaagaaggatccattagctctagagttcaaaggttggccaagtacaggtttctaaagaaacaatcagagcttctgctgaatgctgatgatcttgatgccatgtgggtttgtctcagagaaaattgtgttattgatgatgctactggtgctgaaaaggtaagattcctttttgatgtattttacaccacatcagctagttttgttctgggctcaatggctcactgctgatatcaacgactcagaactcaccgctagcagctacatgtgtgg

SEQ ID NO: 103002 - DNA, 785 bp, Zea Mays
aaatatctgcgaaattctttaaagaaataaaaaaagaatcttcttctccatccctataccctatctaccaccgccctctacccctaatttttctccagccgccgcgctcctgatccttatctctgcgcgcgctgcatcggcgcccgccgggaggcggatcccgcccgcctcgtccatgttgtgggtccgcaatatccgccgcttcgtcgacacgggcgccggcctcggatccgaggccatcatggaactggagactaaaaggatattgcttgagattttcaaggagcggcagcggaagagtgccgaggctggttccatcccaagtttttacaagaaacctgaagaaggatccattagctctagagttcaaaggttggccaagtacaggtttctaaagaaacaatcagagcttctgctgaatgctgatgatcttgatgccatgtgggtttgtctcagagaaaattgtgttattgatgatgctactggtgctgaaaagatgaattatgaagatttctgccatatcgccacagtctgcactgagtagattggtcagaaatgcaaacgatttttcagcccttcaaacttcatgaagtctgcacggagcacttgcacagattgtttggctaattacaagattatctcagtgttttggtttgaatttagagtatacttatgtatgaaatattgattggtactcatttatattatattaattatattattattaaatatatgtatgtgtatttctctttcaaattattataatgtggtatctcaaatgaata

SEQ ID NO: 103003 - DNA, 975 bp, Zea Mays
atgatcgtctccgagcagcagggacttgacaatgatgtcagccatcccctcggcgatcgggaagagatgtcccgacttggggagctcgtggtagacgacccacggcagcttctggctgatgtacctggacaggctgaccggcacgatgaggtcctcggcgccgtgccacaggtgcaccttccccgccccctggccatcgtcggcgtcggcgtcggcgaacgggttctccagctgcagcgggctccagctccacttgccgaacccgaccatcatgtcccggtgcaggcactcgtgctccccctgttgcctgatctgcggcatgtaggctctatagccaaacttggccatgagcatctcgtcctcttgggacaggagggcagggttgtaggcgatgacgctggaggccgggaagagcttctgggtgttccaccagtaggtgagccacggcaggtgatgcgcgacccagaccgcccactggtcccgagggagctgctggtaccaggcgtcccgcgacacgttcgacggcaagccgggccaccagtagttgcctacggggccgagaatggccacgccggagagcctgtgtgggatgtacttgaggcagctccacatgatctcgccgcccatggagaagccagcaaggtagaacttgcgacccagctgcaggttgtcggcgagctcggcgatgtcgagggcgatgctctcctcggtcctggccgggtgcgggtcgctctcggcgtacccggggcgatcgaaggacaacatgtaaacgcccagctcttgcgcaagctccgtggagatcggaagcgcgtcgtgtctgcaggagtcgaacccatggacaaagacgagcctgtgcttggccttctccctcgggacgccggtttccagataggccaggtacctgccgtcgctgagcctcgtcctggtcgccgtcaccggcgggccgcccggcgtgccggggatcttgggcggtag

SEQ ID NO: 103004 - DNA, 1689 bp, Zea Mays
atgttcaaaagtgccacgtcaataggctttcagcaccctgtaaagacaaaaatctacaaactcttgtcaacgtggccttgtggtggcctctccgctcaaagctccacggacagaactggcctccgcgacgcttccagaaccagcgcctcatcccctttcccccctgatacgacgcctcctctcccccttctgggcagcgacgccgtggggagccgccgccgcgcgctccgctcctccctgcacctcatccccttcccctgctccccctcacacgacgtgtggcggtccgaggatcggccctggcaccagcgcccccggtgcctggagcagtgcagggaggagcgggagaagcggcaagagcggagcaggcacgaggccgacgaccgcagcggcgagggctcgtcggaggatgagcgcgagcacgagcaggagaaggaggagaagcagaaggaccggcgaccgtacgtgttcgaccggcgcagcttccgtcgcgtggtccggagcgagcaggggtccctgagggtgctccggccgttcgacgaggtgtccaggctcctccgcggcatccgggactaccgcgtggcggtcctggaggcgaacccgcgctcgttcgtggtgcccagccacaccaacgtgcactgcatctgctacgtggcagaaggcgagggagtggtgacgacgatcgagaacggcgagaggcggtcgtacaccatcaagcaaggccacatcttcgtggcgtcggccggggcggtcacctacctggccaacaccgacggccagaagaaactggtcatcgccaagatcctccataccatctctgtgcctggcgagttccagttcttcttcggccccggcgggaggaacccagaatcgttcctgtcgagcttcagcaagagcatccagagagctgcgtacaaggataaggggatcatcgtgcgcgccacggaggagcagacccacgagctgcggcgccacgcttcggagggcggccacggcccgcactggcccttgccgtcgttcggcgagtcgcgcggcccctacagcctcctagaccagcggcccagcatcgccaaccagcacgggcagctctacgaggccgacgcgcgcagcttccacgacctcgccgagtacgacgtcagcgtctccttcgccaacatcaccacggggtccatgagcgcgccattgttcaacacccgttcattcaagatcgcctacgtgccgaacggcaagggctacgccgagatcgtgtgcccgcaccgccagtcgcagggcggcgagagcgagcgcgagcgcgacaagggcaggaggagcgaagaagaatcgtctgaggagcaggaggaagccgggaacgaaaaggtgttcctggccggcgccgacaacgtgctacagaagctcgaccgggtcgccaaggcgctgtcgttcgccgccaaggcggaggaggtggacgaggtgctcggctcgcggcacgagaaggggttccttcctggccccgaggagagcggcggccacgaggagcgggagcaggaggaggaggaacgcgaagaacgccacggcggccgtggggtgagggaacgccacagacgtgaggagcgggagaaagaggaggaggaacgcgaaggacgccacggccgcgggcgccgcgaggaggtggtggagacgctcatgaggatggtgaccgccaggatgtga

SEQ ID NO: 103005 - DNA, 143 bp, Zea Mays
tttttttaaggtaacactaaacctaacttacttttattttgtccttacaggtctacatgctgctaagtttcttttgtttttcaaccaggcttacttcaaccgcttatttctttaaaatagacataattgctatttttttctaa

SEQ ID NO: 103006 - DNA, 1167 bp, Zea Mays
atgctgttgttaattattcacgctccatttctcccagcccgcggctggctataaatagaggaatgcgtcggccactgagccgcaaaccaagactgctacgacctctcatatatattatcagagcttagccatgtctagagcgttggaacctctggtcgtcggcaaggtgatcggggaggtcatcgacaacttcaaccccacggtgaagatgacggttacctacggatccaacaagcaggtgttcaacggccatgagttctttccgtctgcggttctgtccaagccgcgcgtggaggttcagggcgacgacatgaggtccttcttcacgctggttggttcccttgttgatatctcctcaatttctctcgcacaaaactgagatgcgattgatcagttaatctctcttagcttacgacgacaggtgagtgcatgcatcgtcgtcagcttaggccctgttccaatatcgcgagataaactttagcagcttttttttagctacttttagccatttgtaatctaaacaagagagctaatggtggtaattgaaactaaactttagcacttcaattcatatagctaaagtttagcaggaagctaaagtttatcccgtgagattgaaacggggccttaattaggcccgtagtactgtaacaaatttcagcttttgcaagctgatgatgccgtttgttattatatatatattattgttgttgtgttcttcaggtcatgactgacccagatgtgccagggcctagtgatccatacctgagagagcacatccattggatcgtcaccgacattcctggaacaactgatgcttctttcgtccgtacgcaattacacatggatgcaggaagggagttggtgatgtacgagagcccgaagccgtacatcggcatccacaggttcgtcttcgtgctgttcaagcagagcagccggcagtcggcgcgcccgccctcgtccggcggcggcagggactacttcaacacccgccgctttgccgccgacaacaatcttggcctcccagttgccgcggtctacttcaacgcgcagcgggagactgccgcgcgccgccgctgatcgatcatcaccgctacctcttcccatgcatctcctttctcatcgcgtgcatggcgcatgcaaaatttatcgatctatagctactat

SEQ ID NO: 103007 - DNA, 1251 bp, Zea Mays
atgctgttgttaattattcacgctccatttctcccagcccgcggctggctataaatagaggaatgcgtcggccactgagccgcaaaccaagactgctacgacctctcatatatattatcagagcttagccatgtctagagcgttggaacctctggtcgtcggcaaggtgatcggggaggtcatcgacaacttcaaccccacggtgaagatgacggttacctacggatccaacaagcaggtgttcaacggccatgagttctttccgtctgcggttctgtccaagccgcgcgtggaggttcagggcgacgacatgaggtccttcttcacgctggtcatgactgacccagatgtgccagggcctagtgatccatacctgagagagcacatccattggatcgtcaccgacattcctggaacaactgatgcttctttcggaagggagttggtgatgtacgagagcccgaagccgtacatcggcatccacaggttcgtcttcgtgctgttcaagcagagcagccggcagtcggcgcgcccgccctcgtccggcggcggcagggactacttcaacacccgccgctttgccgccgacaacaatcttggcctcccagttgccgcggtctacttcaacgcgcagcgggagactgccgcgcgccgccgctgatcgatcatcaccgctacctcttcccatgcatctcctttctcatcgcgtgcatggcgcatgcaaaatttatcgatctatagctactatatatgtggcctttattactatttcctacagtatgtggctatcgtcgtcaaataagagcttatgacacctttcagcgagagctagctagctgacctgtctcgatcgatctgctagcagtctctctgttcttcgttttttcggtcaataatcaattagaagctagcctctctagctgtgcatgaatgagcactcatgtatatgtaaagatgcaactcgtgtggcactgtgtgtgtgtgtgaccacctcaactccatcagctccttcacacggaggtgaggtgaaagatgcgtgaatcctgctcggaacacgcgtgcttgactgggagctagctgtcagcggtacggtgcttgtgagatccacgacgtgtccagtggcggtgacgggagataaaggccgtggcctgctggcccatgcatgcatggctctagctagtgctctcccccttatattacccacattaggccttgttcggttacatgggatataatcccaccatggattta

SEQ ID NO: 103008 - DNA, 318 bp, Zea Mays
atggagcaggcggccatgggaagggcagaggaagcgccgacagaggagggagatgaagacgccagcagcaaaaaatcagaggagggagaggatagggatggcacgccgtcaggaacaaaaatcaggaagcagatgatttgctgctgcgcggggaagagccatttggctgggaagaagaaggagctggacgacttcagcagattttcctctgcagcggctggagataaccacggctggaatttatccattgctagaaagcggcgcagggatttgttcacgagcttgagcggcatcaaaaaaaatcccacccgaggataa

SEQ ID NO: 103009 - DNA, 1316 bp, Zea Mays
ggtcgatggcgtggatcgaaaccgcccgggcgccttggtgtcatccaaccaacgccgagctccatctgcaacaaattcgagtggccacgcctcctctctcggtcagcagacccggtcgtgcagatcgccaggaactgtgcccccatcggtgagcagtcaccgacttcatctccaacgactccggcgaagacaggcggctccagagcgcgcgtcacggagatctccatcatcaccgtgtccagcagcggggtcccatgcctcacgtttgggacatggaatgcatcgttcctcttggaggtgccactcggcgtcactgtctcgctcttcgatgagggccacagtgggggtcgcaccgttgatagcggtgtcgtgatcgaggagcgcttgaatcttgtcatacacgcccgctagggcgaacctgaatcccgtcgtgtttgaagggtaccaggtgtgtggtgtccctggtggtagctgatgaccaccaccgagacggttgtccccttctcctctgtctgaccgcctccacgtctgcttctataaaattttagatgcaaggacatccgcttcaatgggttctgctgcatatgctcctaagagagatgcaatggtctagaaagtaaaatcattccctggtggcaaggaatacatgtgcagagtagaatttagtcttcctagcataacagcggaagaagggccccagaaaagaaggcaccaatacgagtgaaatttgagataccatatttcatcgtatcaggtatttaggtctgttatctgaagataattggaaagagtggttaccaggcactcccctgggttagatatatcacgatggctggcgaatatgagctgagacttatatgagttttctcttttctggctgatggaagacatttatgaagctgcaagatacatatttgctcgagacagcaaccgtatgacatttggatgttagcctggacgtcttctgctgaccatacaaggtttccccctgggggcttgttgttcctcttgttaggctcaccttaccttggttattgtatgttacccatcaagtatagtttttgaaaaaagagaggataattttaattttcatctctcttgtattattatggatttatttttgtgggtaccaaacttggatttgtttcgtctgattgagttcacaaaaacactgtcattactgggtgatagttctgaactgcaggttgaaacaattgtgccctttagtgtaaatgtcgtcgtcttgtgtccatgcaaaagaaaggaaacctaccaagacctattatgacttcattaatttcaactttttttgtttc

SEQ ID NO: 103010 - DNA, 1759 bp, Zea Mays
atgtaccgccgtgaattattctttaaatcgagtgctggtgttggcagcttggtttgcccgagaaaaacttcttcaatgacaacttcgagttggtgctctcagaacctagcgatgccaataccaatagcaccaccctcctctcagacgagaccgacgataggcctaaaggaaacacgaatcaagaaacaggcacctcaaagcaacttgaatacgagtctaatccttcggttgctgagcccgaccagagagaaaagatggagggtgttccaggctctgccctagatgccagtcaaaaatcctctccgagaagagcgttttcacgccctataaaaactaacctgagggttgccgagtcgtctgcatttctagcatatgtcaagtcaagcaccccagccaccagctcatttgacagcgaattacaaaggggtggcagccgattagattccttggataaccagggtaattgctctagcgcaaccgatagaagtgacaccggtactgatgtaaatattcggaacaaagaagcttttgagatgcctgcgcagtaccctatggtatggttttcttcctctaacatgcatatggagcgaagcagcgaaggacataatgatactttaggaactccacctgcataccatttcccattttattatccagggatggtagagcacaacatggcactttcatcggcgcaagattttcaagcaaacataaacaatgctcaagcacatacaccgcaagaaggcacatttaagatttgccattatgcaggggaggtgacatatgatacagctgggttcctggagaagaacagagatccactacactctgaatcgatccaactactatcatcatgtaaatgtgaacttccaaaacattttgcctctgtcatggttgctgattctcagaataaatcaagtctgtcatggcattcagtaatggatacacagaaacaaagtgttgtcacgaaatttaaggctcaactgttcaagctgatgcagcagttggagagtacaaccccacattttattcgatgcattcaaccaaatagcaaacaacttcccaggttattcgagcatgatcttatcttgcaccagcttaaatgctgtggggtgcttgaagttgtccggatatcaagaacatgctatccaactaggatcactcaccaacagtttgctgaaagatatgggtttcttctcttgcgttcgattgcatctcaagacccacttagtgtttcaattgttgttttgcaacagttgaacatcccccctgaaatgtatcaagttggctacacaaaattgtttttccgtacaggacaggttgctgcactggaaaatgctaaaatacagatgcttcatggaaccctccgtattcagaaacacttccggggtatgcattctcgtcagggatatcaacgactcaagaaagcgacaatgaatttgcaatcatttatacgtggtgaaagagcaagaatacactttgataatcttgtcaagagatggagggcagctgttctaatacagaagtacactaggcgtcgacttgcagctaacatgtttaatgatcaactgaatcatatcattattcttcagtctgtgatgcgtgggtgcctgactagaaggaaaaacaaatctaaaccaatttgctactgctatactagagagaagaaggtctactcgacggcgatactagagagaaaaaagtcaccgaaccgccttgtcgtcgacgaggccaccaacgacgataactccatcgtcgc

SEQ ID NO: 103011 - DNA, 2790 bp, Zea Mays
atctgctcctcgtgatgcgcgccgctcattgctgccgagcgctgccgctttcgcccgcttgaactcatcctcatccccacgccactcccccactctcgccgctcctcgccgccgtttcggccagaaaaccctagcaaatcctcgctcgcagcagccagcttctccaagtgggagcaacccgcgccgccgaccgagcgcgagccgtagcagctcccgccgccgccacccttcgcgtgccgcgccagcgccctcggccccgggtgccgccgtccggactccgtgatgccggttcttggcccgggaaagcggcttcgtcggccacctaagtgcaggcaaccgtcggtcctgatgacttgaaatgcggcagcccttctacggcctcccacccagatgaagatgcagcttgtggaaccggaaggctcgaaggggatgggttctcctgggtgctcggagatagtcgaactggtggacgagccgaaagatgctcgttcgtgtgggcttacccacttgagggtgagggtcaagccagtggggcaggagcttggggcacggtcgtgctcggtggaggatgatcttgaccagctcatcagatcgatcaacgtgcgcacgtcggcgagggcttctgggcagacgagcacggataggcggcttattgcgcttgggaagtcgccagtgtcgagctcagagattgtggagtccgtgagcctgaagcaggccctgaggaagatgtgcatctcacaggcgtcggagatggcagccatgaagagactgtcaaaaccgacaggggtgtccaccccttctgattctggagcaatcaagaagctacatggctctgttgcagttcaaaccaatgaggagcaagatgacaagagtaaggcagggaaagtttctgtgaagcctgagaaatcggcaggaagttcagtgggtaagccaagtgaaatcagtaaggggcagagcaagagctcagccaagaagaatttgagatcagcatctcctaccacagggaatgttcataaaaccagaatccaagatgtgatcagtaacaagtcatcagagggagttgaaggtatttctgtagaagtaactctgccaaagcagagaaaaggtaaatcaatgaaaacatctagcccccgggctgttcctgtaggtggctcacggttggtgaggccaatgtttcggaataaaacctcgacgaaaaagaaggtgaaacctgaacctgctatagtgcccgcatcacacaagcattgtgagacgaaaggtcctaaatctcacactagtaaacatcaggagtcccttcaggatgaacccagaaccccagcgccaactgacaagaaggctgctgtcagctccaccactgttgatggagctgattttggcactaaaggatgtggtgtcggtgtgatccatggctcgaaggttggtgagttgttaagatcaaaggagaagggagaatgctcccaaagctctaagagtagcattggtgattatagcaccagcacaagcatcagtgaggacagttatggcagcttcagtgctaacagaagcaggcctcacatgtcaaaggatgtgagatggggagccatcaggcgcatggctatccaacaagggagcttgggattaaagaacttcaagcttctcaaacaacttggttgtggggatattggcactgtttatttggctgagttagtgggctcagactgcatgttcgcattgaaggttatggacatcgagtacctcataagcagaaagaaaatgctcagagcacaaactgagagggagatactgcaaatgctcgaccacccattccttccaaccctgtattctcatttcacgacggacaacctttcttgtctggtaatggagttttgccctggtggtgacctacatgttcttaggcagaagcaacctaccaaaaccttttcggaagcagctgcaagattttatgtcgctgaagtcctcttagccttggagtatctccatatgttgggggtcatataccgtgatctgaagccagagaacatccttgttcgtgaagatgggcacatcatgctctcagactttgatctgtcgctgaggtgctcagtgagcccaatgcttgtgagaacatcatcagtagacagagatgagccaagtaggccttctggtccctgtgcacaaagctgcattgatcccctgtgtatccagccatcgtggagcaattcgtcttgcttcacgcccagtctggtttcatctacaccgtcaaggacacggaggactagagctgaacccctgaagaaaccatcacttccacagctcgttgttgagcctacggaagcaaggtcaaattcgtttgttgggacccatgaatatcttgccccagagatcattcgaggagatggccatggcagctcggttgattggtggactcttggaatcttcctttacgaattactctatggcaagacaccattcaggggaccggacaatgacgaaacactctcaaatgtgatctcacagggcttgaagttccctgacagtccagcattaagcttccacgctcgagatctgatcagagggctgcttgtgaaagaaccggagtaccggcttggctcgtcgagaggagctgctgagattaagcggcatcccttcttcgaaggtctgaactgggccttgatccggtggacttcaccaccagagaccccgaaaaatattgatactgcagcaacactcgcgggaacacgcaagaaaaaggaaggcaaatgtctggaattccggctgaatggcgacgacatcgagttcgagctcttttag

SEQ ID NO: 103012 - DNA, 417 bp, Zea Mays
atggcgccattactccaggtccaggactccaggcgcaaccgcccagctagtgccaagtgcagtgctcttccttcttccctcccagtgcattgctccagccgttgcagcgttgcccttgcccccagccactgtgcagtgctcctactccagcgagccgccgctgcccagtgcacaatgctcctgctccagcgagccgctagtgcgcaaccgcccaggtccagccgccagccagtgcgcactgctctagcaagccgccagccaccagctagtgcgcactgcgcagtgctccattctactgcccagtgtggctgcagcctgcaacagtgtggcagtgaatttcaatttctactgtgtgttgcaacagtgtggcagtatgctcatggtcttaatgttgatgagttcgatgatggttactaa

SEQ ID NO: 103013 - DNA, 1377 bp, Zea Mays
atggacgcgagggccacaggcggtgctacaggagctcatggagtggtgacacgctgggagcgcgtctatgctagggcggcgcagaggcgaggacgagggggaggcgatccccgcccgagaaagaggcggaggggcgacaagttcatccccgtcgagctgctcggcgacgtcccagcctccagcatcccgtacgctgccttcggactccggtggagcgaggcacccgaggcaccgccagaggccgcgcaaccgccgcccgtgacgaggccgcctgtgaaggagaagccggccaggccgccgactcctgtcaagacacagcacttggcgcgcagaaacgagctgctgcacaaaaaaggtgcaaattttaatagcaatgttgcattgtccgaggtagatgacgacgatgaggaggaggccatggtggaacgttaccgagcacgccgcaatttcggtgcctccaggaagcacttagcctctcggagcacgcttacctcggtacatgatgaaccatatagtaatcaccacaggaaggaagtaaagcttatgcattactatgaggaagacaatgaggaagaagaggaaaaagaagatatttttcactgtaccaaagaattggtgtatggggacattgtgtgggcaaagcttggcaaacgccagccgatgtggccaggagtggtgaagtacgtgtgggtgaggcaggggttgatatttccattttcagactacatgaaccgatttcaagggcagacagaactaagtagttgcaaacctgctaatttccggagggtagtagaagaggcctttttggctgatcagggattctcagaagtagtcgtacattgcagcaccaagggccaatctatgggattcacgatggctaagtcgaaggaccacatggcacataaccagtcatacaaggcgcacatgaacgacatcaagaaacccaagcgccaccgccagacctccaccaagggggttcttaacaaagctcatgatgatgctcggagtagtgctcaaaatagcttgtctgaaagcaataattcgaaggctacggctcactgcattcccaatccacattgggtctggctagattgggaatccacatgcgcaatataccactggaacatcaggacgaagaccttggtaagctgcaccaacactaatgccagtaaagctagcctgagggtagaaagagaaagcagtaagtgtgcctatgtgatcatgtttacgcagcctagaagcaatggtttcaggattttaatagtacaactctgtgataggtgtgtcaagaaccctatcgggaccatacttgtcaagcgagcccttagaaatctgcaacaggacaacaatgaatattataaaaatggtaggatttaa

SEQ ID NO: 103014 - DNA, 279 bp, Zea Mays
acttccacagttccacgtccagctttcttccagttcaccagccgccgccgacggtcacaccactacacctcgtccctgcctgctggctcgctgaggccgatcaggactagtacgtctcgctgtagtaggcgctcgaggagtacgtcttgccgagcagacggagacaccaaggccgaccaggaccactggaccagtacgtctcgtcgagctccaatccagcgctgacgccaccaccacacctcgccgagtgcggatgcctactcacctctgccagctcag

SEQ ID NO: 103015 - DNA, 307 bp, Zea Mays
atgtaggaacaaggccgggatagtgattcccaattcatgaatcaagatggcgagctgtgaagaaatcttgcaaatgtgtgtttgatgtcatgaagacattgaagaacttatattatgtccatatgtgtgtgtcagtgtgtgagtgtgactattactctgttaactgttattgtgtctgaactgaatttatgtgggttgagtgagtgtaagtttacttgttggatttggaattgtgctatgtgctcatgtactattgtggacttattttcctgttgttcaatggctatgtggtcaactggtcatgtaa

SEQ ID NO: 103016 - DNA, 405 bp, Zea Mays
atggcgtggaccggcgtttggcaagcgcgctgcgaggggcggtggggaagggcatggacgatgcggcatgtgcactgctggatcctgggcgtggatggcgtgtggcacgcgctgctggatctcgggcgaggggcgaggactgccggcggaaatgatgtcgcgctgccggattcggtgggaaagggcgtggacggcgtgcgtaggagggtggggcgaaggagagggaggcgtcagtcgcggagaggatggaagggggcgcggctggggcggaggcgtcttggggcggatctgacgatggcggcgccgatggcgtggggaggagggtggggcggaggagagggaggcgtgcgtcgcggagaggatctcgggcgtgcatcgcggagaggatatcggaggagacgatag

SEQ ID NO: 103017 - DNA, 3036 bp, Zea Mays
ccattccttccctccccactccccagcccagccctgctcactcccgcgggctaataatatctcacgccgctcgtcctcctcggcctcagctgccgccactccccacactcgcttcccgtgggctgcgcgggtgaaggagcgcgcgcgtgcgtacgtacgtgcgggtggttggactcggatctgctgctgggtggggcgcgggatggcgtcgttcgctgtgtccggcgcgaggctcggggtcgtgcggcccggcggctcggcgcgatctggtggggagcggaggagtgcggtggacttgccgtcgggcaccgttctgagctgcgctggtgctcctggaaaggtactggtgcctggaggtggcagtgatgacttgctttcctccgcagagccggtcgtggacactcaacctgaagaactacagatacctgaagcagaactgactgtggagaagacatcctcctcaccaactcaaacaacatcagcagtggctgaagcaagctcaggagttgaggctgaggagaggcctgagctctcagaagtgattggagttggaggtactggtggaaccaaaattgatggtgcaggcatcaaagccaaagcaccactcgtggaggagaaaccacgagttatcccaccaccaggagatggccaacgaatatatgagattgacccaatgttggaagggtttcggggtcaccttgactaccgatacagtgaatataagagattacgtgcggctattgatcaacatgaaggtggtttggatgcattttcacgcggttacgaaaagcttggatttactcgcagcgctgaaggtatcacttacagagaatgggctcctggagcatactctgcagcattagtaggtgacttcaacaactggaacccaaatgctgatgctatggccagaaatgagtacggcgtttgggagattttcctgcctaacaatgctgatggttcccctgctattcctcatggctcacgtgtaaagatacggatggacacaccatctggtgttaaggattccattcctgcctggatcaagttttctgtgcaggctccaggtgaaataccatacaacggtatatattatgacccacctgaagaggagaaatatgtattcaaacaccctcaacctaagcggcccaagtcactgcggatatatgaatcacatgttggaatgagtagcccggaaccaaagataaatacatatgctaacttcagagatgaggtgcttccaagaattaaaaagcttggatacaatgcagtacagataatggcaatccaggaacactcttattatgcaagctttgggtaccatgttacgaatttttttgccccaagtagccgttttgggactccagaggacctaaaatctcttattgataaagcgcatgagcttggcttgctagtgcttatggatattgttcatagtcattcatcaaataataccttggatggtttgaatggtttcgatggcaccgatacacattacttccatggtggtccacgaggccatcattggatgtgggattctcgcctattcaattatgggagttgggaagttttgagatttctattgtcaaatgcgagatggtggcttgaagaatataaatttgatgggtttcgatttgatggggtgacctccatgatgtatactcaccatggattacaagtgacattcactgggaactatggcgagtattttggatttgccactgatgttgatgcagtagtttacctaatgctggtaaacgatcttattcgtgggctttatccagaagctgtatccattggcgaagatgtcagcggaatgcctacattttgtatccctgtccaagatggtggtgttggttttgattatcgtcttcatatggctgtcccagacaaatggattgaacttctgaagcaaagtgacgaatattgggaaatgggtgacatcgtgcacaccttaacaaatagaaggtggcttgaaaagtgtgtcacttattgtgaaagtcatgatcaagctcttgttggtgacaagacaattgcattctggttgatggataaggatatgtatgatttcatggctctggacaggccttcaacgcctcgcatcgatcgtgggatagcattacataaaatgattaggcttgtcacaatgggtttaggaggtgaaggctatctaaatttcatgggaaatgagtttgggcatcctgaatggatagattttccaagaggtcctcaaagtcttccaaatggctccgtcattcctgggaataacaatagctttgataaatgccgccgtagatttgaccttggagatgcagattatcttagatatcgtggtatgcaagagtttgaccaggcaatgcagcaccttgagggaaaatatgaattcatgacatctgatcactcatatgtatcacggaagcatgaggaggataaggtgatcatctttgagagaggagatttggtcttcgtgttcaacttccactggagcaatagctattttgactatcgcgttggttgtttcaagcctgggaagtacaagatcgttttagattctgacgatggccttttcggtggatttagtcggcttgatcatgatgccgagtacttcactgctgactggccgcatgacaacaggccgtgttctttctcggtctatgcacccagcagaacagccgtcgtatatgcacctgcaggtgcagaggacgaatagggcacaacagcggttgttggggaagaacttcagagggatgtgctgctggtggactgacaccactgccacgcgcgatgctgccagatgttgccctcgagaccacgtggcaggacgatcagctattcaggtggataggttagcttaccgatgagctctcgctttcgagtgactggtgaaggaaatggacctcgcacaccgcattttcgctatgcattctgaaaatgtaccgtgtggttttgtacatatggcatcagtaggcattatatcattcatctcgctgaaccaaccatttacgctatactccgtactgctgtgcaaatctctctctc

SEQ ID NO: 103018 - DNA, 3066 bp, Zea Mays
ccattccttccctccccactccccagcccagccctgctcactcccgcgggctaataatatctcacgccgctcgtcctcctcggcctcagctgccgccactccccacactcgcttcccgtgggctgcgcgggtgaaggagcgcgcgcgtgcgtacgtacgtgcgggtggttggactcggatctgctgctgggtggggcgcgggatggcgtcgttcgctgtgtccggcgcgaggctcggggtcgtgcggcccggcggctcggcgcgatctggtggggagcggaggagtgcggtggacttgccgtcggtgctcttcaggaggaaggacgctttctctcgcaccgttctgagctgcgctggtgctcctggaaaggtactggtgcctggaggtggcagtgatgacttgctttcctccgcagagccggtcgtggacactcaacctgaagaactacagatacctgaagcagaactgactgtggagaagacatcctcctcaccaactcaaacaacatcagcagtggctgaagcaagctcaggagttgaggctgaggagaggcctgagctctcagaagtgattggagttggaggtactggtggaaccaaaattgatggtgcaggcatcaaagccaaagcaccactcgtggaggagaaaccacgagttatcccaccaccaggagatggccaacgaatatatgagattgacccaatgttggaagggtttcggggtcaccttgactaccgatacagtgaatataagagattacgtgcggctattgatcaacatgaaggtggtttggatgcattttcacgcggttacgaaaagcttggatttactcgcagcgctgaaggtatcacttacagagaatgggctcctggagcatactctgcagcattagtaggtgacttcaacaactggaacccaaatgctgatgctatggccagaaatgagtacggcgtttgggagattttcctgcctaacaatgctgatggttcccctgctattcctcatggctcacgtgtaaagatacggatggacacaccatctggtgttaaggattccattcctgcctggatcaagttttctgtgcaggctccaggtgaaataccatacaacggtatatattatgacccacctgaagaggagaaatatgtattcaaacaccctcaacctaagcggcccaagtcactgcggatatatgaatcacatgttggaatgagtagcccggaaccaaagataaatacatatgctaacttcagagatgaggtgcttccaagaattaaaaagcttggatacaatgcagtacagataatggcaatccaggaacactcttattatgcaagctttgggtaccatgttacgaatttttttgccccaagtagccgttttgggactccagaggacctaaaatctcttattgataaagcgcatgagcttggcttgctagtgcttatggatattgttcatagtcattcatcaaataataccttggatggtttgaatggtttcgatggcaccgatacacattacttccatggtggtccacgaggccatcattggatgtgggattctcgcctattcaattatgggagttgggaagttttgagatttctattgtcaaatgcgagatggtggcttgaagaatataaatttgatgggtttcgatttgatggggtgacctccatgatgtatactcaccatggattacaagtgacattcactgggaactatggcgagtattttggatttgccactgatgttgatgcagtagtttacctaatgctggtaaacgatcttattcgtgggctttatccagaagctgtatccattggcgaagatgtcagcggaatgcctacattttgtatccctgtccaagatggtggtgttggttttgattatcgtcttcatatggctgtcccagacaaatggattgaacttctgaagcaaagtgacgaatattgggaaatgggtgacatcgtgcacaccttaacaaatagaaggtggcttgaaaagtgtgtcacttattgtgaaagtcatgatcaagctcttgttggtgacaagacaattgcattctggttgatggataaggatatgtatgatttcatggctctggacaggccttcaacgcctcgcatcgatcgtgggatagcattacataaaatgattaggcttgtcacaatgggtttaggaggtgaaggctatctaaatttcatgggaaatgagtttgggcatcctgaatggatagattttccaagaggtcctcaaagtcttccaaatggctccgtcattcctgggaataacaatagctttgataaatgccgccgtagatttgaccttggagatgcagattatcttagatatcgtggtatgcaagagtttgaccaggcaatgcagcaccttgagggaaaatatgaattcatgacatctgatcactcatatgtatcacggaagcatgaggaggataaggtgatcatctttgagagaggagatttggtcttcgtgttcaacttccactggagcaatagctattttgactatcgcgttggttgtttcaagcctgggaagtacaagatcgttttagattctgacgatggccttttcggtggatttagtcggcttgatcatgatgccgagtacttcactgctgactggccgcatgacaacaggccgtgttctttctcggtctatgcacccagcagaacagccgtcgtatatgcacctgcaggtgcagaggacgaatagggcacaacagcggttgttggggaagaacttcagagggatgtgctgctggtggactgacaccactgccacgcgcgatgctgccagatgttgccctcgagaccacgtggcaggacgatcagctattcaggtggataggttagcttaccgatgagctctcgctttcgagtgactggtgaaggaaatggacctcgcacaccgcattttcgctatgcattctgaaaatgtaccgtgtggttttgtacatatggcatcagtaggcattatatcattcatctcgctgaaccaaccatttacgctatactccgtactgctgtgcaaatctctctctc

SEQ ID NO: 103019 - DNA, 776 bp, Zea Mays
aaagaaaaacggtggactagaaacttccaaatcgaacggcacacaaaaatcacaacccggaaagggaccagcagcgcaaaggtgagcgagctttccttcggaactcagaactctcgtgctcacctcatccgttcgacaaatccacacgaatcctctgattcagagcagggtgttggcattgatcagacgcctgccatggcggatcagttcgtggattcggcgaacaatgtgatcattgaggaggtgaacaagggcctgaacccaggaatggtggttctgcttgtggttgcaagcttcctgctgctcttctttgtggggaactatgcgatgtatgtgtatgcgcagaagacgctcccgccaaagaagaagaagccggtgtcgaagaagaagctgaagagggaaaagctgaagcagggggtctctgcgccgggagagtaaacggccatgctgccgatcctcccgtccagagctcctattcacatgattattaaagaaaaaaatttatatatatataccagctggagccgtagtgttggagtaactttgttctgtagatgctctgtctttaatggtacatctgtattggagactttaatggcctgagccgagctagtatgcttcctgtttcgtacaagttcttgaaatgctggtgatggcgcatggctctagagaaaaactcaagggagctgagccagcgaaacatgatctacctctacctctagagttaccaactatatgcagttttaagagctgcagtagtattatttttggagtaa

SEQ ID NO: 103020 - DNA, 732 bp, Zea Mays
ctgggcgactccgccgccgccgaaaaaccaccaattgccccctcaccccgccgccgccgttgcctatccgcaccaccttttctccttcctctatccttctctttctccatcttgcgattgaacctctggcagcatcggcgccatccggtcggcggctgcgtggatccggggcctccagaacaatgtgatcattgaggaggtgaacaagggcctgaacccaggaatggtggttctgcttgtggttgcaagcttcctgctgctcttctttgtggggaactatgcgatgtatgtgtatgcgcagaagacgctcccgccaaagaagaagaagccggtgtcgaagaagaagctgaagagggaaaagctgaagcagggggtctctgcgccgggagagtaaacggccatgctgccgatcctcccgtccagagctcctattcacatgattattaaagaaaaaaatttatatatatataccagctggagccgtagtgttggagtaactttgttctgtagatgctctgtctttaatggtacatctgtattggagactttaatggcctgagccgagctagtatgcttcctgtttcgtacaagttcttgaaatgctggtgatggcgcatggctctagagaaaaactcaagggagctgagccagcgaaacatgatctacctctacctctagagttaccaactatatgcagttttaagagctgcagtagtattatttttggagtaa

SEQ ID NO: 103021 - DNA, 474 bp, Zea Mays
cgccgcgcatgcttgtcgctcgccgtcgccatggcaataaatcccgctcgccgtggccccggggtgctactcctcgtggcgctccttgtggcgctggtcgtctccgggcactgccctgggtgcgcaccacctcgggctgaagcgtcgccggcggaagcacgagatccactctctgatcaaggcagtggtggtcgtggtgatggtaaaccgcagtttcggccacatcctcggccaggcgttgactctgaccccggccacggtttcgaggacatccgggagcagatcttcggttacgccgtcacctccgcggtgacgccgcccatgtccggcttcgcccagaacgtgcgtggtatgggcctcggcgagtcgtagaacgccaggggtgggttcaagcccgacgccgttcttgtctacgcctccttcgtcgacgagttcgccgtcttcgactgctggatcccctccgtgcccacatcc

SEQ ID NO: 103022 - DNA, 1218 bp, Zea Mays
gcctttaccccaggacgacgagccgctcgctgactggttacttattactagtagcctctctggtcctggtgcatcctcgcggaactcatcacaaggctccacctccaccctcctgcgcgcatggtgactgcagcagcagcagcagcctcctctccccgcagcatgctccgcttcgcattgaccgcctcgtcgtccggccgccaccgaacgtgagtacgtggctctcgtccaccgtcaccgccagcggccggatcgccgcgacgtctagagcccccccgcctctgcagccagccggcgctcgcgatgcctcctctggcgccgccgcacggtgagaagggcggcaggcagcggcagggggcggcggcggccccggccccggcccagcggtcggcgtcgttccacgggcgcgggacggagcagcggcaccaccagccgcagaagcagaggcccaagacgctgcccgacctgctcgccggcgtccggggggcgagcttccgctccgggtccccgcccccggacggcgacgcggggcggaggacgccgagcaaggtcctggtcagcgtggcggtgcagcagagcatgtggccgctgcacgtcatggcgcccgccgagtggaccgtggcggacctggtggcggccgccgtcgccctctacgtcaaggaaggccgccgcccgctgctgccgtcgaccgacccggccgccttcggcctccactactcccagttcagcttggacagtctgaacccaaaggagaaaatcatggaactaggcaccaggagcttcttcctgtgcccaagatcttgggctgccggtcaggacgcttcgtcgtcctccggcacagcgaacggggtcaccagtgcggcatcagggaaaacaccggcctggcttagctacatgccgttctggccgaccatgtgatcggctagcacacgcacaccccaaactcttccaggtcctaaagaatctccaagtattgcatttgtgagacagatggctacaaggacattgtaaatgtatattttggagtttgtaagcatcttgaatggtgcacgtgcgatcctgcaaatcatctgtggcccatgttacaacccacagattcagggaaaaaatatcgaatgattatgtaattaaaaaaagtttaaaacagttttaatggcgaaaaattgctgtggtcatcttgttcaaattaactattctacagctccatccaacagtcaa

SEQ ID NO: 103023 - DNA, 497 bp, Zea Mays
ttttttctttctaacatggaataaggttcgtacaaattttgacatctatgaatgcagaccaagatcttgcaatgccagtagcactcgagagggtttttccaaacacaatacatcggttgtgtctatggcatgtgcaaaataggtatataccttttctaaacgagttgtatgcaaggtttgaggaaatggactttaagacaaggttccaatctataatatatcatcctttgactgagttggagttcgagactgcatggtcaatgatgcttgaagatttccatctgcacgataacattactctcaacaaagatgtatggaatacgtaaggattggtgcctgcctttttcaaaaatgattattgtgggctaatgttgtctacacagagtagcgaaagcatgaacaagcttgtgtaaagtgcacatgtcgatgcaaacactctgctacatcaattcgccaagcaaatgatgaaacttctacacagtaggaagatgaaagaa

SEQ ID NO: 103024 - DNA, 1842 bp, Zea Mays
acgaggcggagtcgccgcacgccctccgctttccgagtgacagccgcactcggccctcgtagctggtggttgaagcgggagacgcaacgagaaaaaatccgtacggttaaagttgtggcaggaggagtgggggcgcgggagagatgataaggatggcggcagcgtctcagccgccatcgtcagccttgcggatgcacgggtgcggcggcgcggcttctgcgtcgtccgcgcccgtgcgcctcttcacggagtcgcggggtagagtcgtggcgtcgattgggaggggcaggaggcggaggcgcgccatctcgtgctgctcgtctccagacgcagatggccctcgccccgccgcgccaccgacctccgcagcgccttccgacgggtcgatacagctctattcccagatcgagagggtaatcacggaggcggcaaagcagtcccgggaaggctggggttcgactggagattggaccgaagtcgagggatcatgggtgttgagaccgaagtccttggagccatcatttgttgtccactttgttggaggaatttttgtcggagccgctccccagatcacataccgcttcttcctcgagtgtctcgcgaacaggggagctttggtgattgctacaccttatgcgagcggctttgaccatttcttcattgcagatgaagttcaatttaagtttgacaggtgtttgagaaacttggatgagcctgtaaatgatctcccaacgtttggtgttggacattcattgggatctgttatccacatgttgattggatcaagatatgctgtgcagcgaagtggaaatgtactgatgtcctttaacaacaaggaggcaagctctgcgatcccactattttcacctgtaattgttcctatggcacagagttttggccctatattctcccaattggcatcgtatccaacaatccgatttggggcagaagcagctattaagcagcttgagaatctaagcccacctgttgttaagcaacttctacctttacttcaacaacttcctccgttgtatatggacctaataaaagggcgggaggacttcattccaaaaccagaagagacacgccgcctgataaaatcctactatggaatttctcggaatctcttaataaagtttaaagatgatcaaattgatgaaacctctacccttgcacaagtactaagctctgaagcagctattagctcattgcttgatatgtcaattcgatcacttcctggggatcatgggttaccattacaacaggttcttcctgatgttccaccagcaatggctgatgcagtgaaccgcggaggtgaacttctgacaaatctgacaacaggcacaccatgggaggctgttgctaaggaggttggcaccactttgggtactgactcaggcattctacgagcacagatctcaaaagacgttgaaactcttgttgatgtaattgcttcatggacatcttcaaattctggtccaagactacttcgcccatgatcacccagcagtctgcgtacagaaatgttagtaacagtgaagagcaacaggatttaatgatgcattgtgagtaacaaaaaggtagattgcacttcagcgcgactgtcttagtattttagatccatactatagttcagaaaaaagtgaagatatgtatttatatggtgtatttttgaaccaagatattttgatagaaggaaactttataaggaatagaaatagaatgatagattctggatacggtaaagctgctaagctgtatgaaaggagtcttggcaattcagcatttctaactaggaacaaaactttatggggtgtttggtttgaagaatcaattcattct

SEQ ID NO: 103025 - DNA, 1883 bp, Zea Mays
acgaggcggagtcgccgcacgccctccgctttccgagtgacagccgcactcggccctcgtagctggaggagtgggggcgcgggagagatgataaggatggcggcagcgtctcagccgccatcgtcagccttgcggatgcacgggtgcggcggcgcggcttctgcgtcgtccgcgcccgtgcgcctcttcacggagtcgcggggtagagtcgtggcgtcgattgggaggggcaggaggcggaggcgcgccatctcgtgctgctcgtctccagacgcagatggccctcgccccgccgcgccaccgacctccgcagcgccttccgacgggtcgatacagctctattcccagatcgagagggtaatcacggaggcggcaaagcagtcccgggaaggctggggttcgactggagattggaccgaagtcgagggatcatgggtgttgagaccgaagtccttggagccatcatttgttgtccactttgttggaggaatttttgtcggagccgctccccagatcacataccgcttcttcctcgagtgtctcgcgaacaggggagctttggtgattgctacaccttatgcgagcggctttgaccatttcttcattgcagatgaagttcaatttaagtttgacaggtgtttgagaaacttggatgagcctgtaagtaaaactatctgcttaataaatcaggattctgtccattgtactaagtatatgaaattttaaacaggtaaatgatctcccaacgtttggtgttggacattcattgggatctgttatccacatgttgattggatcaagatatgctgtgcagcgaagtggaaatgtactgatgtcctttaacaacaaggaggcaagctctgcgatcccactattttcacctgtaattgttcctatggcacagagttttggccctatattctcccaattggcatcgtatccaacaatccgatttggggcagaagcagctattaagcagcttgagaatctaagcccacctgttgttaagcaacttctacctttacttcaacaacttcctccgttgtatatggacctaataaaagggcgggaggacttcattccaaaaccagaagagacacgccgcctgataaaatcctactatggaatttctcggaatctcttaataaagtttaaagatgatcaaattgatgaaacctctacccttgcacaagtactaagctctgaagcagctattagctcattgcttgatatgtcaattcgatcacttcctggggatcatgggttaccattacaacaggttcttcctgatgttccaccagcaatggctgatgcagtgaaccgcggaggtgaacttctgacaaatctgacaacaggcacaccatgggaggctgttgctaaggaggttggcaccactttgggtactgactcaggcattctacgagcacagatctcaaaagacgttgaaactcttgttgatgtaattgcttcatggacatcttcaaattctggtccaagactacttcgcccatgatcacccagcagtctgcgtacagaaatgttagtaacagtgaagagcaacaggatttaatgatgcattgtgagtaacaaaaagatgatacgagacgttggcaattaaggagttatgttaccttggccggtggaggaaggatgcatggcactggcaataggagcttttgtggacaaactatcttaacccattggcaaaggcaagatctccttcccagatattttagtctgtaatcaatttggattaaaggtaaacaatataggcttataaggtgaactaagtaagttaggatatttctccccactaaatgtattaagatcttatattcaagatgactgagtaagagatgctagtaaatggacaatgaaattac

SEQ ID NO: 103026 - DNA, 1936 bp, Zea Mays
acgaggcggagtcgccgcacgccctccgctttccgagtgacagccgcactcggccctcgtagctggtggttgaagcgggagacgcaacgagaaaaaatccgtacggttaaagttgtggcaggaggagtgggggcgcgggagagatgataaggatggcggcagcgtctcagccgccatcgtcagccttgcggatgcacgggtgcggcggcgcggcttctgcgtcgtccgcgcccgtgcgcctcttcacggagtcgcggggtagagtcgtggcgtcgattgggaggggcaggaggcggaggcgcgccatctcgtgctgctcgtctccagacgcagatggccctcgccccgccgcgccaccgacctccgcagcgccttccgacgggtcgatacagctctattcccagatcgagagggtaatcacggaggcggcaaagcagtcccgggaaggctggggttcgactggagattggaccgaagtcgagggatcatgggtgttgagaccgaagtccttggagccatcatttgttgtccactttgttggaggaatttttgtcggagccgctccccagatcacataccgcttcttcctcgagtgtctcgcgaacaggggagctttggtgattgctacaccttatgcgagcggctttgaccatttcttcattgcagatgaagttcaatttaagtttgacaggtgtttgagaaacttggatgagcctgtaaatgatctcccaacgtttggtgttggacattcattgggatctgttatccacatgttgattggatcaagatatgctgtgcagcgaagtggaaatgtactgatgtcctttaacaacaaggtggcattttgtaccatctcgttttttgtgcttcgagttagagaaggaggcaagctctgcgatcccactattttcacctgtaattgttcctatggcacagagttttggccctatattctcccaattggcatcgtatccaacaatccgatttggggcagaagcagctattaagcagcttgagaatctaagcccacctgttgttaagcaacttctacctttacttcaacaacttcctccgttgtatatggacctaataaaagggcgggaggacttcattccaaaaccagaagagacacgccgcctgataaaatcctactatggaatttctcggaatctcttaataaagtttaaagatgatcaaattgatgaaacctctacccttgcacaagtactaagctctgaagcagctattagctcattgcttgatatgtcaattcgatcacttcctggggatcatgggttaccattacaacaggttcttcctgatgttccaccagcaatggctgatgcagtgaaccgcggaggtgaacttctgacaaatctgacaacaggcacaccatgggaggctgttgctaaggaggttggcaccactttgggtactgactcaggcattctacgagcacagatctcaaaagacgttgaaactcttgttgatgtaattgcttcatggacatcttcaaattctggtccaagactacttcgcccatgatcacccagcagtctgcgtacagaaatgttagtaacagtgaagagcaacaggatttaatgatgcattatgatacgagacgttggcaattaaggagttatgttaccttggccggtggaggaaggatgcatggcactggcaataggagcttttgtggacaaactatcttaacccattggcaaaggcaagatctccttcccagatattttagtctgtaatcaatttggattaaaggtaaacaatataggcttataaggtgaactaagtaagttaggatatttctccccactaaatgtattaagatcttatattcaagatgactgagtaagagatgctagtaaatggacaatgaaattacgtatcttatattcaagatgactgagtaagagatgct

SEQ ID NO: 103027 - DNA, 1896 bp, Zea Mays
acgaggcggagtcgccgcacgccctccgctttccgagtgacagccgcactcggccctcgtagctggtggttgaagcgggagacgcaacgagaaaaaatccgtacggttaaagttgtggcaggaggagtgggggcgcgggagagatgataaggatggcggcagcgtctcagccgccatcgtcagccttgcggatgcacgggtgcggcggcgcggcttctgcgtcgtccgcgcccgtgcgcctcttcacggagtcgcggggtagagtcgtggcgtcgattgggaggggcaggaggcggaggcgcgccatctcgtgctgctcgtctccagacgcagatggccctcgccccgccgcgccaccgacctccgcagcgccttccgacgggtcgatacagctctattcccagatcgagagggtaatcacggaggcggcaaagcagtcccgggaaggctggggttcgactggagattggaccgaagtcgagggatcatgggtgttgagaccgaagtccttggagccatcatttgttgtccactttgttggaggaatttttgtcggagccgctccccagatcacataccgcttcttcctcgagtgtctcgcgaacaggggagctttggtgattgctacaccttatgcgagcggctttgaccatttcttcattgcagatgaagttcaatttaagtttgacaggtgtttgagaaacttggatgagcctgtaaatgatctcccaacgtttggtgttggacattcattgggatctgttatccacatgttgattggatcaagatatgctgtgcagcgaagtggaaatgtactgatgtcctttaacaacaaggtggcattttgtaccatctcgttttttgtgcttcgagttagagaaggaggcaagctctgcgatcccactattttcacctgtaattgttcctatggcacagagttttggccctatattctcccaattggcatcgtatccaacaatccgatttggggcagaagcagctattaagcagcttgagaatctaagcccacctgttgttaagcaacttctacctttacttcaacaacttcctccgttgtatatggacctaataaaagggcgggaggacttcattccaaaaccagaagagacacgccgcctgataaaatcctactatggaatttctcggaatctcttaataaagtttaaagatgatcaaattgatgaaacctctacccttgcacaagtactaagctctgaagcagctattagctcattgcttgatatgtcaattcgatcacttcctggggatcatgggttaccattacaacaggttcttcctgatgttccaccagcaatggctgatgcagtgaaccgcggaggtgaacttctgacaaatctgacaacaggcacaccatgggaggctgttgctaaggaggttggcaccactttgggtactgactcaggcattctacgagcacagatctcaaaagacgttgaaactcttgttgatgtaattgcttcatggacatcttcaaattctggtccaagactacttcgcccatgatcacccagcagtctgcgtacagaaatatgatacgagacgttggcaattaaggagttatgttaccttggccggtggaggaaggatgcatggcactggcaataggagcttttgtggacaaactatcttaacccattggcaaaggcaagatctccttcccagatattttagtctgtaatcaatttggattaaaggtaaacaatataggcttataaggtgaactaagtaagttaggatatttctccccactaaatgtattaagatcttatattcaagatgactgagtaagagatgctagtaaatggacaatgaaattacgtatcttatattcaagatgactgagtaagagatgct

SEQ ID NO: 103028 - DNA, 1976 bp, Zea Mays
acgaggcggagtcgccgcacgccctccgctttccgagtgacagccgcactcggccctcgtagctggtggttgaagcgggagacgcaacgagaaaaaatccgtacggttaaagttgtggcaggaggagtgggggcgcgggagagatgataaggatggcggcagcgtctcagccgccatcgtcagccttgcggatgcacgggtgcggcggcgcggcttctgcgtcgtccgcgcccgtgcgcctcttcacggagtcgcggggtagagtcgtggcgtcgattgggaggggcaggaggcggaggcgcgccatctcgtgctgctcgtctccagacgcagatggccctcgccccgccgcgccaccgacctccgcagcgccttccgacgggtcgatacagctctattcccagatcgagagggtaatcacggaggcggcaaagcagtcccgggaaggctggggttcgactggagattggaccgaagtcgagggatcatgggtgttgagaccgaagtccttggagccatcatttgttgtccactttgttggaggaatttttgtcggagccgctccccagatcacataccgcttcttcctcgagtgtctcgcgaacaggggagctttggtgattgctacaccttatgcgagcggctttgaccatttcttcattgcagatgaagttcaatttaagtttgacaggtgtttgagaaacttggatgagcctgtaaatgatctcccaacgtttggtgttggacattcattgggatctgttatccacatgttgattggatcaagatatgctgtgcagcgaagtggaaatgtactgatgtcctttaacaacaaggtggcattttgtaccatctcgttttttgtgcttcgagttagagaaggaggcaagctctgcgatcccactattttcacctgtaattgttcctatggcacagagttttggccctatattctcccaattggcatcgtatccaacaatccgatttggggcagaagcagctattaagcagcttgagaatctaagcccacctgttgttaagcaacttctacctttacttcaacaacttcctccgttgtatatggacctaataaaagggcgggaggacttcattccaaaaccagaagagacacgccgcctgataaaatcctactatggaatttctcggaatctcttaataaagtttaaagatgatcaaattgatgaaacctctacccttgcacaagtactaagctctgaagcagctattagctcattgcttgatatgtcaattcgatcacttcctggggatcatgggttaccattacaacaggttcttcctgatgttccaccagcaatggctgatgcagtgaaccgcggaggtgaacttctgacaaatctgacaacaggcacaccatgggaggctgttgctaaggaggttggcaccactttgggtactgactcaggcattctacgagcacagatctcaaaagacgttgaaactcttgttgatgtaattgcttcatggacatcttcaaattctggtccaagactacttcgcccatgatcacccagcagtctgcgtacagaaatgttagtaacagtgaagagcaacaggatttaatgatgcattgtgagtaacaaaaagatgatacgagacgttggcaattaaggagttatgttaccttggccggtggaggaaggatgcatggcactggcaataggagcttttgtggacaaactatcttaacccattggcaaaggcaagatctccttcccagatattttagtctgtaatcaatttggattaaaggtaaacaatataggcttataaggtgaactaagtaagttaggatatttctccccactaaatgtattaagatcttatattcaagatgactgagtaagagatgctagtaaatggacaatgaaattacgtatcttatattcaagatgactgagtaagagatgctagtaaatggataatgaaattaccct

SEQ ID NO: 103029 - DNA, 1809 bp, Zea Mays
aagggcaaaggcgcagcagcggcgcgagcggagcacaagagagcaccacgccaccccttcctgtctctctgctcctccgcatccgcttgtgcgcccgtgccgctcactgcactccattcccaatctctctgcctcccctgcctgtctctccacgccagtgcgcgcagatcgggcgggtgtgaagaggagctcatcacatcctctgctgcttcttctgtccaataagagctagctagctagctagctcgccgattcaacagcaagcggcggcagtgatgcgcggacttgtcctcgcatagccaagatccgtccagcagcggcagcttgagcgcagacagattcaagaatggaggagaaagcggcggacacgacggcgacagtggcggcggcggcagcagcggcagcggatcaggacggcgcggtgtactgcagcgagcacccgtacccgccaggcgcggcagcggcggccggggcgggcgccggcggcatctgcgccttctgtctgcaggagaagctcggcatgctggtctcgtcgtccaagtccagccccttccacccgccgccgcagcagccggtctccgccgcgtcgccgtcctcgacgacgccgccgccgtccaaccgcgcctcctccgaggcgccgccgccgccactctaccctcccgcggcgtcgcgcaaggtgatgcccgcgcagagcgcgggcggcggcgccggcggcgggctcaagaggagcaagtcggtcgcgccgcggccggaggagccgctgccgccgcccgcggtcacggcggacagcccgcgcaagaagagcttctggtccttcctccacctctcgtcgtcgtcaggcagccacaagggcggcgcgtcctcggcttcggcggccggcggcggcgccgcgaggaggaactccgtgtcggtggcgtcggcctcgtcggcgtcgctcgggggccggctggaggcgatcgtggagccggagagcccgggccgccggagcgagggctcgtcgtcgtcgtcgttcgggcggaaggtggcgcgctcgcgctccgtgggctgcggcagccgcagcttctcgggcgacttcctggagcgcctctccaccggcttcggcgactgcgcgctccggcgcgtcgagtcccaccgcgagcccaagcccaaggccgcgctgggccacctgggcggcggcgaggagcacgagcaggaccaggaccagcaccaccgcatcaagtgcgccggtttcttcggcggcggcctgggcgccgcggccccgccttcgtcatcctactggctctcggcacccgacggcgccagcgccagcgccagcgggagcgcgaggggctccggctcgcggagccaccggagctgggcttgggcgctggcgagccccatgagggcgctcaggccgaccagctcctcgtccagcaagagcatcatggccgcgcccacagccgcgtgaacggcagcggcagcatgcatgcgggggtagcttcatggggttgatgctgccgctgcgtaagcgatcaatggccggtgaatcatcatccatccctcgaccatatatactagtactacataaatgtctccatctttattagtgttctcatgtccatgccttacgatttttaagcagaacctggtcctgtttatgttggaaatgttgctatggatctagctatagctactgcctttacatttgggattcctgtctccagtggcaatagactgtggaacttgttaatctgttcaacccctggagtatttgtctgggcaattcatcgtatgcttcatgttatgattgttatcattagtactttcgtt

SEQ ID NO: 103030 - DNA, 105 bp, Zea Mays
caaattattagtaaatatatatatttacatctctactttatatggcacagaagaagtcaagcgcttaatacctaacgagcaaggatcgaatcccccacattccaa

SEQ ID NO: 103031 - DNA, 104 bp, Zea Mays
tttgacactagatggatatgtggtctagtgccgatttccacaagagcaaaaagtgaaaaaacaaatgccagtcaacaagtaactggtgtgattagcttgagaaa

SEQ ID NO: 103032 - DNA, 1137 bp, Zea Mays
cgagcggggcgtgtttgatctgccgggcgcagcgactgcgggggaacgattgctttagagatgttttagttgtataggttacacgacggctggtcaatttcttaccaacgggtttacgcgcgcaggctggacggcaaggtagcgctgatcaccggcggcgccagcggcatcggggagtgcacggcgcggctcttcgtgaagcacggcgcgcgcgtcgttgtggcggacatccaggacgagcctggctcccgcctctgcgccgagctgggagccgacgccgccagctacgtgcactgcgacgtcaccgtcgaggacgacgtcgcggcggccgtggaccatgccgtggcccggttcggtgcgctggacatcatgttcaacaacgccggcatcggcggagcggcgtgccacaacatccgagagaacaccaaggaggacttcgagcgcgtgctgtccgtcaacctcgtcggcccgttcctgggcaccaagcacgcggcgcgggtcatggtgcccgccggccgcggtggctgcatcatcggcacgtccagcctggcatccgcggtggccggcgccgcgtcgcacgcgtacacgtgcgccaagcgcgcgctcgtggcgctcacggagaacgccgcggcggagctggggcgccatgggatccgggtcaactgcgtctcacccgccgcggccgccacacccctcgccacggggtatgtgggactggagggggaatcgttcgagcaagccatggaggccgttgccaacctcaagggtgtgcgcctgcgggtggcggacatttcagccgccgtgctctacctcgccagcgacgacgcacggtacattagcggacacaacctgctcctcgacgggggtttctccatcgtcaacccgtcctttgggatcttcaaagactgagctcgagcggtggacagagtcacagatatctctgtgattgcttggcagtgtgtgtttgctctgtgattgatcggcagagatctgctccagttccatgctttcgtacagagctattgattgtgacggcctcaattttagtttttattcggactatggttattacgtactacctcactcgctccgttcacaaatgtataacaccgtaattatttttcgagaactctatca

SEQ ID NO: 103033 - DNA, 343 bp, Zea Mays
tctaggaaaatacacatcatatagaaagtttctggtacaagtggaagcataggaacggacactgagatatgccgtgttacgacaataaacttaccctgtcctttgaaaataatggctctagaatctccaacatgtgcaacaagcaaactaatagctgctgaggcagatgaacgtgtgtatcgagtttgactgctatctgcttttagaaagcttcaccacgatagacggtgggctctttttcataacatttcttgttgagctaggcctactggatgtaaggttgcttcccttcacctgctctgaacactacttggaaaggttgcttgtatctaacaggatatcc

SEQ ID NO: 103034 - DNA, 1383 bp, Zea Mays
aattcaggcgaggccgacgggctcgcagcgcccgcggggcatccaagagcaggaggggataaagcagccctgcagcagctccctccttcacaagcgacgcgaagcaccgaggagaggcggcgagagttcttggtcggctagatggaaaaggcgggccagaagcggcggccgctgacggtgatggcatcctcatcgtcgcaggtggcagcagcgcggggcatgggcatgaccaacccactggcggagtggaccgaccgcgtcaggtcgctggaggccggcgtgcgggcgtggctagcgaagcagcccacccacgtcgaggccgccgtggtcacggcggtcggcgccgtgcagggcgccgcgctcggcgggctcatgggcacgcttgcgcccgacggcggggccgcgcttcctgtgccgccgccgccgccggggaccgacccaaaggtcttggcctccttcaagcaagcgcaggctttagcgggtggacccctggtgcaagcacgaaactttgcggtcatgactggtgcgaatgctggcatatcttgtgtcatgagaaggataagaggagtggaggatgtccagggcagcatggcagcagcttttggttctggggctctattctccatcgtgagtggaatggggaccccaaatccagtagctaatgcaattacaactggtgttggttttgctgtatttcaaggtggttttttcatgatctctcaaaaattttcacagccacagagtggagatacatactattctcgtggaagaagcatgctgcaaaagttaggccttcagaactatgagaagaacttcaagaagggtctcctaactgatcaaaccttgccccttcttacggacagtgctctcagagatgtgaagatcccgcctggccccaggctcctcatacttgatcacattaaaagagatccagagttgacaaaagcaaattaagtgatcggcactgcggcactgcctcacggtgccagttcttttccccctcgagttgcagaaattggaccaggagaaccgtttaatttagctattcagtgacgacctctttggagcagtatttggttgtgcttactagtatatgttttctagtcatcattcacgcttttttttgagccgaagtgtttgcaaatcactctgatcttggaatgacagaattttgtattctcaaaggtttatgctgatcaatccagattttactactagtttagggatgtcaaacgaagggaaactgcaattcgcacattttatttggcttctggatggtagtttggttctgatctgtaacgtttagccctttgctaagctgtgtcctgcataaggctttgcggcctgattaatataagcacacatgttggaatttcaaatgaa

SEQ ID NO: 103035 - DNA, 1894 bp, Zea Mays
gaaccgtcacgaggatgccgggtcgggatacggagggagatcaggagaagcgaccaggtccggaggacgcacgcccggtgctttcggctttcccatatatatatctcggcctcgtccatatgacatatcccgttcgccaatctcgcggcgaccctacaaagctgcgatcaggtgtagagcggcggcggcgtcgtccgcggatcgctgtggtgaagggcgaactgagaacactaggcagccagaggcaatagccgagccgcgagtcgataggaggatcggaggccggcgagtggttggcgcaagttgtcaggggcgtcgccggagtcgagcggcagcgggcggcctggagcgggggcgatggggcgctacgagctcgtccgcagcgacgacacgcctgccatcgccgtggatctggaggctggcaccgccgcgccacgcgacgactaccccaaacgccgcgggtccgcgccgtctccggcgccggcgccgactcggcagcgcctcgtctcgctcgacgtgttccgtgggatcaccgtgctgctgatgatcatcgtggatgacgccgggtcattcattccggcgatgaaccactccccctgggatggcgtaacagtggccgacttcgtcatgcctttcttcctcttcatcgtcggagtcgccctggcgctcgcgtacaagagagtcccggacaagttggacgccacgaaaaaggcagtgctccgtgcactgaagctgttttgtcttggtcttgtcctacaaggtggtttttttcatggtgttcgcagtctaacttttggtgtcgaccttcaagaaatacgtctgatgggtatacttcagagaattgcaatagcttatctgttgactgccctatgtgaaatttggctcaagggagatgaagatgtagattatggatacgatttgctcaagcgataccgctaccaactgttcgtaggcgcaatcgtggggatcacatacatgtctctgttgtacggtacatatgtccgtgactgggagtaccagacatcaggccctggctccatagagaagtctttctttgtgaaatgtggagtaagaggtgacaccagcccaggctgcaacgcggttggcatgatcgaccgtagaatcttgggtatccagcatctctacgggcggccagtttatgcacgatccaagcaatgcagcatcgactcgccacaaaatggcccccttcctcctgatgctccctcttggtgccaggcccccttcgaccctgaagggcttcttagttccgtgatggccattgtcacatgcttgattgggctccaatacggacacgtcatcgtacattttcagaaacacagggagaggataatgaactggctaatcccttccttcagcatgctggtcctagccttcgccatggacttccttggactgcgcatgaacaagccattatacaccctaagctacaccttagccaccgctggcgccgcagggctcctcttctgcggaatctacacgctggtcgacatctacgggtatcggcggccgaccgtcgccatggaatggatggggatgcacgcgctgatgatatacgtcctgatcgcttgcaacatcttgcccatattcatccacggcttctattggaaggagccccaaaacaaccttctgaagttcatcggaattggaccatgaggtgatgaactgatgacggacggtacatcgaatgcggatattaggagtctactccgacagagatagagaaacacgtgcattcaggccaagttttgctatacggccaatgcatcattgctgcgcacagagtgcgtctcttgtatatgataaaaagcctgctgtatataatgacgataccgtttggaaggaaaaatatagtagtatagagatcttacgtgaa

SEQ ID NO: 103036 - DNA, 1687 bp, Zea Mays
cgtctcccgattcatcagatcccgacgcccccaccgacgccgttcactgttccctccgtccaaaaataaatccagcgtagaaacttgaaagatgaataaaactgctcctacgaaacgttcgcctgaaacccacacaggtgctgcggatggggaagaagcataggttctcaaagcctgaacggcgcgcgctgatgatcatcgtggatgacgccgggtcattcattccggcgatgaaccactccccctgggatggcgtaacagtggccgacttcgtcatgcctttcttcctcttcatcgtcggagtcgccctggcgctcgcgtacaagagagtcccggacaagttggacgccacgaaaaaggcagtgctccgtgcactgaagctgttttgtcttggtcttgtcctacaaggtggtttttttcatggtgttcgcagtctaacttttggtgtcgaccttcaagaaatacgtctgatgggtatacttcagagaattgcaatagcttatctgttgactgccctatgtgaaatttggctcaagggagatgaagatgtagattatggatacgatttgctcaagcgataccgctaccaactgttcgtaggcgcaatcgtggggatcacatacatgtctctgttgtacggtacatatgtccgtgactgggagtaccagacatcaggccctggctccatagagaagtctttctttgtgaaatgtggagtaagaggtgacaccagcccaggctgcaacgcggttggcatgatcgaccgtagaatcttgggtatccagcatctctacgggcggccagtttatgcacgatccaagcaatgcagcatcgactcgccacaaaatggcccccttcctcctgatgctccctcttggtgccaggcccccttcgaccctgaagggcttcttagttccgtgatggccattgtcacatgcttgattgggctccaatacggacacgtcatcgtacattttcagaaacacagggagaggataatgaactggctaatcccttccttcagcatgctggtcctagccttcgccatggacttccttggactgcgcatgaacaagccattatacaccctaagctacaccttagccaccgctggcgccgcagggctcctcttctgcggaatctacacgctggtcgacatctacgggtatcggcggccgaccgtcgccatggaatggatggggatgcacgcgctgatgatatacgtcctgatcgcttgcaacatcttgcccatattcatccacggcttctattggaaggagccccaaaacaaccttctgaagttcatcggaattggaccatgaggtgatgaactgatgacggacggtacatcgaatgcggatattaggagtctactccgacagagatagagaaacacgtgcattcaggccaagttttgctatacggccaatgcatcattgctgcgcacagagtgcgtctcttgtatatgataaaaagcctgctgtatataatgacgataccgtttggaaggaaaaatatagtagtatagagatcttacgtgaatgacggcggaaattctcaccgaagtcgcaaaattgtcacgatagtccgcgcagggggcgagcgcgcagctccatactgggatagagccactcggctcataatttgttgtgtttagattgattatatgtagaacgtagtggtttta

SEQ ID NO: 103037 - DNA, 474 bp, Zea Mays
atggatcctataaatggtcttcgagtcctgatcattgatgaagataaagatgatgcaaaccatatgaaggacatgctccatcaatacaactttcatgtgatagtgtttacaagtcctagagaggcactagactttcttaatggtcatgcacaagatattgatttcctattggtagcagtggatatggaagagatgtcacgatttgaattccttgatatggccatagatatgtatgaaaacatccaagaaattagccctggagctaatacagatggagaacaaagtaatgccacaaactcttctactaataaagagtatatgaataacgatatttatgaagtgcaaagctccacaggaagcaattcagtagatatgggccttgtgaactatccagaatctgaagatggtgaaactgtggagaaatgtcctaatgcataccaagaccctgaagttggcacatctcccaacaactaa

SEQ ID NO: 103038 - DNA, 1537 bp, Zea Mays
cttggcgcgccacggctacccgtcccgtcatcggacaccgtcgcgccgccagcccgccaccgcgcacgcccgcatcgcctataaattcttgcaccgatccgcacacacacgcacaagccaaacgtgcagctgaggaatcgcaacggcagtgacgtgtgcgcgttgccaaataaagctactatactagtcaccgctcgattgccgtcgcagccgcccgccggccggagatgggtgcgccggcgctgtcgtccgtcgtcgtggtggccacggcggcagtggtttgcctgtgcggggcctttgcgcaggcgcaggacatggacagcgagtgggcgcggccggcctaccgcgggttcttcggcgccccggccgggtcgctgctgccgcagtcggacgtggacctgctggagttcccgctgaacctggagtacctggagacggagttcttctgctggtccgctctggggtacggcctcgacgccatcgacgccaacctcaccggcggcgggccgccctccatcggcggccagtccgcgtccctcaccccgttcatccgcgacgtggccacccagttctgttaccaagaagtcgggcacctcagggcgatcaagcagacggtgaggggcttcccgaggccgttgctggacatcagcgcggccaacttcggcaagatcatcgagcaagcgctgaacgcgacgctggacccgcccttcgacccctacgagaacagcctcaacttcctcgtcgcctcctacatcatcccctacgtcggcctcaccggctacgtcggcgccaaccccaggctcctcacccctcaggccagaaaggtaattaaagtgcatacgtacgcgcgtgcatcgcatgaacattctactcgatcgttgccatccctctcctaccagtcatgctgtgtacctgtggctgtgcctgccctgttgacgtgctgttgatatgcactatctgtgtgcgcagctgctggcggggctgctggcggtggagtcggcgcaggacgcggtgatccgtacgctgctgtacgagcgcgggatggcgcgtgtgccgagctatgccggcggggtggcggagatcacggcacgcatctcggacctccggaactcgctggggaggaggggcgtgaaggacgagggcctggtggtggcgcccgagctggggcccgaggggctgaccgtggggaacatcatcgccggcgaccacctgtcgctcgcctacgaccgcacgccggaggagatcctcggcatcgtgtacggcaccggtaactccgcccagcacggcggcttctttccccagggcgcagacggccgcatcgccaggggtctcctcgcgtagcgcatgggtgagttgtgaccgtgcgctgagcagtatgaatccgtgcacggcgcagactgtagactagctagcagtactatacttgtttgtgagttggtatggtgtggccttgagtgccttgtgtaaactgggtgatatacatgaatgtaggtggaaacaaataaagtaaataatgggttgctgcactatacgcaaa

SEQ ID NO: 103039 - DNA, 1510 bp, Zea Mays
cttggcgcgccacggctacccgtcccgtcatcggacaccgtcgcgccgccagcccgccaccgcgcacgcccgcatcgcctataaattcttgcaccgatccgcacacacacgcacaagccaaacgtgcagctgaggaatcgcaacggcagtgacgtgtgcgcgttgccaaataaagctactatactagtcaccgctcgattgccgtcgcagccgcccgccggccggagatgggtgcgccggcgctgtcgtccgtcgtcgtggtggccacggcggcagtggtttgcctgtgcggggcctttgcgcaggcgcaggacatggacagcgagtgggcgcggccggcctaccgcgggttcttcggcgccccggccgggtcgctgctgccgcagtcggacgtggacctgctggagttcccgctgaacctggagtacctggagacggagttcttctgctggtccgctctggggtacggcctcgacgccatcgacgccaacctcaccggcggcgggccgccctccatcggcggccagtccgcgtccctcaccccgttcatccgcgacgtggccacccagttctgttaccaagaagtcgggcacctcagggcgatcaagcagacggtgaggggcttcccgaggccgttgctggacatcagcgcggccaacttcggcaagatcatcgagcaagcgctgaacgcgacgctggacccgcccttcgacccctacgagaacagcctcaacttcctcgtcgcctcctacatcatcccctacgtcggcctcaccggctacgtcggcgccaaccccaggctcctcacccctcaggccagaaagctgctggcggggctgctggcggtggagtcggcgcaggacgcggtgatccgtacgctgctgtacgagcgcgggatggcgcgtgtgccgagctatgccggcggggtggcggagatcacggcacgcatctcggacctccggaactcgctggggaggaggggcgtgaaggacgagggcctggtggtggcgcccgagctggggcccgaggggctgaccgtggggaacatcatcgccggcgaccacctgtcgctcgcctacgaccgcacgccggaggagatcctcggcatcgtgtacggcaccggtaactccgcccagcacggcggcttctttccccagggcgcagacggccgcatcgccaggggtctcctcgcgtagcgcatgggtgagttgtgaccgtgcgctgagcagtatgaatccgtgcacggcgcagactgtagactagctagcagtactatacttgtttgtgagttggtatggtgtggccttgagtgccttgtgtaaactgggtgatatacatgaatgtaggtggaaacaaataaagtaaataatgggttgctgcactatacgcaaaggtcggatgtcttctatttcatctgtagccgagaaattccaaaatagttcagggctgtttggatccctttatttttaagagggattagaatttatttaataaaataacatatttagct

SEQ ID NO: 103040 - DNA, 627 bp, Zea Mays
gccatggccgcgcctaggaagggcggcgctggtcactggggctggggaaggggccacggtggggaggagagtcgagggggcaccggtcacgcaagcggaagagggctcagtgtctgtcgggtgggggcgtcggggccgtcatggccatcgaagacactgacgagccaggcgtggtggtgccgaggggcagaggcgggatccgggtctcgagcggcccgggcgctgcgggaaggcaagccaggcgaggacgaggaggtaggggggaggagcactgcgaaggagatctccgagagcgggaccgtggtggagaaggcgagcacggccgccgcgcccagcgtgttgagctgcttgatggagaagaggcagtggtggtggtgcgggcgcgccgtgggagaggtgggcgtcgggtgcagcggcggcgggggcccgcggaggatggaaggagggtggaggatggaagcgctgccgtggatgcgggcggctgcgggatgcagcgcgactgcgggatgcgggcggatgcgcacggcagaactcttgtccaaaacgagggggtatgaaaaagactctcgatttgtggtgcctagcattaagagcgtaaggcagaatttgcccacctgtcataaataa

SEQ ID NO: 103041 - DNA, 1014 bp, Zea Mays
gtcgccgtggtgccgcagtttgccgctctcggcactcgttcggcttcctctcttctctttccggcctatcagcagtcagtttctctcgtctggtaagctccttgggacgccttcctcctatccctttactactacagttcttaactcctacctaggagaagagaacttctcgttctagatccactcagctttttataagaactttttgttcattggagcctgtgctgcttgtggaggtacagtgctgatggcgtccaactacgtcgacaccggggcggaggagggcaggttccacggccaccacagcacgacgccgaccagcgcggcggcgtcgccgaagacgctgcggaggagctcgtcgtccgcccacagccacggccacgggcccaagtgcgtgtgcgcgccggccacgcacgcaggctccttcaagtgccgcctccaccgcagcagctcccacggccacggccacggccacggcagcaacccggcgtcccctccctccccggccaccttcgccgctgcgccgccgccggccgcggccgcgtcctcctcccgcaccgtcgcggcgcagtgacggcgccccaagaaacgccgacccagcagcagtgaagagaggagaagagaagagagaaacggcaaaagggaaaaaggaaaacacactctctctgttattatgcgacacgagaaagggagcttatttgttcctcccttcatcttcacgtacgccaacggcagaatttcccatttcgtttcacttcctcctccccccctcgtcttttaaccttttttggctgagatatccatcgattctcgctggaatggtcttcccctccttcggtcagaagaaaccctccctggttgtactgtactaggcaatgcgcatcctgctagatcgcctccgctgaaatggaaagcgtatgtgtgatggtgacatgaagttcacttgtgtaattattaccatttcagtaaatccatgcttcttgcaggagttgtgatcttggtggtgggtctgct

SEQ ID NO: 103042 - DNA, 841 bp, Zea Mays
ccgtggtgccgcagtttgccgctctcggcactcgttcggcttcctctcttctctttccggcctatcagcagtcagtttctctcgtctgtgctgatggcgtccaactacgtcgacaccggggcggaggagggcaggttccacggccaccacagcacgacgccgaccagcgcggcggcgtcgccgaagacgctgcggaggagctcgtcgtccgcccacagccacggccacgggcccaagtgcgtgtgcgcgccggccacgcacgcaggctccttcaagtgccgcctccaccgcagcagctcccacggccacggccacggccacggcagcaacccggcgtcccctccctccccggccaccttcgccgctgcgccgccgccggccgcggccgcgtcctcctcccgcaccgtcgcggcgcagtgacggcgccccaagaaacgccgacccagcagcagtgaagagaggagaagagaagagagaaacggcaaaagggaaaaaggaaaacacactctctctgttattatgcgacacgagaaagggagcttatttgttcctcccttcatcttcacgtacgccaacggcagaatttcccatttcgtttcacttcctcctccccccctcgtcttttaaccttttttggctgagatatccatcgattctcgctggaatggtcttcccctccttcggtcagaagaaaccctccctggttgtactgtactaggcaatgcgcatcctgctagatcgcctccgctgaaatggaaagcgtatgtgtgatggtgacatgaagttcacttgtgtaattattaccatttcagtaaatccatgcttcttgcaggagttgtga

SEQ ID NO: 103043 - DNA, 324 bp, Zea Mays
atggattcgaagacaaagttcagtgatgtcaagggagttgacgaagctaaagctgaacttgaggaaattgttcactacctacgagatcctaaggccgcacttgaagaaatcttatatcagtttgaggaaaaactccaagctgaaagagaggaagctgctaggaagcaggaagagttgcaagcacaactacaagctcaacaggcggcacttgaagaaaaccaaagtttgctgcgccaggcccaagaggaagtgaaggggatgcataccaagtttgaagagaccaatgcactgctacgagctgtcctgaaacttcagaaagattga

SEQ ID NO: 103044 - DNA, 2648 bp, Zea Mays
ggtgcctagtgactggttagatttggtatatcaaatcagatcacaggaaacattcagatctcatttaagaaaactaaaacaaaaaacggagaaaaatcaggtgattgcttcctttcctctctctccgttgcccaccacccccaagcccgcgatatattcggcgcagcccacaccttccagcgaatttccgtcacccatctccgcaccgcacccgcaacgcgtctctcttcctctcctggtcctcctgccactccgcctcaacttgctcggctattcccggattgcggctcggggttggtcattggccgtgagggcctttcaagaacgggcggcggcgctttacctgacgcaaattgcgccggtctcctgccttgctgcgcgcttgggggttgggctcaggaatgggggtagagcaggggctgcgtcgcctggctcgattcccatctctctgaacttagatggatgcatctgtaaacaccaagaagaaggttagtttctgtgggaacactggccacagccgctgcggtgaagttcatttagctgctgtgtgctcaggtcgtatgcgaagcaaccccttctcgcttcaggtttggtttgcatttccgttcaagtataaaggaagtagtatttgccattttggcatagcatttgaatagcacaggaacctagaaaacagtgttccagcagtactacgttacactggtgttatactattatagaaaacatggtggatgtggaactgttttataaggacactagtgatcacagcattagctctgaggaagaagatatgcttgtcaggagctgtagcaatctcaatgtgagctttggatatcattgtgattcttatcagagcttttctcctgaaaatgatcatggaaatgacatttctcctaagaacatgtttgggactaatacgatgatggggtcacggaatggctcatttacttgtttgtccggtgctgctattagtgcaaattttacattggcaaatacaaatatttgcaatggtcttattggcgaagaaattttaccagaactagattctccaaactccttcagaaaaattatttcatctccatcaatgtcaagattggactcgttctctacctcacaaggcagtcctgtgtcaactgagagctcaatatttgagatcagtaaaaatatttggaggtccagtgccccaacaactgtatcatccaattttctgactaatacagaggtgaaaatggctggcggagctgctggagaggatagagtccaagctgtgtgctcagagaaaaatggatggctgatttgtgggatatatgatgggtttaatgggagggatgcagctgattttcttgcggtaactctatatgataacatagtatattacttatacctgctggagaatcggataaggcaacaaaatggtttgtacaattcatcagaaagctctcttaatggtctcaaaagtgagttaacactagccatgagaaattcagaaaatgaaggcataaaattttctgaaacatttcgatctggtgtactgaattgcctttctactgctgttgagcaagctgagaatgactttttatgcatggttgaacaagagatggatgatagaccagatttagtttcggtagggtcttgtatcctggttgttcttcttcaaggaacagatctgtgcatcttaaatatgggggacagtagagctgtgcttgcttccatgccatatgtagaaaatggtgctttgaaggctactcaactgacagagacccactcgcttgaaaatcctttggagtaccaaaaacttttagctgaacatcccaatgattcttcagttgtcaggggtaacaaaataaaaggaaagctgaaggttactcgtgcttttggagttggctatctaaagcagaggaagttcaacgacgcactcatgggcattctgcgagtccgcgatttgagcagccctccatatgtttacacaaatccacacacattgagtcacaaagttacagatgatgatttgtttgttgtgcttggtagtgatggcttatttgatttcttcagcaatgatgaagttgttcggttggtttatcaatttatgcatgataatccaatgggggatcctgcaaaatatcttattgagcaacttatactcaaagcagccaaggaagcagctctaacagccgaagaattgatgaggatacctgttgggagtaggagaaagtaccacgatgatgtgactgtcattgttatcatccttggaaatgcacagaggacgatgactgcatcaacttccttgtgaaagaatggagaggtagagagacgggggctatcagctggtaaatttttgtgggttttttgcatacatgtattccaaaatacaattttttttcctgggaatcgcgtggtagtcaataaaaccaaataaaaatgtatatattgtttcgaaatttgggaagtgaacagaaccttttgttaaatcacagggtgcacctgggttcgtttgacctacttctgtacatgaatcaaacatggaggctcgtacttgagctaatgagtccatgagcagagtggtagatcgtttcagtttccgtctgccaattttttttctctgctaataagtatgtgctgtttgtgttgatcttagaattatgactcat

SEQ ID NO: 103045 - DNA, 2246 bp, Zea Mays
ctcactcgacttgcgccgtatgctgattgttgattcgatgttctgttctgctgcgatagggcctttcaagaacgggcggcggcgctttacctgacgcaaattgcgccggtctcctgccttgctgcgcgcttgggggttgggctcaggaatgggggtagagcaggggctgcgtcgcctggctcgattcccatctctctgaacttagatggatgcatctgtaaacaccaagaagaaggttagtttctgtgggaacactggccacagccgctgcggtgaagttcatttagctgctgtgtgctcaggtcgtatgcgaagcaaccccttctcgcttcaggtttggtttgcatttccgttcaagtataaaggaagtagtatttgccattttggcatagcatttgaatagcacaggaacctagaaaacagtgttccagcagtactacgttacactggtgttatactattatagaaaacatggtggatgtggaactgttttataaggacactagtgatcacagcattagctctgaggaagaagatatgcttgtcaggagctgtagcaatctcaatgtgagctttggatatcattgtgattcttatcagagcttttctcctgaaaatgatcatggaaatgacatttctcctaagaacatgtttgggactaatacgatgatggggtcacggaatggctcatttacttgtttgtccggtgctgctattagtgcaaattttacattggcaaatacaaatatttgcaatggtcttattggcgaagaaattttaccagaactagattctccaaactccttcagaaaaattatttcatctccatcaatgtcaagattggactcgttctctacctcacaaggcagtcctgtgtcaactgagagctcaatatttgagatcagtaaaaatatttggaggtccagtgccccaacaactgtatcatccaattttctgactaatacagaggtgaaaatggctggcggagctgctggagaggatagagtccaagctgtgtgctcagagaaaaatggatggctgatttgtgggatatatgatgggtttaatgggagggatgcagctgattttcttgcggtaactctatatgataacatagtatattacttatacctgctggagaatcggataaggcaacaaaatggtttgtacaattcatcagaaagctctcttaatggtctcaaaagtgagttaacactagccatgagaaattcagaaaatgaaggcataaaattttctgaaacatttcgatctggtgtactgaattgcctttctactgctgttgagcaagctgagaatgactttttatgcatggttgaacaagagatggatgatagaccagatttagtttcggtagggtcttgtatcctggttgttcttcttcaaggaacagatctgtgcatcttaaatatgggggacagtagagctgtgcttgcttccatgccatatgtagaaaatggtgctttgaaggctactcaactgacagagacccactcgcttgaaaatcctttggagtaccaaaaacttttagctgaacatcccaatgattcttcagttgtcaggggtaacaaaataaaaggaaagctgaaggttactcgtgcttttggagttggctatctaaagcagaggaagttcaacgacgcactcatgggcattctgcgagtccgcgatttgagcagccctccatatgtttacacaaatccacacacattgagtcacaaagttacagatgatgatttgtttgttgtgcttggtagtgatggcttatttgatttcttcagcaatgatgaagttgttcggttggtttatcaatttatgcatgataatccaatgggggatcctgcaaaatatcttattgagcaacttatactcaaagcagccaaggaagcagctctaacagccgaagaattgatgaggatacctgttgggagtaggagaaagtaccacgatgatgtgactgtcattgttatcatccttggaaatgcacagaggacgatgactgcatcaacttccttgtgaaagaatggagaggtagagagacgggggctatcagctggtaaatttttgtgggttttttgcatacatgtattccaaaatacaattttttttcctgggaatcgcgtggtagtcaataaaaccaaataaaaatgtatatattgtttcgaaatttgggaagtgaacagaaccttttgttaaatcacagggtgcacctgggttcgtttgaccta

SEQ ID NO: 103046 - DNA, 157 bp, Zea Mays
tgcttaaacgtgtcgggctcatttcgggcggcccgaaattataaaagcccgaaattcaatttttggtccaaaattcacattagggcccgaaattcatttgttggcccgaaattcagtttttggcccaaaattcacattagagccctaaattcaaaaa

SEQ ID NO: 103047 - DNA, 1122 bp, Zea Mays
atgctgcaacttggagcatctctacatttactactcaacaaagctcgccgcctgaccccgggagccagcggatctcattggacaacgagtgccgccaccgcgcgggaccaacacgccggcagggcccctcccgcctcgtcacagcaggacctggagcgaggcgttcttgctagcgccgcagacggggcacgcctcggcggcggcctcgcacgcgcggcacaggcagaggtggcggcacgggagcagcagcacggacgcgtcgccgcctccgcaggacttgcacgacggcggcgaggagccccgggacgcggcgtcgcagtcgtcggcgacggggcccggcggggaggtctcgaagcagcaggaccgcgcgtcctccgcctcgccgccgccaacgccggcgccgggctgctgctgctgcagcagctggtccagcgtggcgcggagccccgcggcgacggcctcgtggctccgggcgacgcccagccacgcctgcccctcggcggccagctgccggagcctctcctccagctcggcgttgcggcggcgggcgcgccccagctcggcctccgccagccgcagccgccccgccgcggcgcgctgcacggccgccgccaccgcgcgcgcgtgcctccgccgagcctcctgcagccccgcacgcatcctctcggtctcgagccgcaccagcgcgtcgatctccatgccctggcggtagagcagcgacaggacgccgttggtggtggccgccgcccgaccactggtggacgccgcgccgcaccctgcctccctgctctgcacgtcgccggcgaacacctggccctgcggcaccggcagaaccaacccctgctggtgggcatcatccaggaacccgggcgcgacgcgtgcacgcttcctcgggagaaacacgttgctgttgtcgccgccgccgccgttgcaggtgagctcgctgcgcggctgggtgtcgccaaacgcggcgacctcgaagggcgccggcgccggcgccggcgcgcacccgccgaagccgagctcgtcgaggaacgcggagccgccgccgccgaccgtggcgccctccagtgccctgaaggcgtgccccatgtcgtggggcaggaaggcggggttgagtag

SEQ ID NO: 103048 - DNA, 109 bp, Zea Mays
catcactacgtcagtggtttatagaacgttttgcgaaaagggcacagataagttatgtagtactagtacggtcgaatgagctcagtccgaaccggtcttttgaagaagc

SEQ ID NO: 103049 - DNA, 332 bp, Zea Mays
tttctagactcacgccaatttcaagtgtgcccacacaaatcaaacaaaacaaactacactagcagtacaatttgctcagcctacttatcacaattcacaattgcactccactatcagcaggacaaactgaaacggaatagactgaagactcctgtgtcaccaatttcaaaacaagatgaacaacattcgagacaactaaaacgatcgcctccacaggcaacttgattagctcaacgatgcataccatatttcatagtgttgcagtaacacatcgatacagataataatagcataagacttcagcaacttgccatcagtaaaaggaaactagt

SEQ ID NO: 103050 - DNA, 1645 bp, Zea Mays
tcggttgcaaaccatccattctcactcctcccactggcggtcggttcccacgcccgcccaacgccttcgcggtcgtccttgagttgcgccttgcgccttgccatggccgtgcaggggcggcacctgtcgcacgacctagcagcccaggcggcgggcggctacctgttcctggacgagtacgccgggtgcgcgccagccgcggccccggccccggcccggatcggggacgccacgacggcgctcagcgacttcccgcgcgtcgaggttgcctggtgcaactacgacggcttcctgccgaggaagcggccgcgcctggagacggcggcgccagcagcgggcggtggtctctcagaagaccagcgcgcgggtttgcctccggcgggcacggagcgcctgctgccactgcctgtggctgtggcaccgttcgtcaacgcgcggagccgccgggcggtggcggcctccggcacggcgtccaccagtgggagggtggcaagtggcgcgaccgtggcggcctcgcggggactgctgtcgtcgtggacgcaccgccacggcgtggagatcgacgcgctcgttagacttgaggcagagaggatgcgcgcggcgctggaggaggcgcggcggcggcacgcccgcgcgctgctggccgccgtggggcgcgccgcgtcggggcggctgcgcgcgtcggagacggacctcgagcgcgcgctccggcgcggcgcggagctggaggagaaggcccggcaggcgggcgccgagtgccaggcgtggatggccgtcgccaggaggcacgaggccgccgccgctggcctccgcgccacgctggaccagctcctgcagtcaccctatggcgccggcggcggccgcgaggaaggcggtgaggccgaggacgccgagtcgtgttgcttcgaggacggcggcgcgtcgtgcgcgtccaggtccaagctggcgtgcaggtcgtgcggcgccggcgaggcgtccgtgctgctgctcccgtgccggcacctgtgcctgtgccgcgcgtgcgaggccggcgtggacgcctgccccgtctgcgcggccgccaagaacggctcgctccacgtcctcgtctcctgatggactgaacatgttcgtcgccgactggttacgctacgtcacacgaggccatggcaggagacgaggcttcctgcggacgcgatgcgccggttacggttgatgcgcggttcatgcgcgaacgcaatgtggcacagcacagaacgtcctggcaaatcgtgcgatggccattctgttaataataaccggagatatggccgcagaagtggatcggggacgatgtccaacgaagggtgaaaaaaaaagttctcttcacgtgcaccaacaacaagtcacaaactcaccagtgtccactgccttctcttcaaagcaccgcgttggatgctggatggagatcgttctcctggtggagattgccaagggtttagtcagtccttgaggcgttgtctggttctgattctgaagatatcatttttttcttcttctaaacacacagttttaccaaatattttttttcttataagaaaagccgccgcagagagagagagagaaaaaaactgttcaataagataagccactgctgctctgttttggttgaagatggagagatcga

SEQ ID NO: 103051 - DNA, 721 bp, Zea Mays
ggcggcggcacgagctccgtctgcacgagatctggcggcgacatctacaccggctcaccggcgtccacgaggggaacgccactggctgaccggcgccatcccgtcggtgtccgcttctcgccggtagtactcacatcctcctctcctttccatcgcgtgcatctttccattcatcgccgtcggattgctaccagtagatctttacatcgatgtggccggccactggagtacgcccaagtggtaggcaactcgtcgagaccctcggctacacccaagaggaagcgaggacgcggacggtctgctccctcggctggaaatgcggcgaggatggcacgccggcgggcctcgtccactgagagatcgcggcggatgctctgcttccctccggcgtcctaatgagcgaggaagtggccgatctccctctgtgccgctgacggacgttgctttggcgagcggattttgtattgcgcgccggttttgtgttgtacgacgacgaccggctgcccgccttgtctcaactctcaagcacggagcagtagctggcaaacgttcgccttcaatcaattcaaatggagcttgcttcctgcctgcctgaaataccaaggctaaagtcgaagccgtgacgactgacgaacggccctgaggcaaactctttagttaccagcacatgagccaacttcatcagtcatagcagctgaatcgtcgtcagggatctttgctg

SEQ ID NO: 103052 - DNA, 680 bp, Zea Mays
taactggcgttttagctcattttatttgtccaaaattatgtgtcgttcatggtctacacctcgatgccaccgtagttatctccttgtttcacacacccattcgcttcgttcccacaccaacagactcttggcctcctctcatccatgcgatacatcccagcagccgtcgccgctcccaccatcagcagtcgccctctctcaaccacgagatggatccagttcctccgccctactattctccatcatcgagtgaagaatctgaccctagctggaaatggcgaaaggcttacctacaaggtcgtcatcgtcgctccatccaagcccctgttcgccagcgccagcgccagcacccttacatctgccccacaatccctcgacgccggatgggggcagtgctggcagattacacatcttccgatgaagatgcaaggaaggacgcggtgaatggaggaggcaaggttgctgcttcggcgacggaggaggaaggcaaggtggctgcttcgaagatgggaggatgcaaggttgctgcttcattaacaggagaagagaacgcactgtgcaagaatgctgctgcttcggcgaatgaagagaaaggagcaggcaaggtgacgacgggtgaacaacagaaagatgctccttcgttatctgcatttgttgttgaaacaaaaatatcaatataa

SEQ ID NO: 103053 - DNA, 244 bp, Zea Mays
cttcactcttcatattatgttgttaaactggtacatgtggattcaaactgatcgttgtactagattcctaattgaaaattttaattgtgtcttaacagataatttggtggaggacctataacgcgattttgaatacgaaactcagccaccatatttgttgcatcgaaatgatgcccaagaagtaaatggtatttggtttgataaccaacattactgtgaagctgtcacaagtctttttggaagg

SEQ ID NO: 103054 - DNA, 839 bp, Zea Mays
ggccctctcccttgcaccgtcgacacgattatcggtgagctttgtcgatgtcggaagcgaagctgggaagcaggcgtcgatagtcgagctggtctggggaagggctgctcgcattggacggtttccctctgcgaatcaacaaggagccaggagcatcggatgccatgagtgccaccaagcaccggcgacctacaacatgtgcccttcgtcccaagatcgccaacgacaaatgtattcaactcgtccattgcaagatccaagctcgaaatagagagaagcaaacgaatcgcatcgttggtgtcgtcctcgtctttgattcgaccgagagccccagattgaagtcttgtcagaatatggagtcagataatgaaaagctccaaaaagccctggcttccatgctatgaatcgttgaggttcaatgtgcctccatcatagatgtcgtgcatggtgcttttgaaccatggaacctactagagtttaatgattttaagcaggccttagtcaacatcgagtccattgtcacagaccttgatcaactttccctacaacgcaagtgtgaggttaggagcatagaccaagggaatgatgatgaggttgtcaatcccaatgatatcgttccaatggactacgaacctcggaacaatgctgattgctacgactacaatgattccctactcagagtctctagtgactactccgattaaaacatcagtcattcatgccatgttttatgaacttctcaaagtttgtgttaggtgaatgactctatgtgatgttgtatttaatggttactatgtttgttccataaaggacagtatgaacatctaagtttgtgttta

SEQ ID NO: 103055 - DNA, 423 bp, Zea Mays
ggcagatcgctcaccatggaggtgaaggtgatgagctctagacttgtcaagccgtcctatccacctggtgtgccgcaaccagacaccacccagcatgtgccttgctcggtgttcgacaagatcacataccacatacagatggccatcatctacgccttctcacctccggtgccctccatcacggacattgagcacggcctcgccgccgtgttgggcgtgtaccgggcattcgccggccaggtccgtccgggcccggatggcgagctcggcgtgctgctcaacgaccacggcgcgcagctcaccgaggcgttcgtggacgcccaccttattgttgtcgcaccagcgaggccgtcgccagagctgcagcagctgcaccctgggctacatgttaagatcaaggagtgtggctggtgcacttcatga

SEQ ID NO: 103056 - DNA, 763 bp, Zea Mays
caatgatcttggttttgtagggtgccaagaacggaacatcagcaatcttgtacaggacatcagaaaaatggatcacctggaactcagaaagaccatctgcaccagcagcagcctcctcctcagccttctccttttccttctcaacatcatacttgggcttccaggtcttctccagaatggaggtggcaaccttctcatcgtcagcaatcaagatattgtcaaacaggatgccatcctgcattgtccagatctcaatcccaatagcagcaattggatcaaagtcaggcttgtcaagctcaaagtactcagggttggggatctcctgaggcttccagattcccttgtagttggggttgtcaatcataggtgcatgccacttgcccttgtaagcaggattctgcttcattggcctcttccactcgccacatccaggtgcctcttcacacttggggttgtcaatctttggcgcctcccattcaccatcctcctcatcgtcccagtcctcaggcttggctgcctcaggatcatcaatctcctcaggttcatcatccaaccatccctcaggcttggtggcttcatcatccacaatttccatcggggcatcctcatcccagtcatcaggctttactgcatctggatcaggaattttagctctctcatcccagtcctccggcttcttgtcatcagggtcaggaatggtcttggatgggataagtgctggctcaaaatcatcagcagaaaggaagttcgccttcttcttttc

SEQ ID NO: 103057 - DNA, 3056 bp, Zea Mays
gtcgtctctttgcgtgcgtgctcctctatttaaggccgactcctccctcggcggcaggagggcttcgtgtcacagctaactagcgtccccctgctctgctctgcctcctttcgtcacagcctcgcctcggcggacgaccaacaaggtcgccggccagccagggcggacggtcgcctgctgctgctgctgaaccctgcaccacctcggcggcgtcgtcctcttcgtcagctagcaaagcattccctggctacatagggatcagcagtcacgccaccaaacagccttgggaatcagctggcgcggcttgattgattagggcgcgtggggactctccggagagagcagacagactactcgatccgtcgttccaaggcgttgggacgtacttggggagagggatacccacccaaccgaggcgggcgataatgtcgctggaggtggacaacccagctggaggagcaggcggcggcggcgagtcggccaaccggctcagcctgaagcgccacgactcgctcttcggcgacgcggagaaggtgtccggcggcaagtaccacgggtccgagggcagctgggcccggacgctgcacctggccttccagagcgtgggcatcatctacggcgacatcgggacgtcgccgctctacgtctactccagcaccttccccgacggcatcaagtacaacgacgacctgctgggcgtgctgtcgctcatcatctacaccctcatcatcatccccatgctcaagtacgtcttcgtcgtgctctacgccaacgacaacggagacggcggcacgttcgcgctctactcgctcatctcgcggtacgccaagatcaggctgatccccaaccagcaggcggaggacgccatggtgtccaactacagcatcgaagcgccgacctcgcagctgaagagggcgcagtggttcaagcagaagctcgagtccagcagggcagccaagatcctgctcttcaccctcacgatcctcggcacgtccatggtcatgggcgacggcacccttacgccgtcaatatctgtgctgtctgcggtgagcgggatcaaggagaaggcgccaaacctgactcagacgcaagtggtctggatctccgtggcgattctcttcctgctcttctccgtccagcgcttcggcaccgacaaggttggctacaccttcgccccggtcatctcggtgtggttcgtcctcatcgccggcatcgggctctacaacctcgtcgtccacgacgtcggcgtgctgcgggccttcaacccgtggtacatcgtgcagtacttcaaacggaacgggaaggaagggtgggtttcgcttggcggtgtcatcttgtgtgtcacaggcacggaaggcatgtttgctgacctaggacacttcaacatccgggccgttcagatcagcttcaacggcatcttgttcccatcggtggtactgtgttacatcggccaagcggcgtacctgcggaaattcccggagaacgtcggagacaccttctacaaatccatcccagcacctctgttctggccaaccttcatcatcgcaatccttgctgccatcatcgcaagccaggcgatgctctctggcgcgttcgccatcctctccaaggccttgtcgctgggctgtctccccagggtgcaagtgatccacacctccaagaagtacgaagggcaggtgtacatcccggaggtgaacttcatgatggggctggccagcatcatcgtcaccattgccttcaggaccaccaccagcattggcaacgcatacgggatctgcgtggtgaccacgttctccatcaccacccacctgatgaccgtggtgatgctcgtcatatggaagaagcacatcgtctacgtcctcctcttctacgtggtgttcggcctcacggagatgatctacctctcgtccatcctgtccaagttcatccagggcggctacctccccttctgcttcgcgctggtcctcatgacgctgatggcgacgtggcactacgtccacgtgaagcggtactggtacgagctggaccacatcgtgcccaccaaccagatgacggcgctgctggagaagaacgacgtgcggcggatccccggggtggggctcctgtacacggagctggtccagggcatcccgcccgtgttcccccgactcatcaagaagatcccgtccgtgcactccatcttcctcttcatgtccatcaagcacctgcccatcccgcacgtgctgcccgcggagaggttcctgttccggcaggtcgggcccagagagcagcgcatcttccgctgcgtcgcgcgctacggctacagcgacgcgctggaggagcccaaggacttcgcgtccttcctggccgacaggctcaagatgttcatccaggaggaggtcgcgttcgcgcagaacgacgcggagaacgacgacgaggcggcgacggaccaccaggcgccgccgaggccgcccaggcggtccacgggctctgtcgtgcacagcgaggaggcgatccagtcgagggggagcacgcactcgggccggatcaccttccacgccagccagacggcggaggaggagaagcagctcatcgaccgggaggtggagcgaggggtggtgtacctgatgggggaggccaacgtgtcggcggggcccaactcgtccgtcctcaagaagatagtggtcaactacatctacacgttcctgaggaagaacctgaccgagggccacaaggcgctggccattcccaaagaccagctgctcaaggttggcatcacgtatgaaatataggccaagctttttcttggagtgcaaagcgcaaagtgccgctgttggggtttaataagtgggcttcgttttctattttgtccgccaaacagggaaaaaaagagagagagagtgggcttctttggtttgggctggaaggttcctttttattctctgtacagtgtggttttatcaggagtgcaagcgaaattggaaaaagcacagaggtttccttctgttctctgtacgtttttaccaggacttgtcaaatgcaagcgatattggaagtaaagcacagaggtttcctta

SEQ ID NO: 103058 - DNA, 3092 bp, Zea Mays
gggcttcgtgtcacagctaactagcgtccccctgctctgctctgcctcctttcgtcacagcctcgcctcggcggacgaccaacaaggtcgccggccagccagggcggacggtcgcctgctgctgctgctgaaccctgcaccacctcggcggcgtcgtcctcttcgtcagctagcaaagcattccctggctacatagggatcagcagtcacgccaccaaacagccttgggaatcagctggcgcggcttgattgattagggcgcgtggggactctccggagagagcagacagactactcgatccgtcgttccaaggcgttgggacgtacttggggagagggatacccacccaaccgaggcgggcgataatgtcgctggaggtggacaacccagctggaggagcaggcggcggcggcgagtcggccaaccggctcagcctgaagcgccacgactcgctcttcggcgacgcggagaaggtgtccggcggcaagtaccacgggtccgagggcagctgggcccggacgctgcacctggccttccagagcgtgggcatcatctacggcgacatcgggacgtcgccgctctacgtctactccagcaccttccccgacggcatcaagtacaacgacgacctgctgggcgtgctgtcgctcatcatctacaccctcatcatcatccccatgctcaagtacgtcttcgtcgtgctctacgccaacgacaacggagacggcggcacgttcgcgctctactcgctcatctcgcggtacgccaagatcaggctgatccccaaccagcaggcggaggacgccatggtgtccaactacagcatcgaagcgccgacctcgcagctgaagagggcgcagtggttcaagcagaagctcgagtccagcagggcagccaagatcctgctcttcaccctcacgatcctcggcacgtccatggtcatgggcgacggcacccttacgccgtcaatatctggtaataacggaaacatctagctagctagttactggcatggagtaactaactaactatctaactaatgtgtcctttgttcatggatgtgggtgttctgcagtgctgtctgcggtgagcgggatcaaggagaaggcgccaaacctgactcagacgcaagtggtctggatctccgtggcgattctcttcctgctcttctccgtccagcgcttcggcaccgacaaggttggctacaccttcgccccggtcatctcggtgtggttcgtcctcatcgccggcatcgggctctacaacctcgtcgtccacgacgtcggcgtgctgcgggccttcaacccgtggtacatcgtgcagtacttcaaacggaacgggaaggaagggtgggtttcgcttggcggtgtcatcttgtgtgtcacaggcacggaaggcatgtttgctgacctaggacacttcaacatccgggccgttcagatcagcttcaacggcatcttgttcccatcggtggtactgtgttacatcggccaagcggcgtacctgcggaaattcccggagaacgtcggagacaccttctacaaatccatcccagcacctctgttctggccaaccttcatcatcgcaatccttgctgccatcatcgcaagccaggcgatgctctctggcgcgttcgccatcctctccaaggccttgtcgctgggctgtctccccagggtgcaagtgatccacacctccaagaagtacgaagggcaggtgtacatcccggaggtgaacttcatgatggggctggccagcatcatcgtcaccattgccttcaggaccaccaccagcattggcaacgcatacgggatctgcgtggtgaccacgttctccatcaccacccacctgatgaccgtggtgatgctcgtcatatggaagaagcacatcgtctacgtcctcctcttctacgtggtgttcggcctcacggagatgatctacctctcgtccatcctgtccaagttcatccagggcggctacctccccttctgcttcgcgctggtcctcatgacgctgatggcgacgtggcactacgtccacgtgaagcggtactggtacgagctggaccacatcgtgcccaccaaccagatgacggcgctgctggagaagaacgacgtgcggcggatccccggggtggggctcctgtacacggagctggtccagggcatcccgcccgtgttcccccgactcatcaagaagatcccgtccgtgcactccatcttcctcttcatgtccatcaagcacctgcccatcccgcacgtgctgcccgcggagaggttcctgttccggcaggtcgggcccagagagcagcgcatcttccgctgcgtcgcgcgctacggctacagcgacgcgctggaggagcccaaggacttcgcgtccttcctggccgacaggctcaagatgttcatccaggaggaggtcgcgttcgcgcagaacgacgcggagaacgacgacgaggcggcgacggaccaccaggcgccgccgaggccgcccaggcggtccacgggctctgtcgtgcacagcgaggaggcgatccagtcgagggggagcacgcactcgggccggatcaccttccacgccagccagacggcggaggaggagaagcagctcatcgaccgggaggtggagcgaggggtggtgtacctgatgggggaggccaacgtgtcggcggggcccaactcgtccgtcctcaagaagatagtggtcaactacatctacacgttcctgaggaagaacctgaccgagggccacaaggcgctggccattcccaaagaccagctgctcaaggttggcatcacgtatgaaatataggccaagctttttcttggagtgcaaagcgcaaagtgccgctgttggggtttaataagtgggcttcgttttctattttgtccgccaaacagggaaaaaaagagagagagagtgggcttctttggtttgggctggaaggttcctttttattctctgtacagtgtggttttatcaggagtgcaagcgaaattggaaaaagcacagaggtttccttctgttctctgtacgtttttaccaggacttgtcaaatgcaagcgatattggaagtaaagcacagaggttt

SEQ ID NO: 103059 - DNA, 507 bp, Zea Mays
atggcgaaagggcgaggatggctgggcgaccgcggcggccttgacgagcgccgagctggccatgaccatggacgcagtgaccatggcgcgcgtgaggcggcggcggcgctgcatctcggcggggagcacgaagtagatctgcgccgcatggagctccttcccgcgtcgaccagcaagcaggacagacgcgctccggcgcaggcgcgcgggagacctcggccacggacgacgcgctgtaggttcggtggcgtctccgtaagctttatattaaagattaccaagagcgatatatcaagaggatacatagtcttggaatttcaggattggttcaagaagccactgactgtggagatggggacggccctagatgctctgttcaatcttgatacgccagacacagttcgcctcgacaaggccttgatgggaattgctggagatgctatagctgagatccaagaggaggtggacgccatgcatgcagaggccagagcagttgctgcggcttga

SEQ ID NO: 103060 - DNA, 2600 bp, Zea Mays
gccccggcccaaagcaccagcaccggcgcggcggtccaaagccagaagcagaacagaaaacaactgagacagctagagcagagcccccttcacaccaaaaatttcctctttgcgtcgcgccccgtcagctgagtccccgcggatgggctcggtctcgcggggctagggtttggtcggtcgtctcgtcggcgtcgagggcgccggcgctgctagctagtagtagctcgctcgcgctagggttctcaggagccatggtgatgcagcgcttctcgtggccgtacggaggccggagcgcctccttgtgcggcagcttcaccgggtggagggagtatcccatggggctggtcggggccgagttccaggtcgtcttcgatctgcctcccggggtttaccagtaccggtttttggttgatggtgtctggaggtgtgatgagacgaaaccctttgtatgtgatgaatatggactgatcagcaatgaagtgcttgtggaaaacaatgtgcaacctgttgtgcagccagagccttctatcagaggaactaatttggatgagggtaccgttttgacaacaatgcccccggagtcatcatctcagaacccaggcgtgcaaatagcagttttccgccatgtggtctctggaatattattacacaataccatatatgaagttgttcctctttctagcaagttagcagttttggacactcagctacctgttaaacaggcatttaaaataatgcatgacgagggtcttgctctggttcctctttgggatgaccatcagggaaccataacaggcatgctcactgcattagattttgtattaatgttgagaaagttgcagagaaatattcgagttactggcaatgaagagcttgaaatgcatcccatttctgcttggaaagaagcaaagctacagttttatggtgggcctgatggtgctgccatgcagagaaggccattaatccatgttaaggattccgatagtttggcggatgtggcactgactataatcagaaatgaaatatcttcagttcctatctttaagtgcatgccagattcatcaggagtgcctttccttaatcttgcaaccctccaggggattttgaaatttctttgctcgaagctacaagaacaggctggaggctgttcccttctgcacaatcagcttctcagcattcctattggtacatggtctccacatacggggaggtcaagtagcaggcatctcagaactttgctactgagttctcctttaaatacctgcctggattttctgcttgaagatagagtaagctcaattcctatagttgatgacaagggagcgctccatgatgtttactcactcagtgacatcatggctctggcgaagaatgatgtttatgctcgcatcgaacttgaacaagtgactgtgcaaaatgctttggatgtgcaataccaggtgcatggtcgacgacagtgttatacttgtttacagacaaataccttgctggaagtcttagagggattgtctattccaggagttcgacggcttgttgttattgaacaaagtaccagatttgtggaaggaatcatctcattgagagacatatttacatttctccttggatagcatctgtgtagccattccatacatgaaaaagcttgttgtacttggttcaaacgaaataaaaaggttacaaatgtgatagccatcttctatcttccttcttgatttggttcatattataccgcagacactacataattgagttgcaccgaaggaaagaacaggtaggtgctgcaggatggagaagtgttcaggtgattgtttcctgctcgaccagtccagccgccaattatttgcaggcttccagaattgttacttgcaagttaggagcttgactacctttttaagaacttgatttttctgtggttgtattctttgaacattgatacaggctacagaatcattttcataggatctttgaaacagggggattttttgaaggaaatgaatctcgtggatttttcttccttggaatgaagtcgaaggacctcttcaaatgcgagcatatatatcttttttttgtggaaacatgaacgacgtcatgcaaatgattttcttgaagcattgctgtcattccagttctataagatttgaagtgtttctgtacaattacaatgcttttcatgaccccatttggttttgctttctgttttcaaacaactctgagatttggctcatgagaattgtatatgttcaattatcagtgcatcttggtgtgagtgacattaggcaacggaattttgttatgaaagactgaactgtacaagaaattgctatcataaggaaagcgaattaaggaattttggttgatgctcgaaatatgtcaattattcgcactgtgctagtgattatgtacagaatcagggaatgtctcgcatccaattagggagtgggttggttgggttggactgtgttatactgtctttggtggatcatgtaaaatatgtgatgcgatattgtagatgataatgtttgatattgtttaaaagtttgacattgtttgtagagtgaagtttaaaataaaagatgagatagatgataatgtttgatatt

SEQ ID NO: 103061 - DNA, 1193 bp, Zea Mays
aggcgagacgaggaagaggaagaactgcccagccgtaccctccatacaatccaaagtaccgaaaaccaagggcgggcggggacggcgtaggcgcacgcgcacgcgcacgcgcacacgcgctccaatctccaacacccctcttctctctcctcactcctccctcgcttgtcggcttgtcgctccgcttctccccagcagctgagacagctagagcagagcccccttcacaccaaaaatttcctctttgcgtcgcgccccgtcagctgagtccccgcggatgggctcggtctcgcggggctagggtttggtcggtcgtctcgtcggcgtcgagggcgccggcgctgctagctagtagtagctcgctcgcgctagggttctcaggagccatggtgatgcagcgcttctcgtggccgtacggaggccggagcgcctccttgtgcggcagcttcaccgggtggagggagtatcccatggggctggtcggggccgagttccaggtcgtcttcgatctgcctcccggggtttaccagtaccggtttttggttgatggtgtctggaggtgtgatgagacgaaaccctttgtatgtgatgaatatggactgatcagcaatgaagtgcttgtggaaaacaatgtgcaacctgttgtgcagccagagccttctatcagaggaactaatttggatgaggatgcccccggagtcatcatctcagaacccaggcgtgcaaatagcagttttccgccatgtggtctctggaatattattacacaataccatatatgaagttgttcctctttctagcaagttagcagttttggacactcagctacctgttaaacaggcatttaaaataatgcatgacgagggtcttgctctggttcctctttgggatgaccatcagggaaccataacaggcatgctcactgcattagattttgtattaatgttgagaaagttgcagagaaatattcgagttactggcaatgaagagcttgaaatgcatcccatttctgcttggaaagaagcaaagctacagttttatggtgggcctgatggtgctgccatgcagagaaggccattaatccatgtaattctccatatatttgcttgattctttcatttgattcaatgtgtaagcagttgcaagatcagcagttttcagaatattaaaatatattatctgtatgaaattct

SEQ ID NO: 103062 - DNA, 1025 bp, Zea Mays
gtgcctatactaatccacctctttgtctgatgatgggacgggcacccggcccagcccggcccgcttttttcgctttgctctagtcgtctgctccgcccctgggtgctcgacagtttaacaacctgcatttcttgagttagtatcgcccgccttgcgaagacgcgcagagaatcatgccggcgacggtggccatcacgttggacctgggatgctgccgctgcaaaaccaagatccacaagatcctctgctgcctccaacaacggtgcgggttcgtcttcgacaaggtggtgtacgacaaggacaaggtgctggtttcggggaccttcgacgccatggacctcgtctgcaagctccgctgcaaggccggacatttcgcaaccaaaatcgagattgtgcccccgccgccgccgaaaaaggatccaccaccaccaccaccacaaacggcgcctgctgctgccgtggggagcccccaacagcccgtagtaacgagcaacaggcccgatccgccaccaacgtgcacaaaagcgctcatcccgtacccatgcccgtacccgtatccgtacccgctcccgtgcccaagtccacagccgcgctcctgccactgccactcctgcaagccgccgccatgcccgacaccaccaccaccaccaccacggccttgtccgacaccaccaccgccatgtccgccacctgtgtccgtgtgcaagtgcccagcatggacgccgtgccagtgccgcggccacccgtgggtcgtctgctgcgaggagaacctacaacccgacggcccctgcgctgtcatgtaactgcaaactgttgctgcagaggcgggcgggcggggacggcagcgggttgttgcaactgcaacctctcacgaccctgccatttcatatgcatgtgtgctagtgcataaaagatcagtgaaagcgtcccgtcagatggacggctgcttctgcatgcagttgccattcatcagctgcagacctgactcgagtgtgcgtgcatgtgtccttgttgttgttgtacat

SEQ ID NO: 103063 - DNA, 224 bp, Zea Mays
ccaaggttctacagcagcagaacttattcggtgatcttttggcccatctttgctgataacgacatagtacgcatgctgctgttgtcaagggaagaggtgctggaagcaaggatcagagtgcttgaactgtgtgaaaaatgattactcgcatgcatgctagccgttggcgtaacacccagctgatggagagattttagtttgctagatgaatctttagactttgc

SEQ ID NO: 103064 - DNA, 710 bp, Zea Mays
atgggtaggcttacgggttgtgaagattatgatgctactggttttggagatttaggaaggaaagagaaaacaataccagatgccttacaacctgaattagggaaaggattgctaattgcatatggaagtcaccaagaacttggtaaaggtgattcaatgacaaatctaatgattaacatgtgcgatgtgctcataccatacatgaatttgcaacgccatgtacttgttgatggcaagatgtcatttccacccctaagacaaacaagaactacaggctgcttccgtcttcacccaatcagggatgaggatgccaagttcaagctctgcaacgggaggtctattcagtttgacgtcgacaacgtggtcatggtgaccggcgggaggaacaccgggcgtgtaggagtgatcaagaactgggagaagcacaagggcatcttcgaggtcatcgacgtgctgctcggagttttttgcatgctatgtctagttttctcctatttgttgtacaggaaaacatagaatggaattcaaatttggtggtcgcaaaagtgtggagacttgaattcatataaagttaggcttaacattaatgcaaatagttgtattttagtttagatttagagtacacttatgtatgtcttgtttgacaatgcttatttatgatatattgaatggtacttatttatattatattaattataatgttgttcaat

SEQ ID NO: 103065 - DNA, 1176 bp, Zea Mays
tccttaaaccaaatacaccacaaatttcttcaaaacaaacaaacacgatacatactggttctgtgcacaaaaaaggcacggactgcttctttttctattttttgttgtgtgcacagaatcgagcggctacaataatcaagatcatcaagacaatggagcacggtgccgtcgccgggaagcccaaggtggtgttcgtgctcggcgccacagcgacagggaagtcgaagctcgccatcgccctcgccgagcgcttcaacggtgaggttatcaacgctgacaaaatccaggtccacgatggcgtgcccatcatcacgaacaaggtcacagaggaagagcagggcggggtgccccaccacctgctcagcgtccgccacccggacgccgacttcactgcggaggagttccgacgtgaggcggccagcgccgtggcccgcgtgctctcggcgggccgcctccccgtcgtggcaggcgggtccaacacctacatcgaggcactggtggaaggcgacggcgccgccttccgcgcggcgcacgacctcctcttcgtctgggtggacgcggagcaggagctgctggagtggtacgccgcgctgcgcgtggacgagatggtggcccgcgggctggtgagcgaggctcgcgcggcgttcggcggcgccggggttgactacaaccatggcgtgcgccgcgccatcggcctgccggagatgcacgcctacctggtggcggagcgcgagggcgtcgctggggaggccgagctcgcggccatgctggaacgcgcggtgcgcgagatcaaggacaacaccttccgcctcgcgcgcacgcaggcggagaagatccggcgcctcagcacgctcgacggctgggacgtccgccgcatcgacgtgacccccgtgttcgcgcgcaaggccgatggcactgagtgccacgagctgacttggaagaagcaggtgtgggagccgtgcgaggagatggtgagggctttcctcgagccgtccctgactgccgttccaggtgttgcagtaactgaagaagggaacgccggcgtcgtcgctactgctgcacccgctggtgatgtcgtcgtcccaactggcgatgtcgtcaccgccgtggctgatgcataagtagctagcggacgtagcgcatgcatgcaatgcatgcaggctggctggctggctt

SEQ ID NO: 103066 - DNA, 650 bp, Zea Mays
gcgtgaacagtacgggggtattgttcatctatttataggcacagggcacagcctgtgtggaattacatttataccctttacaattggttacaatcatgacacaaactatcaggggtcaatctgtttttttatctttaagtcggtgcagtcctttgtcttaaggcatatcgttgtgccgaagtttcctgaaagataccttcagcgttacttctgtgctgatctttcgaaggtgtttctttttacaggaccttcggctacgaagcagatcctcaacaaccacacactcacataatggtagtctaaaacctcaaccaaagtcagtcatctcagcaatcgcaaaatggatgtgtttgagccttcgagggtgtgaatgaaatgccgatgaacaacgatatgaaaatgcaattggagttcgtgaaatttatacacggctaatcgatctgatatttcttttcttttttgtgtgaaaagagcttaatttgtgctcggttaaattactttcgcagaggtggagtggatacaatcatttgatcaggcacctcaacgagggtgagagtgacagcagagaacaaacagaatggcagctgtggacgacggcgcgcggtgacgtctgctgctcagttcagtttcagcaatggcggctgaatagc

SEQ ID NO: 103067 - DNA, 926 bp, Zea Mays
caggatagtttggctaccctcgtcgtcgtctcactcaccccgccttcacgcctccctcaccaaataaggtcccgcccttttccgacattcacaggggggacaggaaatcagcggccatggcctcgattccggcgacgaccttcgccgtcatcttatccgtcctcttctgtgccgcggctggcaccgccgtcgacaacgacctccccgactacgtcatccagggccgcgtctattgcgacacctgccgcgccgggttcgtgaccaatgtcaccgagtacatcgcgggcgccaaggtgaggctggagtgcaagcacttcggcaccggcaagctcgagcgctccatcgacggggtgaccgacgggaacggcacgtacacgatcgagctcaaggacagccacgaggaggacatctgcgaggtggtcttggtggagagcccgcgcaaggactgcgaccaggtgcaggcggacagggaccgcgccggcgtcctgctcaccaggaacgtcggcatcagcgacaacctgcgccccgccaacccgctcggctacctcaaggacgtgccgctgcccatctgcgcctcgctgctcaaacagttggactcggacgacgacgacgatcagtaatagcacatcgacgacgacgatcgatatgtaatagcacgtcgtcgacgaccgaccgcagtcgtcgcagactggctggcactaaaccacaaatcctcttcacctggattacaaatatgtaactgagaaaggaaaggaaaacaaaaatgtaactgcgtggctgtaccaaattctgagtgctggattcttgctattgtcacccattgttcgttttatcatacaagttgcagcgcagcgcaagacggctaaggccttgttcgtttgtgtcggattgcatccggaatcgttccacctaatcaaagtttatat

SEQ ID NO: 103068 - DNA, 351 bp, Zea Mays
gatccgcttcccatctgatgctcgtgctccgccgcgtctccttcctcctctcgtcgccctcccctcgcgcaccgctcgcaaaacctctcctgctcctacgcccgccccaaaccctagccccgacagcgcggcagctcgtggctatggccgcgtcagtcccgtcggcgggtggggcggggacgatgagccgcgacgcgttccgcgcggccgtgaccaacacgctggagcgccggctcttcttcgtgccctctttcaagatctacggcggcgtcgcggggctctacgactacggacccccaggttgcgctgtcaaagctaacgtcctcgcattctggcgccaggtactgtact

SEQ ID NO: 103069 - DNA, 223 bp, Zea Mays
tttgctggaaatttggtcttttatatgtacaccatgaaatctgatacatacatttgtcacaccaacactcaatgttcaagtgcaagtatacaactttgtaaataccatactgaagtagcgttgcatcaacaattcctatatctgacaagaggttttaatctgctattgctaactgttttgtgaatccatctttgcagattgtaaatacagtgaacatcatcga

SEQ ID NO: 103070 - DNA, 534 bp, Zea Mays
aatgaaatgattggggcgtttagtttactgtaaaattgcgaattggccatcatgataacttgaagtagtttagaagcatttacatgattacatcagctgcgattggtacagggtacacaggtacaagttcgatacagacatgaaacgtgaaaatacattagctcagtcagttaccctctgtgcttaacaatacacctaaccatcccccccagcattatgtgccgctcgctactggcagagcatggacacaagaggccacctcgggtttttctaaggctggcaacttttcaacaagatggtcaggttctaaaacttagatttgggatatgcagattgccctctgacagcgtacagcagcccaacattaaaacgagattttcctacgggctacggtccactcccaaataaggaaccgaatcctgaatgccgtcgagcatgctctggtaatagcctgctgacaagctccggtggtgcgtttgctagtgccttcacgaagtgaagggcggctgggattggattgtggtggggagtcat

SEQ ID NO: 103071 - DNA, 737 bp, Zea Mays
cttattctaagaggggtccgattctgttgctcaaaacgcaagattattacaggttgctgtgttaagtccaagcttattacatgaattcaacacaaggttttcaacccaggacattttctataaagttgtggccaccaagtgaaaggctcatgcttgttgagaggatgacaaagactatgtccacagcgtccattttctctcgcaaatatggtcttttgggcaagcaagaggctcatgagaatgcaaaaaggattgaagaactttgctttgcatcggctgatgagcatttcaaaaatgagccagatggtgatgggagttctgctgtccagctatatgcaaaggaatcaagcaagatgatgttggaagttctgagaaaaggcccaaggactgctgcagaattggagacacctatagctgatacatctcttgtgtctgctgatgcacctcgtgtgcttgctgatactgtactggatatatctggtggggagcgtgcttttattgaggcagatgaagcaaaggaactgcttagtccacttaccaaaccagggaattcatataaaataatttgctttagcaacaggagctttgttattggtgctgctaatgttgctggtccaattcttgagtcagttaaggatcagctcacagaggttgacatctcaaattttgtggcaggaagggttaacaaatcgtcttattctaagaggggtccaaatctgttgctcaaaacgcagtaa

SEQ ID NO: 103072 - DNA, 1843 bp, Zea Mays
atgcgcatctctctccgcgtacttatcagtagcgagctcggcacgtcattgtgcactgctgcaccgagcctagcgcgagcctccgtccgaaagtccaaatcttcagctctctccttgacgcatgcccggatcgatcggtccagctctacccaccggaggaggaggcagatcaacgggcagctgactaaggtggatccacggaggaggcatggcaagaggcccctacccgccgacgaggaggaggaagaggaggaggagctgcccccgccgccggcaaagtacgagcagctggatcaggaggagaagcatcacgttgtcgtctcgcagctgcaagcaggagctacctttagcggtggccgagggtcttcgtcgtcttccgtggccggcccttcgccggaggcgtacgcgcagtactactactcggcgcgcgccgaccacgacgcctccgccgtggcctccgcgctagcccatgtcatccgcgcctcgcccgaccaactcccgccgcagcaggccgcctgcttgtacggcgccgccggcgcgccggtcctgcggcagggagagggagaccatccgcaaccgcaagcggctgcgcaccaccatcccggtggccacgtcgccgccgaggaggagcaaggtctgaggcggcactaccgaggggtgaggcagcggccgtggggcaagtgggcggcggagatccgggaccccaagaaggcggcgcgggtgtggctcggcaccttcgacacggcggaggacgccgccatcgcctacgacgaggcggcgctgcggttcaagggcaccaaggccaagctcaacttcccggagcgcgtgcagggccgaaccgacctcggcttcgtcgtcacccgcggcatcccggaccaccaccggcacccgcgggcggcggcggtgaacctggcagcaatgccgcaggcgcaggcgcagccgcacttgcagcacggccgcccgaccgtcatgccgtacccgtacccgtaccctgacctcatgcagtacgcgcagctgctgcagggcggccggggcggcggcgaccacgcggcggcggtccagcagcagctcatgatgatgggcgggcggggcggcaacctgcccttctcgttctcgccgccgtcgtcctggagtgcgccgccgcagatactggacttctcggcgcggcagctcatcacccagcccggcccgccgtcgtctccggccgcccccggcggcgcggcgccgtccacgccgtcgtccacgaccacggcgtcgtcgcccagcgccagcgccagcggcagtgcatggccgtacggtggggagcaccacaggaataaaaaggacgcgtgatcgtccagctggccggccgatcgaggatatggatatgcatgcatgcaacttgcagtgcgaggggatcagatcaagaagtagctgtgcggaggaatggaatatgcatgcacgcatgcaatatgggcggggtaagtggcagcgacgatttttggtccaagcataaccatttcttggccctttagtttccacgtcgatttcttcttctttttttttctcacgagatgatcttcttttgttcatttcttggaggatcttgatcactttggttaattagagagctagctcgctatagctgcttgcttaggtgcttttactactaccttccttttgtataatggcctgctctaggtgctcatatctttaatttgttcaagtgtcaactgagattaactacctgtgtgcaaactaatccaaagcaaagaagagtggaaccttatgtatatggggcatgttctccctctctctctctctctctctccaaatgattgatttattcctttgtccctacata

SEQ ID NO: 103073 - DNA, 89 bp, Zea Mays
cgtggagcgtggaagcacacatatatacatgatacatgtacatacacaggtggtgggtagggctagctcatcatccatcgtgttcgttc

SEQ ID NO: 103074 - DNA, 103 bp, Zea Mays
gcatgctataggcggaatggtagtggagggtacacgcgagggtgagatcggcggttcgattcctaacaaccgaatagcgcgcaaattttgcgtgaaaaatgtc

SEQ ID NO: 103075 - DNA, 156 bp, Zea Mays
ccgcgggatccaagggggcggcctcttctcctcgtctgaggacgaggatgaccaagaagacgacgcggccacgccaagtccgacgccgacaccgacaccggcgccggcgccggcgccggctgcggtggtcgtgccgatccccggagagcaagctgt

SEQ ID NO: 103076 - DNA, 620 bp, Zea Mays
gagtcaatgacatgtggggtccatggtatatatctaaagtttggatcttttaatgagaagacggatgacgtgctgcccaggcaagcgagctccgagcaaggcacatcaaaagaaaagcagccggagcagatcaccgaggactcgccagcggcgcagtgcgggcagaagaggcagcgcagcgatgacaatgcctccggaagagccgcgaccaacctgcaggggcagctggttgaaatcctagaccggagcagccagatggtggcagcgcagctagaggcgcagaacatgaacagccgactggatagggagcagaggaaggatcaggtgagcagcctgcttggtgtgcttggcaaggtggctgatgccctctacagaattgctgataagctatagccgccactgtgagtgtgtcttgagcacagtaaataatcgctgcaagaatgtacagattggtacaggttgttggcgtcctattgttattgtggattggttctgaaatttggtcagaaacctgaaatgggatgccccattttttaacccatgggatgtagcatttgtatgcccgtatggccccaaaactgtgtattcttacagaggaatggaagtgcatatctgatgac

SEQ ID NO: 103077 - DNA, 787 bp, Zea Mays
ttcccatttcccacgcggcaggcagctagccctacctctggtctcctctgccacctcctcccctgccacctcctcccctgcctagggtgcgccttcctcgccggacgccggcgcagggtcgggacgcttccgctgccgcgcgttccacgacccctctctgggagacgaaactcggcgccggcttggtagatacagacctgggattgccttttcctagttcagcatggagggcactctagttcagtctgcggttgttccaaccgtttacagaagcagctcaggtcggttccgtgtgcgtgcaagggccagaaccaatgctacaatggtgcgaaatatgccaacaaggactcttactcttggtggtttccaaggattgcgtcagacaaactttttagacacgaggtccgtgatcaagcgtgactttggatcgatcgtggcaagtcagattgcaagaccgcgtggatcagcctcaagaggggtggttcgtgccatgtttgagcgcttcactgagaaagcaatcaaggtgattatgcttgcacaggaggaggcaaggcgcctgggacataactttgttgggacagagcagattttgctggggcttattggtgagggcacgggtattgcggcgaaggttctgaagtctatgggaatcaatcttaaggatgcccgagttgaagtcgagaagataattggacgtggcagtgggtttgtggctgttgaaatcccattcacacctcgtgcaaaacgtgtattggaattgtcccttgaagaagctcgtcaacttggt

SEQ ID NO: 103078 - DNA, 3072 bp, Zea Mays
atgcaggctggtatgaaccattgcactctcctttcatccgctctagatctgggaacgagcaatccccatgctctggatccccacactctggatctgggaacaagcaatctccgtggtcaacatcctacaatccccacgctctggatctgggaacgagcaatctctgcacatttgtgctggttcgtcctccatccgcacgcccccaatatcctacatcagcgcacgtatctttcaccgatatctgccccattccatctaacatggaaacccaaatccccaccacaatcagcgttcatcgtcgattcctacatccgcgccattccatcgaacatggaaacctcaatgcccacctcaatcagcgttcatcgtcgagtcccaccttccagtgcacactcggttccctcgacgctctcaacttctattaaaacacacgaccactgcgagggatgtagacaaatcccccatcaaacttcaacactcgttgtctgttcaacacccattacgatcgcagtgggcttcaacgccttcgccgggcataactatgtaggatctgaacacttgctccttgggctacttcgtgagggtgaaggaactgatgttcgatatgatgttcaggtcataagaatggttggggaaagcacagaagctgttggggctggagttggtggaggaagcagtggccagaagatgcccacacttgaagaatacggtactaatttgacaaaattagcagaagagtcgtttggtagacaagatcagattgagcgtgttactcagattttgggcaggcggacaaagaaacaacccctgcctaattggagagcctggtgttggaaaagactgctattgctgaggggcttgctcagcgtattgccaatggggatgttcctgaaacaatttgaaggaaagaaggttattactcttgacatggggctccttgttgctggaactaaataccgaggagagtttgaagagagactaaagaaacttatggaggaaattaagcaaaatgaagacattattctctttattgatgaagtgcacacactgattggagcaggtgcagcagaaggtgcgattgatgctgctaatattttgaagccagctcttgctagaggtgaacttcagtgcattggtgccacaacactggatgagtataggaagcatatagagaaagatcctgccttggaaagaaggtttcaaccagttaaggttccagagcctactgtggatgaaacaatacagatcttaagaggacttcgtgagagatatgaacttcatcacaaactgagatacacagatgatgctttaattgctgctgcacagctgtcttatcagtatatcagcgatcgtttcctgcctgacaaagccattgacttgattgatgaagctggatctcgtgttaggctgaggcatgcgcagctccctgatgaagccaaagagctggacaaagagctgcggcagataaccaagcagaaaaatgaggctgtacgtggccaagatttcgagaaggctggcgaattaagggaccgagaaatggagcttaaggctcaaattacagccattattgacaagagcaaggaaatgattaaagcagagactgaatctggtgaagtcggtccgcttgttactgaggcagacattcaacatattgtctcctcttggactggaattcctgtggagaaagtgtcatcggatgagtctgaccgcctcctaaagatggaagagacgctgcatacacgtatcattggacaggatgaggctgtcaaagctattagccgtgctatccgccgtgctcgtgttggcctcaagaatccaaataggccaattgccagcttcatattctctggaccgactggagttggcaaatcagagcttgcaaaggccctggcggcctactactttggctcggaggaggctatgatcaggcttgacatgagtgagttcatggagcggcatactgtctccaaactcattggatcacctccaggttatgttgggtacactgagggaggccaactaactgaagcagtccgtcgccgcccgtacacagttgttctctttgatgagattgagaaggcacatccagatgttttcaacatgatgcttcagatcttagaagatgggcggttaactgatagcaaggggcgcactgttgatttcaagaacacactattgatcatgacatctaatgtcgggagcagtgtcattgagaagggaggtcgcaagattgggttcgaccttgattatgatgagaaagacacaagctataacaggatcaagagccttgtgactgaggagttgaagcagtacttccggccagagttcttgaacagattggatgagatgattgtattccggcagctgactaaattggaggtgaaagagattgcagacattatgctgaaagaagtgtttgacaggctgaaggccaaggacattaatctccaggtgacggagaagttccgagatagagttgttgacgaaggttataacccgagctatggtgccagacctttgcggcgtgctatcatgaggcttctggaggatagtctggcagagaagatgctggctggtgaggtgaaagaaggtgactctgccatcgttgatgtggattcagatggcaaggtaatagtcctgaatggtggtagcggtgttgctgagccactggaacctgctctcagtacctaaccgaggttaaaatctttgggccgaaatggccttctttacaagtcagctgggctcttcgtgatggtaaagtagactgttattacttggccgctccattagttgctttatctttcattgatttttttttgttggaagtgaggcagtagggtcactatggaaacgaatagacggagaggcattagccgaaatgaatgtttttcagtttgatgcacttgtattattaggccttgctagcaacaaggtgcagatgcctctccgtttgctgttgtactttagtgtaacttaccttccgaatgtattattaggcgttgctagcaacaagatacggaggttatacatttgattttcagtaaaaaggtagactctttgttgcgccgcagc

SEQ ID NO: 103079 - DNA, 1832 bp, Zea Mays
accgccctgtgcctgcagctgcaccctgcagcgctcactcgctcactgactcactcccctcccctggcctcctcctcctcctcctctctctctctccactatctcccacagccgaaccaacatgcaggggcgcagcagggacgccgccaccattgctgcagcggtggcgtgcgcagctgtgctgctcctcggcgacgcctggagcgtctcggcgcaggcggcggcggaggaggacaagataagcgccctgccggggcagccgccggtgggcttcgcacagtactccggttacatcccggtggacgccgcggggaagcgctccctcttctactacttcgccgaggcggaggcggatccggcggccaagccgctcgtgctctggctcaatggagggcctgggtgctcatccgtgggagtgggggcgttctcagagaatgggccgttcaggcctagcggcaatgcgctaacgaggaacgagtacagctggaacaaagaggccaatatgctgtatctggagagccctgcaggggttggcttttcatactccactgatcctgccttctatgagggtgttggtgacagcatgacagccagagacaacttgaagttcttgcaaggctggttcgccaggttcccgcagtacaagggcagggacctgtatatcacaggagagagctacgctggccactacgttccacagttagcccagcgcatggttgagttcaacaagaaggagaagctattcaacctgaaaggcattgctcttggcaaccctgtgctggagttctccaccgacttcaactcgcgggcggagttcttctggtcgcacggcctgatatcggactccacctacaacatcttcacgacggtgtgcaactactcgcggtacgtgagcgagtactaccgcggctccctgagcacggcctgcgacagggtgatgagccaggtggcgagggagacgagcaggttcgtcgacaagtacgacgtcaccctggacgtctgcatctcgtcggtgctcatgcagtcccaggtcctcgtccctcagcaagggagcagggagctggacgtgtgcgtggaggacgagacgatgcggtacctgaaccggaaggacgtgcagcaggccatgcacgcgcgcctcgacggcgtgcagaggtggacggtctgcagcagcagcgttctggagtacaagcagctggacctccagatcccgaccgtgaacaccgtgggcgcgctcgtgaaggcgggcatccccgcgctggtgtacagcggcgaccaggactcggtgatcccgctgacgggcagcaggacgctggtggggcggctggcggccaggctccggctcaacgccacggcgccgtaccgggcctggttccaggggaagcaggtgggcgggtggacgcaggtgttcggcggcggcgccctgtccttcgccacggtgcgcggcgcgtcccacgaggcgcccttctcgcagcccgagcgctcgctcggcctcttcagggcgttcctcgccggacagcagttgccggaatcgttccagtgacgacggaacgttcctcttcctcgtctagtgtatgttcattgtaagcgtgtacgtgcagctcaccgtatgtcgtcatcatccggccgctcgacactggcaaaacaacccaaatgggttcttgttcttctccaggtgtaatcaggacgaaaataatatcattgggagggatgagattgtgtgtcgtcggatataccgcggacggctttcaatgttgtaggcttagtacaactgtaatatgcacatgctggttcaaatttggcatgtgaggcgaagaacctggagatttggaacc

SEQ ID NO: 103080 - DNA, 1912 bp, Zea Mays
accgccctgtgcctgcagctgcaccctgcagcgctcactcgctcactgactcactcccctcccctggcctcctcctcctcctcctctctctctctccactatctcccacagccgaaccaacatgcaggggcgcagcagggacgccgccaccattgctgcagcggtggcgtgcgcagctgtgctgctcctcggcgacgcctggagcgtctcggcgcaggcggcggcggaggaggacaagataagcgccctgccggggcagccgccggtgggcttcgcacagtactccggttacatcccggtggacgccgcggggaagcgctccctcttctactacttcgccgaggcggaggcggatccggcggccaagccgctcgtgctctggctcaatggagggcctgggtgctcatccgtgggagtgggggcgttctcagagaatgggccgttcaggcctagcggcaatgcgctaacgaggaacgagtacagctggaacaaagaggccaatatgctgtatctggagagccctgcaggggttggcttttcatactccactgatcctgccttctatgagggtgttggtgacagcatgacaggtgaatcacagattatttctttctttcttttccacacttgcagacccatataattcgtctttgggtgttttggatttctgaagccagagacaacttgaagttcttgcaaggctggttcgccaggttcccgcagtacaagggcagggacctgtatatcacaggagagagctacgctggccactacgttccacagttagcccagcgcatggttgagttcaacaagaaggagaagctattcaacctgaaaggcattgctcttggcaaccctgtgctggagttctccaccgacttcaactcgcgggcggagttcttctggtcgcacggcctgatatcggactccacctacaacatcttcacgacggtgtgcaactactcgcggtacgtgagcgagtactaccgcggctccctgagcacggcctgcgacagggtgatgagccaggtggcgagggagacgagcaggttcgtcgacaagtacgacgtcaccctggacgtctgcatctcgtcggtgctcatgcagtcccaggtcctcgtccctcagcaagggagcagggagctggacgtgtgcgtggaggacgagacgatgcggtacctgaaccggaaggacgtgcagcaggccatgcacgcgcgcctcgacggcgtgcagaggtggacggtctgcagcagcgttctggagtacaagcagctggacctccagatcccgaccgtgaacaccgtgggcgcgctcgtgaaggcgggcatccccgcgctggtgtacagcggcgaccaggactcggtgatcccgctgacgggcagcaggacgctggtggggcggctggcggccaggctccggctcaacgccacggcgccgtaccgggcctggttccaggggaagcaggtgggcgggtggacgcaggtgttcggcggcggcgccctgtccttcgccacggtgcgcggcgcgtcccacgaggcgcccttctcgcagcccgagcgctcgctcggcctcttcagggcgttcctcgccggacagcagttgccggaatcgttccagtgacgacggaacgttcctcttcctcgtctagtgtatgttcattgtaagcgtgtacgtgcagctcaccgtatgtcgtcatcatccggccgctcgacactggcaaaacaacccaaatgggttcttgttcttctccaggtgtaatcaggacgaaaataatatcattgggagggatgagattgtgtgtcgtcggatataccgcggacggctttcaatgttgtaggcttagtacaactgtaatatgcacatgctggttcaaatttggcatgtgaggcgaagaacctggagatttggaacc

SEQ ID NO: 103081 - DNA, 1841 bp, Zea Mays
accgccctgtgcctgcagctgcaccctgcagcgctcactcgctcactgactcactcccctcccctggcctcctcctcctcctcctctctctctctccactatctcccacagccgaaccaacatgcaggggcgcagcagggacgccgccaccattgctgcagcggtggcgtgcgcagctgtgctgctcctcggcgacgcctggagcgtctcggcgcaggcggcggcggaggaggacaagataagcgccctgccggggcagccgccggtgggcttcgcacagtactccggttacatcccggtggacgccgcggggaagcgctccctcttctactacttcgccgaggcggaggcggatccggcggccaagccgctcgtgctctggctcaatggagggcctgggtgctcatccgtgggagtgggggcgttctcagagaatgggccgttcaggcctagcggcaatgcgctaacgaggaacgagtacagctggaacaaagaggccaatatgctgtatctggagagccctgcaggggttggcttttcatactccactgatcctgccttctatgagggtgttggtgacagcatgacagccagagacaacttgaagttcttgcaaggctggttcgccaggttcccgcagtacaagggcagggacctgtatatcacaggagagagctacgctggccactacgttccacagttagcccagcgcatggttgagttcaacaagaaggagaagctattcaacctgaaaggcattgctcttggcaaccctgtgctggagttctccaccgacttcaactcgcgggcggagttcttctggtcgcacggcctgatatcggactccacctacaacatcttcacgacggtgtgcaactactcgcggtacgtgagcgagtactaccgcggctccctgagcacggcctgcgacagggtgatgagccaggtggcgagggagacgagcaggttcgtcgacaagtacgacgtcaccctggacgtctgcatctcgtcggtgctcatgcagtcccaggtcctcgtccctcagcaagggagcagggagctggacgtgtgcgtggaggacgagacgatgcggtacctgaaccggaaggacgtgcagcaggccatgcacgcgcgcctcgacggcgtgcagaggtggacggtctgcagcagcgttctggagtacaagcagctggacctccagatcccgaccgtgaacaccgtgggcgcgctcgtgaaggcgggcatccccgcgctggtgtacagcggcgaccaggactcggtgatcccgctgacgggcagcaggacgctggtggggcggctggcggccaggctccggctcaacgccacggcgccgtaccgggcctggttccaggggaagcaggtgggcgggtggacgcaggtgttcggcggcggcgccctgtccttcgccacggtgcgcggcgcgtcccacgaggcgcccttctcgcagcccgagcgctcgctcggcctcttcagggcgttcctcgccggacagcagttgccggaatcgttccagtgacgacggaacgttcctcttcctcgtctagtgtatgttcattgtaagcgtgtacgtgcagctcaccgtatgtcgtcatcatccggccgctcgacactggcaaaacaacccaaatgggttcttgttcttctccaggtgtaatcaggacgaaaataatatcattgggagggatgagattgtgtgtcgtcggatataccgcggacggctttcaatgttgtaggcttagtacaactgtaatatgcacatgctggttcaaatttggcatgtgaggcgaagaacctggagatttggaaccagaaatcgatcg

SEQ ID NO: 103082 - DNA, 1844 bp, Zea Mays
cagctgcaccctgcagcgctcactcgctcactgactcactcccctcccctggcctcctcctcctcctcctctctctctctccactatctcccacagccgaaccaacatgcaggggcgcagcagggacgccgccaccattgctgcagcggtggcgtgcgcagctgtgctgctcctcggcgacgcctggagcgtctcggcgcaggcggcggcggaggaggacaagataagcgccctgccggggcagccgccggtgggcttcgcacagtactccggttacatcccggtggacgccgcggggaagcgctccctcttctactacttcgccgaggcggaggcggatccggcggccaagccgctcgtgctctggctcaatggagggcctgggtgctcatccgtgggagtgggggcgttctcagagaatgggccgttcaggcctagcggcaatgcgctaacgaggaacgagtacagctggaacaaagaggccaatatgctgtatctggagagccctgcaggggttggcttttcatactccactgatcctgccttctatgagggtgttggtgacagcatgacaggtgaatcacagattatttctttctttcttttccacacttgcagacccatataattcgtctttgggtgttttggatttctgaagccagagacaacttgaagttcttgcaaggctggttcgccaggttcccgcagtacaagggcagggacctgtatatcacaggagagagctacgctggccactacgttccacagttagcccagcgcatggttgagttcaacaagaaggagaagctattcaacctgaaaggcattgctcttggcaaccctgtgctggagttctccaccgacttcaactcgcgggcggagttcttctggtcgcacggcctgatatcggactccacctacaacatcttcacgacggtgtgcaactactcgcggtacgtgagcgagtactaccgcggctccctgagcacggcctgcgacagggtgatgagccaggtggcgagggagacgagcaggttcgtcgacaagtacgacgtcaccctggacgtctgcatctcgtcggtgctcatgcagtcccagcaagggagcagggagctggacgtgtgcgtggaggacgagacgatgcggtacctgaaccggaaggacgtgcagcaggccatgcacgcgcgcctcgacggcgtgcagaggtggacggtctgcagcagcgttctggagtacaagcagctggacctccagatcccgaccgtgaacaccgtgggcgcgctcgtgaaggcgggcatccccgcgctggtgtacagcggcgaccaggactcggtgatcccgctgacgggcagcaggacgctggtggggcggctggcggccaggctccggctcaacgccacggcgccgtaccgggcctggttccaggggaagcaggtgggcgggtggacgcaggtgttcggcggcggcgccctgtccttcgccacggtgcgcggcgcgtcccacgaggcgcccttctcgcagcccgagcgctcgctcggcctcttcagggcgttcctcgccggacagcagttgccggaatcgttccagtgacgacggaacgttcctcttcctcgtctagtgtatgttcattgtaagcgtgtacgtgcagctcaccgtatgtcgtcatcatccggccgctcgacactggcaaaacaacccaaatgggttcttgttcttctccaggtgtaatcaggacgaaaataatatcattgggagggatgagattgtgtgtcgtcggatataccgcggacggctttcaatgttgtaggcttagtacaactgtaatatgcacatgctggttcaaa

SEQ ID NO: 103083 - DNA, 1401 bp, Zea Mays
atgcaggggcgcagcagggacgccgccaccattgctgcagcggtggcgtgcgcagctgtgctgctcctcggcgacgcctggagcgtctcggcgcaggcggcggcggaggaggacaagataagcgccctgccggggcagccgccggtgggcttcgcacagtactccggttacatcccggtggacgccgcggggaagcgctccctcttctactacttcgccgaggcggaggcggatccggcggccaagccgctcgtgctctggctcaatggagggcctgggtgctcatccgtgggagtgggggcgttctcagagaatgggccgttcaggcctagcggcaatgcgctaacgaggaacgagtacagctggaacaaagaggccaatatgctgtatctggagagccctgcaggggttggcttttcatactccactgatcctgccttctatgagggtgttggtgacagcatgacagccagagacaacttgaagttcttgcaaggctggttcgccaggttcccgcagtacaagggcagggacctgtatatcacaggagagagctacgctggccactacgttccacagttagcccagcgcatggttgagttcaacaagaaggagaagctattcaacctgaaaggcattgctcttggcaaccctgtgctggagttctccaccgacttcaactcgcgggcggagttcttctggtcgcacggcctgatatcggactccacctacaacatcttcacgacggtgtgcaactactcgcggtacgtgagcgagtactaccgcggctccctgagcacggcctgcgacagggtgatgagccaggtggcgagggagacgagcaggttcgtcgacaagtacgacgtcaccctggacgtctgcatctcgtcggtgctcatgcagtcccagcaagggagcagggagctggacgtgtgcgtggaggacgagacgatgcggtacctgaaccggaaggacgtgcagcaggccatgcacgcgcgcctcgacggcgtgcagaggtggacggtctgcagcagcgttctggagtacaagcagctggacctccagatcccgaccgtgaacaccgtgggcgcgctcgtgaaggcgggcatccccgcgctggtgtacagcggcgaccaggactcggtgatcccgctgacgggcagcaggacgctggtggggcggctggcggccaggctccggctcaacgccacggcgccgtaccgggcctggttccaggggaagcaggtgggcgggtggacgcaggtgttcggcggcggcgccctgtccttcgccacggtgcgcggcgcgtcccacgaggcgcccttctcgcagcccgagcgctcgctcggcctcttcagggcgttcctcgccggacagcagttgccggaatcgttccagtga

SEQ ID NO: 103084 - DNA, 106 bp, Zea Mays
tttttttctatatggtttttaggtgcaatacatagggccaccgacattggcgacgttgacagcagatcccaaaatggagctcgtgatgcatactcactaaataaac

SEQ ID NO: 103085 - DNA, 111 bp, Zea Mays
gttttcagtacgtttccgcttcagaaattaattgggctagcacttgctttattttctcctgctaaaattaggggcaaaagcttttgccgtctttggggtggaggaaaaaaa

SEQ ID NO: 103086 - DNA, 435 bp, Zea Mays
atgaaaaggatccattcctcagtgatggagcagcaagaaatacagagatacagccggtgagagagagagagagagagaggagggaggacactcgaaagccctacttgatgcttcctgcatgccatacggcgaggtagctactaggtagcagctagagatggatgagatgatggagagagctctgttgcatgcatgttctcttgtacacacgctcgctcgccatctgccgatctgcgccattgcactactactagtgcacgggagctagctagggaatggaagaaagccaagcaaaagagaaggacggagcagaaaaaggcttggggacaatgatgagcttgcaggccattttctgagcctaggggtgcataggaaaagaaagaacagaaaggcgtgtccgtgggggctcctgcctaaggctatgcatgctactac

SEQ ID NO: 103087 - DNA, 1882 bp, Zea Mays
cgctgctgcgcttcaccccgctctcgcctcccgccgccgcgccgtcccggtcgcgatggccctgcgctccccggatctgcggtggctcggatcgctcacgaggcccggccgccttgcaccatccccactcgccgcgctcgcctccccacggcgccgccgccgcgcaccgtccccttcgccctcgccctccgactcctccaccccatctaccgcccctacatccgacagtgggccgggagcggaggggatggaggggctggagtggaagaagatcagtgccaagaggttcgggatcaaggagtccatgatcccccccgaggcctggaacgtactacaccgcctccgcagcagaggatatgatgtgtaccttgttggtggttgtgttcgagatctcataatgaaaaagacgccaaaggatttcgacataataacaacagctgatcttaggcaggttataactcaaattaacaatgatgtgatcatgatgtagcggtattactggaatgaaggtctactcaagttttgaggcatcatgtgatggagctattctttcactgaaacgcgtagatattttaagtttgctgtcatagttttgcaaatagcaggtgaaagacactttcttaggatcagctgttatagtaggaaggcgttttcccatatgtcatgtacatgagaacaattccatcgttgaggtgtcaagttttaatacttgtgcaaggggatcaagtggtagccagatttacaattcaaagagccaaaattgtagcaagaatgattttgttcgctggaagaactgccaaaggagggacttcacaattaatgggttaatgtttaacccatattcagaaaagatctatgattacttgggaggcattgaagatattaagaaagctaaggtccgtactgtaattcctgctggcacttcgtttcaggaggactgtgcccgtattctacgtgcaatcagaattgcagctcgtttagggttcagcttccccaaagaaacagcttattatgtgagaacacttgcttgctcagtggcaagacttgataaggcaaggatactcatggagatgaactatatgcttgcttatggttcagctgaagcttctttgaggttgttgtggaggtttggcctccttgaacatttgttgccctttcaggcagcatatttctcttcgactcgttttaagaggaaggataaaggaactaatatgctacttgtcttattttctaagctggataattttcttgcaccgaacaggccatgtcacaatagtctatggataagccttttagcttttcatgaagcattggcacgcaaaccatgtgatcctttgatagtggctacttttgcactagccttttacctgggaggtgatatgtctttggcagtggatatcggaaaatcaatcaaccgacaacatgatactggctttcgggagctcttagaacccaaagtctggactgataagcatttggcaggtgaagtacaaagctttgctgcattgatgaagcaggcattaactgaaatgactgatgagtatcatgtcgcaaatgctatggcaaaaatccctcaagcaccttcctcagatcttgtatttataccactacaagcctacctgaaggttctcaaatttatcgagtgtgttcaatatggcaaaaaggagcgtggccatgaaccaaaacgcgatgggatgatcaattaccataacctgtctaatggtacacatgcagaaataagaaacctctttacactggtggtttttgacacactgtaccctacagacacggaggatgaaaatgactgcagttcttagagagacatcatgattgggatgaattcaatactttgccagacatcaataaatactccatttgtccc

SEQ ID NO: 103088 - DNA, 1728 bp, Zea Mays
cgctgctgcgcttcaccccgctctcgcctcccgccgccgcgccgtcccggtcgcgatggccctgcgctccccggatctgcggtggctcggatcgctcacgaggcccggccgccttgcaccatccccactcgccgcgctcgcctccccacggcgccgccgccgcgcaccgtccccttcgccctcgccctccgactcctccaccccatctaccgcccctacatccgacagtgggccgggagcggaggggatggaggggctggagtggaagaagatcagtgccaagaggttcgggatcaaggagtccatgatcccccccgaggcctggaacgtactacaccgcctccgcagcagaggatatgatgtgtaccttgttggtggttgtgttcgagatctcataatgaaaaagacgccaaaggatttcgacataataacaacagctgatcttaggcaggtgaaagacactttcttaggatcagctgttatagtaggaaggcgttttcccatatgtcatgtacatgagaacaattccatcgttgaggtgtcaagttttaatacttgtgcaaggggatcaagtggtagccagatttacaattcaaagagccaaaattgtagcaagaatgattttgttcgctggaagaactgccaaaggagggacttcacaattaatgggttaatgtttaacccatattcagaaaagatctatgattacttgggaggcattgaagatattaagaaagctaaggtccgtactgtaattcctgctggcacttcgtttcaggaggactgtgcccgtattctacgtgcaatcagaattgcagctcgtttagggttcagcttccccaaagaaacagcttattatgtgagaacacttgcttgctcagtggcaagacttgataaggcaaggatactcatggagatgaactatatgcttgcttatggttcagctgaagcttctttgaggttgttgtggaggtttggcctccttgaacatttgttgccctttcaggcagcatatttctcttcgactcgttttaagaggaaggataaaggaactaatatgctacttgtcttattttctaagctggataattttcttgcaccgaacaggccatgtcacaatagtctatggataagccttttagcttttcatgaagcattggcacgcaaaccatgtgatcctttgatagtggctacttttgcactagccttttacctgggaggtgatatgtctttggcagtggatatcggaaaatcaatcaaccgacaacatgatactggctttcgggagctcttagaacccaaagtctggactgataagcatttggcaggtgaagtacaaagctttgctgcattgatgaagcaggcattaactgaaatgactgatgagtatcatgtcgcaaatgctatggcaaaaatccctcaagcaccttcctcagatcttgtatttataccactacaagcctacctgaaggttctcaaatttatcgagtgtgttcaatatggcaaaaaggagcgtggccatgaaccaaaacgcgatgggatgatcaattaccataacctgtctaatggtacacatgcagaaataagaaacctctttacactggtggtttttgacacactgtaccctacagacacggaggatgaaaatgactgcagttcttagagagacatcatgattgggatgaattcaatactttgccagacatcaataaatactccatttgtccc

SEQ ID NO: 103089 - DNA, 533 bp, Zea Mays
gccataaacactgaattattcaatttgcacttcacaatcaattaatcatggtagcaaaaatcatgcttagaagagtactagcacacgaatcatggcaagaatcatgctttaagggtgctatcacaggccacagagataatgcaaccaacaaccatagtttaactctcacaaatggtgccagtggcggctacctagagtgcaggaatggccaacctaaactctggaatacggtcacgaagaggtggggaaacaattgaggtagtgaaaacaggtaactgctggaagaaacggaaacagaaaccaacagctacacagaatatttctgcagtaccacaatacatctaatgcatgcccaaactctgctatcttcaatgttcaacccggcttgaaccacaagcagatactgtcgaatcttcgtactgtacttgtatcattcctcacagttcatgtctttatgcgcaccacaaacgaacctgtcatcaagaacacgatttagataactgccatgagttcacataaggcaaaaccaaaat

SEQ ID NO: 103090 - DNA, 459 bp, Zea Mays
attcaatttgcacttcacaatcaattaatcatggtagcaaaaatcatgcttagaagagtactagcacacgaatcatggcaagaatcatgctttaagggtgctatcacaggccacagagataatgcaaccaacaaccatagtttaactctcacaaatggtgccagtggcggctacctagagtgcaggaatggccaacctaaactctggaatacggtcacgaagaggtggggaaacaattgaggtagtgaaaacaggtaactgctggaagaaacggaaacagaaaccaacagctacacagaatatttctgcagtaccacaatacatctaatgcatgcccaaactctgctatcttcaatgttcaacccggcttgaaccacaagcagatactgtcgaatcttcgtactgtacttgtatcattcctcacagttcatgtctttatgcgcaccacaaacgaacctg

SEQ ID NO: 103091 - DNA, 712 bp, Zea Mays
cttcattcgctagacgacacaacaccgcgttcagccgctctagaaccctagctccccgccccgcgagatggccactgccgacggcgagccccagcccgtggccaccgaccccgcccaggtccaggctccggcaccggcaccggcaccctacccttccccggccaagcgcaagcccgaggcggatgtggaagccgacgccaaccttgcgccccctaaagccgcgcgtcccgacgtcgacgaggaggccgccgctgtggccgaggctgccagggccagtgctcgcgcggctgacaagggtaagggcaagatggtagtcgaggaggaggaggaggaggaggaggaggaggaagacgacagcgaggagagcagcgacgacgacgagggcggcggcggcggcagcagcgatgacgacgagctcgttgaagacccgatggccgaggtagacctcagcaacatcctcccctcgcggacccgccgccgcgcccccccgcagcccggggcgtacctcgtcactccggaggaggctgccgcggaggacgacgacgacgacgctgacgtggttcctgaggaggatgagggagcggagggagaggagagcgattaaggctgcctcggcacggactcactaggtaatttctttatcctgcctcttgtgctactcaaacgcatctgtgaaccctgttagctcgtgcgttttgattttggcgttttt

SEQ ID NO: 103092 - DNA, 2392 bp, Zea Mays
atgctttggaagaagcttgtacagtttgggaaggggttttttgagaaaaaagaagaatctacttcaaccgatatgcccttaggcacggccatacataacatagaaatcacacgtggaaggggtgggcaattagctagagcagcaggtgctgtagcgaaactgattgcaaaagagggtaaattggccactttaagattaccatctggggaggtccgtttggtatcccaaaactgcttagcaacagtcggacaagtgggtaatgttggggtgaaccaaaaaagtttgggtagagccggatctaagtgttggctaggtaaacgccccgtagtaagaggggtagttatgaaccctgtggaccacccccatgggggtggtgaagggaaagcccccattggtagaaaaaaacccacaaccccttggggttatcctgcgcttggaagaagaactaggaaaaggaaaaaatatagtgatagttttattcttcgtcgccgtaaggtaagtaaatacgtaactaggaatatggaaaattgcatttttggaatttgcaataatgcgatgggcgaacgacgggaattgaacccgcgcatggtggattcacaatccactgccttgatccacttggctacatccgccccttatccagctaaaggattttctcttttttccattcattattattctatttattctgacctccatacctcgatcgagatagtggacataggatgccactctttaaaatgaaaaaaaggagtaatcagctgtgacacgaaaaaaaacgaatccttttgtagctcgttgggatcctagaggacgaatataggactctagagaaagactcagaggaagaatatgggagcctagagaacaaatataggactcgagagggagagggcgaatatgaaatcctagaggaagaatcagaagaagaatatgggagctctgaagatggctcagagaaggaatatgggactttagaagaagactcagaagaagactcagaggaagactcagtaggacttgggttcaagctttccccagccccttttcatcaatggactcctgacgtctacgaaggagtgtggttcgttcgacaaattcctacctctatctgaggtgtttgggttttgcaaaactccatagacatgcagaagagaaatgctatccccactccgaccaagacagaacttttaccaaaagtttattgtgatctttttgttcaaataacaatgttgggtctttgaaacagttcgaatcatttcgataataatctgtttgatctgttttaccgagaaggtctacggttcgaatccgtatagccctaatatatacgtcttttttccattttaggatggatatcttatgtttcctttagtatagttttcttttccttatttagtacttgtttatagactcgacggtcgattgcgccatagaatagagataaaagcattaccataggctcattcatcgaaacgcaaatcagagagacaggaaaagaaaaaagaattttgatcaaatcaatagaaggaaggatcccttacctgatttgaatttcatcctcctttaaataggatatgctctaagtcttcccatactttcctataatgactgcaacgattttctccattttgcgaattcctattttatttgaagtatattactatcatatacattatctaaatcgatccactttaaataaaatagaaaaaatcgaaagaaaaaaaaaagaaagagtaaataataaaacaggatattctgtttcataattctgaaatagagttctttttttagtattactcctcattaggatgtatatattaattatatgaccaactttctatgggtcacatagacatcccaataagcagtagaagtagaaatgagatggagaaaagaggatcttaaataaaaaggatcccatatttaaatttaggaaaaagagcgtttgcttggtttttattttattaggttactatccatatacgctttttggggtctaaagatgagagcaaatccataaaaaaggagtcggcaaatggagtgagaatgaggtggattctttccaattatatacacaaacaaagttggaactagaaaatggaaggggtgcggtttaacccccaaaaagtaactaattagatgaaattcattctctaacaataaacgaatacggtttatgtatggattccggtaaaataccggtactcgatttcataagagtcgaataggaagttaagatgagggtggtatcatcataaaaatggagtagtatcctaaattatactaatccacgtatgatatgtatgcctttccttatcaaccggaagtagtgcaaaaaaattctatactgcactgctctctttttactgagaaatgcaaaaaaataaaa

SEQ ID NO: 103093 - DNA, 1958 bp, Zea Mays
gagtaggcgagacgttcatgggttagatctggcggtccggcggcgcggatctgagcgaggtttcggtggagagatcgggtggtggtcactatcttcgcctcatttcgagtagatggagcgtctcatggccaaatcgggcatgtatggcggattctgctactgtctgaagcagcgttgcctgcagatctgaaagtcacttggtctccttgcccagttgaccttactgaatgacattgctttccgcggtttgactgtcattacatccttttcggtgtctgatcaaaaatttttagcacgagatgacgtgcttctagttgttgttgatatcttgtcctgagttgagtaaacctgaagctggaaaggagcggatcacattcgtgctcttgctcttgttgacttctaggtctatcttagatacctagaggctggaaggggtcagatccagttcctgtggtcctagtaacaaggtcctcttgggggaaggcgccatgacctacttccccgaggaggtggtagagcacatcttcagcttcttgccatcgcacagcgaccggaacacggtctcccttgtgtgcaaggtgtggtatgaggtcgagaggctgagccgacgagcggtgttcgtagggaactgctacgctgtgcgccctgagcgtgtggtgctgcggttccccaatataaaggccctcacggtgaaggggaagcctcactttgcagacttcaaccttgtgccgcctgattggggtggctacgcagggccatggattgatgcagcagcaaggagctgtgttggtctcgaggagttgcgcatgaagcggatggttgtgtttgatgagaaccttgagctgctagctcggtcattcctgagattcaaagtccttgtccttatcagctgcgaggggtttagcaccgatggtctagctgctattgcgagtcactgcaagctcctgagggagttagatttgcaggaaaatgatgtggaggaccgtgggcccagatggctttccttccctgattcctgcacttcgctggtctccttgaatttcgcttgcatcaaaggggaggtgaattctggtgcgttggagagacttgttgctaggtctccaaatctacgcagtttgaggttgaatcgttctgtttcagtagacacactctcaaagatactattgcgagccccaaatttggaagacttggggacaggtaatctgacagatgagttccaagctgagtcctattccaggcttactagtgctctggagaaatgcaaaaagctgagaagtctgtctggattttgggatgcttctcctatttgtgttccgtatatctatcccctctgtcatcaactaacaggcctaaacttgagttatactcccacactggattattctgatctagctaaaatggtcagccgctgtgtgaaactccagcgtctctgggtactggattgcatttcagataagggtttgcaagtggtggcctccagttgcaaggacctacaagaactcagggtgtttccatcagaattttatgttcctggtgcttctgcagtgacagaggagggacttgttgcaatatcgtcaggctgcccaaaactgacctctttgctgtatttctgtcaccagatgaccaatgaagcgctaattactgtagctaataactgcccaaatttcatcagatttagactctgtatccttgagccaaagaagccagatgccatgacaggccagccgttagatgaaggttttggtgcgattgtccgtgaatgcaaagggctaagacgtctgtcaatatcaggtcttctcacagacaaggttttcatgtatattggaaaacatgcaaaatacctcgaaatgctttctatagcatttgctggagatagtgataaggggatgatggacgtgatgaacgggtgcaagaatctgaggaagcttgagatcagagacagtccatttggcgatgtt

SEQ ID NO: 103094 - DNA, 2811 bp, Zea Mays
gagtaggcgagacgttcatgggttagatctggcggtccggcggcgcggatctgagcgaggtttcggtggagagatcgggtggtggtcactatcttcgcctcatttcgagtagatggagcgtctcatggccaaatcgggcatgtatggcggattctgctactgtctgaagcagcgttgcctgcagatctgaaagtcacttggtctccttgcccagttgaccttactgaatgacattgctttccgcggtttgactgtcattacatccttttcggtgtctgatcaaaaatttttagcacgagatgacgtgcttctagttgttgttgatatcttgtcctgagttgagtaaacctgaagctggaaaggagcggatcacattcgtgctcttgctcttgttgacttctaggtctatcttagatacctagaggctggaaggggtcagatccagttcctgtggtcctagtaacaaggtcctcttgggggaaggcgccatgacctacttccccgaggaggtggtagagcacatcttcagcttcttgccatcgcacagcgaccggaacacggtctcccttgtgtgcaaggtgtggtatgaggtcgagaggctgagccgacgagcggtgttcgtagggaactgctacgctgtgcgccctgagcgtgtggtgctgcggttccccaatataaaggccctcacggtgaaggggaagcctcactttgcagacttcaaccttgtgccgcctgattggggtggctacgcagggccatggattgatgcagcagcaaggagctgtgttggtctcgaggagttgcgcatgaagcggatggttgtgtttgatgagaaccttgagctgctagctcggtcattcctgagattcaaagtccttgtccttatcagctgcgaggggtttagcaccgatggtctagctgctattgcgagtcactgcaagctcctgagggagttagatttgcaggaaaatgatgtggaggaccgtgggcccagatggctttccttccctgattcctgcacttcgctggtctccttgaatttcgcttgcatcaaaggggaggtgaattctggtgcgttggagagacttgttgctaggtctccaaatctacgcagtttgaggttgaatcgttctgtttcagtagacacactctcaaagatactattgcgagccccaaatttggaagacttggggacaggtaatctgacagatgagttccaagctgagtcctattccaggcttactagtgctctggagaaatgcaaaaagctgagaagtctgtctggattttgggatgcttctcctatttgtgttccgtatatctatcccctctgtcatcaactaacaggcctaaacttgagttatactcccacactggattattctgatctagctaaaatggtcagccgctgtgtgaaactccagcgtctctgggtgagttcccttctctttgtgttggcttgatatttctgtacgttgagagaaccacataatgaatttgatcctccacaggtactggattgcatttcagataagggtttgcaagtggtggcctccagttgcaaggacctacaagaactcagggtgtttccatcagaattttatgttcctggtgcttctgcagtgacagaggagggacttgttgcaatatcgtcaggctgcccaaaactgacctctttgctgtatttctgtcaccagatgaccaatgaagcgctaattactgtagctaataactgcccaaatttcatcagatttagactctgtatccttgagccaaagaagccagatgccatgacaggccagccgttagatgaaggttttggtgcgattgtccgtgaatgcaaagggctaagacgtctgtcaatatcaggtcttctcacagacaaggttttcatgtatattggaaaacatgcaaaatacctcgaaatgctttctatagcatttgctggagatagtgataaggggatgatggacgtgatgaacgggtgcaagaatctgaggaagcttgagatcagagacagtccatttggcgatgttgcactcttgggaaatgttgccaagtatgagacaatgcgatccctttggatgtcttcatgcaatgtcacattaaaggggtgccaggtccttgcatcgaagatgccgatgctcaatgtggagatcatgaatgaactagatggaagtagtgaaatggagaaccatggagacctctctaaagtggacaagttatatgtttaccgcacaactgctggagcgagggatgatgcaccaaattttgttaagatcctacagagctagccgcgactacccttatatcttcccaccttgagagatggtcggtggaatccggcatgcctggggccagggcaacagtggtaagttcttgaatcgtctccccttttgcagggtcaggaaaagccacactggcctgcgcccttatcgtggagcaacacgaccgggaatccatcatcatcctctgtaccaccgcccccctccctttcagtgtctggtcatatggccacccaggcccccctttattacctgtgaattctcccactcgagaggaggggaccgaacggataactttttctagccatgtaacatctctagtgtacttgtctccatttgcttttgacattggcacggtggattgtgttgctggcgtcgctgttgtagtgttttgtttcgcaaacctgagaattatcgggacattccggggacgacgctctgtttcttgctcctgtgaatgcatggactgcatgtaatatttgatggccttgcaggatttatcgtacacacttttcgcccttgcata

SEQ ID NO: 103095 - DNA, 624 bp, Zea Mays
gagtacccagagcagccgaccctggctagctctagcttgtgtagttgagttcttgtatttgcttgaatctgcaaaaaaaaactagagacaaaaggaggacgggaaacggagagaaggatcatggactacagcatgcagggatccaaggactcgtactcgccgcaagttcacaaccacttgtacccggactctcagccagggctgtatcctcctccgccgcaggggggctacggctacggctaccagtaccagggctaccttggcgaatcggcgaaccctccttattactactacactggcagctggcccgagcagcccccagctccgtccgacggcgccccctttcgctaccgctacctgcaggaccaggacgatgccgactgcatcaccttcctcagaggatgtcttgctggtctgtgctgctgctgcttactggagcgatgctgcatctaaggaggatggcgtgcagtgctgctgcctggagcacgcatgtatgcagcagtgtggtggtgacataataataataataataagctgctgcggcagcagagatgacggttcctgcgttgacggcgccatccatgtaaaaccaaggagcagcttgccatcatcatgtctctcgtc

SEQ ID NO: 103096 - DNA, 1010 bp, Zea Mays
taggcggtccacaggcaaatcccctatctccaacctgtgaacggtgaaccccgatcgaatgacgccgacggcgaacctcctcctcccggctcccccattcgtccccatctctgatgtgcgccgcctccagctccccccgcgcgtccgccaccagcctcgtccctgctggaagggcgtggagtggggctccatacagacccggatggtctcttctttcgttgctgtagggagcagaacacgccgcagaaacgttatatgtgcttccctgtttggagttggagctcccgaagcactggtcattggagtagtcgccttgttggtattcggccccaagggtctagcagaggtagccaggaatttggggaagactttgcgtgctttccaaccaaccattagagagctacagatgtcaagcctgaaccagcaccttatactagcgaggaactaatgaaagtaactgaagaacaaattgctgcatcagctgctgctgcttggaatccacaacagcctgccacgtcgcaacagcaagaagaagcgcccactactccaagaagtgaggacgctcctacatcaggaggaagcgatggtcctgctgctccagctcgtgctgtgagtgactctgatccaaaccaagtgaataagtcacagaaggcggaaggagagagatgactccgcttgacagtttgacactggacggaaagagcacagtgcataggtcaggacgagcagtcatgttttttttttttcattttgtagacgatgaaatagttgtatgagagcgttttcgatggttaggcttgttttgtagcagcatgggccaggtagatgaaaaaaaggctatgcgtatattatttcccacgttgtgtggccgcaattgtttttcaatcgtaagagtaacttcaagacactctctgtattctttttaattgctaggaatagatttttttgtaaaaaattttcttcaaaagcttatttaaatgattatctgaatatatctatttttttatttc

SEQ ID NO: 103097 - DNA, 1131 bp, Zea Mays
taggcggtccacaggcaaatcccctatctccaacctgtgaacggtgaaccccgatcgaatgacgccgacggcgaacctcctcctcccggctcccccattcgtccccatctctgatgtgcgccgcctccagctccccccgcgcgtccgccaccagcctcgtccctgctggaagggcgtggagtggggctccatacagacccggatggtctcttctttcgttgctgtagggagcagaacacgccgcagaaacgttatatgtgcttccctgtttggagttggagctcccgaagcactggtcattggagtagtcgccttgttggtattcggccccaagggtctagcagaggtagccaggaatttggggaagactttgcgtgctttccaaccaaccattagagagctacaggatgtatcaagggagttcaggagcactcttgaacgagaaatcggaattgatgaggtttcccaatcaacgaactataggcccacaaccatgaataacaaccaacaacctgctgccgacccaaatgtcaagcctgaaccagcaccttatactagcgaggaactaatgaaagtaactgaagaacaaattgctgcatcagctgctgctgcttggaatccacaacagcctgccacgtcgcaacagcaagaagaagcgcccactactccaagaagtgaggacgctcctacatcaggaggaagcgatggtcctgctgctccagctcgtgctgtgagtgactctgatccaaaccaagtgaataagtcacagaaggcggaaggagagagatgactccgcttgacagtttgacactggacggaaagagcacagtgcataggtcaggacgagcagtcatgttttttttttttcattttgtagacgatgaaatagttgtatgagagcgttttcgatggttaggcttgttttgtagcagcatgggccaggtagatgaaaaaaaggctatgcgtatattatttcccacgttgtgtggccgcaattgtttttcaatcgtaagagtaacttcaagacactctctgtattctttttaattgctaggaatagatttttttgtaaaaaattttcttcaaaagcttatttaaatgattatctgaatatatctatttttttatttc

SEQ ID NO: 103098 - DNA, 956 bp, Zea Mays
atggcgcccggtcctccctccagctcagccaggcggggcatcgctccctgccgcttctccctccctggcgctcctccctgccgcacccggatcttctttctccctgccgcgctctctctccagtgcacatacccttctctctctccatcagctcgctctcggtgcttctctccctcgccatggctccctccgagctcgcccccgacctatgctcctccctccgtcgcacccagtctccagctcagccgcccagcttcctgtgcacgccttgcttcctgtgcgtctagccggagcttcccctgttcagctctctgctatcgagctcctccggctgtgcttccctgctcagcgcgtttctccctgctctctccctcctctggccatggatgcttgggagcagtagtagccccagctcagcaacacctataagctccctggaaccagtgtctcgtcgagccccgccgcgcgtcctatttcctgctcgcccatggaagctgcgcccagcctttgtccctgtcgcgccgatccgccctcgccaaggtcacctgccgtcgcccagctcggcacctttccctgctacaaagttttccatctgtccgtatgtcgcctgctgcttagatcccagccaggttgaccttgtcatggtgctggaactctcgttgatccggcatgtcgtctacttggcagctccgactagccgcgtcgtcacgctgtttactccttcgacatcgtctgatgcacacctccggagctcaccggtgtcgtattttagtcagcatcatatcctgcgcgacgcactccagtgttgtttgtcacgttttgcgtgtccttaccacctccaactttcaacgttcactgtcgtccgctacgctcaaccatgcaacaaccacgccatccacgacatgtgttcgcgcaaaaaatccgagaagattaggcgtagaaggaaacaaatcagt

SEQ ID NO: 103099 - DNA, 1269 bp, Zea Mays
cccgtgcacgcacttcatcttctccatctcctccccatcttcctctagcgccggccattagggaggttcgagctcgcccctccgcgccctccctgctcgctgctctatagctcgccatcacccctccctatgcctcgtcgagccgtgtgtcctcgactttgacctcgcctttagccgcacacacacctgaaccgtgcccctgcttttctctctgctcctcaagccatggtgcccggtcctccctccagctcggccaggcggggcatcgctccctgccgcttctccctccctggcgctcctccctgtcacgcccggatcttctttctccctgccgcgctctctctccagcgcacagatccttctctctctccctcagctggctcccgacgcttctctccatcgccatggctccctccgagctcgccccgacctctgctcctccctccgtcgcgcccagtctccagctcggccgcccagcttcctgtgcgcgccttgcttcctgtgcgcaccttgcttcccctgttcagctctctgctgtcgagctcctccggctatgcttccctgctcagcgcatttctccctgctctctccctcctctggccatggattcttgggagcagaagtagccccagctcggcaacacctataagctccctagaaccagcgtctcgtcgagccccgccgcatgtcctatttcctgctcgcccatggaagctgcgcccagcctttgtccccatcgcgccgatccgcgctcgccaaggtcacctgccgttgcccagctcgacgcctttccctgctacaaagttcgccgtctgtccgtacgtcgcctgctgcttagatcccagccaggttgaccttgtcatggtgctggaactctcgtggatccggcatgtcgtctacttggcagctccggctagtcgcatcgtcacgctgtttactccttcgacgccatctgatgcacacctccggagctcgcccgtgtcgtattttagtcaacatcatatcctgcgcgacgcgctccggtgtcgtttgtcgcgttttgcgcgtccttaccacctccaactttcaatgttcactgtcgtccactacgctcaaccatgcgacaaccacgccatccatggcatgtgttcacgccaaaaattcgagaagattaggtgtagaaggaaacaaatcagtatgtagtcggaaaattcttgatgtgaatggagaaggcagtgaagtccgcgtggtgctcaccacgtgctcgacgtaatggcggaattggaactc

SEQ ID NO: 103100 - DNA, 84 bp, Zea Mays
ttttttttttttttgctgagaacgtgcctgatccacctatgagatttcgaaaaatgaacttgttaaacaaaactgttcactcct

SEQ ID NO: 103101 - DNA, 529 bp, Zea Mays
acaacacaaccaagagccaacagagcaacgcccaggcacacacgacacgaaccaggcaaccagctgccgagggaggaaccctagcggaacactgtgcaggtgacggcggcgcgctaccggtgacgggggatacggcggcatcgtccccctcggcccctcctccatccccggcgcggcggcgccagcagccggcctgcaggttttgcaggtttcacacttcttatcatggatgataagaacaaagtcaagaaggaaatagatggcccccttggacccccacctcgcaaggggggacttaaattcgcaccaaaagtacctcagaagaaacctgccaaggttgtcccaaagaagtatgtgattcggtctacatgttatttctacttacctggatgtcttccatttgagatttgcagaattggcaattctgatgtgaagtgagattttactgtaacttgacagggaaccggttgaagagagaaaggaggatgctttggataaggagttattgatgaaacttaagatgtcgcaa

SEQ ID NO: 103102 - DNA, 1294 bp, Zea Mays
acaacacaaccaagagccaacagagcaacgcccaggcacacacgacacgaaccaggcaaccagctgccgagggaggaaccctagcggaacactgtgcaggtgacggcggcgcgctaccggtgacgggggatacggcggcatcgtccccctcggcccctcctccatccccggcgcggcggcgccagcagccggcctgcaggttttgcaggtttcacacttcttatcatggatgataagaacaaagtcaagaaggaaatagatggcccccttggacccccacctcgcaaggggggacttaaattcgcaccaaaagtacctcagaagaaacctgccaaggttgtcccaaagaaggaaccggttgaagagagaaaggaggatgctttggataaggagttattgatgaaacttaagatgtcgcaaaacaagtatccctcaagaattaagtccgacgaaaagccaagaagtggtacacaggttgcatttggacaaggaaactcttattatgcaagaaattttcccatgcccaaaaaggattcttcagcaggtggagcttcgaagttaccaaaagaatatgcagaaccatgggactatagccatgattatcctgttactctcccactaaggaagccctactctggaaatcctgaaattctggatgaggaagaatttggagaatcttctgccagcaggacccaagatgatgaattatctgcagcagagcagcttggattaatggatatgtcgtcggaatcacagttcctcttcttccagttgccatcctctcttcctttaccgaggcagccacaatcaggtgctgaccctaacgaagtccgcgatgagaaacgtgaggacatgaggccatcatcgcacaatggctcgaaactcaaagaggttcctgaaggctatatggggaaaatgctcgtatataagagtggtaaagtgaagatgaagataggagacactctctttgatgtttcatttggctcgaattgcatgttttcccaggaggttgcagcaatcaacatcagagaaaaacattgctgtacggtgggagagatcagcaagcgtgctatcatcaccccagatattaactacatgttgggttctgttgacaagatggaagaatagtccattggtttctttcgcgcaaaccatatagaccatattatgccattacaagatagttttgctttcttatagagaacgacctgtgataccctctcagacttcttcaagaaaagatgcctcaaacaaaggaatgtgcctaatttgacactgccgttagtttccacag

SEQ ID NO: 103103 - DNA, 112 bp, Zea Mays
tattttaattttattttgtaccacacatatttatttaatctatctaacaattcggctaacaagaataataaatcggctcgccatattaaaatcctacttgaacccccttaaa

SEQ ID NO: 103104 - DNA, 2475 bp, Zea Mays
catctcctcacctcctcgacggcgcgactccctcgacctcgccctcctccccccgccttgacgctgtcgcctggtcctccgcggtcggctgtctcgattcgatcgtaatacatcgacaataggattgaatcacttcttcaagatttggagttgaaggtgataatcacattgaatacaatctagatgataagttttctgctgtactggttaccttgaagatgctcaaagagtcattatcaccagtgctggatgctgacagaatagaagttccttcaccaaaagaagaaaataattcgacaaattctgaagctgctacagatagcgaagacattgaaatcagcgatgatgatgaccgcaaccacaagcaccgaagacgggaggctaaacaacaatctgatgacaatacagaggagcaacatccagggccacctcttaaaaaaaggagtagggttgctggtaatggagaaccttttggtggagctggctctcaaggtgaagtacaaaaggattttgtgccaaattttaaaaggcgttctggagcaggaggtcacactcgagcacctagagcgaaccaatccttccgagctgattcatcggcttctgctgctactcgccctcctatgacacgaggaagaggacgtaatgttgcaccttggactcaccatgatccaagatttaactcacttgatatgatggattttgcatcccagatggcttcacaaggaccacctgcacatcctagcttatttatgggcactgcattgccatgtggtccatatggatttatgcctggaatgcctcatgggattttggatccaatccacccacttggaatgcaaggccctattcagcgctcagtatctcctttgattgatcttggcatgcctcgtcaacgttgcagagactttgaggaacgtggattttgcttgagaggggatatgtgccccatggagcatggtgtaaatagaattgttgttgatgatatgcagagtctttctcaattcaatcttccagtatcagttccaaatgctcaaggattgggaatccaaaatgagggaggaaccagttctgttaacttatccaaccttggagggagtaaaagcgttcctgtaaaagatgtgaaatctggtgtagcaagtgatgcattaaagccaaatggaagtgctgtttcagctgttgctgatgctgatgtatatgatcctgatcaacctctttggaacaatgagcaccgagaagcatcatctactggctttataaataaagatgttggaccgtggaatgctgaatcatccggctatgaaatggggcaggagcattcaaaccaggttttggcttctgatggttctcagagtttgaagtcttctgtttgggggcgaataacatcaaaaagaaaaccaggaggtaataacacagctaaaagtacaccaacgagtatcactggaaaccaaaaaagtgattatgatgacatggctatcagcacgggccaagtaaaatctgctgctaaggataccaatggtcaacccaattcaagaatatatggagatgtgggctggcaaagtaatcgagctgctcagaaagcatcccgtacattatatgtaaatggaattccccaagaaagcaacagatgggagacccttctatcgcattttcagaagtttggtcaagtaatagatatttatattccatctaacagtgaaaaagcttttgtccagttctcgagaagggaagaagctgaagctgccctaaaagctccagatgctgttatgggaaaccgctttataaagctatggtgggccaacagagatagagttcttgatgtgggagagggcagaatctctcaaaagccttcccagttgtctactacgccggctaattcttaccccaacagagtcaaggaaaatgttcaaccaacagctccagggcccagctctggatcttctgctgaactgttgagttctggtacaccaagttctagaatgctgccagcaagtagtgcgaaagcagtaccaccccatgctccaaaaaggcaagaaagcctagaactattggaagaactacgtaaaaaacaagagatcttagctcagaagcgtgatgagttccgccggcagttagagaaacttacaaaacaaaaaggttcagcaaattcagttaagcatgcagagactggtggaaaagaaattgcttctaatgatgcatcacaagtaaaggatgcagcgtccacgagggttgaagggtcacaggagacagctggttcattggaaaagagaagttctggagagtttgccttgttgtctcaaaagtctgctgcgatatccacgcagaaaccagtggtggttacaaaacagactactctgccagcacctcctcagaataggtttaagcttgacaatcggaccacatcattcagaattcttccacctttgccacctgaaattgcaaatgtaagttttacatccaaccacttgccattccttg

SEQ ID NO: 103105 - DNA, 711 bp, Zea Mays
gcattgaacaccattagcattgatagagctatcgacaaaagcataaaatcctgaatttaacctacgcgtcaccaaaatactatattctacaaaatagaactagttcgaatatattcggccactaaatccctcgaagcacacctcgcctcacgggtatttctaattttaacttcctacgcaaactaagcgtcttatttcacgatcataaaatccatagtaaaaatagtgatttggctcaccgttatcaacttgattcagtgtttgcgggaacgacgatagtcttcgattgaagtcttcgatcgagcagttgacgagtatagcacgaagcttcactttctcttccatccacaattcttggaatttttttcttattaagtagaactccgcataaacggtgatgattcttgttctggcctttcgtcgaccacttgaacatcgaccgaaggcttgcttctctacatcttattgggattcttttgtcgacgtgaacacacgtcagagatgtcacgtagggactggcatcaagacgagacgacgaaacaatcgagtgcggtaaggagctggagaacgacgacgggccaagcagagaagctcgcacgcggcgagcagagagtttcgcgcgcacagaaacttgaggccgagcacacagggagcagcgactggaggagcaccggctgggctaggcgagcacagggagatgcgaccgcgcgc

SEQ ID NO: 103106 - DNA, 621 bp, Zea Mays
aacctgtgcgtcgctcctacgtagttaactcgcccagcaccgcgcgccgtcgtccaagtccagcgacctgtccttctgcacatggcgtccctcgcctccctatagctccagctcgcgccagcgctcctcctcaagccacgccagccgctgtgtgcccctgctccagtctcgcccaagtctgcaccagcaggtcgcccatggccgcgccctcggctccctctctggtggtcgtcgggttcgaccactctccagccgtcgcggcgtccttagtttgttccggcaccgtcgtctctagcccagctcgaccaagccgcgccgttcctcccttcctcgcgccagcagccaccgtctcgtatcgccctcgatccggccgtcgtagctcctccatcttggccattcttgacttttttcatgccatccgttgtcgtcgacatgaggcactgcccacagcaagccacctcgctggtgctatgttgtcttgcgtctcctcatcggactacgtcatcacccttcccaacatcggcaccacgtgtccctcattttggtgtgcgtcaccatcgactcagcacagtccgtcgcgctcggcatcctcgacctcaagtcttgcaagtcattaggtcc

SEQ ID NO: 103107 - DNA, 1355 bp, Zea Mays
tctctgctcagattttcctaccgcccagccgctcctttcctttcccccgaccgcgccctgcatctcccatgggcgagcgccctaccgaggtccctccatggttgcgcactcctccagctcgtggagctctctcctgctcctgttcttggccgagcgcccgaccagggctcccctgcgcgccgacttccctgctcgcgtcgacgccctacttgctggcgcgcgcgcttgcttccctaccaacgtgccgacgtcgcgctgagctctctgcgccgcggttctccctcaaccaggcctagctaagctcgccggcttctcctctacacgccctgctcgccctctgccgcgcactcctcccttgccgcgtatctttggtgcgctgcgctagctgcagcttggagcttcgcgcgcgtcttcctccctgagtccctttcctgtgctcaccatggccgtcacgcctgcttcccctgctcggatttggttcgtgccccgggctcccatggcgcgcccgactcccgctccagcgcacagccgaactcccctacgcagcgcgttcctccctgttctctccctcatccggccatggatgcttaggaaaagtagtagtcccagctcggcaacaccaataggctccctggaactagtgccctgctccctgttgccgcaagctccagctcggattccgcccagctcgcccctgcccatgtcacgccggtttctctgaccccggcgttgtcatttcagttgaccacaccgggtgcaccgcggaagcgtggtgggcacgagggtcggggactggccgattgtcgatcacctatttgctttggacagtgcctcgacgccccatcatagcagcccgttggggaactctagtgtttgacgttaattctcggtcgtctccaactctgtcttgccgtcgtcgttcagtcgccccatctcgatgtcggtccctacgtgatgcctttgaattgtgatcgcgcggacaaaagaatccccaagataagatgtccaaagattggatggtgttatgcgtgaagttcgtgtagcacctgctatgcgcttgacaaattgtttgaatcggaaaatcattaccgatctcgcagattcgagtcagctattggaacggtaagttgatttgctattcttattgactggtctgatgaatggattggttgaattagttgttcgtgaagattgttttattcttagcacatgtgcgttgtcgaggtattagatgtatgccgtgatgcctcgcttcatgcatcaatggagtgtgtacacaagtatgaagtggtcgtgtcacacgaaactcaagtttaaaataattattgtgtgaggagtggttaagtgaataataa

SEQ ID NO: 103108 - DNA, 471 bp, Zea Mays
atggggaaacaccaggcgctggtgaattgggagacggacatggacgagcagagaaggccgatggttggaccagggagcacagggagtcgcagacgaggaagctccatgcccgggcgcagagaacggcggcgcagaggagccgtgcggtcagccatggaagcaggggcaacgccggcgagctcgcaacagggaccgagcagaggaagctccatgcccgggcgcagagaacggcggcgcagaggagccgcgtggtcagccatggaagcaggggcaacgccgacgagctcgcaacagggactgagcagagggagcagacgcgcgtgcaggagagttcggctgggcgcggtgagctacagggcgcgcgtgctatggagaccatggggaaggggctcggctgggagttggggctgggcgtcgagctcacggcgggggagggtgcgccatggagggagcaggagatggccgcgctga

SEQ ID NO: 103109 - DNA, 348 bp, Zea Mays
atggagaccatgccgggcaagcgcacggccgggcgagttgaggggcgcgacggccaggggattgaaggcaagggagctcggcacacaaggagatgggacgagcggctcatcacctgcggctggactagcgccatggggatgaacagatgcgctgagttgagtagggaagcagggcgcgcttccatgggcgagcaaggaagggacgagtccgatgactcgacggtggccgcgaccagggaaggagcagcggccatggggaaacaccaggcgctggtgaactgggagacgaccatggacgagcaaagaaggctgatggttggaccagcgagcacagggagtcgcagatga

SEQ ID NO: 103110 - DNA, 177 bp, Zea Mays
cacaataattatttccgatttgaatctcatggccatgatttatcttgatcagaatttatattgcaacatttttaagcaatccgtgtttgactcagctttactctcgaattttaaattcatcatacgccagtctgaattatttcgacacgagtcgcgaaaacctaatctgagttctag

SEQ ID NO: 103111 - DNA, 112 bp, Zea Mays
atttatagtcaaaggaaacagtttcggcgaatttacaattgtgcccttgagcctatacattcaaactatcatacatattgagggtaaagttgtcttttccttcttttatctt

SEQ ID NO: 103112 - DNA, 100 bp, Zea Mays
aaaaatatattaattgcaacataatagattcttattgtgcattttgtttgaaatggcaattcaaactcagattcaaaattgaattcaatttagaaaacag

SEQ ID NO: 103113 - DNA, 958 bp, Zea Mays
gaaaacacaaagacgaggggccggaaccccaagccaaactgattaataagatgcatggaagagaagaacactaaaccgatcgatctcttctagcaccgaccaaacctagctagcagtagcagtagcagtgcacacacactcgtacatacgcgcgtgggcatgcaagcacgatctaactagctagctcccacacacaagacggaggcagcatcagtaaaaagaatcaccgacctctctctctcacacccactaacacacacacaaacacacaagcgcacgcactctatgattaataactcactactttgggtgtattaattaataagtaacctgccttactatcagctagccccccgatcgaacagctgcaacggcggcaatggctagtagctagcggccggcgatgagatcacagccagagcgcgccggcgtccttgagcagcggcacgagggtgccgttgatgtgcgcggccatgacgcggtccatggcgccgaccagcctgccgccgatgaacacgacgggcacgaccggcgcgcccgccgccgaggctccggaggcgccgaggaggcaggccagggcgcgctccagctcgcggccccgcgggtcgtggtccagctcgtgcaccgtcgggtgcacgcccatgccgcagaagaggcgcttcacggcgtggcacatgcagcaggtgctcacgctgaacaccaccaccgcgctctccgacgccagccgctccacgcgctccgccgccgtctccacggccgacgacggtgccaccaccggcatgtacgaccacgcctgctccgccgccgccgcgccgtactgcattgtcggggtctctaccttgatgcctatgctactgctgagtgctgatgatgatcgaagggctgcaggttaagcggaagggtgtgtgaggtttgcgagcccaaggtctagctagtgcaatgcgtcgtgttgcttgag

SEQ ID NO: 103114 - DNA, 768 bp, Zea Mays
aggagtgatcgtctattttctcatcacataaacgtactgcgtttctactttctagtggagaaggaaaagacaattttctcgtaaccttccgggctcctcttcctctcctcgcgttcccccaccaaaccctaatccgagcacccagcccctacccgcttccgctcgcgccggcctttggggctctcaccctgagcggtaggaatccgcagggctccggttgggtgccagaagcatccaagtcgttggcgggagaccgggaaatggcggaaaaagagggggcgaaggttggggcggaagagatggaagagcgggagcaggaaggggaggcggaggaggtggaggtgaagtttcgtctcttcgacggctccgacatcggccccgtgcgctgcaacgccgccaccaccaccgtcgccgctctcaaggatcgcgtcgtcgccgactggcccaaaggtcataaggattccgtttttcttgagttgaggaactcttgtgaggcgtgatgagccggccccgcccctggtgtgacgtcctgtgatctatactgctaaatttgcttatagacttctgttgctattcttagtctctatgcctatgtgtcgcaaggaggaacagagggctttaaggggaataagctttagatttgcttattcgttgccttcattgtttggtgcctggaaaaaggaagtgtgcctccattattagctagcacttattctgttaagattcgaaatggattcaattgaaaatattgaacgcatagcagaaaac

SEQ ID NO: 103115 - DNA, 1097 bp, Zea Mays
aggagtgatcgtctattttctcatcacataaacgtactgcgtttctactttctagtggagaaggaaaagacaattttctcgtaaccttccgggctcctcttcctctcctcgcgttcccccaccaaaccctaatccgagcacccagcccctacccgcttccgctcgcgccggcctttggggctctcaccctgagcggtaggaatccgcagggctccggttgggtgccagaagcatccaagtcgttggcgggagaccgggaaatggcggaaaaagagggggcgaaggttggggcggaagagatggaagagcgggagcaggaaggggaggcggaggaggtggaggtgaagtttcgtctcttcgacggctccgacatcggccccgtgcgctgcaacgccgccaccaccaccgtcgccgctctcaaggatcgcgtcgtcgccgactggcccaaagataaacaaattatcccaaagactgctagtgatgtaaaactaataagtggcggcaaaattctagaaaatgacaagaatgttgcacagtgcagagctccttttggcgatcttcccagtagtgctatcacgatgcacgttgttgttcaaccatcatcagccaaatcaaaaccagataagaaggcgaacaagttgcccaaaaccactcgttgctcatgtaccatactgtgaactatatgaaggtcaagtccctacgagaccaacaataatttgtacgtccacaaaaatattctgcagagaatttgagaacaaagattcaagatgtccatgccattctctgccaacgggtggcaatggcgaaagacaacgtccacatgttgtaagctatatgtaattgtaacttaggtacaaagagtcgtccctgtgctgtgcggtcagggaaaatagtctggtggttgcgctgttttactctacaagatgtcttatatgatgtacaagatacagacacttctgggtgtagtgaccttgttcccacctcaccttttaaagtttgtggcgctgagtcaatatggatctaagtcaattgattgaagaaacattttcgactatgcagtattttctcatttatttatggcctgtttgaggcaagag

SEQ ID NO: 103116 - DNA, 681 bp, Zea Mays
gccctgggcttcaggtcatgatgattggcagtgaggaggtccagccttgggttatggctcaacgtcatgcacgaggaacaagtcatagcagccactggggaggaactgcaacacgatgccagggatggtgtctggcgggcgacgggaacagatcgaggagcagcacctgggcaggagcatggatatgaaattggtcaacggtatgataagaaggcgaacaagttgcccaaaaccactcgttgctcatgtaccatactgtgaactatatgaaggtcaagtccctacgagaccaacaataatttgtacgtccacaaaaatattctgcagagaatttgagaacaaagattcaagatgtccatgccattctctgccaacgggtggcaatggcgaaagacaacgtccacatgttgtaagctatatgtaattgtaacttaggtacaaagagtcgtccctgtgctgtgcggtcagggaaaatagtctggtggttgcgctgttttactctacaagatgtcttatatgatgtacaagatacagacacttctgggtgtagtgaccttgttcccacctcaccttttaaagtttgtggcgctgagtcaatatggatctaagtcaattgattgaagaaacattttcgactatgcagtattttctcatttatttatggcctgtttgaggcaagag

SEQ ID NO: 103117 - DNA, 1113 bp, Zea Mays
caaaccattacagatatttggaccctaaccattacgcatatttggtgtgcatcgggcccaggtcaagcacgggcctcaggaaatgcgtagcgccagtcctacaggcccacgaacaacaaagatatctccatggcaggcacaggcaagcgggctctctctcgcgctgtctccgtccggcagagatgataaactaatggagttgacaaaaaaaaagaggctggggagggaccgtgcaagcggacagggcacgtgatgaaaggtgacgcgcgtcgcggcgtgtgtgtgcgtgtcgtctgctcgtcgcctggtagctggctgcctgctgcctggtgcgtgcgtagattcatgtgatgtcgtcccgtgactccacgtattcaatcagcgtcttccttctcgcagattcatctaccctatcgtcctcctcctagtggcattatgactttcagaaaagcacaacattgatacaaaaggtattccatcccaatcaggctcgtttagttaattattaatccaggccaataacttcccctgcagaatgaatcagcacgcacgtacgaacagcagtacgtatcaattaggagtttctagcaaacaagaacagcagtagcactagcagtgcgggcgcgagctgaggagcgggaagtcctgcggcgtcatccaggcgtaggtgaagcgcacggcgcccccgcgcggcggcagcgccgggcgtccacggcgcggatggcgcgcgggtccacggcctcccacgctgctgagcccgtagcagcgcagcagcacgcgggactgcgcgcaccggcacgcgttccgcacctccaccgcgtactcgggcttcccctccaccacgcgccccgtcgcgcgctgccgcaccaccaggtcgccgcgccggcacccggtcgctgttggcgcgcgcgctggtgctggtgccgtcgatgcggcggccacggaggaggcgagggcgaggaggacgaggaagagaagcgctgttctgattggttccgccgccatggcacctcagttgcggttgcggttgcggttgcagttgcaggggggtggcggaagattgtttggcttggctatttatttatttatccacgcctctgcgttgggacagaa

SEQ ID NO: 103118 - DNA, 826 bp, Zea Mays
aacctgggcatattcctctctctttcctcatcctcatccgagtggctctctccgtgtgctgtggcggcgcctggctctgctcggacggactccaccgaaggcgctcggctcccctcgggctccacctgcgacggccggccctctgcctgcaccgacggtgcccggccccctcggcatccaccagcggtgctcggctccaaggtatacagcagcagcgccctgtgtcgagatctcccttgtatcccttccctctagcgttttcctgatttgagtgacaagattctaagaagctgttgttttatgtgttacccaagatttaaataagctagtgttagaagctggtgttttatgctatcaaatgaactagtgttagaagctgctgttggatggagatcgtagttattttgatgtgtgacgttatcttaaacagatgttctggtttggatgtgtactgttatctgaaacaaatattcagaactgaaaatgttgaatctgttaaagtgcacatgttactagtttctgttattgtgcacaggttgcaaatgttcaacacatgtggccgcaatgtccacaggtttcaaatgtcccaactggacctagccctcacggacggaagtgcccaggacctgtcaatatactagtgtattgcgcctgcgcgtattccagcataggtttcacgaaggaacgattgatattccggtcgtgtatgtttgtcaaaataatcatttctagatagtggtagcaaactgaatttcctttgtcatgcagttgtaatcttgaacatggctgaattatgaatggtggtagcaaactgtttcatggcatc

SEQ ID NO: 103119 - DNA, 509 bp, Zea Mays
aacctgggcatattcctctctctttcctcatcctcatccgagtggctctctccgtgtgctgtggcggcgcctggctctgctcggacggactccaccgaaggcgctcggctcccctcgggctccacctgcgacggccggccctctgcctgcaccgacggtgcccggccccctcggcatccaccagcggtgctcggctccaaggttgcaaatgttcaacacatgtggccgcaatgtccacaggtttcaaatgtcccaactggacctagccctcacggacggaagtgcccaggacctgtcaatatactagtgtattgcgcctgcgcgtattccagcataggtttcacgaaggaacgattgatattccggtcgtgtatgtttgtcaaaataatcatttctagatagtggtagcaaactgaatttcctttgtcatgcagttgtaatcttgaacatggctgaattatgaatggtggtagcaaactgtttcatggcatcaaactgaatttctaaaa

SEQ ID NO: 103120 - DNA, 1635 bp, Zea Mays
gaaacccagttcccataatgacataaatccaaattctttacagcagtcccgccgccactcaccaaattggccgccagggctccgtcctctagcggctccgtccggtggtccggccagctgcctagctccctccgacggtccggccagcaccgcctcctgctcgcggccttgcccagctcctccgccctccggtgagacgtagatcttggtgcggcagggcgctacgggggcggggtggtgctgttgtgcgtgtgctggtggcctggtgctagcaaccgagtactatggatcacgaatgatgtattgtatgcaattcggcccggagcgtcactaaatcctggatccgcattggccgcagggccagtggccagtgtccagcctgccagctcagcccggcggcaagcgcccagcggctggctcgggcagcggccagtggcgagcagccgactcgtttcttcggcgttctccgccactgccccccagctatgcaccctgttccagtcccctcccagccctttaccgcaactcctgcaaaaaaacttgtttcaaggagcactgctgtgaggaaggccatccattttgtcaacctgtggacagctggaaggtctagtggaaacctggctatgaactccgtaccaaaacccgcccctgggtccgaaacatctgggagggaggattttgctgtgggggataaggatgctgtggtcattgttgatcatgggtcaagacgccaagaatccaatctcatgctaaatgactttgttgagatgttccgggcgaagactagctataggattgttgagcctgctcatatggccagcagggaggaaggagagctgcaggggagcgagaaggaggagagctgcggggagggaggagagctgctgacggctgagagggagatagatatttgtgctggagctagcggagcctactataaaggatgcttttggaaaatgtgtgcaacaaggagcatcccgagttattatcagtccatatttcctttcccctggacgacactggaagcaagacattcctgctttagcagcagtggcatcaaaggagcactcaaatataccctatattgtcactgcccctcttgggctgcatgagcttatggtggatatcatgaatgatcgcatcaagtactgcctgcgacatgttgcgggtgatgtcgatgagtgtacagtgtgtgccggaactggaaagtgccgcatgtactcctgatggagcatacctgggaattgtttctggagaatacgagatctgacgagtgtatatctaggtccgctgtgtaccgtgaaaccaaaagcttgtacagttcattctgaacagatcgtcagaattagacaagtgccaaattagttatgctgtgcatgcttgcgaacatcaataacgattcattagctaatcttgagtttatttacgtcacgaacaaactcagtcaagtgctctgatatttccattcacatgttatctatattcctgctaccttgtagttgaattagacttattgccttaacatggatcaaatgagaatataatgtacccttgtttgatttgccagttctttttgtcatatatctgttagggacttgttctcaaatgctatgaattaaaaacaagacaacacaa

SEQ ID NO: 103121 - DNA, 1538 bp, Zea Mays
gaaacccagttcccataatgacataaatccaaattctttacagcagtcccgccgccactcaccaaattggccgccagggctccgtcctctagcggctccgtccggtggtccggccagctgcctagctccctccgacggtccggccagcaccgcctcctgctcgcggccttgcccagctcctccgccctccggtgagacgtagatcttggtgcggcagggcgctacgggggcggggtggtgctgttgtgcgtgtgctggtggcctggtgctagcaaccgaggtacagtactatggatcacgaatgatgtattgtatgcaattcggcccggagcgtcactaaatcctggatccgcattggccgcagggccagtggccagtgtccagcctgccagctcagcccggcggcaagcgcccagcggctggctcgggcagcggccagtggcgagcagccgactcgtttcttcggcgttctccgccactgccccccagctatgcaccctgttccagtcccctcccagccctttaccgcaactcctgcaaaaaaacttgtttcaaggagcactgctgtgaggaaggccatccattttgtcaacctgtggacagctggaaggtctagtggaaacctggctatgaactccgtaccaaaacccgcccctgggtccgaaacatctgggagggaggattttgctgtgggggataaggatgctgtggtcattgttgatcatgggtcaagacgccaagaatccaatctcatgctaaatgactttgttgagatgttccgggcgaagactagctataggattgttgagcctgctcatatggagctagcggagcctactataaaggatgcttttggaaaatgtgtgcaacaaggagcatcccgagttattatcagtccatatttcctttcccctggacgacactggaagcaagacattcctgctttagcagcagtggcatcaaaggagcactcaaatataccctatattgtcactgcccctcttgggctgcatgagcttatggtggatatcatgaatgatcgcatcaagtactgcctgcgacatgttgcgggtgatgtcgatgagtgtacagtgtgtgccggaactggaaagtgccgcatgtactcctgatggagcatacctgggaattgtttctggagaatacgagatctgacgagtgtatatctaggtccgctgtgtaccgtgaaaccaaaagcttgtacagttcattctgaacagatcgtcagaattagacaagtgccaaattagttatgctgtgcatgcttgcgaacatcaataacgattcattagctaatcttgagtttatttacgtcacgaacaaactcagtcaagtgctctgatatttccattcacatgttatctatattcctgctaccttgtagttgaattagacttattgccttaacatggatcaaatgagaatataatgtacccttgtttgatttgccagttctttttgtcatatatctgttagggacttgttctcaaatgctatgaattaaaaacaagacaacacaa

SEQ ID NO: 103122 - DNA, 1508 bp, Zea Mays
cagcagtcccgccgccactcaccaaattggccgccagggctccgtcctctagcggctccgtccggtggtccggccagctgcctagctccctccgacggtccggccagcaccgcctcctgctcgcggccttgcccagctcctccgccctccggtgagacgtagatcttggtgcggcagggcgctacgggggcggggtggtgctgttgtgcgtgtgctggtggcctggtgctagcaaccgaggtacagtactatggatcacgaatgatgtattgtatgcaattcggcccggagcgtcactaaatcctggatccgcattggccgcagggccagtggccagtgtccagcctgccagctcagcccggcggcaagcgcccagcggctggctcgggcagcggccagtggcgagcagccgactcgtttcttcggcgttctccgccactgccccccagctatgcaccctgttccagtcccctcccagccctttaccgcaactcctgcaaaaaaacttgtttcaaggagcactgctgtgaggaaggccatccattttgtcaacctgtggacagctggaaggtctagtggaaacctggctatgaactccgtaccaaaacccgcccctgggtccgaaacatctgggagggaggattttgctgtgggggataaggatgctgtggtcattgttgatcatgggtcaagacgccaagaatccaatctcatgctaaatgactttgttgagatgttccgggcgaagactagctataggattgttgagcctgctcatatggagctagcggagcctactataaaggatgcttttggaaaatgtgtgcaacaaggagcatcccgagttattatcagtccatatttcctttcccctggacgacactggaagcaagacattcctgctttagcagcagtggcatcaaaggagcactcaaatataccctatattgtcactgcccctcttgggctgcatgagcttatggtggtatgtgcttgatatcatgaatgatcgcatcaagtactgcctgcgacatgttgcgggtgatgtcgatgagtgtacagtgtgtgccggaactggaaagtgccgcatgtactcctgatggagcatacctgggaattgtttctggagaatacgagatctgacgagtgtatatctaggtccgctgtgtaccgtgaaaccaaaagcttgtacagttcattctgaacagatcgtcagaattagacaagtgccaaattagttatgctgtgcatgcttgcgaacatcaataacgattcattagctaatcttgagtttatttacgtcacgaacaaactcagtcaagtgctctgatatttccattcacatgttatctatattcctgctaccttgtagttgaattagacttattgccttaacatggatcaaatgagaatataatgtacccttgtttgatttgccagttctttttgtcatatatctgttagggacttgttctcaaatgctatgaattaaaaacaagacaacacaa

SEQ ID NO: 103123 - DNA, 1204 bp, Zea Mays
atgaatctgatgctagttaactgctgaaagggccagtggccagtgtccagcctgccagctcagcccggcggcaagcgcccagcggctggctcgggcagcggccagtggcgagcagccgactcgtttcttcggcgttctccgccactgccccccagctatgcaccctgttccagtcccctcccagccctttaccgcaactcctgcaaaaaaacttgtttcaaggagcactgctgtgaggaaggccatccattttgtcaacctgtggacagctggaaggtctagtggaaacctggctatgaactccgtaccaaaacccgcccctgggtccgaaacatctgggagggaggattttgctgtgggggataaggatgctgtggtcattgttgatcatgggtcaagacgccaagaatccaatctcatgctaaatgactttgttgagatgttccgggcgaagactagctataggattgttgagcctgctcatatggagctagcggagcctactataaaggatgcttttggaaaatgtgtgcaacaaggagcatcccgagttattatcagtccatatttcctttcccctggacgacactggaagcaagacattcctgctttagcagcagtggcatcaaaggagcactcaaatataccctatattgtcactgcccctcttgggctgcatgagcttatggtggatatcatgaatgatcgcatcaagtactgcctgcgacatgttgcgggtgatgtcgatgagtgtacagtgtgtgccggaactggaaagtgccgcatgtactcctgatggagcatacctgggaattgtttctggagaatacgagatctgacgagtgtatatctaggtccgctgtgtaccgtgaaaccaaaagcttgtacagttcattctgaacagatcgtcagaattagacaagtgccaaattagttatgctgtgcatgcttgcgaacatcaataacgattcattagctaatcttgagtttatttacgtcacgaacaaactcagtcaagtgctctgatatttccattcacatgttatctatattcctgctaccttgtagttgaattagacttattgccttaacatggatcaaatgagaatataatgtacccttgtttgatttgccagttctttttgtcatatatctgttagggacttgttctcaaatgctatgaattaaaaacaagacaacacaa

SEQ ID NO: 103124 - DNA, 2626 bp, Zea Mays
ctccgacctccccacgttcgacggttcgaagcctcggagggaaaccaccaaaaattctcccaaaacccttcgctcatttggtttccatatgaaacgaccgccaaaaacttccttcccaaaaaatgaggcgccggaacctaattgtgcattctgattccgacgaggacgacggcgagggcatgaccaccgccacaacccccgcctcagtttcagcttccgtcgctagcggcggcgtaagcggcagcggaagcgtcggccggccctcgccccaaaacctcagccccctaccagtccccttcccgtcactctcgctatcttctgcccccttcgtcatctccgatgacgacgaggacgtcgacgagatcgtggaccctgacggggactctcccatcgttgacgcccctgaggtcttctccccgccagctcctcccgcgctccatgctcccgctcccgctcccccttcccctccccctcctatcactaccccgtcccagaccccaatcccgactccaccttcggcacggaccccgaccccgactccgccttcggcgcggaccccgaccccgactccgccttcggcgcggaccccggcctcaatagcgcctccgcacccgtccccgctgagcggccggttgcgcccggtggacgagttcctgcggcggctcgggttgcttctgcggccggactggctcgagtcctgcgctgcggggattcccggcttcgacggcctcggtggtgttgaggcgcaggccaggcggtgcttcgagcagtttctcttcgccgatatgaactcttgcggtgctggggtgctgccggagggcgtcgggggcatgcacgctgagttccttgatggccccttcgtgcttcaggttgatgaagttgtcaatatttcagttcctttaaaggaaaggtatcgtgaagcaccggcaggacccaaaaggtgtttaaaactatcaatgacagatggcatacgacatatatttggaatggaatacagacccatcaaagacctgacagttcttgctcctgctggtttaaagattattgtaaggaatgtacacacaaggaggggtcttcttatgctagttcctgaggctgttgagattcttggtggtgtagttgacgaattggaagcagcgcgtgccagacttgtttctgaagtaaacaaaccacctcgtggcaaaagtaaacagggtggattatctttgtcttcaagagctacgcgagctgcctggccatgtagcaccgatattacaaatggtgttgcgcaggggatctcaatgcaaagagcagttaattcctcgtatccaacaggatcaggtaatgctttccaggttggtggagctacagaaactgtggttgaagagcttgttagccctcttgtagcaaaccgtgtccaagaaatcaacatgcagggctcatatgcttctcttaccagggaaactactgaaacttctatgcatactacccatgaatatgatcccactcatatcactgaaaaaagtacagggaccgtcatggaagaacgtcctgatcctcctattctagcaaacagtgtccatgaacaaatgcagcgagtccaacctgctaacggtgcacaatcttcaaatgttggcaagatcaatcagatggaacagtctttcattctaagcggtgaaaatgaaaaaccatttacatacatatacagcatgcttattgactggggtaggcaacaggacacaaaagcctacattcaaggaaaaatcaagggtctgatcacttctgtaaaaaaatttcaatataaacaacgcaccaagtacgagctttatgtatatatagatgatgggagtttcatttcagaggccttcattgacagtgatattgtgaataacatgcttggcctttctcctggagaggttactgctgcacttgctggtgaattagagtttgcatcacccagtgaagtgaaagaaactttgaaaggatttcagaagtttttggtgaagtttgagggtatgatgcttatcgagttaaacaagaactctcctgttcctgttgttcgtgagttaaatgaaggttgctcaagttctactgcatggcttctgctcggaaggctgaaaacaatttcttctcagaagaagaccatccaaactcaggatattatggacaccactccatgattgtttcgatcctctaaaccccagcggccgattataatctttcaatgctggtgcgggtgacacaatgatgtggcatggaaggagtgctaccaaaacattctcattgagcctagaagctttcgtccatctcattcattttcgtctcattttaataaccgtagaaaaaggtcctaaatgattggcggagtagaaaggctgacggagaaagtctgacggtgagatcctgaagaccacaaccgtaatcgtcggatggctgcaatgtcagaataagtatgatagaatccgttctcgaatatttgtccgtgcccgctattttatttttggaaaaaagcgacaaataaaaaaacaacagagggagtaatttgtagtagcattaagataattgagtcctttattaatcgtgtcgatgtctaaaggaacttcggtctcatacagctagtgctatccatggccacagaacgtacacg

SEQ ID NO: 103125 - DNA, 618 bp, Zea Mays
ggataaacgaatgctggattatcatacgcaaataagaatcaacagattgcattaggctacagcttttcttcctagaacagtttacatgtagtaaattaaagatatacacaattaggtcctattttgatatacagaaaatggataacacttgtcccaactttagctgctaagggatggcttgaagtacatgcaaattggcgggtcaatcctaaggattgacagtatcgcagaaggaacagtccagatcccatcaccacagatcaagccagaggcaaccgcacctgcgaagtcatcacactccttgcggttcaccctctcccagacgaaaaggataactgtcccaacaaacatgtcgatggcgaagtacgcaccgatgtagaagggaatggccatagccatcgggattgggatgaatctggagacattctttggggtgacgtccctgaggaggttgatcactagagatgcaatgaagaaaaacgagcagatcgctaggcagtgctgaggcagtgcagaaaacccttccacgccaagaattgacatctcacggaagattacagcatatggagctttgaatgcgccgtcagggttaccaatatcgaaagccgaccagtagag

SEQ ID NO: 103126 - DNA, 390 bp, Zea Mays
atgcgcgcagccaccctcgcccaacagccatgtgctcccgctcccgcccccacccccgccgccatgcgtgcagccgcccccgaccatgcgcgatcctcgccgccgcgggacgggtcccagtggaggcagaaacgggtccccacggggaagtcatgcgcgtgggcgagcttggaggtcgacgcgaacgataggcgcagggccgcgtcgccgtcgtcgcggatggcagtcgtcggtacggcgcgcgggaaggggttgttgaggcgcgcgtggtgcttcttggcagtcttgggcgacaccatggcgacggcggtgatggcgcgcacgggtgaatggaacggacggagaggccgtgcagtgctctctactcggtccgaggccatcattggctga

SEQ ID NO: 103127 - DNA, 669 bp, Zea Mays
ttatattgataccttcggcttgttcaaaggtgttgatgcgagagcgattacaattcagcatgaacagtacagtggtactgttcatctatttataggcacgagacgcagcccgagtaaaaatacatttatgaccataacatttgttcataactgtaatataaatcattagggactagctagtcttttcctcttgagctcagcatcattttggccttcgtcaccattttaagccgaagctgtaattctttggctatagcttcggcgttcattgttatcaccctcgagctatgtcttcgtcttgaagaccttctacagagaggaagacttccatcgcgaaccgaagctccctgtaatagtcactattatgctagaaacaaatggttagtcatgtttttgaggaccttagaaagaggaaggcccccaacaaaaaggtttgttctgtattttataaaacaagatataagcgtgaaaatatcttaactataaatatataaacatttggtgaaccatttaaacctttttagaaaggatatatgtggaatatttaagactatggaataataaggttataagacacactattaaatgtttatttatgaaaaactgagataatagcctaaacggattttatgtggaaagataattaaacaaataattatccttattttt

SEQ ID NO: 103128 - DNA, 315 bp, Zea Mays
gttatgttgcaactccaaccgttcgtgatggaaagcataaaccttgacaaggtaatgactaatgagttatgacatattccctcaattttgtggtgatcgtgggttctaacaatgtgcaatgcaactgcatcttcttctgaaacaaagggaaaagtctgcataccaacacaggctcagagcatggtgagtggtggagacaaagcagatgctcaagatgctccccgtgctagccatcacgttcgttcccagtgcgatgatggcacacatcaacacactgttcgtcaagaagggcacgacgctagaccctttctctag

SEQ ID NO: 103129 - DNA, 101 bp, Zea Mays
ggcaccctgagcgctgaacacttgaccacaaaacaagagtctcatattaattatagtatgaactatgagcaaagtaaatttctaacagctatagaaaaaat

SEQ ID NO: 103130 - DNA, 1193 bp, Zea Mays
aggaagagagtacttgggctttcaggcgacctgcctcggcccataccgggcttggaaagcgctctggcatcacgcaacgcaactgtggccaaattacgctgcttgatgtcgagcctgtggagtggcccggaaagtggggtttcgccggcgggctgagaggagcggtagattggtggcagcggcgacctagggttccggtgagtgcatccatggcctccgaggcggcgcgacggcggcaggaggtggcggtggaggggcagcggcacctggaggagaccatcgcagccgcgttccagatcctcgtatccatgaacgacgagctctgcaacgccggtctctggtcctcctcttccgtatcggcagcagcagctgctgccgcttccgctggctcccagcaccaccaatcggctactccgccgccgccacactctgcggattccgacgctgccgacgcagggggcgcacccggccctggcgggtcgctcgacgaggcgaggcaccgctacaagtcagccgtggtggcgctgcgggactccatctctgctgtgtcgtcctgccctcaggacattggttcaacagaatctgaagttgaccaggcggagattgagagattggaagagcatgcttctgctttaagaaaggaaattgaaagcaaaaacaagcaagtaaagctcctcatggatcagctccgtgacctaataactgacgtagccatgtggcagagcccttgctctgtgtgaagtgtgaactgtgaagtgtcaaagagaccctagctggacgtctggtaaaggcatattgtgcatgttgggtaactgactacttggcagttggaagggagaaatagatgggatatgactgggcttcacgaaaaaaaacataaagttttcctctctataccaactaaaattgtgttgggtcatcgatgcaaatgcacataggctgtaatatgttggatatgaatgttattttggacgagtgtagatacgcgtatcctttgaaacttgtctgattttttaccgtgacgaaattcctgtaatgctttgagaatcctgaatttctgtcatataatggcttaaatacaatgattatatttgcttcttgaacgatgaaaggaatacttaatagtgtgtttggtttgaggaatgaagatagtgtgtttggtttgaggaatgaagtaatccatcttcttctct

SEQ ID NO: 103131 - DNA, 1190 bp, Zea Mays
aatcgacgccaaagagtgagaaagcgagcaggggaatcggaggaggaaaagcatcgggatgaggatggggtgagagagaaagggatggttgctgactcttgattaatttggcggtacggtgggcatgtttgcttcccttgtttcattaacttgaatcggttctttttgcatcgattttaatccaaatgaaaaactgacgcttgctgtgtttttgttttgaaaaaaaaataaacaaaggatggagcggagccggctgccagtgtacaaattctgctggacccttgaagggcccaagcccagcaggcctcccgattccctgctgctccggcacggacccgtgcgccgctggggcccgcgtagatccgttgcgtcgcctccctctctcacgcacggtcgcacaccagactccagtactccaatgtgcaagcaaagcagcaagccagcaagcaacggttggattccttgcccccgcccggaccacggagagaggctggaccacgcaggctcctgcccctgccaatgacgcgtggggcccgcctcgctttctttacccctctaaaaagcctgccactgcggcgctcctcattccaatttccaagagagacagagagagcgtgtggatttgggggagcttcttcactggagagtggagagctccggtagcgaggcgaaggaaggaagagggaggaggggaatcagagaggtctccccgatggcggactggggccccgtgatcgtagcgacggtgctgttcgtggtcctcacgccggggctgctctgcacgctgccgggccggggccgcgtcgcagagttcggcagcatgcacaccagcggcctggccatcctcgtccacgccgtcctctacttcgcgctcatcaccatcttcctcatcgccatcggcatccacgtctacgcgggctagtagccgcccggagcaggatgcgatatacggagtagtaggttgcgccgccgccgtgatccagatcaagatctgtttttttttctttgttccttttcgctctctctctctctctgccctcctcctcggatttgctgccagtatggacgaaatcattgattatggtctggacgtctgcttgtaatcaatcatgacttgtgtaatcttgcttgcggccatcagtatcgatcaaatatcaatcgcgctcattccatattttttttaatttgaa

SEQ ID NO: 103132 - DNA, 336 bp, Zea Mays
atggacatgggcttctacaagcgcgccagcaggggcggcggcatcaagcacaaggcggcggcgatgcccttctaccccaggaaaccggcgcaggtggcgcccgccgcgccggcggcgcagcaggccgtcagcaaggcgaaacagccctcagcgaccaccatgtggtcgattccggcaccgccatcgtcaaccgtggtcgccatggaggttgctggaaacggcatggtgctcgacggcgactccgacgtcgacagccgggcggcctcgtacatatccagggtgcaggagcggctccggcgcgagcgcatggccgaggactggcggatgtactactga

SEQ ID NO: 103133 - DNA, 446 bp, Zea Mays
gccgccctacatccccgccggcagaacaaggatgctctagttgcgataaaagacggcggtgtacctccacctagcgtcctgccatcttttcaggagatcaaggatacattgggtttcaaccgctattataaagaagagaaacaataccaagtggacaagtgaaggaagcagctgaagtctgatcctgtggattcagtcggatcgtggccatggcttaatttccaccggacatgctgggcttccaccggacatgatgcagaccaatcgtatttatgttgagttgtaatcgaacgctgcgtagcgcagtatcccgaagaacatatatatggggtcttctcttccgtttctgctctgctgtggtttcaataatcccgaaattgtgattccagtttaatataacaggccagcttgatggggctttcgttatgccagagcacactttaccc

SEQ ID NO: 103134 - DNA, 246 bp, Zea Mays
aatgaatgttgtggtcattggaggcaaggctgtgaggaagcgattgatgagacacccatcagtcaaagtacagcctcgtactatgagaccactgcatttgctctagggccccaacatccgagcaccccgcagagaaactgcgggtatttcgaagctaaaaggagagcttcccccaaatggcatggaacccttagacataaacaatagaagcatcaaatacagagcaacctaataccacagctgcaa

SEQ ID NO: 103135 - DNA, 1061 bp, Zea Mays
aataatattacaatccaaacacgcacacacaccccacctacctacctagcaagctggagtaggaagccggccagcaaggaaggaatacctcgtggcaatttcgtcccctcctctcttggattcttccatggaggagcaaggtgagcgacacatccagcttcagctactgctcctccctgcgcctgcaggtcatcatcaagtcctgcgtgacgtaccggcggcggtgccagccagcgccgtggagcccccccagctggacctcgatctgaccatgagcatcgggccgaggcggcatccagcggcccaaacaccggcgccttcgccgccgccgccgcgcgcgcggtcgccacccacgaacgagaacaggagggcgtcggcaatgatgatgagcacggtgctggcgccggtaccggccagcgcgaggcagcatcagaagcaccagcagtatgcgggcgctgatgtgcgcgccgtgaagcagcaggccgcggaccaggcccgcatggcgtctgccgagcgcgcctacgcggagcgcgtccgggagctggcgcggcgggagctggagctcgcggagcgggagttcgcgcgcgccagggccatctgggagcgcgcccgcgaggaggtggagcgcgtggagcgcatgaagcagatcgcggcgaggcgcctcgtcggctcggccgcttcgtccgccgcggtgctggagatcacctgccacgcctgcatgcagcgcttccacccctagctagctagctagcccctgctgctctactccgggccagatcctagctagtactagactactagctcctacacttcttgatgacgaagtgtaagggccgggtgcccgggtgccctctctctccgcgacgccggcagttcgaccgtggatatggccaccattgctgaaactctctttcttcgtcatagcttttgtgcacctcttgtgaattaatgccgtacgtacgtgttcagcttgagttccagcgtcttcatcgtctggttcctgtgtttgatcgatgcacgcctcatatcatcaatgcaacgacgagcaagttcttccttct

SEQ ID NO: 103136 - DNA, 443 bp, Zea Mays
atgcccgcttgcgggcggacagcggtgacgcccgcgggcgccacccctaccctattgagggtgccgtctttggtcctctcgccaccatgcgggaaccctcgtctcggccttcttggggtctcccgctggtgctcgtccgacgttagggctctgagggttggtgcgtcggcggacgacagtaggtcttcggaggaaactttgcttggttggtaccaggcgggcggcgacgactcgtttctccttcttgaaggcgcggcccagaagacctagtttgtgtgttcgtcggcgttgtggaggctctttgtcactccgcttggctcggtggtgtcgaggccattgtcgctttaggcgtctgcttgctcccggagttcggcgttgtggatctttgctcgtggtgaagaatcagagctgcctcgtgtggggtgtgcgaggcttggcaacga

SEQ ID NO: 103137 - DNA, 183 bp, Zea Mays
cccttgtgtttgagcttggcaacgatgactctagatgtgtttgtgtgtgtgaggctattgttgtctaggtggtttgttagggccttcgccggtttcctgtgtaggttttgggtccggttttccttaaaactggatcaattctattcttcttaattgagaggcagagctcctgccattatgttc

SEQ ID NO: 103138 - DNA, 99 bp, Zea Mays
ccaattagtaagcatgtatacacaacatccaatatcaaaatcttatataaacacacatacataacatctatattatgtaaatcactttgcaaagccaac

SEQ ID NO: 103139 - DNA, 2424 bp, Zea Mays
ctatagacttttctgagttttctcgttgagcaaagtagaaatgtacaagtttctctactccgaacgcatttcatggcaaaaaatcacaaatcaaaagcatactatcagcatagaggcatggttcctggggttcttgattcgaaatctccatctcatcgccatgcacacttccttctgtgcagcatcttcatattaatctcctccaacacagcaacgctatcatcagcgcaggccagcaataggtcagaggatgaccggcaagccctcctttgcttcaagtctggtctctccgggaactctgctggtgtcctaggatcatggagcaacgactcactgaacttctgcaaatgggaaggggtcacctgcagcacggccatcccaatccgcgtggcatccttgaagctaaggtcagtgcaactcagaggaaaactatcaagttgcgtagcaaatcttacttccctagtgcagatggatctctcaaacaattcgatttctggggagatacctgatgaaataggttcactacccctacttcagactctaatcctctcgaagaacctcctatcaggaactataccacctgagataggaaaacttgtgagtctcacaaaacttgccatggaccaaaacatgctttcaggaatcattccctggactattgggaatttatcaaatttggttgtcctggcactgtccacaaacagcttgtcaggtgaaatcccagccagaattggctatctccctcaactgatccagctttacctggatgacaatacgttatctggacgcataccagcacaactagtgcagtgcacaaggttggctatgttaaatttatcagtcaatagccttaatggatccataccaagtgaaatcctcagtatttcttcgctttctttggggttggacttatcaaacaacaatcttataggaacaataccatcacagattggaaaactgatcaatcttggcttactgaatgtttccagcaacaagttatctggtgaaataccatctgaacttgggcagtgtgttttattgttatcccttcagatggaaggcaacatgctcgatggggttattccacagtctctcaatacactgaagggcatacaacacatggatctctctgaaaacatcttatctggtcaaattccagatttcttcgagaacttcagtaccttagattatcttaatctatcatacaacagactagaaggaccaattccaaccagtggtatcttcacaaattctaatgcagtcatgttagaaggtaacaaggcgttatgtcaacaaattgacatatttgcattgccgatctgccacatcacatctgcaagagaaagaaaaattaatgaacgcctactgctgataacagttccaccagttattatcgctttgttgtcatttttatgtgttcttaccactgttacgaagggaagaataacccagccatctgaaagctacagagagacaatgaagaaggtgtcttatggagacattcttaaagctaccaattggttttctccagtcaacaggatcagctcaagtcatacagcatcagtctacataggtaggtttcagtttgatacagaccttgttgccatcaaggtatttcatcttgacgagcaaggttcgctcaatagctttttggcagagtgtgaagtgctaaaacatacccgccatcgcaatctcattcaagcaattactttgtgctcgacagttgattttgagaacaatgaatttaaagctctagtatacgaattcatggcaaatggtagcttggacatgtggatacacccaaggcaagaccaacgtagccctacgagggtgttaagtttaggtcaaaggattagtattgttgcagatgtagcttctgctcttgattatatgcacaaccaattgacacctccattgattcactgtgatttgaagcctagcaatgttttgttggattatgacatgacctcgcgcattggggattttgggtcagcaaaatttctctcttcaagtcttaatagtaccccagaagggttggttggagcctcaggaaccattggatatatcgcacctgaatatgggatgggatgcaaaatctcaaccggtggtgatgtttatggttttggggtattattgctagaaatgctcacagcaaagcgaccaactgacacactgtttggtaatgacctcagccttcataagtatgtagacttagcattcccaaacaaaattaatgagattttagatcccaaaatgccacatgaggaggatgttgtttctaccctttgcatgcaaagatatatcataccgttggttgaaattggccttatgtgttccatggaatcaccaaatggtagaccaggaatgcgagatgtttatgcaaaacttgaggccatcaaagaggcatttgtcgaaaccttttga

SEQ ID NO: 103140 - DNA, 90 bp, Zea Mays
tagaagctagtgatgatgatatatatagcagtcttccaaggcatgaagatctcccttaactatattgtatatttattctcaggtattcgt

SEQ ID NO: 103141 - DNA, 617 bp, Zea Mays
ataaccagggttgggagctagcgcaaccttgcatggatgattacgctgaagcacagcgatgagtaggagagagagaatagagccgctgcgaccacgcctcgcgttcaccatcgcccagcctctcgatcgctggggaatcgggcgagatcaccaagtcgtgcagatcgtgcgtgtggtcagcagagcaaggaagttggcgggggagacgaattgcttgccggtgcttggccgaatcctcaccgggaatcctcgggcggcactacagcgtcgaccggccgcatcgacgtcttctcgagtggtgagaccctactaaattactcgccgtagcatccgcatagatgatccccattcaatttccgaatttagacctagaaatcggcagggttggttcgccaccaatggcgacatcgtgccttcgcgttctgtcgccggtcgggcgccgtggtgagagagagaggattgggggggagaaaaatgaagggcttgggctgttggatcatacacggatggcaccgatctaagcgcgcataccccttcgctcaataggatttgggccgtagatctgagatcaagcgatcaggatttgatcatagtcattcttaatctggactgacgat

SEQ ID NO: 103142 - DNA, 102 bp, Zea Mays
gtggcatatttggatgctggtatgatataaaacaaaaatataaaataatattgccagtaattagaatttatattagcgttctattgattttatgtgaaaaaa

SEQ ID NO: 103143 - DNA, 638 bp, Zea Mays
atggacagatcttggattaatagtaggcgttttagcaagcagcatatcgcaggagtgaaaagtttcatgaagttaatttcaaagcgttttgcagatattgatgaggtactatgtccttgtcgaaagtgtttgaatcggattgctagacctaagtcaaagatagaggatcatttacatattcatggtatggcaagcacgtacactacgtggatacatcatggggaggcacaatttgatactgtaataaatcaacaagctgaccatctagaagaacaatattgtatgaatgaggatattagtatgaatgagtctgaaaacccagaagatagattgcctgatatggtacgagagttgttcacagctggagaggaaggtgcacataaatctatgtttgcagttgtattggaagatatggagcaagaacttcaccctggtgcatcgtacacaagattttcttttgttgaaatatttgaggaggcacaatggcacaagttgaagaggaaagaagtggaaaatgagcttagccatccagttgacgctgaggcatggaaagacttgacaaaaaaacataattggttccaagagatccctagaaatataaggcttgggctagcccacaagatggttttaatccgttt

SEQ ID NO: 103144 - DNA, 1392 bp, Zea Mays
atgggtgccgagttgggagaagcgggtgtccctgcccgggacatggtggacgcgctggaaggcgtgcgctccatcctgctgaaaccgtcggagcgcctcgacgacaagcgcttcacgaggatcgccggcgccgacttcgacgacgccggcctcggcctcgccgggttgctcggctcgctcgcgtccacggggttccaggcctccaacctcggcgacgccatcgacgtcgtcaaccagatggttcctaactatgttttcgtgctcacgctttctgctgttgtgcgcttcgctggatggaagttggactggaggttgtcccacgagaagccaagcgacgactgcgctgaagctgaactcgatcctgcgtacagagaatccgtcaagtgcaagatattcctggggttcacttcgaaccttgtgtcttccggtgttcgggagatcatccggtttcttgttcagcatcgcatggtggacgttattgttacgactgctgggggtatagaggaggacctcatcaaatgccttgcgccaacctacagaggcgacttcactctgcccggagcgctgctgcggtccagaggacttaaccggataggaaacctgctggtgcccaatgacaactactgcaagttcgagcactggatcatgccgatcctcgacaagatgctgctggaacagtccacccaaaatgtttggacgccgtccaaggtgattgctcgccttggcaaggaaataaatgacgaaagctcctacctttattgggcgtacaagaacaacatccctgtgttctgcccagcattgactgacggatcaattggggacatgctgttctgtcactcggttcacagtccaggtcttgttgtcgacattgtacaagatgtacggctgatgaacgcggaaaccatccacgcaagcccaaggaagacagggattatactccttggcggaggccttccgaagcatcatatatgcaacgccaatatgctgcgcgacggagctgactatgcggtgtatgtcaacacagctcaggagttcgatggcagtgattccggggcgcggcctgacgaagcggtttcatggggaaagatcaagagctcagcgagaactgtgaaggtgcattgtgatgcgacgattgcctttccacttcttgtggctgcaacatttgcacgcaaggttcacggcactaaatcaacaaactgaatcggaggcagtgaaattaaaatatggcgctctataactagctgaaactttcctcatatgatggttgagcttgaagcatgaacttttatttgcttgaagggtgtctatctcttagctcgtttactatttatacattactgtaacatatgtatgatatatattcatttgaaaccatttgggttattatcatac

SEQ ID NO: 103145 - DNA, 186 bp, Zea Mays
gctgccaagatatcagtatccttggtttcgtactccggggtgtagtaagtcaatttataatccttaacaccagctttaaatccaacacttgctttagtttctgtttgttgttacataagtccctccctacaactcatgaattaagaattctcacaacgacagggtctactcgatatggattaggcg

SEQ ID NO: 103146 - DNA, 1324 bp, Zea Mays
tgagggcttgtgcccagccgacctctatatatacccacggcgtcccacaggccaaactccatgtccaaccatccaacaacacactccaatcgtcgctagccggccagtactgtccgtcacatacacacacactgacaccaccatccacaagaatctctccacgctacagccgctacatactgcagctgcaagctagcgaggcaagtgtgtaacaactaagatgaagggcaaggcgtcgaggttcctgaagcagatggtgtcgaccatcgtggcggtagtcaaggccaagtccacggcggtgcgcgtcaagaccagcgccctcaagacgcgcctcctcatcttcggcatcctccgcaacaagaagctgctcgtcaccgccatcaaccacaagatccacgccatcatggggcagcagcaggaagcagcagacaacggcgccggcaagcagcagcgcgacagcagcgacgaagacggcggcggcggcggcggcaggaataaggccatcgtgctctacaagccccccagctacagcttctccgcggagctgggcgcccacgaggcggagccgccgccgcaggaggaggaggaggaggacagcgacgactacctcacccactcgctgttcgccgacgaggacgacgagctggtcaacgcgccgggctcggtcatcgacgtcatgcgcgacgccagggcgcgggaggccggcgacggcaacgccgccgagttcagcctcgaggacgagatcgaccacgtcgccgacgtcttcatccgccgcatccaccgccagctcaagctgcagaagctcgactccttcaagcgcttctgcgagatgctcgagaggagcaccgcctgacgcccatggccaccgcatcgtgcatgcatcttcattcacatccatcgtccatccgtgctgccaagtgccaactaatgaattaaccagcaacacttaattaagaggtagtgtgcatggtgaaacaaaaattattaacatggcttctagctgctactgctactgctactagcaatttttgcctctctggtctggtctgccaaggctaccgctgctgtatgaataacttggagatcgaccgaaaaattacatgcatgtaagtagaaggggttaataaaggtggtatgcagacgaagatgcttttcttgaactagggtttaagtagctagaaatggatgggaactgtactttaagtaattatgttctttgttctttggggaacattgttcttgtgcttaaccttcaataaagaggtaaaagaagagtacgtggattggacatcaggctttgatccgtaccgacttctataatttt

SEQ ID NO: 103147 - DNA, 136 bp, Zea Mays
gacaaaataaaagtaaatttgttaataaaacatatttctctcgtagtttatgaaacaacaagagagatatacaagatttgtgaataatgttagaaccatcatgtggatgaacaaataaccaaataaacaaaataaa

SEQ ID NO: 103148 - DNA, 491 bp, Zea Mays
cagcacattccatacagagagaacaagaacttgactggaacagcaagatatgcaagtgtaaatacccaccttggaattgaacaaagccggagggatgacatggaatctcttggatatgtactgatgtacttcttgcgaggaagccttccatggcagggcctgaaagctgggaacaaaaaacaaaagtatgaaaagatcaacgaaaggaaaattgcatttaatacacccaatatttgggaaggttggtttaatacacccaatatttcatttaatgactaaaccatgtatgcatttctcagtgtagcaaaaatgctaaatcggaattatgttatccattgggcaggttttcagtttgattatgtttttaacaggaccattctaaagtaccaacaggcacagatgaccactgctccacctcgtgcaattgctccagcagtaggaaaaagctctgggatggctcctgtgctccaaggacgagaagctactcgtgt

SEQ ID NO: 103149 - DNA, 90 bp, Zea Mays
cacacatttgagatgcatctagatttgtccgtaaatccgggtgtggcaacatgtttcagcatacataggtttcaggttcatatatacaag

SEQ ID NO: 103150 - DNA, 1370 bp, Zea Mays
tttttttggtgtacggttctgccatctaccgtcgcatcgccggctacaccacgcccccgctccatccctgcagcgcgtccgcggccctccgccctcgccctcccccctccccacaaatctcgcctcctcacccaacgccatcagcgctgccctccgctccatccctgtagcgcagaccttcgccaccgtccctgcccttcctcaccgcgcaatcaccgcccttcccgacgtgcctcggccgccatccacggcatcaccttccttccccacgcgcgcgccccctcctctgtgcgtgccccgcccccgttctttgctcacccgatgccccgccacctccgccgcgatagcctcccccacgaagtgcccccgtgatgtcttccattcccttcctccctcattcgtcctgttgcagcgattgctcccagtggctcggcggcaatggaggcaccacctgacccggtcgtcccatcctgctcgacgagatcgtcggcgacatccacggtgtggttccagattttcctttgctggctgccagggctatcaatgcagctcagcgagctagccccactgccagcttagttgtcgtgacagccattggggctgcacgccgtcagtggggtgaaggcgacagctgacgagatgttggccgaagcggagaaggcaaatgtcctagctgcaaaaaaaattgatcgcctgcttcgtcgttgacctcccatgatgttggtttatgctatgactttctgaaggagaagatgaagaacatgtcgacgatgagttcgatgaccggagtctgtggagtgagaagtaaagacgatagtacccgatgacgtcctgggcaaggccgaggcaaggtgttccattactccgccatgttttatttcatttgtactactgtcgtctcctatggtttaatttcagcagtacaaacggagctcatcctatctctttggttgaagctttcccaaatatgagatttttaaaggtcgttatgatatcaaattattaataatggatctcccaggcttggtaaattagtggttctaagtcgtcgaacttccaagtcctagtgtatttgtttcttcattgcaaagaaacttttctcgtttcttgggactgaaagcttaccacaacaaaggaatactactaagtgatactggacttccttggtggtctgcgttcatccatccaatatggaggctccaacacatctcttcattatctgtatctggatttatctgtgtaatagcattatggtgctcctaacttccaagcttcattaaacaaggaaactgaaagtgtcagaactgcaattcatatagactagatttttatgatacattgtaactaatgcattggtaagcattactttg

SEQ ID NO: 103151 - DNA, 1309 bp, Zea Mays
tttttttggtgtacggttctgccatctaccgtcgcatcgccggctacaccacgcccccgctccatccctgcagcgcgtccgcggccctccgccctcgccctcccccctccccacaaatctcgcctcctcacccaacgccatcagcgctgccctccgctccatccctgtagcgcagaccttcgccaccgtccctgcccttcctcaccgcgcaatcaccgcccttcccgacgtgcctcggccgccatccacggcatcaccttccttccccacgcgcgcgccccctcctctgtgcgtgccccgcccccgttctttgctcacccgatgccccgccacctccgccgcgatagcctcccccacgaagtgcccccgtgatgtcttccattcccttcctccctcattcgtcctgttgcagcgattgctcccagtggctcggcggcaatggaggcaccacctgacccggtcgtcccatcctgctcgacgagatcgtcggcgacatccacggtgtggttccagattttcctttgctggctgccagggctatcaatgcagctcagcgagctagccccactgccagcttagttgtcgtgacagccattggggctgcacgccgtcagtggggtgaaggcgacagctgacgagatgttggccgaagcggagaaggcaaatgtcctagctgcaaaaaaaattgatcgcctgcttcgtcgttgacctcccatgatgttggtttatgctatgactttctgaaggagaagatgaagaacatgtcgacgatgagttcgatgaccggagtctgtggagtgaggcagaagtaaagacgatagtacccgatgacgtcctgggcaaggccgaggcaaggaatactactaagtgatactggacttccttggtggtctgcgttcatccatccaatatggaggctccaacacatctcttcattatctgtatctggatttatctgtgtaatagcattatggtgctcctaacttccaagcttcattaaacaaggaaactgaaagtgtcagaactgcaattcatatagactagatttttatgatacattgtaactaatgcattggtaagcattactttgaatgtgtgggtttttccaggggttgagtggtatgttgtggtcagatttggcaacaatgtatctgccatcatgtgctatatcgataaattatgatacaatgtggtcagattctaggtttagttactgtttttgcgcaacctgtgtgccatctgtttaccgacaactggacaaataggacatattgcaatcggataaataacttggcactcttagtcaaaa

SEQ ID NO: 103152 - DNA, 2166 bp, Zea Mays
cgcagccgcagagcacactccactgcggccgaagcaaagcaagacggcggtattagtatttagtaggcaccagcggcttgctccgcgtcgtcatcggtagcgcgcggtcgcgactggcttctcgtagcagcttatctacagtaataatcacaagagcctactaggtggtgggagcagagcagcacttgcaattgcaaccagcaagcgcaagagaggagggggctcaagagtcttgacgcgtctagccttcgcagaaaagggttcaagcgagaagagggggggagagggcacgggttcagagctggaggagatggagagcccgcgcagccccgaggcggagatcggccaccgggtggaggacctctgggaggtggcggagccgcagctctcgccgtcggagaagctcaactcctgcttcgaggacatccccgtcgcgtccttcccgcgcacgcacccgtcccaagtcattgagattccttcagatgcaagtcttgctgaaactgtagaaatattatccaaaaacaaaatcttgagtgcacccataagaaatgttgaggctccagaagatgctagttggatggacaaatacatcggcattgtggaatttgctggtattgccatgtggttgctcagtcagtctgatgctgcagttaatgggacggttggttcgggaccaggatcgcctgtctccagtctagtttcgaggttgggttctttcacattcagaaggacatcatctggaagattagaaactgctactgattctgaatcagacgaagcagcatcggttggtgggagcttttttgaaaccctgacttcctctgaattctacaagaatacaaaggttggcgatatctcagggagcttccgctgggcaccatttcttgcactgcagacatctgacacattccttaccatgttgctgcttctatccaagtacagaatgaagagccttccagttgtagaagtgggaggagataagattgagaacattatcacacaatcctctgtcgtacacatgcttgcagagtgtgttgggctctcctggtttgagaactggggaactaagaaactctctgaactggggcttcctgtcatgaaaccatcgaaacttgtcaaggtaagcgaagatcagccagttctgaaagctttccaactgatgagggaaaagggagttggtggcttgccagtcatggacacaagtggagcaaatgccattggtaatattagcatcagagatgtccagtatcttttaactgctcccaagatatacaaagagcacaggtcaatcacgacaaaggatttccttagtgctgttcgacaccacctccaggagcagcgtgaggcctcaccgttgctgcatgatgtcatcacttgcaaaaaggatgatacaatcaaggacatcatactgaagctggactctgagaagatccacaggatctacgttgtggatgacaaagggaacaccgagggagtcatcaccttgagggacataatctccaagctggtgcatgagccacgccattactttggggatttctttgatggtgttgttcccctgcctgcaaacagcaccgtatgacacatcttcgcggtccaatcacactgatgtatctgtgcaaatgtacattttgagctattctcttctgaagttgcttctagtgtattccttttctcagccttctcggttctcaggtaaacagaccattgcctacatggagaaaaggactaatgctctaatggatggatggcaatgttgtacattgaataatctgtgaacttacctgagtttctttttcatgttctcatgatggcaattgttatctgtcttccttcttgctgaagatgctgttcactagattcagctttgtcatgctgcaaagcaaaattctgcgggagaagatgtattttatcttgtttttaaccttggagtcagactctttcgctgtcatatacctgggtaacttcatcattcacctggtggagtctactacatgtcgtagggtcaaccaaaatatcctcgtgctgcagtgcatccatatattttttccgtcgtggcagcataacgaggtactacctttgaagaagtgtatagtgtataagtggattgattatatttttcatcagtttaaacttttaagttgaactgattagtgcattcaccct

SEQ ID NO: 103153 - DNA, 1466 bp, Zea Mays
caagacggcgaaaagggttcaagcgagaagagggggggagagggcacgggttcagagctggaggagatggagagcccgcgcagccccgaggcggagatcggccaccgggtggaggacctctgggaggtggcggagccgcagctctcgccgtcggagaagctcaactcctgcttcgaggacatccccgtcgcgtccttcccgcgcacgcacccgtcccaagtcattgagattccttcagatgcaagtcttgctgaaactgtagaaatattatccaaaaacaaaatcttgagtgcacccataagaaatgttgaggctccagaagatgctagttggatggacaaatacatcggcattgtggaatttgctggtattgccatgtggttgctcagtcagtctgatgctgcagttaatgggacggttggttcgggaccaggatcgcctgtctccagtctagtttcgaggttgggttctttcacattcagaaggacatcatctggaagattagaaactgctactgattctgaatcagacgaagcagcatcggttggtgggagcttttttgaaaccctgacttcctctgaattctacaagaatacaaaggttggcgatatctcagggagcttccgctgggcaccatttcttgcactgcagacatctgacacattccttaccatgttgctgcttctatccaagtacagaatgaagagccttccagttgtagaagtgggaggagataagattgagaacattatcacacaatcctctgtcgtacacatgcttgcagagtgtgttgggctctcctggtttgagaactggggaactaagaaactctctgaactggggcttcctgtcatgaaaccatcgaaacttgtcaaggtaagcgaagatcagccagttctgaaagctttccaactgatgagggaaaagggagttggtggcttgccagtcatggacacaagtggagcaaatgccattggtaatattagcatcagagatgtccagtatcttttaactgctcccaagatatacaaagagcacaggtcaatcacgacaaaggatttccttagtgctgttcgacaccacctccaggagcagcgtgaggcctcaccgttgctgcatgatgtcatcacttgcaaaaaggatgatacaatcaaggacatcatactgaagctggactctgagaagatccacaggatctacgttgtggatgacaaagggaacaccgagggagtcatcaccttgagggacataatctccaagctggtgcatgagccacgccattactttggggatttctttgatggtgttgttcccctgcctgcaaacagcaccgtatgacacatcttcgcggtccaatcacactgatgtatctgtgcaaatgtaaacagaccattgcctacatggagaaaaggactaatgctctaatggatggatggcaatgttgtacattgaataatctgtgaact

SEQ ID NO: 103154 - DNA, 704 bp, Zea Mays
ctaaataatttaaaagttattgatgctcgtagttttaaggttggactaaacttgtcctaaacaacatgattttatgaccggagtaaattttcatgtctgttgtaaatcttgcccgccttttcttctttattatggtataatagtaagggatgccctactatgtatgattcagaccattaaaaattgacctataatatgtaagaaacttccttttttatactatcgactatacatttgatatttttcgccccactcatccttctgacatggactgcttcttctgccatggaacagtctgatgctgcagttaatgggacggttggttcgggaccaggatcgcctgtctccagtctagtttcgaggttgggttctttcacattcagaaggacatcatctggaagattagaaactgctactgattctgaatcagacgaagcagcatcggttggtgggagcttttttgaaaccctgacttcctctgaattctacaagaatacaaaggtgaacttatttttgctccatatttaaaacagttatatggacttgtagtgaggaccaatccttgacataagttgtgcctgtgtaggttggcgatatctcagggagcttccgctgggcaccatttcttgcactgcagacatctgacacattccttaccatgttgctgcttctatccaagtacagaatgaagagccttccagttg

SEQ ID NO: 103155 - DNA, 967 bp, Zea Mays
agttagaacatttcactttcagtttttcatttctaataaactcataacagactcaagttcaagttatcaatacctaaagaaagatcaatttcatcaaagccatgctaacacgtcactgtggcctactcttttcaaggtaagcgaagatcagccagttctgaaagctttccaactgatgagggaaaagggagttggtggcttgccagtcatggacacaagtggagcaaatgccattggtaatattagcatcagagatgtccagtatcttttaactgctcccaagatatacaaagagcacaggtcaatcacgacaaaggatttccttagtgctgttcgacaccacctccaggagcagcgtgaggcctcaccgttgctgcatgatgtcatcacttgcaaaaaggatgatacaatcaaggacatcatactgaagctggactctgagaagatccacaggatctacgttgtggatgacaaagggaacaccgagggagtcatcaccttgagggacataatctccaagctggtgcatgagccacgccattactttggggatttctttgatggtgttgttcccctgcctgcaaacagcaccgtatgacacatcttcgcggtccaatcacactgatgtatctgtgcaaatgtacattttgagctattctcttctgaagttgcttctagtgtattccttttctcagccttctcggttctcaggtaaacagaccattgcctacatggagaaaaggactaatgctctaatggatggatggcaatgttgtacattgaataatctgtgaacttacctgagtttctttttcatgttctcatgatggcaattgttatctgtcttccttcttgctgaagatgctgttcactagattcagctttgtcatgctgcaaagcaaaattctgcgggagaagatgtattttatcttgtttttaaccttggagtcagactctttcgctgtca

SEQ ID NO: 103156 - DNA, 582 bp, Zea Mays
atggagaaggcacttctcaggtactgtgctagctttctcactcctgacgacaaaaggatgatcctcgggatcaaggaccaggcaaagcaaatgatccaatcagaggtgcttcaagcaatggttcaaatgggtgtccttgttcctactggagatatgactgttgtcagaagaaccgctcaatttttccttaatagctttcaagagtgcctaatagcacaaaggaaggagagagaaatggcaaccgcagaactgggtttcaaaaagcaattaactaaggaggagaagtttgaaaagaggaagcagagacttgctgcaatcggagaggatcttttggcgattgctgctgatcaaccatttcgcttccctgccacatttacatttgtggtcagagcattctcagttctagatggtactgggaaaggccttcatcctaggtttcatattacagagattgctaagccaaatgccaaggaattgctaagatttaatgacgctggtgttgaaatagttgtgaaggcaagtttcaacatttggtcaaagctgttaacctatctctatgatagcacatctcctaagggttag

SEQ ID NO: 103157 - DNA, 787 bp, Zea Mays
gtattcctcctatgacgaattccttaggctccatgaaggtaagcctgtcttaatgggcttgattgttgaacctgacttagtacttttatccatgtcacggcgttgaaccagacagtcactcatgtccttaggatattaacggtatacatcaacaattcattctattttaattgcttgcaaaacttttttggcccttcaaatgagttccacgcatcaagaagtcaagattccaggaggcctaaaataggagaggagggcgcagcttgattcaatccatgtcaagtcagaggctgctgcgagtttggtgtctatctcagtgtacctacactcagttggaaaacttcaaccacactgcaacaaggtttataaaaggtttgctatgaggaaaaacaaatttatgggctcaaacaaaaaccaagccaagaaaacagatatcaactgtgacgccacactcaaaagcttgtttggtgggagggacaaggttgggatgctggagatctccgagcttttgagccgtggcttcccgaaaatctccaagcttttgtggtccatggagccagggatggctctttggtaaaagacttcgttgtggatggcctcttttatggtccatgttaagtcccaagtcccactaggtggttaagcagaaaaatcttgtgatggcattaagactttcagactttgtttttgggtctgatgcatgtaaaaaggattcccagtgtttctgttgctcttgcgatcctgtgaggacacatatgagagaaatatttagtttgttgatggcaaa

SEQ ID NO: 103158 - DNA, 215 bp, Zea Mays
taagggtctcacaaagaaccagatcgttgtgtatttcaaaccagtgttgttggaacacaccaaaacctacaaacagatgaacccaactatctgcgtttcttcagagggcgtggtagtgccggtccttagaccggcagcgccggacagggagttttcatcctttttcactcaaacttcatggttcacctcttctccctcgtatcttgttgcctgca

SEQ ID NO: 103159 - DNA, 845 bp, Zea Mays
atatatagtttctctcctgccacttttgcgagcttaccctcagcacgccgccgctacagcccgcacctcgtttcctctcccgtctccgagatgacgaagcgaaccaagaaggccggaattgttggcaaatatggaaccaggtatggtgctagcttgcgtaagcaaatcaagaagatggaggtatctcagcactccaagtatttctgtgagttctgtgggaaggtaggtcatcctagtttgcagtttttttttttaaaaaaatctgttatactgcaagctgtttttatgtacttgtcaccagtactagaatgttatgaattgtaggatgcagaccgattttgagcacaaaaggaattggttatcaatatatttgttggtttattctcatttcaatggtttataagatgtttaggcatgacgagcaatttgattctaagtacaagttgccctattgttcccacctttgctctgttgtctttccagtttgctgtgaagaggaaagcggttgggatttggggatgcaaggactgtgggaaggtcaaggccggtggtgcttacaccatgaacactgctagtgcggtcactgtcaggagcacgatccgtcgcttgagggagcagactgaagcatgatcggtcgcttgtcaggcatactggggtccactatattggctgtgtagccgagacagtactccagcatttttgggttatgctctaggatctctaaaggttgggtgctaagatttctacttgtttaccgttgtgaatttcacaagtgatatctgatcctattactatcatgatgacgtcaaatttgcttctggtttctaccctttggtttgcaaatc

SEQ ID NO: 103160 - DNA, 2145 bp, Zea Mays
atatatagtttctctcctgccacttttgcgagcttaccctcagcacgccgccgctacagcccgcacctcgtttcctctcccgtctccgagatggtacgccgcttctcctcgtcctcccattcttcccgttactaagtatctgtgtacggtgtatgcctagttgtggacgtttgttattatgtgtcgagcgagatcctagtgtttgacttggtagcccagcagcttcagttcgatatggattcgaaggctccatagtttaattttcttgataggggcgtgccagcaatcatgctttgtaccagtcgtgtttccatggaaatttgagatattagggtacccagataggcctatgtgaaatgtggtggtattgttagcatgacagaaacaatgtaattctaaactgcaatctattgctagcctgtttgtagggtcgtcatcgtagttggattttgctaggctgtcactaggctggattgtgcaatttagcattgcacaacgccttttgtgcagggtaggtttggagcagttgctacctcaggtttgcaatggtaaggtgcccaaaacctgctacacttaaggtagaaggcaaactatttccgtaaagcctgtttgcgctccgcatttgagtcctatataggcttagcctttcaaattctattggtgatcacatgttaaatggaaacatgttgaaggcagtggtgtactcactccgttccaaattgtaagctcaattacttgtcacttttgattttgcatggtttcaaagatttgaccatctgttttctacagcattgtatttgtgagattttttgataaatacttattatcataaatcaatctggatgtgtcaatataccatcaccaacctagatgttcaagatatcttatttggtagattataattatattttttgccagtcgaacgcatggtgacaagtatatgtgaatgtacataacattttatcagtttttaggtgtgctgtatgtttggtttacattgttagtacttgtgcaagttcaagcatattggaaaaatacattgtttgtttactgtaaagacaaactagttatcgaacttgatgaaaaataaaacattttgataaatccaacatggtctccaacttaatgaaaaataaaacattttcataaatccaacccggtcagctgacacatttgctgtaatctgaagctgtacctggcagcatgcaacatgaaagtagtatacagtcctaagtttagcattcaaataccactagtataaatcagtaggccataatattttttcacttgtgttgattttagttgtatttccttcgttcagatgtgtatggagtaatttttctcttgctgctattggagagtcaatagtgactagctgaactgtatggttcttaatggtttacttatataatgtttaagaaattatagttttcctcttgtgttaacctacctgaatggtacagtcttttatattgaattattgatactaacattagtcttgaagctacaactttatagttaccagtattcttttgaacaattttagtgagcagctgtgtaatttattaagtttttataatgcctatgcagacgaagcgaaccaagaaggccggaattgttggcaaatatggaaccaggtatggtgctagcttgcgtaagcaaatcaagaagatggaggtatctcagcactccaagtatttctgtgagttctgtgggaagtttgctgtgaagaggaaagcggttgggatttggggatgcaaggactgtgggaaggtcaaggccggtggtgcttacaccatgaacactgctagtgcggtcactgtcaggagcacgatccgtcgcttgagggagcagactgaagcatgatcggtcgcttgtcaggcatactggggtccactatattggctgtgtagccgagacagtactccagcatttttgggttatgctctaggatctctaaaggttgggtgctaagatttctacttgtttaccgttgtgaatttcacaagtgatatctgatcctattactatcatgatgacgtcaaatttgcttctggtttctaccctttggtttgcaaatccctttttctttgaaaattttacttataatgcttacctgttctcataatcaaggatatcttgact

SEQ ID NO: 103161 - DNA, 652 bp, Zea Mays
atatatagtttctctcctgccacttttgcgagcttaccctcagcacgccgccgctacagcccgcacctcgtttcctctcccgtctccgagatgacgaagcgaaccaagaaggccggaattgttggcaaatatggaaccaggtatggtgctagcttgcgtaagcaaatcaagaagatggaggtatctcagcactccaagtatttctgtgagttctgtgggaagtttgctgtgaagaggaaagcggttgggatttggggatgcaaggactgtgggaaggtcaaggccggtggtgcttacaccatgaacactgctagtgcggtcactgtcaggagcacgatccgtcgcttgagggagcagactgaagcatgatcggtcgcttgtcaggcatactggggtccactatattggctgtgtagccgagacagtactccagcatttttgggttatgctctaggatctctaaaggttgggtgctaagatttctacttgtttaccgttgtgaatttcacaagtgatatctgatcctattactatcatgatgacgtcaaatttgcttctggtttctaccctttggtttgcaaatccctttttctttgaaaattttacttataatgcttacctgttctcataatcaaggatatcttgactgctc

SEQ ID NO: 103162 - DNA, 122 bp, Zea Mays
gaacagaaactgtcgaatctgccattctgcagaaaactaaattcgagatcaaaacctaaccccacatctaatccaacctctaatcctttaatccccatgatccacaaccgccaaaagcacat

SEQ ID NO: 103163 - DNA, 240 bp, Zea Mays
atggcggtttcttcttcctcacgatcacgtagcaagccgggcacacgagcagagctcgcgcaggggcacggcagcccgcggggtggcttcgccggagaccggctcgaccacgggcagggtggacgagcactcggccactgctcagctaggcttggccgcgaccatccatggctgctcggccacgcacccaagggttgggtgctgcacagttctatgtcggctaggctgcagcatgcatag

SEQ ID NO: 103164 - DNA, 327 bp, Zea Mays
caggaaattgacccttgcaagagtattagtgatgaagatattcgcacgaccatccagaattctgggggtccaaaaggggctatgtttctgcccgaggtaccatttgagattcttgtgcggaagcagataggtcgcctacttgacccaagtcttcagtgtgcccagtttatctatgatgaattaatcaaagtatgtccacagtgcttaatcagcgaacttcagaaatttccagctcttaaaaagcggttgagtgaagtcgtttgcagtttcttgagagatggtcttcgacctgcagaaacaatgataacccatatcatcgaaatggag

SEQ ID NO: 103165 - DNA, 440 bp, Zea Mays
actattgttggttctgagatacaattagcagccgaaagaagccaaaagtcacgtgctgttttcgcaagagatgcaatcagaagagtaacatctgaacaggcttctgtggaagcagaaacaagtctgactggtggtaatcagataggtaattcacaggttggtgagagttcaagcaaattaccctcaatcattcctctaaaagagccacccattaccttgaagccatcagaaactgagcaggatgcaacagaggtagccgttgtaaaactattgatcaaatcctactatgacattgtaagaaaaaacattgaggatgcaatcccaaaagctgtaatgcactttctggtgaaccatacaaagcgggatctgcacaacttcctaattcgcaaactatatagagagaacctgctcaatgaattgatgagggaaactgatgaagt

SEQ ID NO: 103166 - DNA, 1658 bp, Zea Mays
aaagtattcgcagtttcataccatagcccagtaggtggaccattctgtcgtgctcacccaatgccaatggagtcggttgcggtcgtggcggtgccgttcccggcgcagggccacctgaacgcgctgctgcacctgtcgctgcagctggcggcgcgcggggtacccgtacactacgcggcgcccatggagcacgtccgccaggcccggtcgcgcgttcaaggctggggcgacgacaccctctgccgcgtacacttccacgagctctccgtctccgcgtacgcctccccgccgccagaccctgccgccgaatcggccttcccctcgcacctcgtgcccatgtgggaggccttcaccaccgacgcgcccgccccgctcgcggcgctcctcggcgggatctccgcctcctgccgccgcttcgtcgtcctgtacgacatcgccaacgggttcgccgccgaagaggccgcgcggctgcccaacggcgaggggttcgggctggtgtgcaccgcggtgtcgtgcatcgtcgggcggacggacgccggcagccggctcgtgcgtgagcgcgggctcgacttcttccccgtcaactcctttgtgacggaggagtttctggctaccgtcggcaagcgggcgagatgggcgcagtccataccgtgcagcgtcggcatcctcgccaacacctgccgcgcgctcgagggtgagttcatcgatattttcgcgcagcagcttgccgccgccggcaagaacctctttgtcgtcggccccttgaacccactactgctgccggacgcgaggtcgcccaagcatggaattagcaaggagcgccacgagtgcctggactggctcgacctgcagccgccggcatcggtggtctacgtgtcgttgggttctacgtcgtcgctgcgagacgagcaagtcgaggagctcgcatctgcgctgcgcgacagcaagcagcggttcatctgggtgctgcgcgacgccgaccgggccaacatattcgcggaccacggcgagagcccccggcacgccaagttcctgcccgagttcgctgaacacacccaggacagggggctggtgatcaccgggtgggcgccgcagctggagatcctggcgcacggcgccacggcggcgttcctgagccactgcggctggaactcgatcatggagagcatgggacacgggaagcccatcctcgcctggcccatgcactccgaccagccatgggacgctgagctcgtatgcaagcaccacaaggcgggcatcctgatccgcccgatggagaagcaaagggaggtgatttcggcagcggccatacaggaggcaatcgagaagatgatggtctctgatgaaggctacaagatccaacagcgcgcaatggcgctgggccaagctatccgtgcgtcagcagcagtaggcggtgggtcagagaacaaggacctggataagttcattgcccacatctcaaggtgatttggggatttctggttggtttgggaaatgtcaagcatatttcaatagaaaattttaattcaatttcagtgtgatctgtaatgttctcaatttaagaaccggagattcaactttagagttggaaatcatctcattgcccatacattcgttttaggcatttatcggagtgagaatggacatcaatttgctcg

SEQ ID NO: 103167 - DNA, 762 bp, Zea Mays
gctagtgcttggttgaactgttctaatgatccaatacatggcaatgacaagaaaggagaaactttttggaaggaaattgcagaatactttaacaagcatgctccagcagatcgtcaaagggacgtcaatcaattaaagatacactggacaaggttgaagacagtgatcaacaatttcaatgggtgttggagcgcagtatcaaaaatgcatacaagtgggtactctgatgatcagttaatggatgaggcacaaaagatgtatgcaaatggtaataacggcaaaccgttcacgctggttcattggtggaaaactctcagaaatgaacctaaattttgtgcacaaatctcacagatggataaggaaaaaggtcagagccataccattgacatcactgaagatagagatctgcttccctcacaacgtcctataggaagagatgcagccaaggctcaaaggaatggaaagcgcaaggcagaagaggttttggatggtattgctcgccttggggacagcataaacaaaattgttgaagtgcaacaagaccggaagcaagagcgtgaaaaagtggctgaaactcaactagaaatctcaaggttacaactcaaagctgcacaggaacagaaggaggcaaaattgcttgaagtatatagctcactactgcagcaagacactagtcaattatctgatcaaggaaagataaaccgagagaggacattgcagaagatggagctgaaattattcggtgataatgctgaagactaa

SEQ ID NO: 103168 - DNA, 796 bp, Zea Mays
gctcgcgccggtgagcacctcccatggcgtggcccatcttcctgctgttgctagggacgacgagcccaagtcttgtctctagcctttccttgccgactatggctgcccagcagctcgacacctccctctctagtgcatgccccggctgtcatttccccacaccgagtgtgccctctcgccatcctttgccttgctgctcacagccgagtttcctactcgtcgcagctcgcgcaccacctgtccggcgatatgcacagtagctgcatgtctcagattatcgcagcagcgagctccttcgccggcgcctgtccactgcagcagtcccgacgcgacgctgtgacccttggtgaggcaccttgctgtcctagccgctggatcgagctttgtcccagcccgcagcttgctatcgtcgagtattgggcttgccgtcgatgccgtgcttgtcgtgcgcaacaagaaccacagcgccacgacttgttccagctcggcgagagcagccgcgtcgtcgtcaacccatgcccttgtcatcatgcctcgcgcattccatgctcgacgaaagccccaagctgtggacagcatgcggacatgcgcggctcgagtcggccaggttgttcgctttagaaaaattgtgatttcgtttttatttatgattcagtcgatggcgtgaatatgtgcgtgaaaatataattgtatgaatggacgcgagtagagaaagaagacgaagtagaaagaaactcgtatgtttttatattttgataaaaaaatatgtgatgcgttgtttgatgcgaaaaactaa

SEQ ID NO: 103169 - DNA, 1716 bp, Zea Mays
cttttcaatagccgacacgtcgagaggagccccttgttgcagcgtgagtgcagcaggcacagggaaggggacaacgtcaagatcctgtcctctgcgtcgactgtcgagggatcggcatggcgttgagggtgtcccccgtgtcgcatggcgccgcggcagcgccgctgccgccgctcgcccggaggaggatggcccgtggggtggtggtggccatggcgtccaccatcaacagggtcaagactgtcaaagaaccctatactcctccacgtgaggtacatcgccaaattacccattcactaccacctcagaagcgggagattttcgattcacttcaaccttgggccaaggataacctattgaacctgctgaagccagttgaaaagtcatggcagccacaggacttcctaccagagccgtcttctgatggattttatgatgaggttaaagaactgagggaacgggcaaatgaaatacctgatgagtactttgtttgcttagttggtgatatggttactgaggaagccttaccaacctatcaaacaatgcttaacacccttgatggagtccgggatgaaactggtgcaagtccaaccacgtgggcagtttggacaagggcatggacagctgaagagaacagacatggtgacctccttaataagtacatgtaccttactggacgggttgacatgaaacaaattgagaagaccattcagtatctgattggttccggaatggatcctgggactgagaacaacccgtacttgggtttcctttacacatcatttcaagaaagagcaacatttgtatcacatggaaacactgcaagacatgccaaggagtatggtgatctcaagctggcacagatatgcggtacgatagcagctgacgaaaagcgccacgaaacagcctacaccaagatagtcgagaagctcttcgagactgatcctgactacacggtgcttgcattttctgacatgatgaggaagaagatcacaatgcctgctcatctcatgtacgatggcaaggacgacaacctgtttgagcacttcagtgcagtagcacagaggatgggtgtgtacactgctaaagattatgccgacatcctcgagttcttggtccagaggtggaaagtcgcagatctcaccgggctgtctggagaagggagaagggcgcaagatttcgtctgtaccttggcaccgagaatcaggcggttggatgaaagagctcgggcaagggcgaagcaagcaccggttattcctttcagttggatttatggccgcaaggtgcagctttaatcaagaacactaggcaatgttggcacttactataccattttcagtcctggggttctctgtaagaaacagtctctaggttatctagcagggtagactactaatggatctcactcacgcaaagtatgctgtctgctattgtgaaagttgcaaagtttggattactatgtgggcctagtgaagacttctgttgtgggggggggggggggggggggggggggctgcgtccagttatgaatggtggctccatcacaactgagtgaacttttgttgaacatgttacaggacttgcgtaataatatggagtttgtatatggacaagcttgctttgatgcatcatgagaatctgaagttagtattttgtgagtgtgtgtgttggtttctgaattggtctcaacttctgatatcatctcgacaatgtctt

SEQ ID NO: 103170 - DNA, 1761 bp, Zea Mays
agctagcagcgtccctgctgctccgcgccacacctctccgcttcattcctatccgtctcccctgctctatcgtcgtcctcctccgtcgggccggaggagcgtctctttgtcggcgcagcgtgcagagcaccgcagattcagagacacgatgatgtcgcgacagtgtgcaaaccgcatctttcttaccggaggttccagcttcctccatggcctcaaatctagagttgcatccagtaggagtcacggcaccgtcagactcaactggcgctgcgtgagaactaatctctggagggccgagcgccttggtgtcaaggctactccgtctgagcatatcattgcagtactgcaagcgtcagatattttcagtggcatcaggaaatggagcaagttgcaattggtcgccatgacaggggtgatggcatgtgtagttctggtagtcccttcttctgatgcagtcgatgctctcaagacatgcacttgcctgctaaaggaatgcagaatagagctggctaaatgcatagcgaacccatcctgtgcagcaaacgtagcatgcttgaacacgtgcaacaatcgacctgatgaaactgaatgtcagataaaatgcggagacctgtttgagaacagtgtagtcgatgaattcaatgattgtgctgtttcacgcaagaaatgtgttccaaaaaaatccgacgtcggcgagttccccgtccccgatccatcttcgctggttaagagcttcaacatggcagattttaatggcaaatggtacatttcaagtggcttaaacccgacgtttgacacattcgattgtcagcttcacgagtttcatgtcgagggagacaaattgatcgcgaacatcacatggagagtccgcaccccagactctggcttctttaccaggtcaaccgtgcagcgttttgtgcaggacccatcgcagcccggcatactctacaaccatgacaatgagttcctgcactatcaagatgactggtacattatctcatccaaggttgagaacaaggatgacgactacatatttgtgtactatcgtgggcgaaatgacgcatgggatggttatggtggttctgtattgtacacaagaagtaaaactgtacctgaaacaataataccggagctggaaagagctgcaaagagcgtaggtcgggacttctcgacgttcatcatgaccgacaacacctgtggtcctgagcctcctcttgtggagagaatcgagaaaactgtggtggaaggagagaagaccatcgtcagggaggtgaaggagatcgaggaggaggttgaggagctggagaaggaggaggcgtcactgtttcagaagctggcagaaggtctcatggaggtgaaacaggatttcatgaacttcttgcaggggctgagcaaggaggagatggagctgttggatcagctcaacatggaagcgactgaagttgagcaagtcttcagccgtgcactaccgttgaggaagctaaggtagctgcagagcaaaggacttggagaaaacaagccatcaagtactggccgaaacggattctatttgccacagcagtacccacagtagagattgttgaacagatacaacaaacatttttaattttcttttctttttcttttcttttcttttcttttctttgtttacccttttctgtggtcaaaacacatgcctacgttagccctatttgtaaagcatcaagagacaacgtaactttttcttgccaaacagagaaaaaaaacaagtgtacttaagac

SEQ ID NO: 103171 - DNA, 102 bp, Zea Mays
ctatgtttttgtatatatctaaatgaattgtttttcataactcttaagatttatgtaagctttatagttcaagaggcccacctaacttgagagccaattttc

SEQ ID NO: 103172 - DNA, 8333 bp, Zea Mays
caagtgtccatcaaagcacaagaaggagcaagcacatgctgtccaagaagaagaggaggctacacttcttgtcgcaagaacgttcccggtaaaatcctccacagaacttcaaacatgctgcaagatgtctggttctcatctagagatcagggaggagaaggtgtttctgcaacgtcaagaagaggagaaactggaggagggaacctggatcctggacactggagccacaaaccatatgtctggatccagggctgtcttcactgatctggacacagaagtgctgggcattgtccggtttggtgacaattcggtggctcggattgagggacgaggaaccatcaagtttgtgtgcaagaatggcgagacccggtcgttcgttggggcttatttcattccccgactgacgacgaacatcattagtattgggcaacttgatgaagcgaagtacaagatccatgttgatgatggggtgatgcgtattcgggaacccgatggaagattgctggcaagaatagtgcgggctgaaaacaggctgtaccttctccatctgaagatacaacagcctgtgtgcttagcagtgcgtgggcgtgaagaggaagtagcctggcggtggcatgagaggttcggccatgtcaatatggctgcactacggaagctggagaaggaagagttagtccgaggcttgcccaagctcggacaagttgaaagagtgtgcgaggcctgccaggcaggcaagcaaaaacgcacctccttcccggcgcaggcggagtaccgggcgaagcagcgtctggagttggtgcacggtgatctctgcggtcccattacaccaatgactccaagaggtaacaaatacttcttattgttggtggatgatctgagcagatatatgtggatggctgccatctcgtcgaaggatcaagctgctgatgctgtgaaaagaattcagatgcaagctgaaggagagtctggactcaagctgaaggcactccggactgatcgaggtggagaattcacctcgggtgagttcgcggagtattgtgcggctggtggtgttcaccgacaacacactgcgccgtacagtcctcagcagaatggcgtggtggagcgccgtaatgggactgttgtagcagcagcaaggagcatgctcaaggcgaagaaactccctggctggttttggggagaggcggtaaaaactgttgtgtatgtcttgaacaggtgcccaaccaagagtgtagatgggatgactccatttgaggcgtggcacggcaagaagccggccgtgcaccacctcaagacgttcggctgcatcgtctacgtccgcaacaccgtacctcatctgaagaagctggaagatcgaggaaagaagatgatcttcatcggctatgaagaaggcacgaaggcataccgcgcctacgaccccgtcaccgagcgcgtccatgtctcaagggacgtcatcttcgacgagcaggcccagtgggactgggaaacccacggcaacaccgacccagtaaatgaagaccaggatgtgtttacgatggagtatgccatcgggaagcaaacacgtccagaggtagaagaggctggtgaagaatcgggagatgagcaaactgctggtgaaactgaagatgagcaagctactggcgaatctgaaactgctggtggtctgtcccctttaacccctcatgctgatacagagcacacttcggaagaggaggatgaaatgcaggaagtggagtttgcttcaccaccggagggaaatattgatgagtatctagatgcctatagagcagaagatgatccacttagattccgcaaggtagatggactactggaatccaaaactccacctggttatgcaacaaggaggctgttagatgaggagttacatgcagaaatagctaatatggtagtagttcagtcctatatggacagatctggtcggcaggatcagggctgatagcagccggtttatttccttgtaatgattagtttgtttccatgtaatggtctataaatatatggccttagaggctaagaaaaggcagtcaatagggcgccaccaaaacctctctgtgttctgtctctgagttccagcattcgcgtgtgtgtgtgtgagactgacccggaggagggaggagctcgccggcaacctgtaaaaggttgtctctccggcgtggtttccaacagcctagaactggaacttgtgggcgtcagcggcagcacaggtggccacctggaacttgtgggcggcactgcagctgtgcaggtgcagcagcacgggtggctctctgtgatgtgttcttgcgcagctgtagcttgttgcctagtttggcaaccctaaaaggccacaatagcagcccatgaggccgcagatgcaacagcaacggcaccccatagcccacagccacagcacccattaatctcaaaagcccatctaaaaacacatgcccaatctggtcgtctcacaccaaatcgaacgattaatcgtgattagacgtcgactaatcggacgactagaattctggtcggtctaatcgcttcagtgggtctagtcgggtttgggttaacgattagtctgactagtcgcgattagtcagatgacttgaaaacactgcttaaaactatgtaaccctacagtctctaaaatatgtcaagatcaaatgctatgcatagttcacattattaattaatgcattccccttaatcaaatatttgggcacaaaaattctgttttcaactagaaaaatgcaaatgctcacatgagtacatgacaatggctgaaatgcaaatgctcacatgaccgagtatatgagatgtgactttggtactgcaattagtgaggatgcagatataagcttgggaggccaggtgttatgtatggccaagcctatgttaggcacaacagggccaaggctgcctaagggggcgtgccaggtggggcctaaggcccgttagctaatagatcagctctatctagatagttatacttatccaaagctagtagatagacttgagatagctctatatatagatatgtaaactcttgaataaaggaagcagaatacctatttattctggcttcccagaggaagccagagtctcttgggatcttctccctgcgcgcgacctagccagggtcacaacggtgccccagcgctgtcgcccttctcgcgcccaatccccaccctacaacctgcgcaatctgcccggtaggatccgtcgttctaccaatctggtaccagaggactcgacgatcatgagttcttccaagtcgccgtcaccaggacagcagccgccgccggccacaagcccgtccgcagcgccggtcgtctccctggccgcggtccctgcgccgtcggaggccatggcgctcggccctcccggcgcggccatcaaccagcaggccgcccccgcgctcaccccggcccagatcgcgacgtcattggcggatctcagccacgccgtgcgtgacatgcagatcaccatgaacgccatgctgacaggccaccttcccttccccaatccacaagccgcccatccaccccagccgccgcacccgtccctgacggcgcagccaccgccggccgcactgcccccacccacgcagccgcctgcgccactccctccactcgtccggcaaccaatctcttaccagtacggcatgccgatcgaccccgggccttcatccaccgcaccaccgcagaccacaacccccatccatatgatccgtttcccaccatccacatcccccatcccatcttcggcgcagggcgcgtctacggtttcaccaccagtgtactccgaggcatccccgcgaccggcgctcacgacttccttacctagcagcgccgccggggggcctcccggggtgctgttaggaggcggcaacggccccctgttcccgggtcgggggcccttgcgccctcacgtggccgcagcgacagcagcgtggtcaccgtaccacgggctgcctcaggacgacgacatggagaccgcaacctacgggggcgctgaggcgcgcgcgcctccacgctactacaaactagagttcgccacagacgatggctctgaggatccgctgaactggctaaatcattgtaagtagttcttccgggggcagcgcacgccagcctcggatcgcacgtggcttgcctcgtaccatcttaaggggccggcacagacgtggtactatgccctggaacaggacgagggcatgccgtcttgggatcgcttcgctgagctgtgtcgccttcgcttcggtccagcaatgcgcggttctcgccttgcggagctgggacgcatccccttcctgtccacgatccaggagtactcggaccgcttccaggcgttgctatgtcgagctcgggacgtctcccccatgtagaagacagagttgttcgtgggcagcctccccgagtacttgcgggtggacgttgagctgcgcaacccgcaggatctacaaactgccatgtacctggcgcgggcgttcgaacggcgcgcggcggcctggcccccatcccagcagcgcgggtcgcgaccaccgcaacgggcgcaggggtcgggacgcgcgacaccagcaccgcccggggctccaccgaccggtacgacgacgtcaggcgatagtacgactccgacacgcccgtttcgccgattatccccggccgagcagcaggagcggcgccggcaggggctctgcttcaactgcgacgagccctacgtccggggacacgtgtgccagcggctgttctacttggaggtcgacgatttcctcgacgaggcggccggtgagggtggggtcgaccccctggaggagccggctgccccagacgtcaccgtagccaacgcgcgggtggtctcgttacacgcgctggcgggcatccggacggacaagacactgctgctaccagtcaccatcaacgacgagcgactactcgcgctcatggacacagggtctacccacaacttcctcaacagtgacacgatgagcagcctcatgctagctatggcgggtggcgagcaccttcaggtcacggtggtcaacggtgaccgcctaccctgcgccggcattgcccgtgacgtccccgtcatcatcaacgatgagtccttcagtccttctccatcacgtgtgtcgggatacgcctgggctccttcgacttcatcctcggcgtggacttcttggagacgttgggtaccatccagtggaacttccgagcactgaccctgtcgttctggcgccaggaccggcgcatccactggcagggtgtgagggccacgcaacagcctgccccgcagcagctggctgtggcagtcgtcgacactgcccaacagcccctcatggacgtccttcttcagcaacatggcgccatcttcgacgagcccacgggactgcctctggtccgcccctacgaccatcgcatccacctgctgcccggtacagctccggtggttgcacgaccgtactggtacgcgcaactgcagaaggacgagctggaacgacagtgtgaggccatgctcacacaaggcatcatatgaccaagcacgcgccgttctccgctccggtgctcttggttcgcaaggcggaccgctcgtggcgtttctgcatcgactaccgcgccctcaacgccaagacgtccaaggacaagttcccaatcccggtggtggacgagctcctcgacgagctccatggagcctgtttcttctccaaactggacctacgctcaggctaccaccaggtgcggatacacaccgatgacatcgccaagacggcgttccgcacccatcatggccattatgagttcctggtcatgtcgttcgacctctcgaacgcgcctgctactttccaggccctgatgaacgacgtactccgcccatatcttcggaggtttgtgcttgtcttcttcgacgatatcctgatctacagtgcatcatgggcggagcacctccagcatgtgggcatcgtcctcgaggcactgcaggcacaccacctccacctgaagcgctccaagtgttccttcggcgccacatcggtggcctatcttggccatgtcatctccgagggcggggtcgccatggacaccgacaaggtcgcggcagtggcctcttggccgcccccgcggtctgcacgaggcctccggggcttcttgggactggcagggtactatcggaagttcatcaaagacttcggcctcattgcagccccgctgacgcgtctcttgcgacgagacgcgtttgcctgggacgatgacgcaacagcagccttccacgccctaaagcacactctgacgacgggcccagtgctccagatgtcggacttcgccaagctcttcgtcgtcgactgtgatgcgtcaggtgcagggttcggtgctgtccttcatcagggggcaggacctctcgcctacttcaacaagccatttgcagcccaccaccttaagttggcggcctacgagagggagctcatcggcctcgtgcaggccgtccgtcactgacgcccgtacttgtgggggcgccacttttctgttcgtactgaccactacagtctaaaattcttgctggatcagcgcttgtccacagttcctcagcatcaatggaccagcaagctgttcggtttcgacttctcagtggaatacaggccggggcgcctgaacaccgtggccgacgccctgtcccgccgcgactcggaggctgccatggaggacacggctatggcggcacgggccatctcgggcccgacattctccctgttggacgacatcaagcgggcgctagcagctgctcctgacaggcagcacctcctccagcagctgcgggagggcgtactggctgcgccatggcgccttgtcgacgggctgctcctgcacggcacacgcatcttcgtgtcgaactacgacgacctgcgctaccaggtgctgacattggcgcactcggcgggtcatgagggcgtccagaagaccctccatcgactgcaggcggacttctacattccacatgatcgtgcgctcgtccaggactgggtgcgcacctgcaccacgtgccagcaaaacaagacactggcgcagtagccgggcggcctcctgcaacaccttgaggtgtcgtcccaggtatgggccgacatctccatggacttcatcgaggggctgcccaaggtggcaggcaagtccgtcatcctcacggtggtggatcgcttctccaagtacgcccacttcatcgccctcggccacccctacatcgcgtcatccgtagcgcgggcattcttcgacggcatcgtacgactacacgggttcccgttgtccattgtcagtgaccgggaccccgtcttcaccgggcacgtgtggcgcgacctcttcaggatggcggggtgacactaaagatgagcaccgccttccacccacagacggatggacaatcggaggtggtcaacaaaattattgcgatgtatcttcggtgtgtcaccgacgatcgaccgcaggcatgggtggataggctgtcctgggcagattattgctataatacctcctaccacacagcattgcgtgccactcccttcgaggtggtctatggcagatccccaccgtccatgctaccgtacacgccagggacggcacggactgaggccgcagacgacatgctacgctctagagatgagatgctagccaaggtgcacagaggcatcataagatgggacaataatgtgaagagaggtagagggcggtcaaacttgacatgggaggagcttatcaaaagggacttgaagaaatggaatatcacaaaggagttgtgtttggatagaagtgcttgaaaagaagctatccacgtgcccgaaccgtgattaggcattttccattttagttctctcaaaagcttttccccctcccttttctctctctttttttggtgacttcttgttgggttcaaattttagcttggaactaaaaggctatgttgatgttgatgttgtcacatgacagtggctaatggactctgaagttcatgtacatatttcattgtaacatgtgaaataaaataaaaatgaatgttactgttccatatgaagtaatcggatgcagcaaacataacctaaagaaaatggcaccacattacaacatagtctaaaatgtcgaatcttttgtttcaatctggaaagtatcaaaacaaatttctagattttggcgaactaatgaagttcggaatatgaaataagaaatggaaattatgcattatggaactattcctagtagtacaatgtacctttggctgagatgtcttcttcgatgaagtctgctttggtggtttcttattttggcgtgcatgcatttcatcagcaatttgacgccttg

SEQ ID NO: 103173 - DNA, 1461 bp, Zea Mays
cagaatcgtaaacctcggactctccattttgtgatccgagggaataatgtgtatagccgtttgctatatcgcgcatcgattctttgctcgtcgttagaaatcttgatccgaaatatctgcgattttcggaatacagaaaaatctaaaaggaaaaatatcccacgaattcttatctctccacgtcagccgttccaatcccagacgaccgcccagccgccgaagacctccctcttcctgatctgttccacggtcagcagctcctgtacgcttccctctctgtcccttggatagttctgcactaccggctatatctccagccgcgcgtctccctgctctctgtgttcttcttcctccccgtacgcggctctctccagctcgctcagatctcccatggcgcttggcgtccaagcccctggttgagctcgccctgccttttctgctcgcccaatctcccttttcttcaatccgggattgaggtccttctctggtcatgctgcgtccattctctctacgattgtctctgtgtctcggttgagtccgtgctcctctgctcggcgtcttccctgctcgccagtggagcttcctccctgttgcggctcagcctctaggttgcttcctcgccgtgcccaaggttcctccatggctacgtttccccgctgtctgcgcgcagccgcgtcctcgagtttagcccagcttggcaacaccaatagactccctggaaccagcgccctgctccctgttgccgcgagctccagctcggattcagcccagctcacccctacccatgtcgcgcgggtttctctaatcccggcgttgtcgtttcagttgaccacgccggctgtgagttgagtttggtttcggcgggttactcggattactttcgaccggtgttgagagttcgtcatgtggtgtatgacggggagatacgtaaaaaaaggtcctagccggttatggagaaacttgttgagcgtcggatgaagatgtgcgtgaagttcgtataatacctgccaagtgctcgacaaattgtcttgttgggactatgcttcgtcgccgaaggtcttgtaggaagaagcagcttcggctgaagctgtccgcatgagacgaccgaaggatcctcttcgtgaagcttcggaattacaaaccaacttaaaagtagaatgaccttttagtccataaatgtttgagtcgctgttgtaatcccttataaggggcataattgtaattccccacaggctgtgtcctgtgcctataaatagtgaacagtattcctttactgttcacggattcctgtatttgcaatcgcatcattcgggaaccaatctttgccaaggcagaggtataactgtattcaatgattaaatatactgagtagatataatatggttcgtttatgattcatttacctttgatactctatattttatgttatcttatacaatctattaaaattcaattacaaat

SEQ ID NO: 103174 - DNA, 2404 bp, Zea Mays
atggcgtcccagaagagttgtcttctgatcactttctcccaggagattgtagatggggtgcctttgtatgtttcatcaaactgccttcctgtaaaagctttgaaatatgaacctgctggtcattcgttccatgctgcggcaatgaagcttcttggtcttgtggagcatgaagatatagaaactgatgatcgcagcgtttcatcggatgacaaaagccaagattttaatactgcttctgatacctttagcagcaaagggaagaagaagtcatctggcagtcaacagcaggaccactatgctttgcttgggttggggcacttgaggttcttggccactgaagatcaaattcggaaaagttaccgtgagatggctctcaaacatcatccagataagcaggctgccctgattcttgcagagacaacagaggaggcaaaacaagcaaaaaaggatgagatagagagccatttcaaggccatccaagaggcctatgaagttctcatagaccctacaaagaggaggatttatgactctacagatgagtttgatgatgatgtcccaacagactgtgccccacaagacttcttcaaagtttttggcccagccttcatgagaaatggacgctggtctgttacccagcctattccttctcttggagatgatactactccagtagaggaggttgataagttctacaatttctggtacaacttcaagagttggagagaatttccagatgatgatgagtacgatttggagcaagctgaatctcgtgaacataagagatggatggagaggcagaatgcaaagctacaagagaaggccaaaaaggtggaatacgcgcgagtgcgcatacttgtagacaatgcttataagaaagacccaaggatccagaggaggaaagaggaggagaaagctgagaaacagagaagaagggaggcgaagtatttggcaaagaaattacaagaagaggaagcagcaaaagctgttgaagaggaaaggataaggaaagaagaagagtctaagaaagctgcagaagctgctctacatcagaagaagctaaaggagaaagagaagaagctgctccgcaaagagaaaactcggttgcgcactcttgcagcacctgtcattgcagatagccactttggtctgtcagaggcaaatgttgaatcggcatgtgcttcacttgatatggaacagctgaagaagctctgtgatggaatggatagtaaggatgcagctggaaaggccaggttgctgagcaatgtacttcgcaatgaaagttcctcaaaggaagcaaagaaaattgaagggaatggtgtggagccttctgccccaaaatccaactctacaggaggtagagcgacagaagccagtaacagcatattgaacagctatgagaaaaaagagagaccatggggaaaggaagagattgagatgcttaggaaagcaattcaaaagtatcctaagggaacatcgaggagatgggaggttgtttctgaatttattgggactagcagatcggttgaggaaattctcaaggccaccaagactgttcttctgcagaagccagactcatcgaaagctttcgactctttccttgagaagcggaaaccgacacaatcaattgcttcgcctctttcgacccgagatgaaattagttcaactgagggagctgggactgcatcgtcaaaggctgcagcacaatctgcgaatagccagacagccaatgagaaagctgctgctgatcctgtcacggatggaggaccatccgtgtcagatccagatgcctggacagatgcgcaggtcctggctctagtccaagctttgaaggcttttcccaaggatgcaagccaaagatgggagcgtgtggctgctgctgttccatgtaaaaccgtagtccagtgcaagaaaaaagtagcggcaatgagagagaatttccggagcaagaaaagtggggagtaggctgaggcattgcctcactggaagtatattttgcaagaaagagtctggacggcaatatttatagaatggattcagcatcttagctagagaggtattgcttggcgaacctttcatctcatgccaccagtggtgaggataattttgttatggagctgtgacagctcatttattgtggctggccaccagggttgttttactttgagcagccgtagcaggatgccatcgaagctcatctattgttgatgggctgatggttggcaattttgccgcagtggttcgtgtgggattttgtttctgcaggctcctggggttgtatatgcgctgctgtaagccaatgaatgaattgtgagctattccaacattcttagagtcaattcatctcaggtttgatcaaatttatataataaaacactaatatttatgataccaactatgtcattag

SEQ ID NO: 103175 - DNA, 261 bp, Zea Mays
atggaggtcgatgatgatgtttctgggtcaagggtcgctaccactgtacccgtttcttgtgactatgagttagaggaagaggaggcacattctaatgttaaggatttggaaaaggaactggagtcaacaaaaagtgttcccaatagccatattgtggaactatggaaggagaagaattctgccacattagagatagagcggctaaaggcttctttgatgaatattgagaatgatctatcgcagcaacttgataggatttaa

SEQ ID NO: 103176 - DNA, 1315 bp, Zea Mays
cgtctgtcttgctgctcgttcctgcagctcagacgtcgcctcccttctaccccttgctcctcagccaggcttgttagccgagcccctccaactagcgtgctagacctttgacgccgtttccccgtcgtccaagctccaccatgcccacacgtccgtcctgctcctccatgcacacgcccatgcatccttatctccctggaaacttcactcgtgtacggctccctggtgataatattcagcgatgcttcgccagggcaccgttcccctgcgcgctcgctggacgccgtcgcacatgctccctgctcggcctccccggcgtgctgctccctcgccttggtgcccctgcgagctccttctctctggcccggtttccagctcgggcctcgctagatgccgatgccgcttttctgacctcgtctcgatactcaatcgctgcagcacgccatgccgtgtgtgctgcactgtcatcattcgctatcctcatttttgctaatttttctcgtcgtttctcgtctacaaccttgtcagctcctgcgtgtcgtgcgcgtcttgtgttcgggtcgagccccaggattttgaggaaaaggaagctccagtgcattggccggtgaaatgaataaaatggattttgaagaaaaggaagctccaatgcatcagccggtgaaatgaataaaatggtggtaattatggtccttgtgaaatctgagatcaacttagtcgcgtgacacaccaagataacacgtgttatgtgctctccatcaacaagtgaagctcaccgaagaaggatcattaactctaccggtgtctactgctcagaacagggtctcgctgccgcagaacgttgtcgcagaccgcttcaccgtcgaccctttgaactgcgtcatccccggttaatctcgcgcgcgtaccgacagcttcgaagagcctgtgtcgatgccctcgccgtcgtcaatgaagcgccaccgtggtcgatctggcgcagaccgccggagttctgcactgcggcgttgtgggctagaacttttgtaaaagagtggaatctgagggacttaagtgaatctgtcagtgagtaagatcaatagtggcaaggaccgatgtggattagtttgagcgcgaaggtcctttttgcaagatgtgtggtgcggtcgcgggctgttcattgtgggccaactctacctgccactgggtcggctgggctaggtttcggcacagtactgtactcagttttgttgtttcttttatcagcaaacttgtaaattgagctaaaaatcatagaaaattccaaaaatcatgggataaattttgttggatgtct

SEQ ID NO: 103177 - DNA, 1034 bp, Zea Mays
gcagctcagacgtcgcctcccttctaccccttgctcctcagccaggcttgttagccgagcccctccaactagcgtgctagacctttgacgccgtttccccgtcgtccaagctccaccatgcccacacgtccgtcctgctcctccatgcacacgcccatgcatccttatctccctggaaacttcactcgtgtacggctccctggtgataatattcagcgatgcttcgccagggcaccgttcccctgcgcgctcgctggacgccgtcgcacatgctccctgctcggcctccccggcgtgctgctccctcgccttggtgcccctgcgagctccttctctctggcccggtttccagctcgggcctcgctagatgccgatgccgcttttctgacctcgtctcgatactcaatcgctgcagcacgccatgccgtgtgtgctgcactgtcatcattcgctatcctcatttttgctaatttttctcgtcgtttctcgtctacaaccttgtcagctcctgcgtgtcgtgcgcgtcttgtgttcgggtcgagccccaggattttgaggaaaaggaagctccagtgcattggccggtgaaatgaataaaatggattttgaagaaaaggaagctccaatgcatcagccggtgaaatgaataaaatggtggtaattatggtccttgtgaaatctgagatcaacttagtcgcgcagtgacacaccaagataacacgtgttatgtgctctccatcaacaagtgaagctcaccgaagaaggatcattaactctaccggtgtctactgctcagaacagggtctcgctgccgcagaacgttgtcgcagaccgcttcaccgtcgaccctttgaactgcgtcatccccggttaatctcgcgcgcgtaccgacagcttcgaagagcctgtgtcgatgccctcgccgtcgtcaatgaagcgccaccgtggtcgatctggcgcagaccgccggagttctgcactgcggcgttgtgggctagaacttttgtaaaagagtggaatctgagggacttaag

SEQ ID NO: 103178 - DNA, 900 bp, Zea Mays
aaaaactaattagtggacattgttttttagtgttttaaatctttaggatctaagtggtttacaaagttgattaatatgtttctatccttattctgaattattggtatataaaaatagtgaattaaagtttggcgagttgtttgacattggactcagttaaattaaaatagcgtggacatgcatggtatttagtaccatctcgacacctagtaatttcttttaagtggtattatgtgcctcgccatcaagtgttcagttttctactgtgttcaccttaccgtggccatgatactcgaagcagtgacacaccaagataacacgtgttatgtgctctccatcaacaagtgaagctcaccgaagaaggatcattaactctaccggtgtctactgctcagaacagggtctcgctgccgcagaacgttgtcgcagaccgcttcaccgtcgaccctttgaactgcgtcatccccggttaatctcgcgcgcgtaccgacagcttcgaagagcctgtgtcgatgccctcgccgtcgtcaatgaagcgccaccgtggtcgatctggcgcagaccgccggagttctgcactgcggcgttgtgggctagaacttttgtaaaagagtggaatctgagggacttaagtgaatctgtcagtgagtaagatcaatagtggcaaggaccgatgtggattagtttgagcgcgaaggtcctttttgcaagatgtgtggtgcggtcgcgggctgttcattgtgggccaactctacctgccactgggtcggctgggctaggtttcggcacagtactgtactcagttttgttgtttcttttatcagcaaacttgtaaattgagctaaaaatcatagaaaattccaaaaatcatgggataaattttgttggatgtctaaaatc

SEQ ID NO: 103179 - DNA, 591 bp, Zea Mays
atggatgacgatgaggaggaggcgcggacgatggcgtgggagcggcggaaggcggagcggagcggaggcggcgagcagagtggtggcatggcggtggcgaaggggagccagggcaagggcatggcggtggcggaggaggtggtggtgccctacgcaagcggaggggagacgggccacgaggcagaaacggtggccgaatggaggcgagacggagacaccgagatgcaaggaagagtggagagagtacgggaggtcgtgatcactcagagctggattggaaaacgatttcaggttcggactccacgaatcggcacgcccggcgttccgccgtacgacgttatatcagtttatcttgcctcaggagtttttttaattaagaatttgacatcattggcatatggcgtccgcgcgttgaagaatgttgtaggacaacccaatagagcaacgatgatcgccagcaccatgaagaatgttgtagggacaaccaccgccaatgccaccccgccaagcctccgcgcgttgccaccttcttcgaatcatcgacacaccaacccagtaggccccaaccaccagagctcctacaccagctaa

SEQ ID NO: 103180 - DNA, 1512 bp, Zea Mays
ggccgacgggtcgtgcggtcgtgcccaacggccttctcagcccatctcgtgcccacgtccctcttcccatttctgaccaacccctcttcatccctcggactacaaatgcggcgcaaccgtgagcgcagctgcagttggggagtgtgcagcagtatgttctcggtctcgccatcgcatctcgcagagtagacactcaaatccgattgtcgagggggagaaggtggagatcgttgtaacggctagttgcgtcggcccgatggacccgtcgtaccatggcggcggcgccgccggtggaagcgccgacgaccatggccaaattctttgggattggacagaacagcattgtgaacctaacgattcaagtcatgatgctactaaatttgtgtgggattgcctcaatcaagatgacaatgagctgttgggattgcttggaaatcaaaccccattgagatactgccgtgatttcttcgctgaccttgatgatatcacatgcaaggagaccctggacctggaggaatctcgggaatcaaagcggcggcgcacattggagtaccctttggagtctagtcagtcagaagttgggactcatgaaaccggttcacctttcgtcacacctgaggtagcagaaatttcattgctctgcactgataaaccacagagcttaaattgtggtatgcaccacactttaaataatctagatacaataaattccttgtcagatgaagcaccctaccagcaagaagatatccttttggaacattgctcttatggaacggcagtgtaccttgagccagatcaaacaccttgtagccagcagagcattgcatgtacaaatgatcaagctggtatttcaggaacaagtgagattgcaccaatgacagaaagtttcataatgcaggaaactaggaagctttctacactcaaagtctccaatggagcaagctcgtcactagttacgaaggacaacttaactacctcagtagcatatccttttactctcatcaaaccatcctggcaagaaggcgatgttaccttgcaggatataaatcggcgaatccgtcctcctaagaaggccccagagatccttggaacttcagcattctctggcaagccagtgattaacaagacaagaatcagaacagaaggagggaaaggaagcatcacaatactaagaacaaagggctgagaaccggaaaatacctttgatccttatttatctgctcctttgtggtcaattgtacaggtctgagcacttgaggctgccattgattcacagttcatggaacagagggcttagagcttgaggatgccattgattcttatttatctgccattctctcgattgcttttggcactctggtcaatgtgcaggcctcttagctttccagctgttactttttttctttcagttttgtaccgtgactttgtcttgtgaatagtattatgacatgtggatgtggtcaacgatatatacaaagcactaaagttaatggaattagtgtgttaaattcc

SEQ ID NO: 103181 - DNA, 1464 bp, Zea Mays
ggccgacgggtcgtgcggtcgtgcccaacggccttctcagcccatctcgtgcccacgtccctcttcccatttctgaccaacccctcttcatccctcggactacaaatgcggcgcaaccgtgagcgcagctgcagttggggagtgtgcagcagtatgttctcggtctcgccatcgcatctcgcagagtagacactcaaatccgattgtcgagggggagaaggtggagatcgttgtaacggctagttgcgtcggcccgatggacccgtcgtaccatggcggcggcgccgccggtggaagcgccgacgaccatggccaaattctttgggattggacagaacagcattgtgaacctaacgattcaagtcatgatgctactaaatttgtgtgggattgcctcaatcaagatgacaatgagctgttgggattgcttggaaatcaaaccccattgagatactgccgtgatttcttcgctgaccttgatgatatcacatgcaaggagaccctggacctggaggaatctcgggaatcaaagcggcggcgcacattggagtaccctttggagtctagtcagtcagaagttgggactcatgaaaccggttcacctttcgtcacacctgaggtagcagaaatttcattgctctgcactgataaaccacagagcttaaattgtgatgaagcaccctaccagcaagaagatatccttttggaacattgctcttatggaacggcagtgtaccttgagccagatcaaacaccttgtagccagcagagcattgcatgtacaaatgatcaagctggtatttcaggaacaagtgagattgcaccaatgacagaaagtttcataatgcaggaaactaggaagctttctacactcaaagtctccaatggagcaagctcgtcactagttacgaaggacaacttaactacctcagtagcatatccttttactctcatcaaaccatcctggcaagaaggcgatgttaccttgcaggatataaatcggcgaatccgtcctcctaagaaggccccagagatccttggaacttcagcattctctggcaagccagtgattaacaagacaagaatcagaacagaaggagggaaaggaagcatcacaatactaagaacaaagggctgagaaccggaaaatacctttgatccttatttatctgctcctttgtggtcaattgtacaggtctgagcacttgaggctgccattgattcacagttcatggaacagagggcttagagcttgaggatgccattgattcttatttatctgccattctctcgattgcttttggcactctggtcaatgtgcaggcctcttagctttccagctgttactttttttctttcagttttgtaccgtgactttgtcttgtgaatagtattatgacatgtggatgtggtcaacgatatatacaaagcactaaagttaatggaattagtgtgttaaattcc

SEQ ID NO: 103182 - DNA, 1317 bp, Zea Mays
gacgggtcgtgcggtcgtgcccaacggccttctcagcccatctcgtgcccacgtccctcttcccatttctgaccaacccctcttcatccctcggactacaaatgcggcgcaaccgtgagcgcagctgcagttggggagtgtgcagcatctttgggattggacagaacagcattgtgaacctaacgattcaagtcatgcagatgctactaaatttgtgtgggattgcctcaatcaagatgacaatgagctgttgggattgcttggaaatcaaaccccattgagatactgccgtgatttcttcgctgaccttgatgatatcacatgcaaggagaccctggacctggaggaatctcgggaatcaaagcggcggcgcacattggagtaccctttggagtctagtcagtcagaagttgggactcatgaaaccggttcacctttcgtcacacctgaggtagcagaaatttcattgctctgcactgataaaccacagagcttaaattgtgatacaataaattccttgtcagatgaagcaccctaccagcaagaagatatccttttggaacattgctcttatggaacggcagtgtaccttgagccagatcaaacaccttgtagccagcagagcattgcatgtacaaatgatcaagctggtatttcaggaacaagtgagattgcaccaatgacagaaagtttcataatgcaggaaactaggaagctttctacactcaaagtctccaatggagcaagctcgtcactagttacgaaggacaacttaactacctcagtagcatatccttttactctcatcaaaccatcctggcaagaaggcgatgttaccttgcaggatataaatcggcgaatccgtcctcctaagaaggccccagagatccttggaacttcagcattctctggcaagccagtgattaacaagacaagaatcagaacagaaggagggaaaggaagcatcacaatactaagaacaaagggctgagaaccggaaaatacctttgatccttatttatctgctcctttgtggtcaattgtacaggtctgagcacttgaggctgccattgattcacagttcatggaacagagggcttagagcttgaggatgccattgattcttatttatctgccattctctcgattgcttttggcactctggtcaatgtgcaggcctcttagctttccagctgttactttttttctttcagttttgtaccgtgactttgtcttgtgaatagtattatgacatgtggatgtggtcaacgatatatacaaagcactaaagttaatggaattagtgtgttaaattcc

SEQ ID NO: 103183 - DNA, 856 bp, Zea Mays
caacggccttctcagcccatctcgtgcccacgtccctcttcccatttctgaccaacccctcttcatccctcggactacaaatgcggcgcaaccgtgagcgcagctgcagttggggagtgtgcagcagtatgttctcggtctcgccatcgcatctcgcagagtagacactcaaatccgattgtcgagggggagaaggtggagatcgttgtaacggctagttgcgtcggcccgatggacccgtcgtaccatggcggcggcgccgccggtggaagcgccgacgaccatggccaaattctttgggattggacagaacagcattgtgaacctaacgattcaagtcatgatgctactaaatttgtgtgggattgcctcaatcaagatgacaatgagctgttgggattgcttggaaatcaaaccccattgagatactgccgtgatttcttcgctgaccttgatgatatcacatgcaaggagaccctggacctggaggaatctcgggaatcaaagcggcggcgcacattggagtaccctttggagtctagtcagtcagaagttgggactcatgaaaccggttcacctttcgtcacacctgaggtagcagaaatttcattgctctgcactgataaaccacagagcttaaattgtggtatgcaccacactttaaataatctagatgaagcaccctaccagcaagaagatatccttttggaacattgctcttatggaacggcagtgtaccttgagccagatcaaacgtttgtccctctctggttccactgaaaccactttatttggctcatttatttgttagtcgtgatatattcatctcctgcttgctgtagaccttgtagccagc

SEQ ID NO: 103184 - DNA, 1574 bp, Zea Mays
caacggccttctcagcccatctcgtgcccacgtccctcttcccatttctgaccaacccctcttcatccctcggactacaaatgcggcgcaaccgtgagcgcagctgcagttggggagtgtgcagcagtatgttctcggtctcgccatcgcatctcgcagagtagacactcaaatccgattgtcgagggggagaaggtggagatcgttgtaacggctagttgcgtcggcccgatggacccgtcgtaccatggcggcggcgccgccggtggaagcgccgacgaccatggccaaattctttgggattggacagaacagcattgtgaacctaacgattcaagtcatgatgctactaaatttgtgtgggattgcctcaatcaagatgacaatgagctgttgggattgcttggaaatcaaaccccattgagatactgccgtgatttcttcgctgaccttgatgatatcacatgcaaggagaccctggacctggaggaatctcgggaatcaaagcggcggcgcacattggagtaccctttggagtctagtcagtcagaagttgggactcatgaaaccggttcacctttcgtcacacctgaggtagcagaaatttcattgctctgcactgataaaccacagagcttaaattgtggtatgcaccacactttaaataatctagatacaataaattccttgtcagatgaagcaccctaccagcaagaagatatccttttggaacattgctcttatggaacggcagtgtaccttgagccagatcaaacgtttgtccctctctggttccactgaaaccactttatttggctcatttatttgttagtcgtgatatattcatctcctgcttgctgtagaccttgtagccagcagagcattgcatgtacaaatgatcaagctggtatttcaggaacaagtgagattgcaccaatgacagaaagtttcataatgcaggaaactaggaagctttctacactcaaagtctccaatggagcaagctcgtcactagttacgaaggacaacttaactacctcagtagcatatccttttactctcatcaaaccatcctggcaagaaggcgatgttaccttgcaggatataaatcggcgaatccgtcctcctaagaaggccccagagatccttggaacttcagcattctctggcaagccagtgattaacaagacaagaatcagaacagaaggagggaaaggaagcatcacaatactaagaacaaagggctgagaaccggaaaatacctttgatccttatttatctgctcctttgtggtcaattgtacaggtctgagcacttgaggctgccattgattcacagttcatggaacagagggcttagagcttgaggatgccattgattcttatttatctgccattctctcgattgcttttggcactctggtcaatgtgcaggcctcttagctttccagctgttactttttttctttcagttttgtaccgtgactttgtcttgtgaatagtattatgacatgtggatgtggtcaacgatatatacaaagcactaaagttaatggaattagtgtgttaaattcc

SEQ ID NO: 103185 - DNA, 1471 bp, Zea Mays
caacggccttctcagcccatctcgtgcccacgtccctcttcccatttctgaccaacccctcttcatccctcggactacaaatgcggcgcaaccgtgagcgcagctgcagttggggagtgtgcagcagtatgttctcggtctcgccatcgcatctcgcagagtagacactcaaatccgattgtcgagggggagaaggtggagatcgttgtaacggctagttgcgtcggcccgatggacccgtcgtaccatggcggcggcgccgccggtggaagcgccgacgaccatggccaaattctttgggattggacagaacagcattgtgaacctaacgattcaagtcatgcagatgctactaaatttgtgtgggattgcctcaatcaagatgacaatgagctgttgggattgcttggaaatcaaaccccattgagatactgccgtgatttcttcgctgaccttgatgatatcacatgcaaggagaccctggacctggaggaatctcgggaatcaaagcggcggcgcacattggagtaccctttggagtctagtcagtcagaagttgggactcatgaaaccggttcacctttcgtcacacctgaggtagcagaaatttcattgctctgcactgataaaccacagagcttaaattgtggtatgcaccacactttaaataatctagatgaagcaccctaccagcaagaagatatccttttggaacattgctcttatggaacggcagtgtaccttgagccagatcaaacaccttgtagccagcagagcattgcatgtacaaatgatcaagctggtatttcaggaacaagtgagattgcaccaatgacagaaagtttcataatgcaggaaactaggaagctttctacactcaaagtctccaatggagcaagctcgtcactagttacgaaggacaacttaactacctcagtagcatatccttttactctcatcaaaccatcctggcaagaaggcgatgttaccttgcaggatataaatcggcgaatccgtcctcctaagaaggccccagagatccttggaacttcagcattctctggcaagccagtgattaacaagacaagaatcagaacagaaggagggaaaggaagcatcacaatactaagaacaaagggctgagaaccggaaaatacctttgatccttatttatctgctcctttgtggtcaattgtacaggtctgagcacttgaggctgccattgattcacagttcatggaacagagggcttagagcttgaggatgccattgattcttatttatctgccattctctcgattgcttttggcactctggtcaatgtgcaggcctcttagctttccagctgttactttttttctttcagttttgtaccgtgactttgtcttgtgaatagtattatgacatgtggatgtggtcaacgatatatacaaagcactaaagttaatggaattagtgtgttaaattccat

SEQ ID NO: 103186 - DNA, 306 bp, Zea Mays
acctaggattgtggttagcagatgtggcgcctggctcctacaagatcgaggagaggtgattgttgctttggtggagcttccgatggacgattttttttccagacgttgtgattttcttttttatcttgttctgatagctaagatgtttatttcgtaagtgcttgcttttcggtggattagaggaagttgggtggaatttcctgtgattatgtattgcagtgtggtttgggaggaggtcttttttaaggcaattggggaggaagttactaggcctgtaggattgttaattgtataaagatttctgat

SEQ ID NO: 103187 - DNA, 378 bp, Zea Mays
atggctggggaagatggtgtccaggggggagctcgcagccatggaaatcgcaaggctagagaggagctcgctcgtgcctcgggagaggcgccatgggagaaacccgagctcgcagggaggggcgccgtgatctgctgccgtgtgcgtgctggagcttgggagaggaagatgccatggcggcaacagaggaggggcgagctagagtgggggctcggcggctggaggatggagacagtcagcgcgcgaggaggcaagctgagggtaggagaatggcgtggaggagaagggagagggaggtggctgccatttatggaggagaagctccagagcacggctgccacttttctccattgcagcaattcatcgaacacgtggtga

SEQ ID NO: 103188 - DNA, 968 bp, Zea Mays
atggagctcaagcgcgtcctggtcgcgccaacagcagcacgccgagctccaacggtccctcccaccacctctggtgcgaccgctctgccccctgcagggctcggtctccttcccccactgccggaagctatcccctggccctccagcggtgtgcaaacccatgttgccgctgttgaacaagcagttgtaaaagatgctacgaagctggaagctccagttgttgttgttacaggtgcctctagagggattggaaaggcaactgctctagcccttggaaaagcaggatgcaaggttctggtaaattatgctcggtcttcgaaagaggctgaagaggtctccaaagagattgaagcatctggtggtgaggctatcacctttggaggagatgtttcaaaagaagctgatgtagagtctatgatgaaagcagctctagataaatggggaacgatagatgtgctggtaaataatgcaggaattacacgagacacattattgatgaggatgaagaaatctcagtggcaagatgtaattgatctgaatcttacaggcgtctgcctgtgtacacaggctgcaacaaaagtaatgatgaagaagaaaaaggggaaaattatcaacattgcatccgtcgttggccttactggcaatgttggccaagctaattatagtgcagccaaggctggggtgaatgctattgcaccagggtttattgcatctgatatgactgccgaacttggagaagagcttgagaagaaaatcttgtcaaccattccattagggagatatggccaaccagaggaagttgcagggttagtcgagttcctggcccttagccctgcagctagctatatgaccggacaggcgacgttggttcactttcttgtgcacgggcgattttgggcaacggaattagggttctctttttcttttaatactcaccgtggataaaccaggcatgtggaagttgaaat

SEQ ID NO: 103189 - DNA, 789 bp, Zea Mays
gaaagactggagtcgcatctcgagcccaggaagtcggcggcgcgcttcggtagaacttgtgcggcgtaactcggtaagtttcccctacgaatcttcgctcctcctcagcgtagcctcgagttgggggcgcgacaaattggaacgacgcgggttgccacttcggcgtcgtgcggtgtcgagctcgggctcacatctcagtcctttctagattagcgtgtcgcgcttagggctgcggaggggctggcgcatttgccaggatcgccggcgagccgagcgtacgggtctggggtgctcgctccgccatggaacgactggaggttgacgacgacgcgtccgtcgttggatcctgaaggagtgtgtgagatttatccaaggaaacgatgatcattggtcgttagatgtgaatcgtagggccacgatcgcatagcaggcgtaccggttcgacgtaattggctcagggcgtcgatctgcggttgaacggctctgatttctccgcgttatcgatcgttgtggaccactggttaacaatccgagggcccagaatacgtatagcctcgttgcctttgtagtctaatcttggcacttcgtttgggatcggacggctagatctgtgcggtaacgcttcgccgcagagaaattgctaaagagaccttgacaaacatttgaatcaacccgccgtccctcgcggttgtactttgagtcttgtggatgtttataccggagcccctgcactctttatatattctgcgcgcagtccagactgcaaataaaatcagagaaattcattct

SEQ ID NO: 103190 - DNA, 1298 bp, Zea Mays
atgtttgttggcataaaaaaattaacaggctggcgagtaccttttttccgtccaaatgttcataagcagtgctcagcggcagcactgaagcaggccagctggctcagctgtaatactacaaatttgagcaagttgcagagcagaactgaggttggttaactaggaacgcagccatggcaagcagtgccgtcatcgtccctgcctctccaagaaagttggagggaaaggtggccgtgatcactggcggggcgagcgggataggggagcgcacggcccggctgttcgtggagcacggcgcccacgtcgtggtggccgacatccaggacgaggccggcgcgcgcgtctgcgccgatctcggcgcgggtgccgccagctacgtccactgcgacgtcaccagcgaggacgacgtcgcggccgcggtggaccacgccgtggcgacgttcggcgcgctggacatcatgttcaacaacgcgggcgtcagcgggccggcgtgctacagcgtccgggagagcggcaaggctgacttcgagcgcgtgctggccgtgaatctggtgggcccgttcctcggcaccaagcacgcggcgcgggtgatggtgccctcgcgccgcggtggctgcatcatagggacgtcgagcgtggcggcggcagtgactggcgtgtcgtcgtacgcgtacgcgtgcgcgaagcgcgcgatggtgactctgacggagaacgcggctgcggagctcggccagcacggcattcgcgtgaactgcgtctcccccgcgggggtcgccacgccgctgaccatgaggtacatgggcctcgaggcggaggcgttggagcaggcaatggagggcatggccaacctcaagggcgtgggcgcactgcgggtgcacgacgtcgccgccgccgtgctcttcctggccagcgatgacgcgaggtacatcagcggccacaacctgttcgtcgacggcgggatctccgtcgcgaatccatccactggaacgtccaaagattgaagtcactgcgcggtacatcagtgggacccgtcgcagtcacgtcgctgcgtggcagcgtgggtgatctatcatcatcagtcgtcgttctagacatcagtgggggcacactgcacactacagtgtgctccgtaaattcatgattgctcaccggcaccggctttgtaaggtccgcccgtcgcccttcggttttctaaactaaaaataaatgtacctcgctcgtccccattgtaaggtttacttataatacaaatgagattggacctctacttctaataaaaatatattgttagaatttag

SEQ ID NO: 103191 - DNA, 1228 bp, Zea Mays
ggttggttaactaggaacgcagccatggcaagcagtgccgtcatcgtccctgcctctccaagaaagtaagaacgcttgcttcttcattgtgtctggtcggccgtgctgattccaccagatccggtctaggttgacctgttatgtatctatgtgctcaggttggagggaaaggtggccgtgatcactggcggggcgagcgggataggggagcgcacggcccggctgttcgtggagcacggcgcccacgtcgtggtggccgacatccaggacgaggccggcgcgcgcgtctgcgccgatctcggcgcgggtgccgccagctacgtccactgcgacgtcaccagcgaggacgacgtcgcggccgcggtggaccacgccgtggcgacgttcggcgcgctggacatcatgttcaacaacgcgggcgtcagcgggccggcgtgctacagcgtccgggagagcggcaaggctgacttcgagcgcgtgctggccgtgaatctggtgggcccgttcctcggcaccaagcacgcggcgcgggtgatggtgccctcgcgccgcggtggctgcatcatagggacgtcgagcgtggcggcggcagtgactggcgtgtcgtcgtacgcgtacgcgtgcgcgaagcgcgcgatggtgactctgacggagaacgcggctgcggagctcggccagcacggcattcgcgtgaactgcgtctcccccgcgggggtcgccacgccgctgaccatgaggtacatgggcctcgaggcggaggcgttggagcaggcaatggagggcatggccaacctcaagggcgtgggcgcactgcgggtgcacgacgtcgccgccgccgtgctcttcctggccagcgatgacgcgaggtacatcagcggccacaacctgttcgtcgacggcgggatctccgtcgcgaatccatccactggaacgtccaaagattgaagtcactgcgcggtacatcagtgggacccgtcgcagtcacgtcgctgcgtggcagcgtgggtgatctatcatcatcagtcgtcgttctagacatcagtgggggcacactgcacactacagtgtgctccgtaaattcatgattgctcaccggcaccggctttgtaaggtccgcccgtcgcccttcggttttctaaactaaaaataaatgtacctcgctcgtccccattgtaaggtttacttataatacaaatgagattggacctctacttctaataaaaatata

SEQ ID NO: 103192 - DNA, 502 bp, Zea Mays
ggttcatggtatgtcaccagtggttgggaatgcgaagctagctgcccacgcggcatggcaggtctgtagcggagccttgtctccggcgagcaattcgtacggggatagtggtcttctccgcccgacaacaccgcgaagggttcgcacacgatctggcgatcatcctcgaccacaccgcacacacaagatgacaacggagatgcgggaccacgacggtggccatcatccttgtgcggcggatccacggcgagcagttctagggtcatcgaggcctcccgcgcccagcagtttcctcggacgcgaaccacgcatgcgatgctcctcagcctccacgcatgctctgaacgacgacgtccgcgagcgaatcgctcgtcgtctctccttctctcccggctcggctcccacggcacacaactctctgcttcctttctcatgctgcggacgagggatgaactcgatgggagaaaggggaggggagaccgtgatacttataactgaggag

SEQ ID NO: 103193 - DNA, 839 bp, Zea Mays
ctgagcacagttgtattttttgtgtctggatgtgacatatattatctttgctatacaggtgcacgtgaacttgcaagagatgctcgagccacaacacctgatgaccccatgaattctgttgttggtgggctagcaagtggagctgtccttggtcgaatacaaggtggacactttggagccgtgaagtatgcggtcacctttgcagctgccggtaccgcattagactacgctgcactgaagttggcccctgaatggcattcgctgaaagaacaactgtctgaaaagaaagactggtttacactacccgagtggtcacctatccaggtgttggatgaggaagctttggctaagaaaaaagctcgagaagagaagttgtttgcccaacgagcactaggtaaacttgacaaggaggatccctagctatacggccttttggacgactgcgcactaacagagatacgatgatttttatcgaggcgcttatctgcgggtctctggaagcatagtgttagaaagcatcgagatgtatttttttttctgtactttgcggcgaacctagatgattgtacttccaagttttgacggctaaaaacatctctacaagtgtaagagtcgttatgccatttcaacctattgtagtggacttgcacgtcgtgtagtggtagcaaaatgtttggatcttggattagaatatatgttatatcaatttttagggtccgtttaggaacacaacatttttctagttgtagcatgcatgttattttaggctagaaggtatttaggagcacatgtaaaaactctgtattttattaaacaatagtttcatcaataccataata

SEQ ID NO: 103194 - DNA, 786 bp, Zea Mays
attcggcccggctagagcccacaacaggtctagggtttcctggttctcccacggggtttcaggagacacatataatccacacgccgccgtctttctaaacttcgccatccatttttcatatcctcactcgccgccgccgccgctcgtccctcgccccatcgcgatggcccggatcaaggtgcacgagctgcgggggaagagcaaggcggatctgcaagcgcagcttaaggagtttaagtcggagctctccctgctacgcgtagccaaggtcaccggcggggctcccaacaagctctccaagatcaaggttgtgcgcacctccatcgcgcgcgtgctgaccgtcatctcgcagaagcagaagtcggcgctgcgtgaggcgtacaagaagaagaagctgctcccgctcgacctccgccccaagaagacccgcgccatccgcaggcgcctcaccaagcaccagctctccttgaagaccgagagggaaaagaagcgtgagaagtatttccccatgaggaagtacgctatcaaggcctagatcagtgaaagaacatttatcctgtcaagttttgctcagaagttacttgaatttgagacaaatctatctccatccaagtactatgtagctgatcaactgcatgatgaaaaacgagtactttttgcttgtttaaacgtgctttacattttcagtttccacttatcaccattggaatgaatagtagtgatcgattctttgttgttacgcgcattggacacaaagctcaactgtagccaacaacgtttgaaatc

SEQ ID NO: 103195 - DNA, 1450 bp, Zea Mays
ctagagacttcacgcaggcagtcttcaccgcgcggcggcctcatacccgcaggcagttttcaccgcgcggtggcctcatccccgccggcgagcctccactctcctccgccggtaagcctccaccgccccatcgatcgctcctcacccgccggtggcctccccctcggcggacatttcttggtgcatttggccccccccccctccaccaccagcgaaatttacccatcccgaatcgccccccaaaatcggtcctacaccgcaccagatcacatctcatgattccagtgagaattcgaaaaggaggaagcaatgacggaggtggcgctcctccggggcccgaccaacctcgcttccaccgtaagtcgcgcctccgcctcctccccctcctcaacgctgtgctatttagccaatgctgacagcgacgtgctcccaagaagcggcagccccgagcgcactgcgggatctgctaggagccggcgactccttgaacagcatgggcaagaggccgtggaggaggaagaggagcggtggtcgttcttggcactgctcttcgagctgttgcagaagtcgctgctcgggtgcaggacggtgggcggcggcggtgaaggcgaacacggcggcggcgggatggagattgggctgcccacggacgtgcaacatgtcgcgcacgtcacgtttgacaggttccatggattcctggggctgcccgttgaattcaagcccgaagtgcccctccgtgctcccagcgtgaggtatgactcttagtgtccatcgtcaatttagattaattttaagttcacgcttccagaaatctgactttatttttgcagaatttacttatgcaataacatgaacttttttagctccaatttgaactttaacttgagggtgtttgcagttttcttcttttaattccaagtatgtctggtgctttggtaattgatatgaacagttgataacaataagtattagattatgttcttttagaaagctgtaaaatctagatgatgtttgcttgacacaggttcgttaatagttcatcactctttagcattttgatggcatgctcgtttccgcaatatagttttgatccttgaaaagtagtcccttttgtttgtgttacagcctccatgctcccttgatctgaaatatcattgaaaaagcaaaattttaagtggaatttgagtttcgtttgaattgtgttatgaagtatgaagttggttttcgtgttggcggccttagcaggatctgaactacggttgatgaaatgggcatgtcttctgatagtggatatgctttggaccgcaactgttcatagaaataatttctgtgttttttcccatgttccatcaaacaattggtcaatcatttcgctgatgcaatcttgtagcatccatgattttactgtacttgcttacctcatctaagaattattccgattgtactaggt

SEQ ID NO: 103196 - DNA, 1183 bp, Zea Mays
ctagagacttcacgcaggcagtcttcaccgcgcggcggcctcatacccgcaggcagttttcaccgcgcggtggcctcatccccgccggcgagcctccactctcctccgccggtaagcctccaccgccccatcgatcgctcctcacccgccggtggcctccccctcggcggacatttcttggtgcatttggccccccccccctccaccaccagcgaaatttacccatcccgaatcgccccccaaaatcggtcctacaccgcaccagatcacatctcatgattccagtgagaattcgaaaaggaggaagcaatgacggaggtggcgctcctccggggcccgaccaacctcgcttccaccgtaagtcgcgcctccgcctcctccccctcctcaacgctgtgctatttagccaatgctgacagcgacgtgctcccaagaagcggcagccccgagcgcactgcgggatctgctaggagccggcgactccttgaacagcatgggcaagaggccgtggaggaggaagaggagcggtggtcgttcttggcactgctcttcgagctgttgcagaagtcgctgctcgggtgcaggacggtgggcggcggcggtgaaggcgaacacggcggcggcgggatggagattgggctgcccacggacgtgcaacatgtcgcgcacgtcacgtttgacaggttccatggattcctggggctgcccgttgaattcaagcccgaagtgcccctccgtgctcccagcgtgaggattttcgaaccagtgcaggatggggcacaggttggctcctgtcaagtgccaataacttccgtactaaattctaaatgctggtgaatagaagttcaccaagaagacaatgaaaaaaaactagaccaacaaggaggaactaggcagcttttatatcaagaaaataggcacccaatttgcctggacaagtacttgaatgtgggtggtataggaacaccacaaagcacaaacaactgagcctgttcagctgccttagccaggaacccactgagagaacaataccaatattgggccaaaaaaatgttgtcaaatcatgtctggcaatttggaagttgcgaagttagttaaaaaaactgtgtgaaagatatgtttatggacatgaatgaactcagttacaagaaaattcatcaataaatttgcaaaattgtaataa

SEQ ID NO: 103197 - DNA, 1842 bp, Zea Mays
gcggcggcctcatacccgcaggcagttttcaccgcgcggtggcctcatccccgccggcgagcctccactctcctccgccggtaagcctccaccgccccatcgatcgctcctcacccgccggtggcctccccctcggcggacatttcttggtgcatttggccccccccccctccaccaccagcgaaatttacccatcccgaatcgccccccaaaatcggtcctacaccgcaccagatcacatctcatgattccagtgagaattcgaaaaggaggaagcaatgacggaggtggcgctcctccggggcccgaccaacctcgcttccaccaagcggcagccccgagcgcactgcgggatctgctaggagccggcgactccttgaacagcatgggcaagaggccgtggaggaggaagaggagcggtggtcgttcttggcactgctcttcgagctgttgcagaagtcgctgctcgggtgcaggacggtgggcggcggcggtgaaggcgaacacggcggcggcgggatggagattgggctgcccacggacgtgcaacatgtcgcgcacgtcacgtttgacaggttccatggattcctggggctgcccgttgaattcaagcccgaagtgcccctccgtgctcccagcgtgaggtatgactcttagtgtccatcgtcaatttagattaattttaagttcacgcttccagaaatctgactttatttttgcagaatttacttatgcaataacatgaacttttttagctccaatttgaactttaacttgagggtgtttgcagttttcttcttttaattccaagtatgtctggtgctttggtaattgatatgaacagttgataacaataagtattagattatgttcttttagaaagctgtaaaatctagatgatgtttgcttgacacaggttcgttaatagttcatcactctttagcattttgatggcatgctcgtttccgcaatatagttttgatccttgaaaagtagtcccttttgtttgtgttacagcctccatgctcccttgatctgaaatatcattgaaaaagcaaaattttaagtggaatttgagtttcgtttgaattgtgttatgaagtatgaagttggttttcgtgttggcggccttagcaggatctgaactacggttgatgaaatgggcatgtcttctgatagtggatatgctttggaccgcaactgttcatagaaataatttctgtgttttttcccatgttccatcaaacaattggtcaatcatttcgctgatgcaatcttgtagcatccatgattttactgtacttgcttacctcatctaagaattattccgattgtactaggtacataaagttgattgttacatcatctgtcattagtaagattggaaagttgccagggattccatgatttatgtatggcctattttgtattgattagattattcactatttttctctagacttgcaaattactttggtttttacctttttttctatccttcatctattgttcgtacagtagaccttggcttcaaatacttggtatattattttttgtcccatataacagagctagaaatattgccagcagccgagcacatatgactccatatattgtaggaatatttctttatcagaatatgatccaagaccacctgaaggaacaatttccaattctgaacatgaaagatgagtgtaatgctaatgcatgaatctgaaagtgcaggattttcgaaccagtgcaggatggggcacaggttggctcctgtcaagtgccaataacttccgtactaaattctaaatgctggtgaatagaagttcaccaagaagacaatgaaaaaaa

SEQ ID NO: 103198 - DNA, 164 bp, Zea Mays
tctagacataggttacatgtttatttcagaaataagtttatgcaatgtgtttctgcaatgtgttgggttcagtcatacattggacagtcacaggtaggttacaggtttatttctaaaataagtatatttctgagacataggttacaagtttaccgatcctctcc

SEQ ID NO: 103199 - DNA, 666 bp, Zea Mays
agtgcccaaaatctttgtatgcttctaaacagacctttggtattgttgtacacattggattcaataccacttctgttgtcccggtcaattatttccgttgggataagaaggaagaacaatcctctgatttgtacagattctgccgcctcatgaccaaattccgcaaggaatgtgaatcccttggccttgaggacttcccgacttcagaacggttgcgatagcacgatcatcagcccgggaagcctgactggtcagaggcaagccgattcgttgccttcaccatgaaggacgaaaccaaaggcgagatctacgtggccttcaacaccagtcacctgccggtggtcgtcgggcttctagagcgctctgggttccgatgggagccggtggtggacaccggcaaggaggcaccatatgacttcctcaccgatggcctgccagatcgtgctgtcaccgtctaccagttctctcatttcctcaactccaatctctatcctatgctcagctactcctccatcatccttgtattgcgccctgatgtctgaaagaaacggatacaatagagtatattgtagccgtagtatatattttctttgacttttctttgacttccttttgtagatctgccaaacacaaacacaactaagcaatgtagcacatactattggc

SEQ ID NO: 103200 - DNA, 252 bp, Zea Mays
aatacgttacttttcggcttaataataacaagcattattcctgggcaccggcaaccctactactgaccagggaagagatcatgaatagggcgtggtgcaaatctagtaaatggtgccgtctcgtatcagtgaacgttgtttgcttgatggattgacggaagtccgctattgattcgggaaccacaagtcgaataggaatacgtagatcaatctctgaaagctgccagtccagagtagcttattggaaatgtc

SEQ ID NO: 103201 - DNA, 1078 bp, Zea Mays
gtggtttttactatggggggcataaacagttgaatatggagagtcggctgagtttaggacaaaaagacaaggcgtagtcttttgagtctgatcagtctagtgttgcctatgttgggtaggaaataaaagaatcaaagccctcgacgttagcagttcttagcgggacttgacgttcctaacagctgttgagctctcgaagtatgagatcctgaatgcatcctctttctttccacttcatcttgggaatctggaatggttgtttatggctgggtgtgacagatcagactgagtttagaatgagactttctatctatctatctagctgtattgccactccaacggttctttttctttgattatgccccgtatctctctgagcctatttgatctatttgctatatctaagttcgagtgtgaagttcgctccggttgaagtgtagggcttcctaattcctgcttcgtcctcctatgaatgcactagtatagaaggttggcccgtcaccgtataccatcgtaagatgaactggaaattcgtagtttcaaccagttacacaaaataggcaagttgaggtttgttcagcgtgtgttgcctccaactataacgaggccctttgacttgaggtacgatcttacctcttaacacgctttcctgctagaagaagtgagggtgatgtccaatgacctgttgaagaagcttgctgtgtagataggtttcgtgaacctaatgtagaacctgtaaacgaaagactagagtcccggaaccgctgccattcaaaaagctatcaatctgattcgaaataccaaggttcgaagacctctggctttgattgtgtgccctttcttgttcctaaggatttctaaccagaccttaacttaggcggacgtatactcaattatcaataagactaaatcgtgatcgacccgccatcatctcttgcctgaactgacttaccagtcacagggccgagaacacatgatcgagggaaatttctttcatcactacgaaaactggttttgctgattgacaaaacggatctcttccctgtgagccgcctttaggaaaactgcaccaaagatg

SEQ ID NO: 103202 - DNA, 1191 bp, Zea Mays
tctttttttcttttttctatttgaccaccatttttttcttatttcaacgcttcttcataaaaacgactttcatcagtccgacattagaaggaaaagaacgatgaaagattccaacttacttcactcaaagagtagaagcttcatcctcctagcgagccgagccagccgaactcaaccttttcttatctagaactgccaacagtggaaagcataccacattatctccattccatactgagtccacagcccagggctttctttaatagcggctatcccccggagaatccttgcattttgttgaaaggaagcctcctcggcatgatttgcacgaccgaggtcttactctttcgttatgctttaacatttctattttatatgttattggatatttcagttaattactttcattcccgaggctggatttccttactcaatggagagcgaagctcccctcaattctggccaggattcaaagacctattcgggcctagccctccttttctttctttgtgaggtgtcgacagaactcacttcagagatagagtggcgggtacttctgggtcgtattctcgctcagggaaagctacactataggaagtcaggaagtcaaacaacggaagcaggtctggcgtatcggatcaatctgcgactggccttttattcataacattagtagttactcattgggtgccatcagatgaacgaactagttttccacagaagaggatttgaggtagggctgctagagaaactgacaaggaaatcacaagaaatagagatgcttcacgcccagccaatcttgaaagcttgtacagagatccagaattgcatcttcagaagaataataagctaagcgtcgcgtcgaatctggactggaaagtctctagaaggatttgcactcctacactgccttatcaacggattcctgagagaaggggccgggctattcattccttcgaggtgccgcagtaaaggtagactagcttattgggcaaaaaggtgccgtacttctcaattgtgagactagagcttgatcctctcttacgagatttctagttcgagatttcgagtttcctgaaaagaaagcgaagaaagagttctgtattgaagatgtcaactgccaactgcatgctttccccaattcttctcttacgaaatggatcgttgattcctaccactgatggatttatg

SEQ ID NO: 103203 - DNA, 447 bp, Zea Mays
atgtaggagtattggctttggcaagcaagtcaaggacaaaagaagaggatattcgaagttccctgagtttgatggtagtaagttagatgtcacaaataggaattcatggccgcatgtatgtgctaaaagaagatcaaaaaccgaaccagggaatcacttacacttaataagaaattctaactatctattgttcaaaactcaaagtaccacagaagaaatagaatgaaatggttaactaagaatgagagaatgaaaaagctgagtaataaacaaggattggtttgctatttatgatgacgaagagctggtacaagcctccttcaggaaatgaccctgcgatgaatgcaatctacattcttccaagatggtatatgacagaaagaaagtggtgcgatgaattagtatcatttactagtcattctaaaaccgttccaattcatttcacat

SEQ ID NO: 103204 - DNA, 328 bp, Zea Mays
tctttttttagctttatttttcgatcaagttgatctgcaaaagtggtactttcggaaggaggacagtcaaggaaagatcaagctatggatggaggagctctactctagagaaggtctggaaaggatggtcggccactaagaaagctatgcaactacaaaggttatacgaacccatctcgataaggaaaccaataccaggtaccctggcccaattgagagaaggaaagatcaagctaggaattcataagtagagctaagaaccagtaggttatatgcgaacctgtaaaacaatggatggctcctatccttgcatgcacactcaaaggga

SEQ ID NO: 103205 - DNA, 104 bp, Zea Mays
aaaatgcatcttcgaacaacgcttcgcgccaacgctttcaactacttgcttcactttactagtgctatttctcgtctagcgcatcccgataaaaggatcactta

SEQ ID NO: 103206 - DNA, 2098 bp, Zea Mays
aacctttccctctcctctctgtttcatctcgccagctttgcgggaaaagagacaccagggacaagccccgcctcctctcccgagtcctgacgtgccccttttgctccggccccacttcctcgcaaaaccctaacccctcgatctcccaagatggcgtcgcagccgccgccccctgccgcagccgcggcatctggagctccgccgccggcacaagtggtgggcaacgccttcgtgcatcagtactacaacatcttgcaccagtcgccggagctcgtctaccgcttctaccaggaggccagctgcctcgggcgccccgccggcaccggtgccgacggcatggacacggtcaccaccatggacgcgattaacgacaagatcgtgtccatgggtatcgaccgggcggagatcaaggcggtggacgcgcaggaatcgctctgtggcggcgtcagcgtgctcgtcatgggtcatcttacggggaggaacagcgtcagccgccagttcgtgcagtccttcttcctcgcgccgcaggagaagggctactttgtgctcaacgacatactgcgctacgttggggaggggggaggggacgagggggctgagaagcagccagcacctgaggttgctgcggacgcggagacgaccacctctgcccctatcctgagtgccaggtggccgagcctgcacttaatccaaaggaggaagttctgaacggggaggtttgtaactcgctaagtgatgtggagaagcctgttgctgaggaaacgccggttcctgatgtcataaatgaagtgccaaataatgttgcagtggctccaccaatttcatcccctcctgtaccattgaaggaggcaccaaagaagtcatatgcttcaattgtaaaagtcatgaaagaacatcggccattagcacctgcagttccttccagacctgcacccccaataacagagaagcaagcctctcctgcccccactccagttactgaggctccagctttctcccctaatcctcagagcggcggctttcaagatccagaagttgatgcacatgccatatatgtgcgaagtctgccattaaatgccacaccacaacaattagaggaagagttcaagagatttggaaccattaaacatgaaggcatccaagttagaagcaacaagatccaagggttttgctatggctttgtagaatttgaggatgccagtgcagttcaagctgcaatagaggcttctcctgttactattggtgagcggcaatgctttgtcgaagagaaaaggactactggttctcgtggcggtggtagcaggggaggaaggtttccaccaggtagaggtggtaatttccgaggtgaaggcattagaggccgtggtacatacaatggaggcagagggtacggaaggggcgagttcagttaccgatccgattatggaggccgaggtggcggcaggggtggctcattacacggaggtgatgttggctatcagcgggtcgactactctggcacatccagtggacgtggtgcccgggcaccatcagcggccgctgctatggcaaagtgagttcttggtagctatgagtcggtagtagtttagttttgtggccaccatcacggttgaccaaaagagtggtgtggtgattcgagttcatgtgaggattatgaacaaaagtcaggtcataaattgatgcttccttgttttgtggcaaggcaaagcagtggtgatatcggttactaattgtagaatatacgtctgttgagatgtcctagtatgtctggcttcggtgagcaggcttacttgttgccaaattatagaggtttttttgagatgccagctatttatagtattttattgactgtcgttgaataagttttagggtctagcgctgcaaatatgagtatgatatttttcctgtttctggaatatgcatgcccactcatgtctgggaaatgtctgttccttttatgctgcctcttgccagcagctacattccgtgccagtagaatattggaatgtttgctgtcggaatgttttccgtttggctgagctctatttgcttgtaaaaatgagatttttaattgaaatcttgcattcaataggaaata

SEQ ID NO: 103207 - DNA, 2243 bp, Zea Mays
aacctttccctctcctctctgtttcatctcgccagctttgcgggaaaagagacaccagggacaagccccgcctcctctcccgagtcctgacgtgccccttttgctccggccccacttcctcgcaaaaccctaacccctcgatctcccaagatggcgtcgcagccgccgccccctgccgcagccgcggcatctggagctccgccgccggcacaagtggtgggcaacgccttcgtgcatcagtactacaacatcttgcaccagtcgccggagctcgtctaccgcttctaccaggaggccagctgcctcgggcgccccgccggcaccggtgccgacggcatggacacggtcaccaccatggacgcgattaacgacaagatcgtgtccatgggtatcgaccgggcggagatcaaggcggtggacgcgcaggaatcgctctgtggcggcgtcagcgtgctcgtcatgggtcatcttacggggaggaacagcgtcagccgccagttcgtgcagtccttcttcctcgcgccgcaggagaagggctactttgtgctcaacgacatactgcgctacgttggggaggggggaggggacgagggggctgagaagcagccagcacctgaggttgctgcggacgcggagacgaccacctctgcccctatcctggccaacggcactgtcggaggagacgccacgactgttcctcaggatgcttcgccgcagcctgagtgccaggtggccgagcctgcacttaatccaaaggaggaagttctgaacggggaggtttgtaactcgctaagtgatgtggagaagcctgttgctgaggaaacgccggttcctgatgtcataaatgaagtgccaaataatgttgcagtggctccaccaatttcatcccctcctgtaccattgaaggaggcaccaaagaagtcatatgcttcaattgtaaaagtcatgaaagaacatcggccattagcacctgcagttccttccagacctgcacccccaataacagagaagcaagcctctcctgcccccactccagttactgaggctccagctttctcccctaatcctcagagcggcggctttcaagatccagaaggtatcatctaaacccaaaattggagctaaaactttgacttcagttggcatcatctgatgatctgctttacaaccatcttcaaagttgatgcacatgccatatatgtgcgaagtctgccattaaatgccacaccacaacaattagaggaagagttcaagagatttggaaccattaaacatgaaggcatccaagttagaagcaacaagatccaagggttttgctatggctttgtagaatttgaggatgccagtgcagttcaagctgcaatagaggcttctcctgttactattggtgagcggcaatgctttgtcgaagagaaaaggactactggttctcgtggcggtggtagcaggggaggaaggtttccaccaggtagaggtggtaatttccgaggtgaaggcattagaggccgtggtacatacaatggaggcagagggtacggaaggggcgagttcagttaccgatccgattatggaggccgaggtggcggcaggggtggctcattacacggaggtgatgttggctatcagcgggtcgactactctggcacatccagtggacgtggtgcccgggcaccatcagcggccgctgctatggcaaagtgagttcttggtagctatgagtcggtagtagtttagttttgtggccaccatcacggttgaccaaaagagtggtgtggtgattcgagttcatgtgaggattatgaacaaaagtcaggtcataaattgatgcttccttgttttgtggcaaggcaaagcagtggtgatatcggttactaattgtagaatatacgtctgttgagatgtcctagtatgtctggcttcggtgagcaggcttacttgttgccaaattatagaggtttttttgagatgccagctatttatagtattttattgactgtcgttgaataagttttagggtctagcgctgcaaatatgagtatgatatttttcctgtttctggaatatgcatgcccactcatgtctgggaaatgtctgttccttttatgctgcctcttgccagcagctacattccgtgccagtagaatattggaatgtttgctgtcggaatgttttccgtttggctgagctctatttgcttgtaaaaatgagatttttaattgaaatcttgcattcaataggaaata

SEQ ID NO: 103208 - DNA, 2156 bp, Zea Mays
aacctttccctctcctctctgtttcatctcgccagctttgcgggaaaagagacaccagggacaagccccgcctcctctcccgagtcctgacgtgccccttttgctccggccccacttcctcgcaaaaccctaacccctcgatctcccaagatggcgtcgcagccgccgccccctgccgcagccgcggcatctggagctccgccgccggcacaagtggtgggcaacgccttcgtgcatcagtactacaacatcttgcaccagtcgccggagctcgtctaccgcttctaccaggaggccagctgcctcgggcgccccgccggcaccggtgccgacggcatggacacggtcaccaccatggacgcgattaacgacaagatcgtgtccatgggtatcgaccgggcggagatcaaggcggtggacgcgcaggaatcgctctgtggcggcgtcagcgtgctcgtcatgggtcatcttacggggaggaacagcgtcagccgccagttcgtgcagtccttcttcctcgcgccgcaggagaagggctactttgtgctcaacgacatactgcgctacgttggggaggggggaggggacgagggggctgagaagcagccagcacctgaggttgctgcggacgcggagacgaccacctctgcccctatcctggccaacggcactgtcggaggagacgccacgactgttcctcaggatgcttcgccgcagcctgagtgccaggtggccgagcctgcacttaatccaaaggaggaagttctgaacggggaggtttgtaactcgctaagtgatgtggagaagcctgttgctgaggaaacgccggttcctgatgtcataaatgaagtgccaaataatgttgcagtggctccaccaatttcatcccctcctgtaccattgaaggaggcaccaaagaagtcatatgcttcaattgtaaaagtcatgaaagaacatcggccattagcacctgcagttccttccagacctgcacccccaataacagagaagcaagcctctcctgcccccactccagttactgaggctccagctttctcccctaatcctcagagcggcggctttcaagatccagaagttgatgcacatgccatatatgtgcgaagtctgccattaaatgccacaccacaacaattagaggaagagttcaagagatttggaaccattaaacatgaaggcatccaagttagaagcaacaagatccaagggttttgctatggctttgtagaatttgaggatgccagtgcagttcaagctgcaatagaggcttctcctgttactattggtgagcggcaatgctttgtcgaagagaaaaggactactggttctcgcggtggtagcaggggaggaaggtttccaccaggtagaggtggtaatttccgaggtgaaggcattagaggccgtggtacatacaatggaggcagagggtacggaaggggcgagttcagttaccgatccgattatggaggccgaggtggcggcaggggtggctcattacacggaggtgatgttggctatcagcgggtcgactactctggcacatccagtggacgtggtgcccgggcaccatcagcggccgctgctatggcaaagtgagttcttggtagctatgagtcggtagtagtttagttttgtggccaccatcacggttgaccaaaagagtggtgtggtgattcgagttcatgtgaggattatgaacaaaagtcaggtcataaattgatgcttccttgttttgtggcaaggcaaagcagtggtgatatcggttactaattgtagaatatacgtctgttgagatgtcctagtatgtctggcttcggtgagcaggcttacttgttgccaaattatagaggtttttttgagatgccagctatttatagtattttattgactgtcgttgaataagttttagggtctagcgctgcaaatatgagtatgatatttttcctgtttctggaatatgcatgcccactcatgtctgggaaatgtctgttccttttatgctgcctcttgccagcagctacattccgtgccagtagaatattggaatgtttgctgtcggaatgttttccgtttggctgagctctatttgcttgtaaaaatgagatttttaattgaaatcttgcattcaataggaaata

SEQ ID NO: 103209 - DNA, 2159 bp, Zea Mays
aacctttccctctcctctctgtttcatctcgccagctttgcgggaaaagagacaccagggacaagccccgcctcctctcccgagtcctgacgtgccccttttgctccggccccacttcctcgcaaaaccctaacccctcgatctcccaagatggcgtcgcagccgccgccccctgccgcagccgcggcatctggagctccgccgccggcacaagtggtgggcaacgccttcgtgcatcagtactacaacatcttgcaccagtcgccggagctcgtctaccgcttctaccaggaggccagctgcctcgggcgccccgccggcaccggtgccgacggcatggacacggtcaccaccatggacgcgattaacgacaagatcgtgtccatgggtatcgaccgggcggagatcaaggcggtggacgcgcaggaatcgctctgtggcggcgtcagcgtgctcgtcatgggtcatcttacggggaggaacagcgtcagccgccagttcgtgcagtccttcttcctcgcgccgcaggagaagggctactttgtgctcaacgacatactgcgctacgttggggaggggggaggggacgagggggctgagaagcagccagcacctgaggttgctgcggacgcggagacgaccacctctgcccctatcctggccaacggcactgtcggaggagacgccacgactgttcctcaggatgcttcgccgcagcctgagtgccaggtggccgagcctgcacttaatccaaaggaggaagttctgaacggggaggtttgtaactcgctaagtgatgtggagaagcctgttgctgaggaaacgccggttcctgatgtcataaatgaagtgccaaataatgttgcagtggctccaccaatttcatcccctcctgtaccattgaaggaggcaccaaagaagtcatatgcttcaattgtaaaagtcatgaaagaacatcggccattagcacctgcagttccttccagacctgcacccccaataacagagaagcaagcctctcctgcccccactccagttactgaggctccagctttctcccctaatcctcagagcggcggctttcaagatccagaagttgatgcacatgccatatatgtgcgaagtctgccattaaatgccacaccacaacaattagaggaagagttcaagagatttggaaccattaaacatgaaggcatccaagttagaagcaacaagatccaagggttttgctatggctttgtagaatttgaggatgccagtgcagttcaagctgcaatagaggcttctcctgttactattggtgagcggcaatgctttgtcgaagagaaaaggactactggttctcgtggcggtggtagcaggggaggaaggtttccaccaggtagaggtggtaatttccgaggtgaaggcattagaggccgtggtacatacaatggaggcagagggtacggaaggggcgagttcagttaccgatccgattatggaggccgaggtggcggcaggggtggctcattacacggaggtgatgttggctatcagcgggtcgactactctggcacatccagtggacgtggtgcccgggcaccatcagcggccgctgctatggcaaagtgagttcttggtagctatgagtcggtagtagtttagttttgtggccaccatcacggttgaccaaaagagtggtgtggtgattcgagttcatgtgaggattatgaacaaaagtcaggtcataaattgatgcttccttgttttgtggcaaggcaaagcagtggtgatatcggttactaattgtagaatatacgtctgttgagatgtcctagtatgtctggcttcggtgagcaggcttacttgttgccaaattatagaggtttttttgagatgccagctatttatagtattttattgactgtcgttgaataagttttagggtctagcgctgcaaatatgagtatgatatttttcctgtttctggaatatgcatgcccactcatgtctgggaaatgtctgttccttttatgctgcctcttgccagcagctacattccgtgccagtagaatattggaatgtttgctgtcggaatgttttccgtttggctgagctctatttgcttgtaaaaatgagatttttaattgaaatcttgcattcaataggaaata

SEQ ID NO: 103210 - DNA, 1967 bp, Zea Mays
aggggtacccattgccatctatcttcagcacgtttcttccctatcaatcgcgcgccgatctacagttccgcatttcgtcgagcacatctgggccaccctgggcactctcctccgcaactctccgctttcctcggcaaccacggccactgcccgatggaacgccaccatctggcgccgcctcgacggaggcaaccccgtggaggctgtgtctgcattcatcaccatgctccggtgcggcgcccgcccggatgccttcacgctcccgctcctcaatcgcgcttcggcgcccctcaccagccttgtcggcgccgcccactgcttcggcattcgggtcggctttggtggaaacgtctacttcggcaacacgttgctgaaggcttatgcgcaacacgggatggtcgcggccgcgcgccttgtgtttgacgaaatgcgcgcgcgggacgtggtttcttggaccacgctggtttccgcgtacgtcaacgcggaggatatttgggaggtatcccgtctgctgacggccatgaggacccacggccggtgcgagccaagtgcagtgacgctgtcagtggtgttccggctgtgcacggccttgagggacactgccagtggtaagcagctgcaatgctacgctgtgaagagggggtgggcaggtgatttcctagttctcaactcgatgttgactcacatgagcaggacttctagcttgggtgatgcagagatgctgttcaagcagtctccaagtagagacatggtttcgtggaacattataatctcggaatactcttcagaagggaatgtttccaaggttattagtttgtatgtggcaatgatagaagaggaagtgtgtccaagcagcgaaaccttaactgctgttgtttctgtattcgccaggcacaaatttcttccccatggcaagaagctgcactcctttgctattaggagtgggctcatggacacaatcttggtagcatcatttgttgacctctatgcgaaatgcggtgagttagtgtcatcgattcagttgtttgaggaattcaatgggggaagcaagtacttatggtcagccatgatatgggcttttatctatcatggaatgttcttggatgcaatccatctatttgagagaatgatgggctccttttactttccaaatgctgacattctacgaggtctcctagtcagttacactgaaatagatgctttaaggtgtggtaaagcaactcatggatacatcataagaaacaactatgctgcagaatctgagagttgtgccttggacacagcccttgttaagctttatgctagatgtggggacattcatcttgcagaaagatgctttagcagaactcttcagaaagatatagtctcatggagttcaatgattgaagcattcacaattcatggtcatggtaagcaagctctaacattgtttaatcagatgctgaaagaaggagtaaagccaaatgaagtgaccttcttaagtctactttcagcatgtagtcattcaggtctcgtcagtgaagctcgcgagttgtttgattgcatgacaaaaaagttcagattcgcacctgagctaggacactatacttgtatggtggacgttcttggtcgttcaggtaatctagaggaagctctccaagtgatcagcaacatgaaagttaaggcagatggcagaatttggggtgcccttcttggatcatgtagaattcactcaaactctaagcttgcatattttgcagctcagaaacttgtggagttggaaccaagtaatgttggctatcatgtgttgctgagtaatatccaagcaggaggtgatagatgggctgaagtggaggacattagaagctccatggaagtaatgaacatggagaaatctcctgcttggagctgcatctctgacatcggtgtcccatgatatgtatttttaagcactacatcattgatatttgtcttcaaaaattaatacc

SEQ ID NO: 103211 - DNA, 919 bp, Zea Mays
ggttggtgctacgagaaaggagagctcctacttatctacgagtacatgcccaacggcagcctcgaccatcacttgtttcccaacaaggagcaccaaggtcgcatccttggatggactacccgctacggcatcattgccgacgtagctgcggggcttcactacgtccaccacgagcatgagcatatggtgctccaccgcgacatcaaagccagcaacatcatgctggactccaccttccacggccgcctcggcgacttcggcctcgcgcgcatcgtgggcttcgacaagaactcctacaccgacctcggcgtcgccggcacctggggcttcatcgcgccagagtactcggtgagccgcaagtccacccgcaagacagacatctacgcgttcggggtgctgacccttgagatggtcaccgggaggcgggctctcagcacgttccaggacacgtttcaggtgctcactgactgggtttggaggcttcaccgggaaggaagactgctagaagcagtcgacagaaacgccatctccacacaggagtacgacgccgatggcgcagccaggttgctgctccttgggttagcctgcaccaaccccaacccgctggatcgtcctagcatggccgaggtggtgcaggtcgtctccaagtcggtgccggcgcccgacgtgccacctgagaagccaacgtttgtgtggccaccagatgaacgggttcctcgaagcagcttcgatgacatcacggagatgatgagtgatctccatgagagtcatcgttgggaggagacgtcaagcagtgatgcgctggctgcaagcgccatcatcaggcgcaaggcatgggctgagtcggttgagttgtactgtctgtgacttgtgaccggcaaagagtcacctgaatttatgggcataaaatttattttct

SEQ ID NO: 103212 - DNA, 735 bp, Zea Mays
acgcatatcattcagggcacttgacatctaagagtgatgtttatagcttcggagttgtgctactcgagatgttgactgggagaagatcaatggacaagaagcggcctacgggggagcagaacctggttgcatgggcaaggccttacctaaatgatcggcgaaggctctatcagcttgtagatcctcgcttggggctgaactactctgtcaaaggggtgcaaaaggtcgctcagatctgccactactgccttacccgtgatagtaagtctcgcccatcaatggatgaagttgtcaagcaactcacaccattacaagatctaaacgacatggcatctgcatcgccaaggcctcgctcaactcagcgcggaaaggtgcatcgatgacaacctggttctgttgtaagaagagcagtgtggtcctggttgcttgatgcttgtttggtttaattgtatagcaaaattaggtgttgatctcttttgtttgatgccaactggtggtggaaagtccatgtgctatcaaatttcagctctggtgaaaacatgcattgttcttgtcatttcatctatgataggtcacaggttgctaggcattgtggatgatgatcatgttgaattgaataaccttcatcgacaggtccatgataaattagcttgtattgttgagatggagaaaaagaatgcaagtttgggtaggcgctctactaattatttaccatatttaaaccagtcttcttaa

SEQ ID NO: 103213 - DNA, 2205 bp, Zea Mays
atgccattgtcgacaaattccatggctctaacaaacttgtgctcatgcccaagcagcagagctcatcagctgcagcttctatgcttctgcttggccctctcactgcatgtcccttatcatgccaattctctctccttcagctacagcttcttcaaccctgatgacttcaggccggaggacgacgcgcaggtcgtcgatggcaggatcgagctgctcggcgacgagttcagagggcgtgccagggggcgggtgtggcacaagcagccggtgcagctatgggacggcaccaccggcgaggctgccagcttcaccgcgaacttcagcttcagcatcgagtcagtggctggcaagggcgcggcaagcgctgggcacggcatgacgttcttcctcgcgccgtacacgccaaacttgccgcaggagtcctacgacggctgcctcggtctgttcgatgagagccaggcgcttaactactccaagttcaacgcgtccggcgactcgaggttcgtcgccgtggagttcgacatccgcaaggacatctgggacccgagcagccagcacatcggcatcgacatcaacagcatggactcccgcggcgactacacggtcttgccagacggcagcctcgtcgacgccggcgtgatgtccgcgacagtcgtctacgacaaccgcacgcgcagtcttcgcgtcaccctgatggtcggaagcgtcacttacacgtccgtagccaccgtggacttgagaagcttgctgccggagaaagtcgcagttggtttctcggcggcgacaggcgacgagtacaacgcaaaccacacggtgctttcgttctctttcgcctcgacgttggcaaccaagaacagcacctccatgcctgtgactgtgacctcgtccaccaagaaggccaccctgcaactcggcgctggagcggccgccgcagcgttgctggttttcctgctcgtcgccaccgtggcgctgctactagttcggcggtcaagcagaaggggcaagaaaccatacgatgacgagcagctaaccacagacggcgacgactccctcgacgccgtcgatgacagccacttcgagtccagcacggggccaaaacctatcccgtacgcccaactcgcggcggcgacgaaggacttcgcggcggagggaaaactggggcagggcgggtcggggtcggtgtaccgcggccacctgaaagagtccggcctcgatgtcgccatcaaggtgttctctcggggggcgtccatggagggacggaaggagtaccgggccgaggtcaccgtcatcagccggctgcggcatcggaacctggtgcagctcatcggctggtgccatggccggaggcggctccagctggtctacgaattggtcagcaatggcagcctcgatgaccacctctacagcacagaggtgacactgacatggccgacgagataccagataattcttggattgtcttccgccgtgctgtaccttcaccaagagtgggaccagtgtgtcgtccatggcgacatcaaaccgagcaacatcatgctggacgagtccttcaacgccaagctcggcgacttcgggctggcacggctcatcgaccacggaatgagcctgcagaccatgactgccgtcgctggcacgccagggtacctggacccggagtgcgtcatcaccggcaaggcctcccccgagtccgacgtgtacagcttcggcatcgtgctgcttgaggtcgcctgcgggcgccggccgatggcgccgccagcgagcacgggcgagggcaaggacggccaggtgttccggttggtggagtgggcttgggacatgcgcggccggggcgccgctctagacgccgcggacgagcggcttggtggagccttcgacccgtgggagatggaacgcgtggtctccgtcgggctctggtgcgcgcacccggacccaaagatgcgaccgcggatccgccaggctgccgaggcactgcggtcgagaagcttcaggatgccgctcctgccgcccaagatgccggtcgccgtgtacctgcagccgttcggtccctccaccctgcacttcagcgacaccaccacctccgtcgggtcttctgttaccgtgccgtacacttcgaccacgagccgtgcgacgacggcgacggggacggggatgtctaactccagctcgccgccggcggtcactcaacacttgagcccaagagcatag

SEQ ID NO: 103214 - DNA, 2273 bp, Zea Mays
ctagagatttccatcgcacacctctctagtctccatctgccgggacgccgcatcttgcttcgtctcgctttgttcctctccacgtcacttgggtttcgtcggcgtcaaggactccgcttccgcccgaagacttcgccttctcttggcttgctcaccggctgcgtctctttggttagatacgtttttctccattgtctttcgtcgtccctttcgattcggtcgatacctggatccagatccgttcgtcgatcatatccagcctcctctacttgagatcctctcgctttttggagatcatgttgcttcggtgcgtggagattgagatctaaacgacaagtatttttcttttggttaactggttcgcaagaagtgtagatggacatctggttccaaatttgttcttcgatcatatctagctgccagcttggtcgtcgacacgtttatttccacagttgtgctcccattcttgcttcgtcgattgtttcgttttggtgcacagctgatcttgtttgtgtcaaatgcataaggttgtctcaggtcggagatttccgattgtgctcattgcaaccaagacgaagaagacgacgacgatccgtccacggcggtcatctcctccacgggcgtattgacgccacagcccgctatgggtaccttgagttggccatcgagcagatggcaaagactgcagacgccagcaacgcactcaaccacgggcttcactaccttcggtcgaccggcaatgcatgtgcggcgagggtgttgttatggtggggatgggagaactccgatgctcacgctgggcgtcatgacaacagctccccaagcgatgcaagccgcctgttcgacgaaatgtgtgagaagcaaaatagagacatcaacggtgttttcatgtgtctaatacaaatttattttttaaaacatagccagatagcattttcgacatgaacaaaggattcgtaatgcgctcggctacagggcgtcatgacagcagctccccaagcgatgcaagccgcctgttcgacgaaatatgtgagaatcaaaatgaacatgctcgcgtgttaggtcctttatgtgacccaaataactgaatttcagctaatcaccagagctaatatatcgaatccttcgagcttccatgggtgaggcaattaacacttactccaatttgttcttccttcacggtgctacttaattcaacatgttcttcattgcaatgattatagttacacttggtttatcaccattgctttcagcttgacaaagccttatctttgctacatacttaattaatgcttcaaagcactgacaattccaaatgacaggtacaagctcaacttcattgtcactgatggaacatgtgaagcagagttcttttgttttgatagcatagccagaaaaatagtaggaaaaccttgtcacaaccttgttacagcagttacaacttctcaaggtcctccagcagacctagccgctgttatgtgactgaaacttacccttgcatttgccatcaatatgtcagcctactctgtcacaaacagtcttctctattctgtctattttaacaaatcatgtaagacatgccttcatgccatctaacatgcctaaccattctcaagagttgtatacacaagatgaagtacctagccttccagtcacacaaaactctccaacaacatcttgggtgaaactatctacctgtagcaacgaaagaaacgagggtgatgaccaacgtacaagtgaactcaacaagcaatagttatcatcaccaccgaaaaggtatttgctttttgtgcacctatcaggatcaccatcacttttggaccatgaatgcttccctttagatatgaaccagtcgttagcctatttgtggatctatacatatggacttaacacctgcaagtctgcaagcacactgttgctaggtcttgatgtacggtggttaaatgctacttactatacattttttattgtagtctaaattaactctacgactgatatcaactattagagaaaaacaatgttatatgcttatatttggttctgtgcctgcgtattctatacttatattctgttcaaatttgttttcatacctgggtacaacaactagatgtggtcacgcgcggctggccgcgcgccatacactagtataaataagaccgtaatggatctttttcgagggaattaaaaaaaagagccggtagtatgggcggatctagaaaaaaaacgtgtagaagatctgaccgagaaaaagaagatgagaagacagcacagcg

SEQ ID NO: 103215 - DNA, 572 bp, Zea Mays
ggccaggtgcctgcctccatctccctcctccactcgggtcttcacgatgccgccgccgccacacgacatcgcacatccgctcttctccctcccctcgctctcggcggtcgacgtccgctcccctggtgccatcgcttgtgcctggctcccgccatcgctggctccccgatggacctcacggctagtgtggggccatggatccccgacggatcgagggtcgcgccgcctcatgaggtcagtgagcccgcccacactctactttcttgctccttgttctacgagcttcggctgcgctgaggcggtcatggtcgctgttcatgtggaattagatgtgagagaaggagcgtgcagcgccgccgcagctgtggactcccatcataaaattcgaacatggagaaacttgaaccttttctaatgcaacattcatgtgttggtattctattttggtatattatagattttgcaggacaagttaagatggagttggaagttgaggcatatattaggcaacattatgaaggggaaatttctgacatagaaataattgagaaagaggatttagatctagtttt

SEQ ID NO: 103216 - DNA, 1600 bp, Zea Mays
atctccctcctccactcgggtcttcacgatgccgccgccgccacacgacatcgcacatccgctcttctccctcccctcgctctcggcggtcgacgtccgctcccctggtgccatcgcttgtgcctggctcccgccatcgctggctccccgatggacctcacggctagtgtggggccatggatccccgacggatcgagggtcgcgccgcctcatgagaaaattcatctttctggctcgaacagaaaatacctgaagcttcaatttgacgtcgtgtagcaatgaatgcgtgcaaggaatgctcttttacatgttgagaatgaagaaaaattagatgtcgtggaggcatcccaaaacatgtactttccattttgcacattttagtccaaggttcaatacaaactttctcagaaaactatctcaaacactactaatcgttgttggtctgcagggtttcaaattaggacttagctatttttccatcagcctgaaacagcctaataatcttactttgatcccttgggaaaaaatgttcttattattttgagtttttgacctatagtcaggtctagaacatacccctgacatcacactactaatctgggacaaaaatatgtagttctccaaaagaaaattgtttctaatcctgccttgaaaatgtttgctgaaatactatttggtaaagttgctgaaatactgtttatgtatatttctctttcaaattattataatttggatgcgctccttgtttgagtgctccaaatctgaaaaccaagaaggtaagaaaatgtaaaggcattggtccaatcagtaattccaggcatatttagggcacatgcatttaggagtccaagtgtccaacattgctagatcaataagaaataaagattgatgatttgaaaaaaactgaagtagcttaaataaattgtttgattgacaaattcagatagctgtacctttgaacttcctcttacttggaggactttcagtgtttcttctatctgcaggaatgtcctcaggaggcttggagccttcatgctggtcaatcttcccaagaagaaaggtgtattgagacttcaaatgcttgtagtttgtcttcggctgagtgtaatcgtcaatttattcttactgttttctataaacctatgtctgtggtcgtaagaaagaaggtagctacaacagaaatatgtaatagaataatgttcgtacttcgtaacacgctatttcttatatgctgacatgctattgtggctattgtgttgttgcagctgcagccgaaacagtagccagctgaacatgctgacatgttattgcgggtggtcaaggctcaggattcagagcagaagatacacataaatactggtgaatgatgccatcgacgatgatgaactgatcaaacgatggatgatgccatcgatgaaagatggaatggaactcaaatttgggtggtcgcacaagtgtggagacttgaatttatatatacttagtctcaatgttagcacaaacagttgatgagcaagttttcccattgtattttagtttgaatttagagtacacttatgtaagagttatttgacaatgcttatttatgagatattgaatg

SEQ ID NO: 103217 - DNA, 1405 bp, Zea Mays
atctccctcctccactcgggtcttcacgatgccgccgccgccacacgacatcgcacatccgctcttctccctcccctcgctctcggcggtcgacgtccgctcccctggtgccatcgcttgtgcctggctcccgccatcgctggctccccgatggacctcacggctagtgtggggccatggatccccgacggatcgagggtcgcgccgcctcatgagaaaattcatctttctggctcgaacagaaaatacctgaagcttcaatttgacgtcgtgtagcaatgaatgcgtgcaaggaatgctcttttacatgttgagaatgaagaaaaattagatgtcgtggaggcatcccaaaacatgtactttccattttgcacattttagtccaaggttcaatacaaactttctcagaaaactatctcaaacactactaatcgttgttggtctgcagggtttcaaattaggacttagctatttttccatcagcctgaaacagcctaataatcttactttgatcccttgggaaaaaatgttcttattattttgagtttttgacctatagtcaggtctagaacatacccctgacatcacactactaatctgggacaaaaatatgtagttctccaaaagaaaattgtttctaatcctgccttgaaaatgtttgctgaaatactatttggtaaagttgctgaaatactgtttatgtatatttctctttcaaattattataatttggatgcgctccttgtttgagtgctccaaatctgaaaaccaagaaggtaagaaaatgtaaaggcattggtccaatcagtaattccaggcatatttagggcacatgcatttaggagtccaagtgtccaacattgctagatcaataagaaataaagattgatgatttgaaaaaaactgaagtagcttaaataaattgtttgattgacaaattcagatagctgtacctttgaacttcctcttacttggaggactttcagtgtttcttctatctgcaggaatgtcctcaggaggcttggagccttcatgctggtcaatcttcccaagaagaaagctgcagccgaaacagtagccagctgaacatgctgacatgttattgcgggtggtcaaggctcaggattcagagcagaagatacacataaatactggtgaatgatgccatcgacgatgatgaactgatcaaacgatggatgatgccatcgatgaaagatggaatggaactcaaatttgggtggtcgcacaagtgtggagacttgaatttatatatacttagtctcaatgttagcacaaacagttgatgagcaagttttcccattgtattttagtttgaatttagagtacacttatgtaagagttatttgacaatgcttatttatgagatattgaatgatatttatat

SEQ ID NO: 103218 - DNA, 794 bp, Zea Mays
attccaaaattcactctcaacgatacattggaacaaccaagtcatggcgagaacaagagtgccctcccacttgtccatcttgttgctactagcagtgctctcaatgtgcgcgcacagcagcgcatcagccggtgacgacggaagcagcggcactggcgtagacgacggggagggccgccacgcgcgcgccgcggccacagtcgccgagctcctgtcggctcacaacgcggcccggcaggcggtcggggttccgccgctgacatggagcccgcagatcgcggggtacgccaaggactacgcgcgctcgcggcgcggggactgcacgccccgtcggtccccgctgttctacttcggcgagaacctgttcgtggggagaggccggcactggaacgccacggcgatggtggcgtcgtgggtggcggaggcccagtggtacgactacggcagcaactcctgcgccgcgccgccgggcgccgggtgcctccggtacacgcaggtcgtctggcgcaacaccacgcagctcggctgcgcccggatcgtgtgcgactccggcgatactttcctggcttgcgactacttcccgccaggcaactacggcacgggcaggccctactgaccgtacgtcgtcagttgatgctgtcatctgcgggccgggccgcgcacacattggtttcccatgcagtactctgcgttgaattggtgtcctttgaattgcatatgtcgttccgtttcctctgtcgattcttcaggctgctgtttcgccggtacgctaaaaataaaacgaaaaatttagt

SEQ ID NO: 103219 - DNA, 497 bp, Zea Mays
ttttttttttttttgtctgttggtctcttattgggttgagctaaggtattgctcaggcaatacagagccatgttgggccctccgtccctgtaaacgtgaatacaggagcaacaatatatgtgaatacatacacatacaagtgacaaaattatctaaacagataattatttacagtagtagaatagttaagtctgcaaatataacaacataagtcgtccagatgttatattacattgacgatggttgcagcggtttaagtggttatatacatgtaaagaagcaataaaatattgatcttaaggccacaaaataatgatgcgcttaaagaaagtttactgtgagtttctaaagttaaagtactaagaatggatcagccatatatacagactttttagacaaaaaataatgatctcaaagtccaaaaaataaagatcaacaaaacagaaacatgtggtgcctgtcatgatcgtgtttgatcttcatggagttcattgtct

SEQ ID NO: 103220 - DNA, 104 bp, Zea Mays
gcatcatgtataaactatgtgtttctctcgttatgcaactttcaagggaggtgctgccgaattttttctttctgtctccatctttttatgctttctaatttgtg

SEQ ID NO: 103221 - DNA, 447 bp, Zea Mays
tggtataatctgcttagaaaatttgggttggataaccttgctccccaaccgggcctaacatcctttctggaatggtgggagacagcttctgaaacagttcatggaatgaccaagaacggattgagctctctgatctctttgggggcctggatgatctggaatcaccgtaatagatgtgtgtttgatggtcaagctcccagtctcccatctatccttcggcaggcagacgacgagagacgtctttgggaattagctggggccaagggtctctcctttttggcagcccctcatctctagtagtgtttttgagtccggtttccatggattctttcgcttatgtgcgttactggcctccgtaaggagtcattgctgtaatctgtggtctattttagaccttattatctccttcttaatatatttaaggcgcagttcccctgcgctttcgag

SEQ ID NO: 103222 - DNA, 106 bp, Zea Mays
atgcaatatttgacaaggcaaggcatcgacccgccatacaacagaaagcatgacgacatcgacagatgctatcaactaatcattttaaaaatattaaacttacttc

SEQ ID NO: 103223 - DNA, 116 bp, Zea Mays
tgcaggcacctgatctttgctttgggaaagaagggatgtagcagcacggccaccacacttttaaataaaggaaccactgcttaataatgatgttaaacagggagggtcaagtctag

SEQ ID NO: 103224 - DNA, 206 bp, Zea Mays
gtgctcgataagggggttccatgatgtacttccatgatgtatgtggccataagcacatttgccccaatgattatcaaacaaagataggtagtcaaaaaacactaaaaatagacttgttgccccaatcactatggagattttctaccaaggaaggggtcttagtgtcccatacacatctagtagttgcatcaactatccatgacaag

SEQ ID NO: 103225 - DNA, 294 bp, Zea Mays
atgaccgggcggtcaaataagaggaaggcatgtgcgctcgagacggggaagggggaggatgccatgagggcatctccaaagttgaagaccaaagcagtgtcgaagggcacatcgaaagctcaggatgctgatgtggggcccactgtggtgcttgatgtcaacgattttgacatctctgatatgggtctgggcacaaagccatatgacacacgctttcaacagcaaaggcaaaaaggcagcggtagtatagtccaacaaatggagcagatggtgcggtcatgttctcagacatag

SEQ ID NO: 103226 - DNA, 228 bp, Zea Mays
atgtcatccattagagatgtccaggagctggacccaattgccgaggacgaggagaggaggctagaagacgagaacgaggccgaggatgccctccagttcctcatcggtggtgctggtaccgttgaggtggggaccaccactggatccacgccgacgagccccacggtcgaggcgagcagtggctctggatcctgcctcggcccagccacccgttcgaggaggaggtga

SEQ ID NO: 103227 - DNA, 84 bp, Zea Mays
acatgaaacatgacacagaagaaattctttgctagctcacctcaactccaacatcggcgtcgaagaatctggatagctgcgtct

SEQ ID NO: 103228 - DNA, 176 bp, Zea Mays
tattttaattttattttactcctcacatatttttcatgtcaacaattattcaaacatttctttatcgtaaatatatatatatatatatacatctatagaaatgattaaaatattttatcatcatacgggcctactcatattctactcggtacactaattccggtaattgaccgaaa

SEQ ID NO: 103229 - DNA, 171 bp, Zea Mays
tattttaattttattttactcctcacatgttttcatgtcaacaattattcaaacatttctttatcgtaaatatatatatatatacatctatagaagtgattaaaatattttatcatcacacaggcctactcatattctactcggtacactaattccgctaattgaccgaaa

SEQ ID NO: 103230 - DNA, 453 bp, Zea Mays
atggcccaaatctcaacccctaaactctatccatccggaatgctaactgcacataagatcccaatctcacctatagaaagcagcttcctgaactgtgtggtggcctcaagctgcacggaggggtcgttggagtggacagcatgcgccatcgccggaaagccatcccgtcaccaagaaagtcagatccgaacccagcaaatggagtgccaccacgtcacccatacccggcggcggaggcgggaaacccatcgcggcgcttcttctggagactttcctcgcacttggccttgcgcatgtccatcatctggccctcgcggcggtggcggctctcctccgcgtccaccgtctgcttgtagttgccctttcgcatctgctcccgctcgctcggccggagcgacatcgcggcgaaacactaggaggacccggcggcggcgcgcagtgtgtgggcactga

SEQ ID NO: 103231 - DNA, 2688 bp, Zea Mays
gtgcggatgagagttcggatgcgggtaaaacttagaaatatccttcaaaggcggggcataaaatttcctaaaatttacagatggatctctcaagccttttgaggccaccaatggtgaaaaccgaggcggcggaggagcgggagcccctctcccggacgccagcggcggcagtagcggtcgagggtagcggcagaaggaccgccacggcggtgatcgacctcagcagcagcgactctgattccgacggcgagggtgcggtcggaagcggtaagagggtgaggggcgttggtggagacggctccgcgactaagcgggctagggtttcagcggtcgtcgatctgcccccgggtttcctcgagccaatcccgccgccgccggtgccggtgccattggcagcttgtgcgacgaagcagttctggaaggctggggactacgacggaaagccgctcggtgatggggtggctcagcagtcagtctctggaatggatcatgttcgcgtgcaccctagatttctgcactcaaacgcaacaagtcacaagtgggctctaggtgctttggctgagctgctggacaattctcttgacgaagttataaatggagctacctatgtgaacatagatgtgttagagaatgataaagatatcgataaaaagaagtccagaatgcttcttgttgaagatgatggtggtggaatggaccccgataaaatgcggcaatgcatgtccttgggttattcagctaagagcaaagttgctagtactattggacaatatggtaatggtttcaagacgagtacaatgaggcttggtgctgatgttttggtcttctcccgtagtcctggaaaatcaggcaaaggcctactcaaagcattggcatgctatcttatacatttcttaggagcactggcaaagaggacatcattgttcctatgattgattatgaatataaacaaggctgggaaagaatggtccggactacattggatgattggagcacaagcttccaaaccatcattacatggtctccatattcaactgaagcagaattacttgaacagtttagttctatgaaagatcgagggacacgaattattatttacaatctttgggaggatgaccaaggggacttggagcttgattttgatgctgaaatacatgatattcaactcagaggtggtaatcgtgatgagaaaaatatccagatggcaaatcagttcccaaactccaagcattacctcacatataggcattcattgagaagttatgcatcaattttgtatttgcgacttccgacttacttccaaatgattttgcgcggaaaagagattgaacaccataatattgtgactgacatgatgttgaagaaagaggtcacctacaggcctgtggcacctaatggacatccgaaggattcaaatatggtagctgatgtaacaattgggtttgtaaaagatgcaaaacatcacatcgacgttcaaggatttaatgtataccacatgaaccgtttgataaagcctttctggagagtgtggactgctgctggaagtggaggtcgtggtgtcataggtgttcttgaggcaaacttcattgaacctgctcatgataagcaagactttgagcggacaacacttctagcaagacttgaagcacgattagttcaaatgcagaaggattactggtctgggaatgctcatcgaataggatatgttgcaccacgatttggcaggaatactgaggcaggagatggagaagactctcctgaaaacacagcaagtgcacaaccatcaccttatcattctggtaaagggtacacacatgcaaaagacttgagtaataatatcaaaaagggtggtaaggcaagcacatcatttggtattcagcaaagagctgagaagtccgcaaggactaaacgatctacgaagtcaatactgcacgggctgtctgatagtgataatagtgattctgagtttatgggcaccctgtcgaggtcaagatcgcacaccctgaagacaaaccgaaaattgtttcaaaatggcagtactggtttgataacacctcaatccagtggactgatagaaagagagagggtcagaactaaatcccagccattggacccaaaagcaacaagcaacggagatctacatactatggatgagtatcagtctgttatcatgcagttaagggatgaaaattcatcactaaaggaaagattatcaaagatggaagaatcgatgtcgcaagagctagtggttgagtgtgacaagaacaagtctttgacagagagggtggaggatctgcagagacaacttgagtctgcaaccaaggaacaggaggcgctgatcgacatcttctcagaagaaaggaaccgacgagaccaagaagaggagagcctgaggaagaagctgaaggacgcatcttccaccatacaggatttgctggagcaactgaatgctgccaggaaaggccgcaaagtttgaggaaataaactagtaacgttgctccttgcgggcatcatcttagattagagtttgagggttagctgcatctacattgtgctccaggtcgtttggagcatcccatgtacagccaagcagtagtgaccactgaagaacacgttatgctttatctgcagttagcagttaccctacaagaaataacttgcgtaattatctttttatcctgttacgtc

SEQ ID NO: 103232 - DNA, 2689 bp, Zea Mays
gtgcggatgagagttcggatgcgggtaaaacttagaaatatccttcaaaggcggggcataaaatttcctaaaatttacagatggatctctcaagccttttgaggccaccaatggtgaaaaccgaggcggcggaggagcgggagcccctctcccggacgccagcggcggcagtagcggtcgagggtagcggcagaaggaccgccacggcggtgatcgacctcagcagcagcgactctgattccgacggcgagggtgcggtcggaagcggtaagagggtgaggggcgttggtggagacggctccgcgactaagcgggctagggtttcagcggtcgtcgatctgcccccgggtttcctcgagccaatcccgccgccgccggtgccggtgccattggcagcttgtgcgacgaagcagttctggaaggctggggactacgacggaaagccgctcggtgatggggtggctcagcagtcagtctctggaatggatcatgttcgcgtgcaccctagatttctgcactcaaacgcaacaagtcacaagtgggctctaggtgctttggctgagctgctggacaattctcttgacgaagttataaatggagctacctatgtgaacatagatgtgttagagaatgataaagatatcgataaaaagaagtccagaatgcttcttgttgaagatgatggtggtggaatggaccccgataaaatgcggcaatgcatgtccttgggttattcagctaagagcaaagttgctagtactattggacaatatggtaatggtttcaagacgagtacaatgaggcttggtgctgatgttttggtcttctcccgtagtcctggaaaatcaggcaaaaggcctactcaaagcattggcatgctatcttatacatttcttaggagcactggcaaagaggacatcattgttcctatgattgattatgaatataaacaaggctgggaaagaatggtccggactacattggatgattggagcacaagcttccaaaccatcattacatggtctccatattcaactgaagcagaattacttgaacagtttagttctatgaaagatcgagggacacgaattattatttacaatctttgggaggatgaccaaggggacttggagcttgattttgatgctgaaatacatgatattcaactcagaggtggtaatcgtgatgagaaaaatatccagatggcaaatcagttcccaaactccaagcattacctcacatataggcattcattgagaagttatgcatcaattttgtatttgcgacttccgacttacttccaaatgattttgcgcggaaaagagattgaacaccataatattgtgactgacatgatgttgaagaaagaggtcacctacaggcctgtggcacctaatggacatccgaaggattcaaatatggtagctgatgtaacaattgggtttgtaaaagatgcaaaacatcacatcgacgttcaaggatttaatgtataccacatgaaccgtttgataaagcctttctggagagtgtggactgctgctggaagtggaggtcgtggtgtcataggtgttcttgaggcaaacttcattgaacctgctcatgataagcaagactttgagcggacaacacttctagcaagacttgaagcacgattagttcaaatgcagaaggattactggtctgggaatgctcatcgaataggatatgttgcaccacgatttggcaggaatactgaggcaggagatggagaagactctcctgaaaacacagcaagtgcacaaccatcaccttatcattctggtaaagggtacacacatgcaaaagacttgagtaataatatcaaaaagggtggtaaggcaagcacatcatttggtattcagcaaagagctgagaagtccgcaaggactaaacgatctacgaagtcaatactgcacgggctgtctgatagtgataatagtgattctgagtttatgggcaccctgtcgaggtcaagatcgcacaccctgaagacaaaccgaaaattgtttcaaaatggcagtactggtttgataacacctcaatccagtggactgatagaaagagagagggtcagaactaaatcccagccattggacccaaaagcaacaagcaacggagatctacatactatggatgagtatcagtctgttatcatgcagttaagggatgaaaattcatcactaaaggaaagattatcaaagatggaagaatcgatgtcgcaagagctagtggttgagtgtgacaagaacaagtctttgacagagagggtggaggatctgcagagacaacttgagtctgcaaccaaggaacaggaggcgctgatcgacatcttctcagaagaaaggaaccgacgagaccaagaagaggagagcctgaggaagaagctgaaggacgcatcttccaccatacaggatttgctggagcaactgaatgctgccaggaaaggccgcaaagtttgaggaaataaactagtaacgttgctccttgcgggcatcatcttagattagagtttgagggttagctgcatctacattgtgctccaggtcgtttggagcatcccatgtacagccaagcagtagtgaccactgaagaacacgttatgctttatctgcagttagcagttaccctacaagaaataacttgcgtaattatctttttatcctgttacgtc

SEQ ID NO: 103233 - DNA, 473 bp, Zea Mays
atggagtggagcagaggaggaggtgaagctcaacatcaacaacgtgttcatggcgctcgagtccctcaagaagaagggcaacaagggcagggcggtcaggcagtcctccaggaagaagcacaatgtagggcccgtgcagcagcagtagcaggaaccacctcagaaggaggtcttctaggctctcgcaccgctcactactgatgccctttttcgtggccttccccaccaacgccgatgactcgctcgacaacccagatctggggtccttcctcctcaaccaagcacctgacattgggcgagagcggcgacatcgtgcgtgcttgagttcgccgagcgcgccgctaggatgctcgagcgacgcagtgagggtggcgagctcgagctcgccatgagtctccacgttgctgctgccatccactacgggctcggtcgccacgctgacgtcatccccgtcctcgagcgtgctgtcacag

SEQ ID NO: 103234 - DNA, 562 bp, Zea Mays
gttgtagaagccgcaatggagggaagtacgccaatgtctattggtcccaccgtcgcattcatggacgtttcggccacccacccctccacacaaactggcatcttcttgctccctggttagtttttctcttgatctatcttctctattagttgttttcggcgttgtcaaaatcttaggtgccacaatggatgaaagaacaacatgaagagttgggttccaaaggacttgagggctacttcatcataacaagtaactgaagatattgaataactgactacatcaccatgcaagactaaagtttttattttattaagaaaatgaccccaaagaagaagaaactagatgttgcagtgcagtctacacagtcatatgttgtatgttagtttctggaaaaaactagatggttcattgtggtatgtgtatgacagaagtatatatgtgttccttttagtttgttaagtgatctcggcaaggactaggtaactgtgtgtttgtcttagttgcggtgaactttctgtgttattgttaagtgaacttgggaaatgaagtatgtgcttgtttt

SEQ ID NO: 103235 - DNA, 285 bp, Zea Mays
atggtggggaagaagaggggtattatctccctgctggaccatctcgctgggctgctggaggtgcgcatggtgaaaggagtggacctcgccatccgcgacctccgattcagcgacccctacgtcgtccttcgcatcggcaaggcgcagatccggcgaattaaaatcggtcgcgccactgcgccaaccccgcgccactgcgccaaatcgccgccccggatcgaggagggggaggagccggcggaggctcctttggtggctgcgggggcgagagcgggagcgccatga

SEQ ID NO: 103236 - DNA, 117 bp, Zea Mays
ttcgcttcaccctgggaggactctggcccgaatctcgggacgagattcctttaaggggggaaggctgtgacaccccagtgtcacctagggtttctctcaaataccaaaccaagaacc

SEQ ID NO: 103237 - DNA, 1230 bp, Zea Mays
atagataatcttatataaaaataggtttatatatcctggtgctcttgccatggctggtgcatcgctcctctccccatcctgcacgctcctccgcctgattcccagcgcgtcgcacttcaagagattcgatcgggttcgccggttcgcgcccgccgccatggcgacttcctcaggaccaaaggaggcgccagcgaataaccctgggctccagaccgaggtcgaccccgccaccaaaggctacttcttgcaacaaacgatgttacgtgtgaaggacccaaaagtgagccttgacttctactcacgtgtgatgggcatgtcgttgctgaaaaggttggattttgaagagatgaaattcagtttgtattttctaggttacgaggatgtgaccttagcccctgatgatcatatcaagcggactgaatggacttttaggcaaaaagctactcttgagctcacccacaactggggcacggaaaatgaccctgaattcaaaggttaccataatgggaactcagaccctcgtggttttggtcatataggagtaactgtggatgatgtccacaaggcatgtgaacgctttgaacgtcttggggttgagtttgtgaagaaacctgatgatggaaaaatcaaaggcatcgctttcatcaaagatcctgatggttactggatcgaaatatttgaccagacgattgggacggtaacttcttcagcatcatgatgaacagtagtggttccttatatggtgcgcaagatcatacaactctggcataagagcttttcatatgtgtgtctggggtctggactcggattaagggctggaatctgtttacttctagcatcttcttgctttaataatatgcgaactatgttgaggaatgaaataaaataagttcgggtaaaaattcaagtttctgttgtcctgaccggtggtcccgcctgcatgcacactccccagcgcgggcacgtcctgtgccactgccttgtgggcccggccgcatgcaagcgcatgccttggagttacggttggagttggaggttcccccacctggcgacgcgaattagggctgggcaaaaaaaatccgaaatccgaattttgttcgggaattttgggtagtaacttgcaaaacccgaatttattttgggcatcataatcgggtacctgaattacccgaactttcatgtgtcatgtactcacgtcgtgtttaattattaatttgtacatctataatt

SEQ ID NO: 103238 - DNA, 1304 bp, Zea Mays
ttatatatcctggtgctcttgccatggctggtgcatcgctcctctccccatcctgcacgctcctccgcctgattcccagcgcgtcgcacttcaaggtcccgtgttccgtactggaggatttggattgatgattatggtgactttcgctcaggtttcactcaccattccccgttgggaattttcttgatttcgtagagattcgatcgggttcgccggttcgcgcccgccgccatggcgacttcctcaggaccaaaggaggcgccagcgaataaccctgggctccagaccgaggtcgaccccgccaccaaaggctacttcttgcaacaaacgatgttacgtgtgaaggacccaaaagtgagccttgacttctactcacgtgtgatgggcatgtcgttgctgaaaaggttggattttgaagagatgaaattcagtttgtattttctaggttacgaggatgtgaccttagcccctgatgatcatatcaagcggactgaatggacttttaggcaaaaagctactcttgagctcacccacaactggggcacggaaaatgaccctgaattcaaaggttaccataatgggaactcagaccctcgtggttttggtcatataggagtaactgtggatgatgtccacaaggcatgtgaacgctttgaacgtcttggggttgagtttgtgaagaaacctgatgatggaaaaatcaaaggcatcgctttcatcaaagatcctgatggttactggatcgaaatatttgaccagacgattgggacggtaacttcttcagcatcatgatgaacagtagtggttccttatatggtgcgcaagatcatacaactctggcataagagcttttcatatgtgtgtctggggtctggactcggattaagggctggaatctgtttacttctagcatcttcttgctttaataatatgcgaactatgttgaggaatgaaataaaataagttcgggtaaaaattcaagtttctgttgtcctgaccggtggtcccgcctgcatgcacactccccagcgcgggcacgtcctgtgccactgccttgtgggcccggccgcatgcaagcgcatgccttggagttacggttggagttggaggttcccccacctggcgacgcgaattagggctgggcaaaaaaaatccgaaatccgaattttgttcgggaattttgggtagtaacttgcaaaacccgaatttattttgggcatcataatcgggtacctgaattacccgaactttcatgtgtcatgtactcacgtcgtgtttaattattaatttgtacatctataatt

SEQ ID NO: 103239 - DNA, 95 bp, Zea Mays
ctcatacccgtgcgagagatcttaacttcgtcacgcttagggatggcaacgggtacatacccgtcgggtagtaccattccatacccatacccatc

SEQ ID NO: 103240 - DNA, 7461 bp, Zea Mays
ggtcttcaattgtgctgtctgggccacggaacgacaatgtcacagcttggattagccgcagctgcctcaaaggccttgccactactccctaatcgccagagaagttcagctgggactacattctcatcatcttcattatcgaggcccttaaacagaaggaaaagccgtactcgttcactccgtgatggcggagatggggtatcagatgccaaaaagcacagccagtctgttcgtcaaggtcttgctggcattatcgacctcccaagtgaggcaccttccgaagtggatatttcacatggatctgaggatcctagggggccaacagattcttatcaaatgaatgggattatcaatgaaacacataatggaagacatgcctcagtgtccaaggttgttgaattttgtgcggcactaggtggcaaaacaccaattcacagtatattagtggccaacaatggaatggcagcagcaaaatttatgaggagtgtccggacatgggctaatgatacttttggatctgagaaggcaattcaactcatagctatggcaactccggaagacatgaggataaatgcagaacacattagaattgctgaccaattcgtagaggtgcctggtggaacaaacaataataactacgccaatgttcaactcatagtggagatggcacaaaaactaggtgtttctgctgtttggcctggttggggtcatgcttctgagaatcctgaactgccagatgtattgaccgcaaaagggatcgtttttcttggcccacctgcatcatcaatgaatgctttgggagataaggtcggctcagctctcattgctcaagcagccggggtcccaactcttgcttggagtggatcacatgttgaagttccattagagtgctgcttagacgcgatacctgaggagatgtatagaaaagcttgcgttactaccacagaggaagcagttgcaagttgtcaagtggttggttatcctgccatgattaaggcatcctggggaggtggtggtaaaggaataagaaaggttcataatgatgatgaggttagagcgctgtttaagcaagtacaaggtgaagtccctggctccccaatatttgtcatgaggcttgcatcccagagtcggcatcttgaagttcagttgctttgtgatcaatatggtaatgtagcagcacttcacagtcgtgattgcagtgtgcaacggcgacaccagaagattattgaagaaggtccagttactgttgctcctcgtgagacagttaaagcacttgagcaggcagcaaggaggcttgctaaggctgtgggttatgttggtgctgctactgttgagtatctttacagcatggaaactggagactactattttctggaacttaatccccgactacaggttgagcatccagtcaccgagtggatagctgaagtaaatctgcctgcagctcaagttgctgttggaatgggcatacctctttggcagattccagaaatcagacgtttctatggaatggactatggaggagggtatgacatttggaggaaaacagcagctcttgctacaccatttaattttgatgaagtagattctcaatggccaaagggccattgtgtagcagttagaattactagtgaggacccagatgatggtttcaaacctactggtgggaaagtgaaggagataagttttaaaagcaagcctaatgtttgggcctacttctcagtaaagtctggtggaggcattcatgaatttgctgattctcagttcggacatgtttttgcatatgggctctctagatcagcagcaataacaaacatgactcttgcattaaaagagattcaaattcgtggagaaattcattcaaatgttgattacacagttgacctcttaaatgcttcagactttagagaaaacaagattcatactggttggctcgacaccagaatagctatgcgtgttcaagctgagaggcccccatggtatatttcagtggttgggggtgctttatataaaacagtaaccaccaatgcagccactgtttctgaatatgttagttatctcaccaagggccagattccaccaaagcatatatcccttgtcaattctacagttaatttgaatatagaagggagcaaatacacaattgaaactgtaaggactggacatggtagctacaggttgagaatgaatgattcaacagttgaagcgaatgtacaatctttatgtgatggtggcctcttaatgcagttggatggaaacagccatgtaatttatgcagaagaagaagctggtggtacacggcttcagattgatggaaagacatgtttattgcagaatgaccatgatccatcaaagttattagctgagacaccctgcaaacttcttcgtttcttggttgctgatggtgctcatgttgatgcggatgtaccatacgcggaagttgaggttatgaagatgtgcatgcctctcttgtcacctgcttctggtgtcattcattgtatgatgtctgagggccaggcattgcaggctggtgatcttatagcaaggttggatcttgatgacccttctgctgtgaaaagagctgagccatttgatggaatatttccacaaatggagctccctgttgctgtctctagtcaagtacacaaaagatatgctgcaagtttgaatgctgctcgaatggtccttgcaggatatgagcacaatattaatgaagtcgttcaagatttggtatgctgcctggacaaccctgagcttcctttcctacagtgggatgaacttatgtctgttctagcaacgaggcttccaagaaatctcaagagtgagttagaggataaatacaaggaatacaagttgaatttttaccatggaaaaaacgaggactttccatccaagttgctaagagacatcattgaggaaaatctttcttatggttcagagaaggaaaaggctacaaatgagaggcttgttgagcctcttatgaacctactgaagtcatatgagggtgggagagagagccatgcacattttgttgtcaagtctcttttcgaggagtatcttacagtggaagaactttttagtgatggcattcagtctgacgtgattgaaacattgcggcatcagcacagtaaagacctgcagaaggttgtagacattgtgttgtctcaccagggtgtgaggaacaaagctaagcttgtaacggcacttatggaaaagctggtttatccaaatcctggtggttacagggatctgttagttcgcttttcttccctcaatcataaaagatattataagttggcccttaaagcaagtgaacttcttgaacaaaccaaactaagtgaactccgtgcaagcgttgcaagaagcctttcggatctggggatgcataagggagaaatgagtattaaggataacatggaagatttagtctctgccccattacctgttgaagatgctctgatttctttgtttgattacagtgatcgaactgttcagcagaaagtgattgagacatacatatcacgattgtaccagcctcatcttgtaaaggatagcatccaaatgaaattcaaggaatctggtgctattactttttgggaattttatgaagggcatgttgatactagaaatggacatggggctattattggtgggaagcgatggggtgccatggtcgttctcaaatcacttgaatctgcgtcaacagccattgtggctgcattaaaggattcggcacagttcaacagctctgagggcaacatgatgcacattgcattattgagtgctgaaaatgaaagtaatataagtggaataagtgatgatcaagctcaacataagatggaaaagcttagcaagatactgaaggatactagcgttgcaagtgatctccaagctgctggtttgaaggttataagttgcattgttcaaagagatgaagctcgcatgccaatgcgccacacattcctctggttggatgacaagagttgttatgaagaagagcagattctccggcatgtggagcctcccctctctacacttcttgaattggataagttgaaggtgaaaggatacaatgaaatgaagtatactccttcgcgtgaccgccaatggcatatctacacactaagaaatactgaaaaccccaaaatgttgcatagggtgtttttccgaactattgtcaggcaacccaatgcaggcaacaagtttacatcggctcagatcagcgacgctgaagtaggatgtcccgaagaatctctttcatttacatcaaatagcatcttaagatcattgatgactgctattgaagaattagagcttcatgcaattaggacaggtcattctcacatgtatttgtgcatactgaaagagcaaaagcttcttgacctcattccattttcagggagtacaattgttgatgttggccaagatgaagctaccgcttgttcacttttaaaatcaatggctttgaagatacatgagcttgttggtgcaaggatgcatcatctgtctgtatgccagtgggaggtgaaactcaagttggactgtgatggccctgcaagtggtacctggagagttgtaactacaaatgttactggtcacacctgcaccattgatatataccgagaagtggaggaaatagaatcgcagaagttagtgtaccattcagccacttcgtcagctggaccattgcatggtgttgcactgaataatccatatcaacctttgagtgtgattgatctaaagcgctgctctgctaggaacaacagaacaacatattgctatgattttccgctggcctttgaaactgcactgcagaagtcatggcagtccaatggctctactgtttctgaaggcaatgaaaatagtaaatcctacgtgaaggcaactgagctagtgtttgctgaaaaacatgggtcctggggcactcctataattccgatggaacgccctgctgggctcaacgacattggtatggtcgcttggatcatggagatgtcaacacctgaatttcccaatggcaggcagattattgttgtagcaaatgatatcactttcagagctggatcatttggcccaagggaagatgcattttttgaaactgtcactaacctggcttgcgaaaggaaacttcctcttatatacttggcagcaaactctggtgctaggattggcatagctgatgaagtaaaatcttgcttccgtgttggatggtctgacgaaggcagtcctgaacgagggtttcagtacatctatctgactgaagaagactatgctcgcattagctcttctgttatagcacataagctggagctagatagtggtgaaattaggtggattattgactctgttgtgggcaaggaggatgggcttggtgtcgagaacatacatggaagtgctgctattgccagtgcttattctagggcatatgaggagacatttacacttacatttgtgactgggcggactgtaggaataggagcttatcttgctcgacttggtatacggtgcatacagcgtcttgaccagcctattattttaacagggttttctgccctgaacaagctccttgggcgggaagtgtacagctcccacatgcagcttggtggtcctaagatcatggcgaccaatggtgttgtccacctcactgttccagatgaccttgaaggtgtttccaatatattgaggtggctcagctatgttcctgcaaacattggtggacctcttcctattaccaaacctctggaccctccagacagacctgttgcttacatccctgagaacacatgcgatccacgtgcagctatctgtggtgtagatgacagccaagggaaatggttgggtggtatgtttgacaaagacagctttgtggagacatttgaaggatgggcaaaaacagtggttactggcagagcaaagcttggaggaattcctgtgggcgtcatagctgtggagacacagaccatgatgcagatcatccctgctgatccaggtcagcttgattcccatgagcgatctgtccctcgtgctggacaagtgtggttcccagattctgcaaccaagaccgctcaggcattattagacttcaaccgtgaaggattgcctctgttcatcctggctaattggagaggcttctctggtggacaaagagatctctttgaaggaattcttcaggctgggtcaacaattgtcgagaaccttaggacatataatcagcctgcttttgtgtacattcctatggctggagagcttcgtggaggagcttgggttgtggtcgatagcaaaataaatccagaccgcattgagtgttatgctgaaaggactgccaaaggtaatgttctcgaacctcaagggttaattgaaatcaagttcaggtcagaggaactccaagactgtatgggtaggcttgacccagagttgataaatctgaaagcaaaactccaagatgtaaatcatggaaatggaagtctaccagacatagaagggattcggaagagtatagaagcacgtacgaaacagttgctgcctttatatacccagattgcaatacggtttgctgaattgcatgatacttccctaagaatggcagctaaaggtgtgattaagaaagttgtagactgggaagaatcacgctcgttcttctataaaaggctacggaggaggatcgcagaagatgttcttgcaaaagaaataaggcagatagtcggtgataaatttacgcaccaattagcaatggagctcatcaaggaatggtaccttgcttctcaggccacaacaggaagcactggatgggatgacgatgatgcttttgttgcctggaaggacagtcctgaaaactacaaggggcatatccaaaagcttagggctcaaaaagtgtctcattcgctctctgatcttgctgactccagttcagatctgcaagcattctcgcagggtctttctacgctattagataagatggatccctctcagagagcgaagtttgttcaggaagtcaagaaggtccttgattgatgataccaacacatccaacacaatgtgtgcatgtcacatctttttgttctagtacatacatagaaggatattgcttggtcttgattgatcatgtctgatttaagtcgactattatttcttggaattttcttttggacctggtgctatggttgatggatgtatattggatatgtgcgttctgccaggtgtaagcacaaaggtttagacagaccgagagcaagagcgagtgaacctgttctggttttgcagtggttcagtaaggcagaaagttgttaaaccgtagttctgagatgtattaccagtggcgccatgctgtacttttagggtgtataatgcggatacaaataaacaatttagcggttcattaaagtttgaactcaaataacatgttctttgtaagcatatgtaccgtacctctacgtgaaataaagttgttgaattagcattcga

SEQ ID NO: 103241 - DNA, 7464 bp, Zea Mays
ggtcttcaattgtgctgtctgggccacggaacgacaatgtcacagcttggattagccgcagctgcctcaaaggccttgccactactccctaatcgccagagaagttcagctgggactacattctcatcatcttcattatcgaggcccttaaacagaaggaaaagccgtactcgttcactccgtgatggcggagatggggtatcagatgccaaaaagcacagccagtctgttcgtcaaggtcttgctggcattatcgacctcccaagtgaggcaccttccgaagtggatatttcacatggatctgaggatcctagggggccaacagattcttatcaaatgaatgggattatcaatgaaacacataatggaagacatgcctcagtgtccaaggttgttgaattttgtgcggcactaggtggcaaaacaccaattcacagtatattagtggccaacaatggaatggcagcagcaaaatttatgaggagtgtccggacatgggctaatgatacttttggatctgagaaggcaattcaactcatagctatggcaactccggaagacatgaggataaatgcagaacacattagaattgctgaccaattcgtagaggtgcctggtggaacaaacaataataactacgccaatgttcaactcatagtggagatggcacaaaaactaggtgtttctgctgtttggcctggttggggtcatgcttctgagaatcctgaactgccagatgtattgaccgcaaaagggatcgtttttcttggcccacctgcatcatcaatgaatgctttgggagataaggtcggctcagctctcattgctcaagcagccggggtcccaactcttgcttggagtggatcacatgttgaagttccattagagtgctgcttagacgcgatacctgaggagatgtatagaaaagcttgcgttactaccacagaggaagcagttgcaagttgtcaagtggttggttatcctgccatgattaaggcatcctggggaggtggtggtaaaggaataagaaaggttcataatgatgatgaggttagagcgctgtttaagcaagtacaaggtgaagtccctggctccccaatatttgtcatgaggcttgcatcccagagtcggcatcttgaagttcagttgctttgtgatcaatatggtaatgtagcagcacttcacagtcgtgattgcagtgtgcaacggcgacaccagaagattattgaagaaggtccagttactgttgctcctcgtgagacagttaaagcacttgagcaggcagcaaggaggcttgctaaggctgtgggttatgttggtgctgctactgttgagtatctttacagcatggaaactggagactactattttctggaacttaatccccgactacaggttgagcatccagtcaccgagtggatagctgaagtaaatctgcctgcagctcaagttgctgttggaatgggcatacctctttggcagattccagaaatcagacgtttctatggaatggactatggaggagggtatgacatttggaggaaaacagcagctcttgctacaccatttaattttgatgaagtagattctcaatggccaaagggccattgtgtagcagttagaattactagtgaggacccagatgatggtttcaaacctactggtgggaaagtgaaggagataagttttaaaagcaagcctaatgtttgggcctacttctcagtaaagtctggtggaggcattcatgaatttgctgattctcagttcggacatgtttttgcatatgggctctctagatcagcagcaataacaaacatgactcttgcattaaaagagattcaaattcgtggagaaattcattcaaatgttgattacacagttgacctcttaaatgcttcagactttagagaaaacaagattcatactggttggctcgacaccagaatagctatgcgtgttcaagctgagaggcccccatggtatatttcagtggttgggggtgctttatataaaacagtaaccaccaatgcagccactgtttctgaatatgttagttatctcaccaagggccagattccaccaaagcatatatcccttgtcaattctacagttaatttgaatatagaagggagcaaatacacaattgaaactgtaaggactggacatggtagctacaggttgagaatgaatgattcaacagttgaagcgaatgtacaatctttatgtgatggtggcctcttaatgcagttggatggaaacagccatgtaatttatgcagaagaagaagctggtggtacacggcttcagattgatggaaagacatgtttattgcagaatgaccatgatccatcaaagttattagctgagacaccctgcaaacttcttcgtttcttggttgctgatggtgctcatgttgatgcggatgtaccatacgcggaagttgaggttatgaagatgtgcatgcctctcttgtcacctgcttctggtgtcattcattgtatgatgtctgagggccaggcattgcaggctggtgatcttatagcaaggttggatcttgatgacccttctgctgtgaaaagagctgagccatttgatggaatatttccacaaatggagctccctgttgctgtctctagtcaagtacacaaaagatatgctgcaagtttgaatgctgctcgaatggtccttgcaggatatgagcacaatattaatgaagtcgttcaagatttggtatgctgcctggacaaccctgagcttcctttcctacagtgggatgaacttatgtctgttctagcaacgaggcttccaagaaatctcaagagtgagttagaggataaatacaaggaatacaagttgaatttttaccatggaaaaaacgaggactttccatccaagttgctaagagacatcattgaggaaaatctttcttatggttcagagaaggaaaaggctacaaatgagaggcttgttgagcctcttatgaacctactgaagtcatatgagggtgggagagagagccatgcacattttgttgtcaagtctcttttcgaggagtatcttacagtggaagaactttttagtgatggcattcagtctgacgtgattgaaacattgcggcatcagcacagtaaagacctgcagaaggttgtagacattgtgttgtctcaccagggtgtgaggaacaaagctaagcttgtaacggcacttatggaaaagctggtttatccaaatcctggtggttacagggatctgttagttcgcttttcttccctcaatcataaaagatattataagttggcccttaaagcaagtgaacttcttgaacaaaccaaactaagtgaactccgtgcaagcgttgcaagaagcctttcggatctggggatgcataagggagaaatgagtattaaggataacatggaagatttagtctctgccccattacctgttgaagatgctctgatttctttgtttgattacagtgatcgaactgttcagcagaaagtgattgagacatacatatcacgattgtaccagcctcatcttgtaaaggatagcatccaaatgaaattcaaggaatctggtgctattactttttgggaattttatgaagggcatgttgatactagaaatggacatggggctattattggtgggaagcgatggggtgccatggtcgttctcaaatcacttgaatctgcgtcaacagccattgtggctgcattaaaggattcggcacagttcaacagctctgagggcaacatgatgcacattgcattattgagtgctgaaaatgaaagtaatataagtggaataagcagtgatgatcaagctcaacataagatggaaaagcttagcaagatactgaaggatactagcgttgcaagtgatctccaagctgctggtttgaaggttataagttgcattgttcaaagagatgaagctcgcatgccaatgcgccacacattcctctggttggatgacaagagttgttatgaagaagagcagattctccggcatgtggagcctcccctctctacacttcttgaattggataagttgaaggtgaaaggatacaatgaaatgaagtatactccttcgcgtgaccgccaatggcatatctacacactaagaaatactgaaaaccccaaaatgttgcatagggtgtttttccgaactattgtcaggcaacccaatgcaggcaacaagtttacatcggctcagatcagcgacgctgaagtaggatgtcccgaagaatctctttcatttacatcaaatagcatcttaagatcattgatgactgctattgaagaattagagcttcatgcaattaggacaggtcattctcacatgtatttgtgcatactgaaagagcaaaagcttcttgacctcattccattttcagggagtacaattgttgatgttggccaagatgaagctaccgcttgttcacttttaaaatcaatggctttgaagatacatgagcttgttggtgcaaggatgcatcatctgtctgtatgccagtgggaggtgaaactcaagttggactgtgatggccctgcaagtggtacctggagagttgtaactacaaatgttactggtcacacctgcaccattgatatataccgagaagtggaggaaatagaatcgcagaagttagtgtaccattcagccacttcgtcagctggaccattgcatggtgttgcactgaataatccatatcaacctttgagtgtgattgatctaaagcgctgctctgctaggaacaacagaacaacatattgctatgattttccgctggcctttgaaactgcactgcagaagtcatggcagtccaatggctctactgtttctgaaggcaatgaaaatagtaaatcctacgtgaaggcaactgagctagtgtttgctgaaaaacatgggtcctggggcactcctataattccgatggaacgccctgctgggctcaacgacattggtatggtcgcttggatcatggagatgtcaacacctgaatttcccaatggcaggcagattattgttgtagcaaatgatatcactttcagagctggatcatttggcccaagggaagatgcattttttgaaactgtcactaacctggcttgcgaaaggaaacttcctcttatatacttggcagcaaactctggtgctaggattggcatagctgatgaagtaaaatcttgcttccgtgttggatggtctgacgaaggcagtcctgaacgagggtttcagtacatctatctgactgaagaagactatgctcgcattagctcttctgttatagcacataagctggagctagatagtggtgaaattaggtggattattgactctgttgtgggcaaggaggatgggcttggtgtcgagaacatacatggaagtgctgctattgccagtgcttattctagggcatatgaggagacatttacacttacatttgtgactgggcggactgtaggaataggagcttatcttgctcgacttggtatacggtgcatacagcgtcttgaccagcctattattttaacagggttttctgccctgaacaagctccttgggcgggaagtgtacagctcccacatgcagcttggtggtcctaagatcatggcgaccaatggtgttgtccacctcactgttccagatgaccttgaaggtgtttccaatatattgaggtggctcagctatgttcctgcaaacattggtggacctcttcctattaccaaacctctggaccctccagacagacctgttgcttacatccctgagaacacatgcgatccacgtgcagctatctgtggtgtagatgacagccaagggaaatggttgggtggtatgtttgacaaagacagctttgtggagacatttgaaggatgggcaaaaacagtggttactggcagagcaaagcttggaggaattcctgtgggcgtcatagctgtggagacacagaccatgatgcagatcatccctgctgatccaggtcagcttgattcccatgagcgatctgtccctcgtgctggacaagtgtggttcccagattctgcaaccaagaccgctcaggcattattagacttcaaccgtgaaggattgcctctgttcatcctggctaattggagaggcttctctggtggacaaagagatctctttgaaggaattcttcaggctgggtcaacaattgtcgagaaccttaggacatataatcagcctgcttttgtgtacattcctatggctggagagcttcgtggaggagcttgggttgtggtcgatagcaaaataaatccagaccgcattgagtgttatgctgaaaggactgccaaaggtaatgttctcgaacctcaagggttaattgaaatcaagttcaggtcagaggaactccaagactgtatgggtaggcttgacccagagttgataaatctgaaagcaaaactccaagatgtaaatcatggaaatggaagtctaccagacatagaagggattcggaagagtatagaagcacgtacgaaacagttgctgcctttatatacccagattgcaatacggtttgctgaattgcatgatacttccctaagaatggcagctaaaggtgtgattaagaaagttgtagactgggaagaatcacgctcgttcttctataaaaggctacggaggaggatcgcagaagatgttcttgcaaaagaaataaggcagatagtcggtgataaatttacgcaccaattagcaatggagctcatcaaggaatggtaccttgcttctcaggccacaacaggaagcactggatgggatgacgatgatgcttttgttgcctggaaggacagtcctgaaaactacaaggggcatatccaaaagcttagggctcaaaaagtgtctcattcgctctctgatcttgctgactccagttcagatctgcaagcattctcgcagggtctttctacgctattagataagatggatccctctcagagagcgaagtttgttcaggaagtcaagaaggtccttgattgatgataccaacacatccaacacaatgtgtgcatgtcacatctttttgttctagtacatacatagaaggatattgcttggtcttgattgatcatgtctgatttaagtcgactattatttcttggaattttcttttggacctggtgctatggttgatggatgtatattggatatgtgcgttctgccaggtgtaagcacaaaggtttagacagaccgagagcaagagcgagtgaacctgttctggttttgcagtggttcagtaaggcagaaagttgttaaaccgtagttctgagatgtattaccagtggcgccatgctgtacttttagggtgtataatgcggatacaaataaacaatttagcggttcattaaagtttgaactcaaataacatgttctttgtaagcatatgtaccgtacctctacgtgaaataaagttgttgaattagcattcga

SEQ ID NO: 103242 - DNA, 370 bp, Zea Mays
agcgagaaggcagcagccgccagcaaccagttcgtcactgcctaaacctaacctaatccattagcagttcggcactgcgggtctacggcggccggcggcagcagtactacggagcccccagccagccccaggttgcggcagcggcagcaggtggccaggttgcggcagcggcgccctgggacctggtcggccgaccctgctcgagtgctcggcgtcacagcttctcctttctacgtgcagcggttcacaggttcaggcattcagcgccacgccgccgtcgcccccaagccagtgttcagcgctcagggtgccttggaagtacgctagcttgttgtcatgaagaagtcattcaagttccttccagtgagtt

SEQ ID NO: 103243 - DNA, 3054 bp, Zea Mays
atggatgctccccatgaactacgctttgacaaagtattgtacattgactgctctgaatggaaaagtagaagggaaatgcagagagcaattgcagaggaactgaaacttgaccatggaacaatggccatgtttgacaaccaggatgaggaggatgactacgatggaaaagataaagaatctagggatgtgatacgaagtattgcaatggatatttatcgaagactggcggactgtaaatttatgatgatttttcttaatggaagtgataacgagatcgatgtcactagatttggcatccctcatataacggaattcggtaaaaacacaatcatttggacattcaagagaaagttgttgacgattaatagccgtcatgatgagatagcagaaaagttaagatacagccaccttttcctctatggatcaattgtcgcaggacctaatctggtaagtgagcaggatttttgtgcattggtgcatggagaggctactaccatagttgctcgccaccaatgcatgctggatatggatgcaacaatggtgacagaatgttgcctctttgagctatccctacattacaatttccacaacatcactagattgggttgggatgctcattcttctaactattggatatgtgctggaattatagcaggcaataaaaaaatggagatcgcaaatgcattgcatggagagataagatgggagtgtgatgctcctctacttcaacgtttgcttgaagaattgagtcctaccttttcagtaaagaagattacaaagcctctagttgtttctatgaggtgtctagttaaagatcgtcattggatttcaatcacctcccaggaacatggattagatggtgtccaagatataccagcaggagcatcggcggtgttcttggcatttcaaagaacaggtcagctagaaccatatgcaagatcaggtcatccaacatcacttgaaggacaatattccccacccatactgccacctggcatattcaaatattctaggagcattgctgtgctggttctctcttattgtgccttcagttttgcatcacctcctttcctcatgtgcaatagcctaaggttccttggtttggacaagtgtaagcacaagccaagtgaacaatattgtgatacagatgcagagtggaccttcttgctcagtctatgggttctcgagatacgatacacagaatgggatgagattctgtccaaagaaaagatagatctcatgagtaacctgaaggagttaaatatagagggagtttggagctggcagtgcatcaatcaactaaggaaattaataccccacctttacaggttaaggattaccaatgctaggatttatcaagcagaaacagtagatgtagatgactcatttatggacaagggaaagctacagttactcgatctgtctggcaatagggagatgaaagttgtaccaggtagcctatcaaaggcaagtagccttgaggtgcttctccttgatggctgccttgggcttgaatatgttggtgcgcttccaccatctctcaattcctttagtctcgatggctatggagtagcatcccattggacaccatctattaataatctactacctcctgaaaatctgcgtccagcttctatagatgtgagggatgccaagatctccaggatatgcctagagggctgcacaggattggagaatttgttcctacgtgggctacctaatcttgtggagctggacctatcaggaactggaatcaagatacttgactttacaactatggtgattcaagtcccatgtctcaaacgattatttctgctgggctgtgagcgccttgttgccataatattggaagagaagtggccatacgatatagatacacaactagagctcctatgcattgacacacgagctgagacgggatattctcggccatgtattgaccataccaaaaagtccttcaagctacagatacatgccattctttcggactcaaggcttgctcggtccttgttctcaatcatagactaccacatttgcaacaacattgtggatatttactttaatatccttgtcaccgatgtgcccactgtgtatagtggggaggatgtacaacctgaagctgcccacagggtggttgcacttgcacagtatggtgatgtccctgccacggctggcgatgttcccatgcaggatttcccaccagctccaactagagatttggatcgccacgtaggaattgccaaggtgagccgttgtctggactgggtacaattcatagagttgtctaactccctgcacctgcatgacaatgacatctcaaccggtgtaaacataaccctggccggcgaattctactacctcaggcaatgccgtgtggagaggtgccccaagttggatactgtctttccaagaacagatgacttcagggctctcgagacgatttgggcatcggatctcctgatggcccgctgcatctggggcaaaggtcgtccgtcttacatgtctaacttgtttgacgcactacggcacctcaacttgcgtgcctgcccaagactccagtttgtgcttccagtctgggtctcctccttccccagattggagatgctccacatcgccgactgcacagacctgaggcatgtattcgtgctggatgaagagcaccgagaggaacgcatagcgttccccaatctgaaggccatgcacctgcacaacctcccatcgttgtggcagatatgtgaggcctcgatgctgatgctggcgcccgcgctcatgaccatcaagatcaggggctgctggtccctccgccgactgccatccatggaaggccgtggcgtacacatggagaagccgacggtcgagatcgagaagtatgtatgggatgcgctggagtgggacggggtggaggctggccaccatccctccctcttccagcagccacgacactcacgctactacaggaagaaatcgctccggggatctgtcctcaggtactcttttcccgctagcattctttgtcctgacgcacgctaattcaatatgttagctttgcttatt

SEQ ID NO: 103244 - DNA, 783 bp, Zea Mays
ttccaagaacagatgacttcagggctctcgagacgatttgggcatcggatctcctgatggcccgctgcatctggggcaaaggtcgtccgtcttacatgtctaacttgtttgacgcactacggcacctcaacttgcgtgcctgcccaagactccagtttgtgcttccagtctgggtctcctccttccccagattggagatgctccacatcgccgactgcacagacctgaggcatgtattcgtgctggatgaagagcaccgagaggaacgcatagcgttccccaatctgaaggccatgcacctgcacaacctcccatcgttgtggcagatatgtgaggcctcgatgctgatgctggcgcccgcgctcatgaccatcaagatcaggggctgctggtccctccgccgactgccatccatggaaggccgtggcgtacacatggagaagccgacggtcgagatcgagaagtatgtatgggatgcgctggagtgggacggggtggaggctggccaccatccctccctcttccagcagccacgacactcacgctactacaggaagaaatcgctccggggatctgtcctcagttaagcttcgaagaacgcgttggttcttcagctacggccgggtcatcgcgcattgcatggatgcgttgtgctcctccactcactgtgttcttgttttgttggccatcgattgtttgggccaagatggtttgatatttaaggtgtgataaacttttttactgtcgtgtgataaacttacaggtgtgaatcaactgttagat

SEQ ID NO: 103245 - DNA, 546 bp, Zea Mays
tcctgcagtccaagttctccccacgccgaccttcttccccggcaagtctggccgctgccatccctcggcaccaggctggagcacacgccgtgctcctcctcacgtgctcctccgccggtctgcgtcccagctcgagccgcagtagcagcgacgcccttcgctgcgtcgcgctcgccagaacgggcctcacgtcgtcgatctgcgcagcgtctacgcgtcgtcgtcaaaacccacgccttgtcgacgtcacgcctcgcacatagctcgtcggcagagagcccaaactaatggcatgcatgcgcgacgcgagtcggccaggttgttcgccttgaatgattcacgatttattttatttacgtattgggtcgatgatgtgcctgcatgttaatatgtgcgtgaaaatataattgtatgaatggacgcgtgtagagaagaaactgaagtagaaaagaactcggacgtttttatattttgataagaaagatgtgcgatgcgttgtttgatgcgaaaaactaagtcaaaaatgcagattatgtttttgggaaa

SEQ ID NO: 103246 - DNA, 1195 bp, Zea Mays
ctgctcctcccgcgcttagctcttggtgcggatctcctggccggttcacaacttctagctcgtcaagctcgtccccatggcgcgccagttcggatttccctccctgccactcggccttgccccctgctcacccctgcaaccctgccgagccctaaccccagccagccgagctcaggcgcccaatccatggcgcacccagccgcgcccttgtccatctgctcggccgcgagcttccctgctcccgtggttatcgaagctccaggtgcgcacgtacgcactgaagcctttggggtccatgacgatatcgtggagagccgcagcgttgtcgctcgcgtgcctcgtcgccgtgacaacggcgctggtggacggcgcgctgctccccgaactcgctctgcgctcggcttcttctccgtggagctcgcctctgcgcctgactcctgctcgtcgaatctccagccgcgccgtcgccttgctgctcgccagcgtcttctctgcccctgcgcatccatggcgatttcccctgcggcagcttcctcggcgcgcagcctccctcccagctcagccgcctgcttctctccactgctcgtcgcgcccagctacagctcgccgtgccctcgccgctcccttctcctcctctgtttgcccatctccatggctgccgtcgaaggctcgaagcttcctggcacgctcgttgtgctctggtcggaggaggatttgctgcgcgcccaaatcttcttcctcccattcccagctccctctgctcgcgacgtgcgcccagcgatggagtctcgcggtgctcctgttccctgtctatcgcgccatcgatcccgcctgagccccttcgcgttcgtggaagctccctgccgtcgctcagctcaccggcgtgcgtcctgctccttatgcgcccagcgccgtgcgccggaaagtccctgcgcgcaagctatatgttggccgcgcgcgaagctatctgttcgtcgtcatcgctcggtcgcgcgacaggtggactgtgtgttgtgtgtcgcacatcctaggtccttgtagtcgtgtcgtacgtgcaacagtcgcggatctgtgccgccttggtcttgttgtcgacatcgttcgccgtggcatagtcgtggaacttcctcggcgccgcgcacgtcagatcgttgggtcgcgtcttgctcggctctcatgccattgattttggctc

SEQ ID NO: 103247 - DNA, 125 bp, Zea Mays
cttattttctctttggttttcttatcccctctggggaggtcttttgtactatggtctattttggaccctcttttcctctacttaatataatgatgcgcagctctcctgcgctttcgagaaaaaaa

SEQ ID NO: 103248 - DNA, 321 bp, Zea Mays
atgggaaggaggacgattcttgcacattctcagaattggaggaggacgatggtggggcagacgaccgaatcgaaggtggacaaacctggcgatgtcgctggctggttgctgcttcgcgtatggaaaccagccgatgcaagcagccctcccttggaccagcccgactctggtagcctagtgcctagcttcgcgtctagcaccgacaaagcttgtcacgagcgtttcggcggcgctgggggaaatggttgccatgcgaatggagagggaaacctccgcgtcagcgcgggattcaccagcgaccgatgtgtagcggacgcatag

SEQ ID NO: 103249 - DNA, 1885 bp, Zea Mays
gtctttaacaacccacgatctgaaagcaaagcagcaaagcagaccaacccagcgcagcgcgcaacacctcgccaattgcgacgccgccgccgtcactgtcgccgcaggagtgcgaaccacgctgccgcccgctcccgccgcccaaacagctttatccgagccccgattcgccggatcacatgctgcggccacctctcaaatgacctctcaactccagagcactttgctcctgctcccgctcttcgccgccgctgctttgggccgcggcggcgacgcctcgactgcgccgtcgctggagttccaccatcggttctccgcaccgctgcggcggtgggtggaggcccgagggcgcgcgctccctggcgggtggccggctcccggcagcgccgcgtacgtcgccgcccttgccgggcacgatcgccaccgggcggtgtcggcagcagggggtagtagcagcgacgcaccaccgctcactttcgccgagggaaatgccaccctcaaggtcagcaacctcggatttttgcactatgctcttgtgaccgttggcacaccgggccagacgttcatggtggcgctggacacaggcagcgatctcttctggctgccttgccagtgtgacggctgcacgcctccagccactgctgcctctggatcagctacattttacatccctggtatgtcgtcaactagtaaagcagttccgtgcaacagcaacttctgtgatcttcaaaaagaatgctccacagcattgcaatgtccatacaagatggtgtatgtctctgcgggcacatcttcttctggatttttagttgaagatgtgctttatctctcaacggagaatgcccatcctcaaattctcaaggcacaaataatgcttggttgtggacagactcaaacagggtcatttctggatgctgctgctcctaatggtctttttggacttggaatagatgaggtttcagttccaagtattttagctcagaaaggtttgacatctaattccttctcgatgtgctttggtcgtgatggtattgggcgaatcagctttggagaccaagagagctcagaccaagaagagacacctcttgacatcaaccgacaacatcccacatacgccatcactataagcgggattactgttggaaataaaccaacagacatggacttcattactatttttgacactggtacttctttcacatacttggcagacccagcgtatacttatataacccagagttttcatgcgcaagttcaagcaaatcgtcatgctgctgactccaggattccttttgaatattgttatgatttgagctctagtgaagcaagatttccaattcctgatataatcctaagaacagttactggaagtatgtttcctgttattgatccagggcaagtaatctccattcaggaacatgagtatgtttattgcctggcaatcgtcaagagcatgaagctcaacattattggacaaaatttcatgactggtcttcgtgttgtgttcgatcgggaaaggaaaattcttggatggaagaaatttaattgtttctcaccttcaacatctgagaactactctccgcaggaagcaaggaacccagctggtgtttcccagttgagaccactgaacaattcagcaccagcagcgttatatgatagcttgctcctgatgcttatcttggtccacctggctgtaaattagtttggttcttaaaatagatactgtagagcttgactagaggtacaccatagagaacaatattgtttagtggttacacgtcctgtaatagagatacttgtgatgccgattttttatggctcattgtacaaccattcccccgtcttgttttcactcaaaagggtatctcagattttatctgtaacc

SEQ ID NO: 103250 - DNA, 1922 bp, Zea Mays
gtctttaacaacccacgatctgaaagcaaagcagcaaagcagaccaacccagcgcagcgcgcaacacctcgccaattgcgacgccgccgccgtcactgtcgccgcaggagtgcgaaccacgctgccgcccgctcccgccgcccaaacagctttatccgagccccgattcgccggatcacatgctgcggccacctctcaaatgacctctcaactccagagcactttgctcctgctcccgctcttcgccgccgctgctttgggccgcggcggcgacgcctcgactgcgccgtcgctggagttccaccatcggttctccgcaccgctgcggcggtgggtggaggcccgagggcgcgcgctccctggcgggtggccggctcccggcagcgccgcgtacgtcgccgcccttgccgggcacgatcgccaccgggcggtgtcggcagcagggggtagtagcagcgacgcaccaccgctcactttcgccgagggaaatgccaccctcaagtttgcactatgctcttgtgaccgttggcacaccgggccagacgttcatggtggcgctggacacaggcagcgatctcttctggctgccttgccagtgtgacggctgcacgcctccagccactgctgcctctggatcagctacattttacatccctggtatgtcgtcaactagtaaagcagttccgtgcaacagcaacttctgtgatcttcaaaaagaatgctccacagcattgcaatgtccatacaagatggtgtatgtctctgcgggcacatcttcttctggatttttagttgaagatgtgctttatctctcaacggagaatgcccatcctcaaattctcaaggcacaaataatgcttggttgtggacagactcaaacagggtcatttctggatgctgctgctcctaatggtctttttggacttggaatagatgaggtttcagttccaagtattttagctcagaaaggtttgacatctaattccttctcgatgtgctttggtcgtgatggtattgggcgaatcagctttggagaccaagagagctcagaccaagaagagacacctcttgacatcaaccgacaacatcccacatacgccatcactataagcgggattactgttggaaataaaccaacagacatggacttcattactatttttgacactggtacttctttcacatacttggcagacccagcgtatacttatataacccagagttttcatgcgcaagttcaagcaaatcgtcatgctgctgactccaggattccttttgaatattgttatgatttgagctctagtgaagcaagatttccaattcctgatataatcctaagaacagttactggaagtatgtttcctgttattgatccagggcaagtaatctccattcaggaacatgagtatgtttattgcctggcaatcgtcaagagcatgaagctcaacattattggacaaaatttcatgactggtcttcgtgttgtgttcgatcgggaaaggaaaattcttggatggaagaaatttaattgttatgatactgatagttccaatcctctctccatcaactcccggaattcatcaggtttctcaccttcaacatctgagaactactctccgcaggaagcaaggaacccagctggtgtttcccagttgagaccactgaacaattcagcaccagcagcgttatatgatagcttgctcctgatgcttatcttggtccacctggctgtaaattagtttggttcttaaaatagatactgtagagcttgactagaggtacaccatagagaacaatattgtttagtggttacacgtcctgtaatagagatacttgtgatgccgattttttatggctcattgtacaaccattcccccgtcttgttttcactcaaaagggtatctcagattttatctgtaacc

SEQ ID NO: 103251 - DNA, 735 bp, Zea Mays
atgaagtgcagctctgacttgatgttcttgagctccctagcgagtgcagcggctctgcttgccattgacaccgccagctgcaggttcattcaggcacaaaatggaaacagaaatcagccacggaaatcatacgtgaagaagaggacatttggtatgcagcctacacttctggcccgcttcaggttagtgctctgtgcgatctcagcagaggcctggacattccccttccccagaccatcaggaccagccgccgtttcctctccagcggccggagaattgctgtccaggccgttccgtggagaatcttccgtggagccgccacacatccgcttcgccctgggctcctcctcctctgccttcacctcctcggggcaggggcaggcgccgccttcgcatcccctcgcctgcgaagagcaggtcgcgagagcactcactcccttctgcgcggcggtgagggtgtcggagagctgtgccagagactccgccacagagtcgaggccacggacgagcatcagggagtcctcccggagccgcttcccccgctcagattccaccccgcgcatgggggcaccggcggcggcggctggcgggaggccacggcggtcctcgaggatggtgtcgacgcgggtgcggaggcggtcccagaaccgtcggtcgtcggaggcggggctggcgagcgccacggtggcggagtccatgggaagcgcgacgtggagaggtgcgggcaacggctag

SEQ ID NO: 103252 - DNA, 819 bp, Zea Mays
atgaagtgcagctctgacttgatgttcttgagctccctagcgagtgcagcggctctgcttgccattgacaccgccagctgcaggttcattcaggcacaaaatggaaacagaaatcagccacggaaatcatacgtgaagaagaggacatttggtatgcagcctacacttctggcccgcttcaggttagtgctctgtgcgatctcagcagaggcctggacattccccttccccagaccatcaggaccagccgccgtttcctctccagcggccggagaattgctgtccaggccgttccgtggagaatcttccgtggagccgccacacatccgcttcgccctgggctcctcctcctctgccttcacctcctcggggcaggggcaggcgccgccttcgcatcccctcgcctgcgaagagcaggtcgcgagagcactcactccctgggaaatgaatcagactatgtatcacgacggggatgaagacgatggaattgaaatcgaagcatggggcggtgtgctcaaaaccttctgcgcggcggtgagggtgtcggagagctgtgccagagactccgccacagagtcgaggccacggacgagcatcagggagtcctcccggagccgcttcccccgctcagattccaccccgcgcatgggggcaccggcggcggcggctggcgggaggccacggcggtcctcgaggatggtgtcgacgcgggtgcggaggcggtcccagaaccgtcggtcgtcggaggcggggctggcgagcgccacggtggcggagtccatgggaagcgcgacgtggagaggtgcgggcaacggctag

SEQ ID NO: 103253 - DNA, 1574 bp, Zea Mays
gtctttggttcgccagaaagctcttgcttatgggtccatctttccacggttgattctggtcgcccggcggccagaagcccagaacctttgctggcaggccgcgaaccaaccaaacagctgaagtctgacgacgagccttggttcagagaaacagggcactgggtttagagcccttcggatctagtattgtcgttcaccggcggcgaccaggccaaaccctagaaccttgccaagatgaggtcgttgcgagcggcgcagaccctagtctcccgttcccttttctcagcgcgccatctaagcggcgcagcctcccccgccacggccgccgccgcgggcgcgcggtggtgtgcagcgccggcgccaccgccccgttcgccgcttccatcctcgagggtgatgcctgccggggttgccggcgcagtatccttctcccttaccttcgctactgtagcggcggcggaggccaaggccaaggagcgaccgcaaccggatctgttgccgcagaacgtggtgctgtaccagtaccaggcgtgccccttctgcaacaaggtcagagcctttttagattatcatgatataccatataaagttgtggaagttaatccattgagcaaaaaggaactcaagtggtctgattacaagaaagttccaatattgacagtagatggtgaacagcttgttgattcatcagatataatcaatatactacagagcaggatcaaccccaatgaagaactcactagtgacgaggaagcaaaatggcgaaggtgggttgatgagcaccttgtgcatgtcttatctcctaacatatatcggacaacttcagaagctctagaatcttttgactacattgcaaaacatggtaatttcagttttacagagaggtttgccgtgaagtatgctggtgctgcggccatgtacatggtatctaagaaactaaagaagaaatacaacataactgacgagcgtgcttcattgtatgatgctgccaatacatggatcgacgcactgaacggaagagatttcctgggtggctccaagcctaacttggcagatcttgccgtcttcggtgttctgagacctatccgatacttgagagcaggaaaagatatggttgagaacactgaaatcggcgattggtaccgacgcatggaagacgcagttggagaaccatcaagaatacaggatgcagaaggaaactagaattttgacaacattcttttaaatactttagcggtatccgtgcctatgcatggaggctattcaaattttttgccagaatcaagtgtatgcaataatgctctgccagattattaagtatactagcacctgaggaacagtgtttgacttgggaacttggttgtgttactgtgtaaggttttgctcccctagctgttcacgtctgtattgtctgcgatgtggttttgaagattcagcatcagcgattctgctgtgccttgcatacagtttaaagaatttcggaatgctggatctgccgaagcgatagattcatggttgtttaattaattaatgacaatctcatgtggcttattgactgggacatgttccagtaa

SEQ ID NO: 103254 - DNA, 896 bp, Zea Mays
aaatacatttcgaaataaataaaaaagaaaactattcctaaccctaaggcccactaggggcccatctacctaaacctaacagccgcgcgctgcgctccctggcttctctcccagccgccgcctctattctcctttccctcttctctctcccctcgcctatctcctcccccgacgcgcctgcaccaacagtggaagagctcgctagcgaagcaggcctgggttgcggcgcacagcgtgaacgcgttcggcaagagaccctcctcgagcgtctcaccgaaaaggcggagcgcctccgcctcagcgccattttgcgagaggcaggacaccatggccgtccaggagatgaggtcccgcaggccgacgggcattccgtcgaacacgctgcgcgcggcggccacgacgctacacatgcagtagagcgtgaggagcgagttggcgacgacggaatcagtctcgacctataggaatcgttgaatgcccggtacaaccgatcaagtttcgacaacccctggttcgtcatcggggtctcctactccggcgctctcagcgcctggttcaggctcaagttcccccatttgacatgtgggagcctcgcgagctcaggggtggttcttgcagtgtacaactacaccgactttgacaagcaggttgatagtccgggaataggtggagatggcgcaaattaattctgtctgtttgatgtacttctacccaattcaggtctccatatgtgacagcctttattatgtaggttggagagtcagctggtcctgagtgcaaagctgtccttcaggaaataactgaactcgttgacgaacagctccggctggagagtcactcggtgaaggctctatttggagcacagatggtaaatccttttgtgcatagcactctga

SEQ ID NO: 103255 - DNA, 950 bp, Zea Mays
aaatacatttcgaaataaataaaaaagaaaactattcctaaccctaaggcccactaggggcccatctacctaaacctaacagccgcgcgctgcgctccctggcttctctcccagccgccgcctctattctcctttccctcttctctctcccctcgcctatctcctcccccgacgcgcctgcaccaacagtggaagagctcgctagcgaagcaggcctgggttgcggcgcacagcgtgaacgcgttcggcaagagaccctcctcgagcgtctcaccgaaaaggcggagcgcctccgcctcagcgccattttgcgagaggcaggacaccatggccgtccaggagatgaggtcccgcaggccgacgggcattccgtcgaacacgctgcgcgcggcggccacgacgctacacatgcagtagagcgtgaggagcgagttggcgacgacggaatcagtctcgacctataggaatcgttgaatgcccggtacaaccgatcaagtttcgacaacccctggttcgtcatcggggtctcctactccggcgctctcagcgcctggttcaggctcaagttcccccatttgacatgtgggagcctcgcgagctcaggggtggttcttgcagtgtacaactacaccgactttgacaagcaggttggagagtcagctggtcctgagtgcaaagctgtccttcaggaaataactgaactcgttgacgaacagctccggctggagagtcactcggtgaaggctctatttggagcacagatgctgaaaaacgatgtcgactttctcttcttcctggcggatgccgcagcgataacattccaatacgggaacctagatgccttgtgccctccattaatacaggcaaagaagaacaggaaaaacttggtggtacatgtcccttctataattgtacatgagatctgtaaaatcttactggaagacagaagg

SEQ ID NO: 103256 - DNA, 1846 bp, Zea Mays
aaatacatttcgaaataaataaaaaagaaaactattcctaaccctaaggcccactaggggcccatctacctaaacctaacagccgcgcgctgcgctccctggcttctctcccagccgccgcctctattctcctttccctcttctctctcccctcgcctatctcctcccccgacgcgcctgcaccaacagtggaagagctcgctagcgaagcaggcctgggttgcggcgcacagcgtgaacgcgttcggcaagagaccctcctcgagcgtctcaccgaaaaggcggagcgcctccgcctcagcgccattttgcgagaggcaggacaccatggccgtccaggagatgaggtcccgcaggccgacgggcattccgtcgaacacgctgcgcgcggcggccacgacgctacacatgcagtagagcgtgaggagcgagttggcgacgacggaatcagtctcgacctataggaatcgttgaatgcccggtacaaccgatcaagtttcgacaacccctggttcgtcatcggggtctcctactccggcgctctcagcgcctggttcaggctcaagttcccccatttgacatgtgggagcctcgcgagctcaggggtggttcttgcagtgtacaactacaccgactttgacaagcaggttgatagtccgggaataggttggagagtcagctggtcctgagtgcaaagctgtccttcaggaaataactgaactcgttgacgaacagctccggctggagagtcactcggtgaaggctctatttggagcacagatgctgaaaaacgatgtcgactttctcttcttcctggcggatgccgcagcgataacagtatgcgtaattttttttctaagttgctttattatagaagtacgttttgtggatgtttgagagtggatgctattttgcagttccaatacgggaacctagatgccttgtgccctccattaatacaggcaaagaagaacaggaaaaacttggtggtacatgtcccttctataattgtacatgagatctgtaaaatcttactggaagacagaaggagccagcaaagaaataactatccttgtattaacattttaatgtaaattgttttaccaattaaactcccctgccaatagcaaataagaggaataagcatagtagtttaatctataaagatggaaaatagttacactgttgagtgaaaattctgcaggcaacctgtcgatggatgaccaaacacattatacaattttactattatatcttcctcttttagagcatcctttttgatcttccatttactggttttgcaggaagcatatgctcaatttgtgtttttagatccatgatatgttgtcggtctgttgtttgtagtcctagatatcttcgtttttgtcactactaaaaacaccgatcggttctgatgtactgctatttattgctctgatatttttgtcatgtatgtgattggtgacttgggctttactagaggaacattcgtggtatagttttgaagagagaagtgagtcataaaattagagatatctgcattcattgtgatctatctttaacacttcatttttactgtagacatcaagtaagtggcgacatcacaacccctacaagtttgtgcctcaaaacaagaggatacaagaagttggagtgcttttgtgaaggcttttgcgaatcacttgaaacgttggtacttttgtgaatgattttgtaaagtgtttgcaaatatgtgcaaaacataataacatgtgtaggttttgtgaatgattttgttgtggtgcttgttgatggtttatgtgatgtggatctatcattgtgcaatactaattaaatttgtatatct

SEQ ID NO: 103257 - DNA, 1827 bp, Zea Mays
aaatacatttcgaaataaataaaaaagaaaactattcctaaccctaaggcccactaggggcccatctacctaaacctaacagccgcgcgctgcgctccctggcttctctcccagccgccgcctctattctcctttccctcttctctctcccctcgcctatctcctcccccgacgcgcctgcaccaacagtggaagagctcgctagcgaagcaggcctgggttgcggcgcacagcgtgaacgcgttcggcaagagaccctcctcgagcgtctcaccgaaaaggcggagcgcctccgcctcagcgccattttgcgagaggcaggacaccatggccgtccaggagatgaggtcccgcaggccgacgggcattccgtcgaacacgctgcgcgcggcggccacgacgctacacatgcagtagagcgtgaggagcgagttggcgacgacggaatcagtctcgacctataggaatcgttgaatgcccggtacaaccgatcaagtttcgacaacccctggttcgtcatcggggtctcctactccggcgctctcagcgcctggttcaggctcaagttcccccatttgacatgtgggagcctcgcgagctcaggggtggttcttgcagtgtacaactacaccgactttgacaagcaggttggagagtcagctggtcctgagtgcaaagctgtccttcaggaaataactgaactcgttgacgaacagctccggctggagagtcactcggtgaaggctctatttggagcacagatgctgaaaaacgatgtcgactttctcttcttcctggcggatgccgcagcgataacagtatgcgtaattttttttctaagttgctttattatagaagtacgttttgtggatgtttgagagtggatgctattttgcagttccaatacgggaacctagatgccttgtgccctccattaatacaggcaaagaagaacaggaaaaacttggtggtacatgtcccttctataattgtacatgagatctgtaaaatcttactggaagacagaaggagccagcaaagaaataactatccttgtattaacattttaatgtaaattgttttaccaattaaactcccctgccaatagcaaataagaggaataagcatagtagtttaatctataaagatggaaaatagttacactgttgagtgaaaattctgcaggcaacctgtcgatggatgaccaaacacattatacaattttactattatatcttcctcttttagagcatcctttttgatcttccatttactggttttgcaggaagcatatgctcaatttgtgtttttagatccatgatatgttgtcggtctgttgtttgtagtcctagatatcttcgtttttgtcactactaaaaacaccgatcggttctgatgtactgctatttattgctctgatatttttgtcatgtatgtgattggtgacttgggctttactagaggaacattcgtggtatagttttgaagagagaagtgagtcataaaattagagatatctgcattcattgtgatctatctttaacacttcatttttactgtagacatcaagtaagtggcgacatcacaacccctacaagtttgtgcctcaaaacaagaggatacaagaagttggagtgcttttgtgaaggcttttgcgaatcacttgaaacgttggtacttttgtgaatgattttgtaaagtgtttgcaaatatgtgcaaaacataataacatgtgtaggttttgtgaatgattttgttgtggtgcttgttgatggtttatgtgatgtggatctatcattgtgcaatactaattaaatttgtatatct

SEQ ID NO: 103258 - DNA, 1104 bp, Zea Mays
aaatacatttcgaaataaataaaaaagaaaactattcctaaccctaaggcccactaggggcccatctacctaaacctaacagccgcgcgctgcgctccctggcttctctcccagccgccgcctctattctcctttccctcttctctctcccctcgcctatctcctcccccgacgcgcctgcaccaacagtggaagagctcgctagcgaagcaggcctgggttgcggcgcacagcgtgaacgcgttcggcaagagaccctcctcgagcgtctcaccgaaaaggcggagcgcctccgcctcagcgccattttgcgagaggcaggacaccatggccgtccaggagatgaggtcccgcaggccgacgggcattccgtcgaacacgctgcgcgcggcggccacgacgctacacatgcagtagagcgtgaggagcgagttggcgacgacggaatcagtctcgacctataggaatcgttgaatgcccggtacaaccgatcaagtttcgacaacccctggttcgtcatcggggtctcctactccggcgctctcagcgcctggttcaggctcaagttcccccatttgacatgtgggagcctcgcgagctcaggggtggttcttgcagtgtacaactacaccgactttgacaagcaggttggagagtcagctggtcctgagtgcaaagctgtccttcaggaaataactgaactcgttgacgaacagctccggctggagagtcactcggtgaaggctctatttggagcacagatgctgaaaaacgatgtcgactttctcttcttcctggcggatgccgcagcgataacaacatcaagtaagtggcgacatcacaacccctacaagtttgtgcctcaaaacaagaggatacaagaagttggagtgcttttgtgaaggcttttgcgaatcacttgaaacgttggtacttttgtgaatgattttgtaaagtgtttgcaaatatgtgcaaaacataataacatgtgtaggttttgtgaatgattttgttgtggtgcttgttgatggtttatgtgatgtggatctatcattgtgcaatactaattaaatttgtatatctatgtgattatgtgtataaaaa

SEQ ID NO: 103259 - DNA, 967 bp, Zea Mays
gtgttttagatggctgtttggcagggctccttccaaggggctgcaagaagctagagccagagccgtgccaaagggggccttaatagagatgatatcctgaggcttggaaattggaatcaatggttgaagtactatctgaagcatagagtaagcctagctccattaatttacacttagggaatgtttgggactgcttcacttcacaaaatctagcttagctttataaaactctagccaaacactcccagcttcaccaaaaaaggtgaagttgaccctaacttcaccaaatccatgaaacaaccaaaagtatacttcacgaatgggtatttttaactccctcattaagttggggtgaaattacccacctttgccatcagttacgcaatccctcacgaaatgttttctttcgttctgttctcaagggaactcaggccgcacacagttacgccagcgagcagggccgtgccgaccggcagccgcaccgccaggccatgtgccgctgccagagccacgcctgaaccaaactctggcagcgcgcgtgccaccacctgcgctagcgagcagggccgcatcggccgacaacgtgccgccaggctgcgtgcagcgcgctgggccgccagagccacgccaggccatcgcagcgttgtgtctgtcttcccaagtcgcgcacgtgcgcctctggccgccacggccaaaggaagaagaaacaagtttttttttattatattttttatgaaactaaagctggtctacaagccaaactcttcaaaaactctgcaacttcaaagctgggctgctatattttgaagttcatgaagttgcgcttgtttttgtgaagtggagcagtgccaaacggggccttagcttgttaagataaacaacaaatgtagacatcaagcacacatgatacccaaagagccttgaagtgcctatgaaaagacaaaatcacctgatcagctggtcttgt

SEQ ID NO: 103260 - DNA, 3366 bp, Zea Mays
ccgccattgctccagccgccgccgctccattgcttcaggcttcagcttttggaaagtgcccagtgctccagtgccccactgtgcccagtgctccagccgccgctacccagtgtggctgcccattgataatatgccattctattgtgtgtgttgcaggaagccaggaagcacactgtttttggcaagcttgttgttggaagtgatgttctgaagagaatcgagcaagtagatgtgcaatccgcagcacctattgctccatttgatataaagattttgggggcatttagctaaagtgtggcagtgaatttcaatggcaacaaatagcgaggcattgtctgccggtgaaagtaatgactcctatgacccactcaaagatcagtcacgaaggccaaagtcaaatgatccaggatggaaatatgcatactatgttgaggcaagaaagcgagagttgattcaatgtgctttgtgccccaaacaaataaaaggaggtatcaagaggttgaaacaacatctagctggtggctatggagattggagacattgtcaagtgtcctaacactactagagagattgctaaagagatgaatgaagctttgaataatgggaagcgggctaggccgttgtacctagatgacgatgtaatggaagatgaagcaggacaagatgatgtccaagttatgggaagcaggtcaatgtcagcatcatccaaggcttcctcgtgtactgtgccaagttctggaatagctgccaaaagaaacaaagcaattttccaattgaagccccacccaattgcagctccaaagaagtccattgcatctatgattcgacaaacacctcaagaggttgtagcagagagacatgcaaaggggcctgctcaaactaccataagtgctaccatgaagcctaaggaagaaagaaattatgtttgtttggagataaccaagtttttctacgagtgtggtataccattcaatgctgcgaactcaaggcaatttgaggtagctgtggaggctatttctcaatatggatttgggttcaagcctcctactttccatgagctaagtgtgcctttacttgctagggctgtcaaagacatagatgatgagaggatgaagcatgaggaagcatggagccaatatggttgcacactcatgtctgatggttggacagacaaaagaggtctccatttgatcaatttccttgttaacagccctcaaggaacattcttcttggagtccgttgatgcatcaaatgagtcacacagtgcagtgacgcatgcagacttgttacaaaagagaattgaggggattggtaaagaaaatgttactcagattgtcactgataatggtgctaattataaggcagcaggtaagattttaatggagaggattcctaccttgttctggactccttgtgcggcacattgcttggaccttatgttggaggacataggaaagctgaaggattttaagaagcctattgctcgtactcatcatgtcaccacttttatttatagacatgggaggatacttagtgaaatgagggtgcatacaaatgggatggatcttgtgagacctgctgctactagatttgctactgccttccttaccatgaagagtttgcacaagtacaagaactcattgaaaggcctattttcaggtgatgttttcactcaatccaaggattgtcttagagcttctttaccgcttcttgtcgtgctgagattggttgatggtgatgagaagccagccttggctgaggttgctgcagccatgactatagcaaagaataagattagctcctcattttctactcaaaacaagaaagcatgtctgaaacatatcatgagcattgtggatcgacgttgggcgaaccaaatggataccccattatatggagcagcactatatttgaaccctggaaaattctacaacatcaaagcaggtgatgatgaaggctatgttggagagctaaggggttgctttaatgatgtgcttgtcaaaatggtggtagatgaggatcttagagagaagattgatgcccaagctgttctttatgagaaccaaagagaggcatttgcaaatccaatggctataaaaaatgcacaaacaaggaatccacttgattggtggcttgcatatggtggtcgtactattgaattatataagtttgcaagatggattgttagcctttgtgcttcatcatctagttgtgagcggaattggagtacatttgaatttatgcataccaaaaagaggaataggttagagcacaaaaggttgaatgacttggtatatgtttcatacaacagaaatatggcggataggtttcaaaaaatacgtgaggaaggaaaaaactttgatcctttgattttagaagacttcgattgggacaatgaattggttgatccattagctaattcttctcatgttagcaatgctcttggagatgatttcaatttatcatgggaccaagttgatgaagctattggtgcatttgcacatctcagaggtcgtaattttcctaggagagctggtggtgggtgtgtgagaaggaatgaagaccttgaggaagaggagactaatttagcaaatgaagatgacgaggatggggaatatattcttgatgatcttgatgtggaagatgaaattgaaggaagcaatagtggaaacgatggtgatggtcaaggcgtggatgctcatggtcttaatattgatgagttcgatgatggttactaatcatgcatgaaagttgtaacttgtgttgtgtggctgaacttgtgttgttgaacttgatatgtttttatgctaatgctatttggtttgtgaactcaacttatgtatgaacttattctatatttgaaattatatgtcaagtctgaaaagacgtttcaacgctcgtttaaacgtttaaacgttgaaaagttggttcataacgttttaacgttttaccgctttaataaccatgcaattaacacaatgatcttatcatgaacaataataaaccaacaataatagtggaacatgatcataattcagtatagcactaatcccaaaatcaggtagagcaatagcaaatctacccaatagttcatttgtttgcaaggtgtgggataaacagtactagagaaacctattaggtcccatcaaattaacatgagcttgtcacagtgattaacaggaacattattaggtaaagaagagtaatcaaggcacaacttgcctttttggtgcaactccaggtacttctctaatttggtcttcaggttcctcgtgacctcgctactactcgtagtaatacatacaatcaagcaaataatgggtctggtaacattacaccaaagcataagaacaaaaaagcgtaagg

SEQ ID NO: 103261 - DNA, 75 bp, Zea Mays
atggggaaaaaggtgtccatcgctcacttgcgagctcataaccgtttggatcttcaccaggtggatgaagaatag

SEQ ID NO: 103262 - DNA, 106 bp, Zea Mays
cggcaacaattcaacactttctctgaattcttagaatttcttaggcccatcaatttcatattgatatatcacataaaatctaaagggaaggactggacaacactac

SEQ ID NO: 103263 - DNA, 102 bp, Zea Mays
gcctttttccgggattggatttcactcatttagtgcttgggatgcagacaggcgtggaagatgaacataagagagctccgcccttgccttgcaccggtgaac

SEQ ID NO: 103264 - DNA, 1678 bp, Zea Mays
aggagatcacacacgtgtagggcgtcacgaggtgggtgacagcgcggttgtcgagtcggtggcatgccctataactagggcattggaaggaggcagaaggggacctagattcattataccatgtaaacattgggaaatcacctcacaccctttgggggggggtgcaactcatgttagagtaaaactttgtctctagtaggtctagtagggagtactgaatggatagtcaggtaagcagcatccttgttatcaaatcctctataaatactgttaccctaccccaccgtcctttgccagtgacagaagatttttgtatttctgtttagtccagaaacaagtactagtttacactctgttagacagatacaagtttataagcatacagtgttggcgcttaaaagagaatgggttttataatcattagttgatcaacatgtatcaagaaattgaatgaacatgtttttgctatcatctaggttatgaacagtttggaatctcaagaaaaggctcacaggacaacactgatgaatactgcacaatattctatgaaaaggagaaggtttcacatctctggctaatcatttctgtggagcttactgaaggtggcactttttggttgtcggaatcaccatcggttccaggaagcatttcatggggagcaaaggcaccctgcattgcaacatgggcaatatcctgtaatgtgattctttttcttgctctttattgttctattgttttcttagtatcttgatggcagtgaagattgttgccttaacatgatgtacacacgtttcaactcaaaagactagaaccacctggattcagtttccagatcgtaaatacaaatcttgatgaagttagccctcgtgctcgacgaagaagtgctttacttacatggcaacatatagcatcgctgccacccaatttgcctgttatctattgtggaggcttcaatacacagaaggaatctatgactgggcggtttttgcttggcagatccagagaacatggtgttgttggtgatatgagagatgcttggccaaatgctcgagtgcgaaaaaatgtttcactaatacacacatatcatggatttaaaggggagaaacaaggtgccctggaatttcttaaattgatatttagagctctttgcctctgctgggatcgacagacacaggacttgcatatcgactggatcttgtttagaggacgcccattggttcctgcactttgtgaggtcattaatgacaatatagatggtgtttatccgtcgtcgcacttccctatctttgccgagtttttgcttccacgctcagtccgcctagctgagacaccttcatagctattgtgtcaattttctgttctatttttcccaatcttattttgattacggctgattgtttctttcgaccacttcaccatgatcttgcggtaacccccctttacaaccattgttgggtttctttctgttatcccattccgcaaaacaagacaatgcacatgtgcatccttgtatgtttcctgtcactagtccctattatgtgttcgccttagctttgttatcttcttaaagttcactttttccttatgtcattgatttttagactgtcatatataccgtgtatatatatggtatgaatatgttgtcatgtatagtcggccgatccttgtatatgttata

SEQ ID NO: 103265 - DNA, 1552 bp, Zea Mays
aggagatcacacacgtgtagggcgtcacgaggtgggtgacagcgcggttgtcgagtcggtggcatgccctataactagggcattggaaggaggcagaaggggacctagattcattataccatgtaaacattgggaaatcacctcacaccctttgggggggggtgcaactcatgttagagtaaaactttgtctctagtaggtctagtagggagtactgaatggatagtcaggtaagcagcatccttgttatcaaatcctctataaatactgttaccctaccccaccgtcctttgccagtgacagaagatttttgtatttctgtttagtccagaaacaagtactagtttacactctgttagacagatacaagtttataagcatacagtgttggcgcttaaaagagaatgggttttataatcattagttgatcaacatgtatcaagaaattgaatgaacatgtttttgctatcatctaggttatgaacagtttggaatctcaagaaaaggctcacaggacaacactgatgaatactgcacaatattctatgaaaaggagaaggtggagcttactgaaggtggcactttttggttgtcggaatcaccatcggttccaggaagcatttcatggggagcaaaggcaccctgcattgcaacatgggcaacgtttcaactcaaaagactagaaccacctggattcagtttccagatcgtaaatacaaatcttgatgaagttagccctcgtgctcgacgaagaagtgctttacttacatggcaacatatagcatcgctgccacccaatttgcctgttatctattgtggaggcttcaatacacagaaggaatctatgactgggcggtttttgcttggcagatccagagaacatggtgttgttggtgatatgagagatgcttggccaaatgctcgagtgcgaaaaaatgtttcactaatacacacatatcatggatttaaaggggagaaacaaggtgccctggaatttcttaaattgatatttagagctctttgcctctgctgggatcgacagacacaggacttgcatatcgactggatcttgtttagaggacgcccattggttcctgcactttgtgaggtcattaatgacaatatagatggtgtttatccgtcgtcgcacttccctatctttgccgagtttttgcttccacgctcagtccgcctagctgagacaccttcatagctattgtgtcaattttctgttctatttttcccaatcttattttgattacggctgattgtttctttcgaccacttcaccatgatcttgcggtaacccccctttacaaccattgttgggtttctttctgttatcccattccgcaaaacaagacaatgcacatgtgcatccttgtatgtttcctgtcactagtccctattatgtgttcgccttagctttgttatcttcttaaagttcactttttccttatgtcattgatttttagactgtcatatataccgtgtatatatatggtatgaatatgttgtcatgtatagtcggccgatccttgtatatgttata

SEQ ID NO: 103266 - DNA, 1622 bp, Zea Mays
aggagatcacacacgtgtagggcgtcacgaggtgggtgacagcgcggttgtcgagtcggtggcatgccctataactagggcattggaaggaggcagaaggggacctagattcattataccatgtaaacattgggaaatcacctcacaccctttgggggggggtgcaactcatgttagagtaaaactttgtctctagtaggtctagtagggagtactgaatggatagtcaggtaagcagcatccttgttatcaaatcctctataaatactgttaccctaccccaccgtcctttgccagtgacagaagatttttgtatttctgtttagtccagaaacaagtactagtttacactctgttagacagatacaagtttataagcatacagtgttggcgcttaaaagagaatgggttttataatcattagttgatcaacatgtatcaagaaattgaatgaacatgtttttgctatcatctaggttatgaacagtttggaatctcaagaaaaggctcacaggacaacactgatgaatactgcacaatattctatgaaaaggagaaggtggagcttactgaaggtggcactttttggttgtcggaatcaccatcggttccaggaagcatttcatggggagcaaaggcaccctgcattgcaacatgggcagtttcaactcaaaagactagaaccacctggattcagtttccagatcgtaaatacaaatcttgatgaagttagccctcgtgctcgacgaagaagtgctttacttacatggcaacatatagcatcgctgccacccaatttgcctgttatctattgtggaggcttcaatacacagaaggaatctatgactgggcggtttttgcttggcagatccagagaacatggtgttgttggtgatatgagagatgcttggccaaatgctcgagtgcgaaaaaatgtttcactaatacacacatatcatggatttaaaggggagaaacaaggtgccctggaatttcttaaattgatatttagagctctttgcctctgctgggatcgacagacacaggacttgcatatcgactggatcttgtttagaggacgcccattggttcctgcactttgtgaggtcattaatgacaatatagatggtgtttatccgtcgtcgcacttccctatctttgccgagtttttgcttccacgctcagtccgcctagctgagacaccttcatagctattgtgtcaattttctgttctatttttcccaatcttattttgattacggctgattgtttctttcgaccacttcaccatgatcttgcggtaacccccctttacaaccattgttgggtttctttctgttatcccattccgcaaaacaagacaatgcacatgtgcatccttgtatgtttcctgtcactagtccctattatgtgttcgccttagctttgttatcttcttaaagttcactttttccttatgtcattgatttttagactgtcatatataccgtgtatatatatggtatgaatatgttgtcatgtatagtcggccgatccttgtatatgttataccgttatatatgaagtgtgtatagagatattgggagatttcatttggttctgtttccataaaccatgagatc

SEQ ID NO: 103267 - DNA, 333 bp, Zea Mays
atgtctagtcagcatggaccatactatgactggaggacctcacctattgatcctcaggctgtgtatgcaagtggtggaaaagctcttggaaggtacacaatgcttgctaacgtcatcgactcgagccaggtgagggttcagcgtggaggttcgtcgaggtctgttgctcgtagctcctgtcgctccactcaagatccagcagaagtggagcaactacgagaagaacttaggcgacatcaggattacttgaagcaacaagctgcacaacaagaatattatgctacacagattcaacaacagcaaacgctcatacaaaggcttattgggccgtag

SEQ ID NO: 103268 - DNA, 109 bp, Zea Mays
cctacctgtaccaatacggtacacacattacacagcgacaatcgcgtgtacgcccttctccagtgtgccatcccttctccatcgccgccaccttcctctcctttttttc

SEQ ID NO: 103269 - DNA, 601 bp, Zea Mays
aggatgtgtaatttatatatcaattgtaatgtctctcttttttatttgttcattatgatgtacccaactttgatctgtaacccatagcaatgagtagagtttgtagacttaagcttagcagtaggtaattttgcttatctattaccgtaataagcttggtgactgaggtagacatctgatttatatttaatctaactatttctctatgtgaatggatacatatattaactcaggtagcactacaactagcaatgtatggatgaattgaaggaagtaaaagaaggcagacaatcttatagaaactctgcatcttgaaaccgccatgattggcaaagaagttggatgcatcctttgcattggtgtgttcttatcaccaagcagtaatgtgaagcaagttcatttgttgactaagaacggatcaacacaaattagtgaagattttgttcacaagagatgcaggatggagaggtggtagatttcaatatggctttgatactatttttccctttacaatcttttgtatggaacaagaaaaaacaatgtacgtggttactattgtaattcaagaatttatttctaaataataaatatatttgtttat

SEQ ID NO: 103270 - DNA, 577 bp, Zea Mays
aacgctcgctcgacgcaggccacgcgcacgcccagctctgctctttgcgtcgtcttccaactgctcggtctcgccctagcgctgagcgccttgcaccgccagccacgcctccctggccatcatggcgtcactatttcctgttgcgccgcgacatcgtcgagctcgggtgcttagcgtcgaagtcgtcgcgccgttgtcgctctggcttcccttgtcctcgcacggggtttggtggtcgtgtccacatccgactccgaggcatcaacgtccgcatccccggtatcgtcatcgtttcagcagccttgtcacaccttgcgttcacgccggaagacgaaagggaagcaccagtgccacgctcgtcaagtattggtgatatgcgcaagtcggacaacgtcgtcgatttcgtagtttcaagtcgtatttaatgatggtaagatgattcgttatttcagtcaactaggtatatagatggattaaatagaattgttggtcacgataatttttattaattgagcatacgtatgttgtgatgttcatgattgtgaaatagctgtatcatatgtgtatgatgaggttt

SEQ ID NO: 103271 - DNA, 240 bp, Zea Mays
atgccaagaatagctgctgcaggtgctggttcgtcttctcagcctcaacgaacatatgttaggacaaaaaagcgttcaagaaatacaacagctcaagatattggagaagaggatagtgatgatcaagatggtgttgctacagcacaagcagaacaacaacaaacccaagaagcaaatgaatacatggacgaagatggtgttgctgctgatgcattttgtttggatgctgatctgctttag

SEQ ID NO: 103272 - DNA, 144 bp, Zea Mays
atggcccagcagcctggctgcgctcccgggctgcagctcccgtgtttgcgttgtctggcttgctcgggagcctggctggccgcgtgcaagtttagcctctcagtctggctccacagaaacgagatcaagggtcagaaaagataa

SEQ ID NO: 103273 - DNA, 684 bp, Zea Mays
caaaaaatcttagccaaccgtttgcaacaggtgatcacaaagttagtgcatcagaatcaatatggttttataaaggctaggtcaatttaggattgtctagcatgggcttttgaatacatttctcttttccataagtccagaaaagaaatggtcgttctgaagctagactttgaaaaggtttttgacaaattggaacatgcaactatcattgaggttttgaggcacaaggggttcggagacaaatggattcactgggtttctatgattcttggctccagcacctcagaagttcttttgaatggtgtccctgggaaacgatttcactgtaaacgcggagtcagacaaggagatcctttgtccccacttctttttgttcttgcagctgatcttctgcagtcgatgatcaacaaggcttgtgactgtggcatcttacagctccccctgtcgagcacgtgtggtcctgatttacctattattcaatatgcagatgatactatcctcataatggaagcttgtcctaaacagcttttcttcctaaaggcgatgctcaattcttttgttgaatccacagggctacttgtaaactaccacaaatctaatatttatcccatcaatgtcatggaccaaaaaatggaaatccttgcaaatacattccactgcaaaattggatcaatgccgtcgaaa

SEQ ID NO: 103274 - DNA, 3051 bp, Zea Mays
tgagaggatcaccgttacgtttattgactgattaaccacactttgataatgaaaagcaatctgctatctccatcatctcatgcccccttcctacctggctactccccaccccaccaaaacaagaggagggagcaagcaacaagcacgggcaggagacgaaacaagatcaaataaaagaatctagacctaggatcatcagattctacaaatgctaacagcagcagctgcctgcaagcagggagattaatccgcaaggaaggaacaattaaaacattttgttacaccgacgagggaaccacaatggcggtggtcggatccgtcagcatgtcgtcgtctccctccatgagcagctccgcgtccctgtcgtcgtcgttccgcaagtccttccgctccagcttcgagttggccaccacgaacaccagccgttgcgcgcgggcgatgccccgcgatgaggtaccgggcgcggtcagccaccgcgccatcgtcggcgtgcacctgaacccccttgctgtcgcgtggaggaagatgagccgcacggccaccttgcctagcgacttgaactcgctgaggcacgtctcccagacgagccggctgctctgcttgttggcgatcttcatcttccccgtcgtcgggtcgggctgccggacctgcaccgcctgcgcgtacagcgggtccaggccctccgaccgccacttcataagctccatcatcgccaggtgcgcctcctccggcgacaccagcctcgtgatcagcctgtccacgtccttctcatgctccggcgtcaggtacttgaatggcgggaggtaccgcccgctgacgtccttgataagatacagcgggtccaggatgaatgccgccgaccacgccgggtggtagctcctcctgaacctcctctccagcacgctcatggcgatggcttcgtccacgttgaacttgcggcaccagcccctgaccttgccacgcaggtcctcccagagcgggaggcattgcccgacgagaggccgttcggtctccatctccttcaccatgtcggtgatcatcttcaccagcgagtgcgccgcctccacctccgcccagaacgccgcgctgtgcaccatgtccacgatctcccgagcggtagagtcgtcaatgcagagcagcttgaagggctcctcgagcacggagagctggagcggccttgcacaggtcagcacgtcatcgagcatcgcgaatactgcgctggtttcgttgtcgccagtcgacggcggagcggcgacgcggaggagccccgcgtggccaagctcctggacctggtgtcgctgcagcagcgcgcgcacggctcgagtggcgttgaagtaggcggccatcttggcacaattggtggcggcggagtggaccacagggagctcccgcaccaggtctttcgctaggcgtgccaagcaatgggcttggcacgacaggttcaccatccacgggtgcttgctctcgagatcgcgcagagccttggagccgaagcggtcagcgacgatgccggcgcaatgacggacgtcggcggatgctgcgacggacgacacggcgtccagcaacacctcctcggcgtagcctgacgacggcggcgccggcatgggaacggcgtggtggaagacggacgtgccgttggggaggttgacggcgagcgtgactacctggtcgcgccacccgtccgcggcgagctggaagaatcgtgcgtcccggacgcgcgcggcggcgtcggcgcgggcctcggcgaagcgcgcgtcgaggcgtcctcgggttaggtcggcgcgcgacagctccggaaggccgacttggcgcaggaaagccttgagcttcgggtgctccgccgcggccagggagacggtcccggacgactcgaggaaccagtccgcgagcagcgcgagcgccgcctcggcctggtgccgcggcagcatggaccccggtgacgtgacgggcgacttgagccgcttgacgctgtcctcgaggcgcgctagcgcagtcaggtcaccgcggccgcccgagaggacctggcgcggcgcgggcagcgccggtggcgtgggaggcgtggagtagatggccggctcgccaacccaccatgtggtgcgaggaggccgcgtcgacggctgcgtacgccgctgccagcacgtggcgcttgcgaccgccgccgccggtggagtggcgccgctgcgacgacggcgggaaggaggagatgggcacgacggaggacgccgcggcgatggctagcggcggcgccgtggagacaggcgcggaggcggccagcggcgacgcgaagttggggcaggcgccgcgcttgaggtgctcggaggcggtgcgcgacgggttggaggcggagaacgtggcggcgcagagcgtgcagcgcaggcgcgctaacttgggctgctgcccggaggcgggcggcggcacgagcacgggctccaggtgcgcccagtaccaggcgcccttgcccttgatggccttggcgcgcacctgcaccagcgactcgtagcgcttcctggctgccgccgcctcggcccccattgcccccgccgcgggcgcttccgcctccggcggcgcggacgccgccgccgacgcgccctcctcggccgacatggcgtcacgcggccgtcatgtccgcggttacgtcggttgggttcgtttgcctgccgctggacctgcctttgtttcctttcctctcgcggggaggggtgggggagctacgaagcccaaaagcgagaacaaagaaaaaaaaacaaacaaacccgggaggcgtgggacgagacggtgccagccagtcgccctggctcgccgcggcactatttttgtgtttttctctcggcccccaattgctattcgctcttgtagtcttgcgcctggctcgcttggctttggcgggtatagagaagcaagccaggagccagcagcgatgtctccaaaacccaggccgcctcctgtttctgtggcttctctctctacagcacactgttcatacttgtgagtggtgcgagtcttgggagctgagagcctgactgtgtgtagagagagatagagagacgggca

SEQ ID NO: 103275 - DNA, 1775 bp, Zea Mays
gaaagaaagagaaggaaaaaaaaaaactttgcggatccgtcgccgctgcccttgccgccgatggtcgatgtggccgcgctcacggacgacgtcctggcggagatactcctccgggtgccgtcgccgcgggacctcgctcgcgcctctgtgtcgtgctcctccttccgtcgcgtcatctcaaacccccacttcttccgccggttcgtcgccctccacgcggcgcctccgctcggcgtcttctgctgctaccccgccttgggcggcggggttggtggatcccagttccagccagcgctgccgtcgcacccctcggcgcccctcgctcgcgcgctcgccagttcagcagacttctgcttcaacttcctcccgccgcccgccagcgactggctcgtccgcgacagccgtgacggccgctttctactcgaccgcgtgcgggacggctccaccgctttcacggaggttgcaatctgcgaccccctattccggaggtaccggctgctcccgcccatccccaacgatctcgccgcctcggtggaaaacccctacttccagcgcggtggcgatggtcaattgcagtcacgcagcagtgaaatcttcctggtttctcgtagtaatgacagtgtcagtgagaacgatacgacgttcaccgtgatctggatggcatgctgtcgagggaagctggtagcattcttctactcttcagagtcacagcaatggtgtgcactttcaccgcctgaacactatgctttgagcaccagaagagtcatgggcgttcgactaggacagcgcaaccatgctcatgggtgcttctactggatgttagccctcacacataggtggcttgtgttggacacacacaaaatggacttctccatcgtggacatctcacctatcctgacaggccgtgcgatgatgttcagtaatcagattaccactctggagtcaagcaatggctggactaccattgtggtctctgatgttttccgttcagatagaagatgcattctgtatttttatgcattcttgaatttcagcgaccggtggcagcttctgaacagaatcaccttgcctgatgaatgggggtatcgatttagaggcataataggtgctgccgacggatacttatttataaagctagatgatcctaaggagaacctgaatgatcagattgagcgatatgttgaatatttttcgcttgatgtcaagacaatgcagcttgggagtttctgtcggacgaccctttttactgtgactgaatcctacctttattgtggttttcccccatcattgtcgatgccttctatatgatttgtattagaaggaaaaagaatggcaccacagaatgtcttttggggctagtagaaggaaaaagaatggcaccacataatttgtcattttcttgaactgctacgaggctgcatcaggaaccaagaagactactcggactggcaccttacttgcgattttgttaaaatatatactcctacactgggtttctccgtctctattatgaaaactattgggtaatatgaccatattgtatttcataatttgggtcaaactcacaactctggttattaagattcaaatggagtcatctttcttgattgccattacaagatgttgagtctatggactgttgtaatactttgttacaattttttttatggaaattgctatattttaggtgcctggattttcaacctggcaataatcttatacaactaaactagtacaattaaaaagcgaactcaccagtatggaggactggaaac

SEQ ID NO: 103276 - DNA, 916 bp, Zea Mays
ctcggtctcacaaaaaagaggcgagctgggtgagttattcttctttccaagtgtctctttgtggtctagtctttggtcccttttcttgacggaggtctttcccatgggtccagttcttttaacatgttagaaatcaccattactaaaaccaaggttttgtagcagttgtaatgtggttgcaaaggtttttgtgacacaacctttttctcattttgtcagtagtcactttacattctgctgtgaagctgagactacgattctgatgatttagtgcctttatatatacaaagtttgcataaatggtatcattcttacaggtcattttgtggatagatcaaaagctttctgtagcaattgacctggtcgttataaaaccatctgttgctctttttaaactgaataaattatcattttatatacattacaatgattaggatatgatcgttcttgctctttctgatttccttgctcttgatgaacaagatcgctgttgatagagttaataatagtgacattttcttgtcttccctgtcagtattagaaggaaaaagaatggcaccacagaatgtcttttggggctagtagaaggaaaaagaatggcaccacataatttgtcattttcttgaactgctacgaggctgcatcaggaaccaagaagactactcggactggcaccttacttgcgattttgttaaaatatatactcctacactgggtttctccgtctctattatgaaaactattgggtaatatgaccatattgtatttcataatttgggtcaaactcacaactctggttattaagattcaaatggagtcatctttcttgattgccattacaagatgttgagtctatggactgttgtaatactttgttacaattttttttatggaaattgctatattttaggtgcct

SEQ ID NO: 103277 - DNA, 914 bp, Zea Mays
ccggtgctcgtcgataagccgctgcgcccactcgttgcgcgccttggacagccttattgcgcgcttgttcacgccgccgatgtccaccagtgcaagtacgggcacgaagtcctgcaggttcgatgccccgtgcatcgctaagtactcgcggaccatggcacggaaccgctcggcctcctccgacgccaccgagccgtcgccgtagtaccgcttcccggcgattaccctcgccacggtgttcagcgcgatctcgaacgcgcgtgccttcacgtcgcagcgcgcgggcctggaggcgtcggccccggcggcggccttgaagagctggcgcgccatgttacggacctcgctggcgcggacatccgcggagcagaggacgcgatgcgaggagaagacgtcgacggtggcgatgcggcggaggttgcgccagttgggcccgtagcttgaggagcccaacgtggtgtagtcgttggagaggtagcgggcggagggaagccgcgggcggttggcgaaggtgacgtcgtgggtgctcaaacactccgcggcgacggcagggtcggcgacgtggacaacgcggcgggagccgaatcggaagaggagaacagggccgtgctgcgccgcaagagcagacagcgttcggtggagcggcttcttcaaaaggtgcaggtggccgatgacgggcagggacgacggcgggctcggtgggaggcgacagtggcgcttcttgttgttgatgaggctgcgcaggaggagaaggaagagtgtcgttgctagtgacagaaaggagaaggagagtgccgtcgcggccaccatggttgggatcttggactcttggagctgggtggacgggacggaaatctctggaggaaaaagaggaacccaggggccaggagttttagctgtcggtgaccgtcctg

SEQ ID NO: 103278 - DNA, 177 bp, Zea Mays
gggaggcggggtgcgtctgccgccaatgaacgcgctgcagatcctgcgggagacagtgcgggtgctgcgcggagacccgcacgcgttcacatccatcttcctgctgctctgcccggtgtccggttgcctcctcctgtccgcggccgcactcttttgtgctctcgactccccgccatc

SEQ ID NO: 103279 - DNA, 509 bp, Zea Mays
tatggaaatcacccggcctcagaaaggccaacagaaatcacatgcttctttacctctggtgtccgtgctactggcccaagccgagggcagtcttggctccaaaaccaagtgggaaagaaaccttcacctcaaatggttctcatggcccctaggtatgaattgaaccagccttcgaatgaaagttattcggttttcagtcagctgtttggttgcagtctcaatgcatttttctatttccgtttggttgtgtagaattgaggcatgttgaggtgtacgtccaaatgcatatgctggaaaggtagtatattagctgcaactgtttgtcagcagaaccaactggtggagacgatctagagccccgagttgtggttgctttaggcgattcatctaaacccgacctgtcccatgtaatagaaagctctgctatagaaaatatacgtgtagccttttgtctcacaggtatcgttcgtgcgcattctatcaggcgacgcgtccgttgtattatgctc

SEQ ID NO: 103280 - DNA, 1657 bp, Zea Mays
gtagaacgcgtcaccgaagcaaatctagaagcaaggaacaaggacgcggcgaggtccacctccagctctacctgcccggctggcggctgcccccgtcttcgtcttccttaatctcaaattcccaatcctcctccgacgccttgtttctggatcatccagcggggggacgccggtgtattgctcggtcctcctccctggttgcccgaggcagccgtgacggaggcggaggtagcgggggggaccatgtacagatcggcgggggtcgcgatggcgtggaacgtgttccggttctgcacggctctccgtgggctgggttccatcatgatcctactcgtcctcgccatcgtcggcgttacctactacgctgtcgtcctctgcaactacggccccgccctcctcaccggcggcggcaccactctcgccgcgctcgctgtcctgctcctcttccactttctgcttgctatgcttttatggagttatttttctgtggtgctcactgaccctggttctgttccaccaaattggaatcttgattttgatgcggagaggggagaaactgctcctctcactagctcagagttcagtagccagatgaattcacagcaatctgtggctcttggcaatacggcaaatccaagggctaggtactgtaggaaatgcaaccagttgaagccacctcggtgccaccattgctctgtttgtggaagatgtgttcttaagatggatcatcattgtgtgtgggtggttaattgtgttggggcactgaactacaaatactttcttctgttcctgttttacaccttcctcgagacaactcttgtcacactctctttattgcctcacttcatagccttcttcagtgatatcgagatcccaggaagtcctgcagcacttgcaaccacatttctcacctttgtgttgaatctggccttttccttgagcgtttttggttttatgattatgcatatttcacttgtttcggctaatacgacgacaattgaggcatatgagaagaagacaactccacattggatatatgatcttggccggaagaggaattttgctcaggtttttggaaatgacagaaaatattggttcatccctgcatattcagaagaggatctgagaagaattccagctctacagggtcttgattatcctgtcagtgagaccagattttgatggccaggaattgtaatggggcaattctaacagtgtcctcgtcagatacctcagtgttggacatctactcatacaactgtcagcattgctgattgccctatgcaaggcatctagtgaaatgtgcacaagatgattgtagtaatagtaaccatgagttattcatctgttgcacttcatgtatgtgacgaaggggaagtcctcctacctttgccagaggaagtttgttgtgatgtaaattagttttagcgcctggttagatggaccaaatcttggcgatgcgccaggattttggacttaattctttatccatccacgtgaattgggcaggatttcatccatgcaaactgggcattagtgtggtttgaaacagtcttgtacttcagtttagttatatcatgccatgcaatacatttaccatttgagatatttgtgccgctgttatacactatcaatagtaaatggataagcgctgcgt

SEQ ID NO: 103281 - DNA, 2361 bp, Zea Mays
accatggtgacaccagcctccaccgcccctgcgtccaccgcttccgccgccgcggcgaccggctccggccgcggcgtactccgcctcctccgctatcccgcccgctgcctccttcctttggctgcggcgcccaggacaggcacgcggctgaccaccgtgctccgcgcaagaacccagccggcggagcccgagctggtggagcagtaggtgaacactatccggttcctggccgtcgacgccgtggagaaggcgcattctggccatccaggcctccccatgggctgcgcgccgctgggacacgttctattcgacgagttcctccggttcaacccgaagaaccccgcctggttcgaccgcgaccgcttcgtgctctccgccggccacgggtgcatgatccagtacgctctcctccacctcgctgggtacaatggcgtcaagatggacgatctgaaaactttccgacaatggagaagcagaactcctggtcacccagaaaattttgaaacacctggcgttgaagtcaccacaggtcctcttgggcagggttttgcaaatgctgttggactagcacttgctgagaaacatctagcttcacgtttcaacaagactgacatgaaagtcgtggaccattacacgtatgttatacttggggatggttgccaaatggaaggtgtttcgaatgaagcggcctctcttgctggtcactggggccttggaaaattgatagctttttatgatgacaaccacatatcaattgatggtaatacagatattgcattcactgaagatgtgcttgcacgatatgaggcactagggtggcatacaatctgggtgaagaatggcaacactgggtatgatgacatacgtactgcaataaacgaagccaagggagttaaagacaagccaactcttatcaaggtgactaccactattggttttggatctccgaacaaggccaacacatatagtgttcatggtaacgctttaggttcaaaagaggtagaggcaactagaagcaaccttggctggtttcatgagcctttccatgttccagatgaggtgaagaggcactggagtcgccatatcgatgagggtgcttcacttgaagctgaatggaatgccaggtttgtagaatatgaaaagaaatacaaccaggaggctgctgagttaaagagcataatttcaggggaactggcttctgggtgggaaaatgctcttcgaaactacactcctgaaatgtctcctgatgctactaggaacttatctcagcagtgcttgaatgcacttgccaaagtaatacctggatttcttggaggtagttcggatctcgcaacgtcaaacatgacactgcttaagaagtttggtgacttccagagggatactcctgaagagagaaacattcgcttcggtgtgcgagagcatgctatgggtgccatttcgaatggcatcgctgttcacagccctggtctgataccttattgtgcaacgttctttgtcttcaccgactatatgagagcttccatccgcctttcagccttaagcgaatctggggtgatcttcgtgatgactcacgactccgttggcctcggggaagatgggccaacccatcagcctgttgagcatttattcagcctccgagcaatgcctaacatcttaatgcttcgtccagctgatggaaacgagacatcgggggcctataagattgcagttcttaacaggaaaaggccctcagtcattgccctctcacggcagaagctcccgcagctgagaggaacatcggtcgatgctgtttctaaaggagggtatattgtctccgatgactcatcaggcaacaaacctgatttcattctcattggcactggttcagagcttgagatcgcagaaaatgcagcaggcgagctgcggaagaaggggaggaccgtacgagtggtttcactagtttgctgggagctatttgaggagcagcctgaggagtacaaggaaagtgttctcccgagtgaggttacttctaggattagcattgaggcaggggtcacatttggatgggagaagtatattggacagaaaggcaaagctattggtatcgaccgttttggtgcaagtgctcctgcggggaaaatatacaaggaacttggtttgacagtggaacacgtcattgcagcagccgaggccctgtaaatggtcgtcacattactgaaacacatagtttgataggtatatggtgccactgggttgaaggcttgaagcactatttatggtcatatgtaagtatctgaacttctaaggatctttacgagctgcaagttgcatgttcacctaatgatgtgtagcttgtcaggcaaatttgcgctttgctccgat

SEQ ID NO: 103282 - DNA, 1988 bp, Zea Mays
atcaggtatcagccaccgcccaccccaactcgccgaaacacaatcgccgaacacacacaaaaaaaaccctagaccgccgagcccagtccagcagtgtctctccaccgctgccgcgccacctcgagctccacttgcacttgcatcgcgggatggagcacgatgcgcacgccgaggccccaccacacgccgtcccgccaccggaggtcgccaccgtcgatgattgggctcgcgacgacgcggagcccatgtccgttgaatctggcgttgccgctgcggagctaactgcggcagattcgggcgctgatgccccgctcgcgcccgcgccctcggccgcggtcgcggcagaaggtgtcaaggaaattcaatcatctctgcaatccttggagcttaaaacaaatgttgctactcaagaaggtgctcatgtggttgaagacgatgtagatgaaacaaaaagacacttgaacgtggttttcatcggccatgttgatgctggaaaatcaactactggaggacaaatattgtttttgagtggtcaagttgatgataggaccatccagaagtatgagaaggaagcaaaggataaaagtcgggaaagctggtacatggcttacatcatggacacaaatgaggaagaaagggttaagggaaagactgttgaagttggtagagcccactttgagacagaacacacaagattcactatcttggatgcaccgggtcacaaaagttatgttccaaatatgatcagtggtgcatctcaagctgacattggtgttctggtcatatctgctcggaaaggggaattcgaaacaggttatgaaagaggaggacagacccgtgaacatgtactacttgcaaaaactttgggtgttgctaagctggtagttgtaataaataagatggatgaacctactgttaaatggtctaaggaaaggtatgatgagattgaagcaaaaatggttccattccttaaatcttcagggtacaatgttaagaaagatgtacaattcttgccaatttctggtcttgtgggaaccaatatgaagaccaggatggataaaagcatttgtagttggtgggatggaccttgtctttttgaagttctggaccgtattgaaattcctttacgcgaccccaaaggtccagtaaggatgccgattattgataaatataaggatatgggcactgttgtaatgggcaaaatagaggctggcactatcagagagggtgacagtttattgattatgccaaacaagtctcatgtgaaagtcattggtttgaacttggacgagagcaaagtacgtcgtgctggacctgctgagaatgttcgtgtcaaattgtccggagttgaggaggaggatgtaatgtctggttttgtactttcaagtgtcgctaatcctgttggtgccgttaatgaattcatcgctcagttacagattttagagttgcttgacaatgctattttcacggctggctacaaagctgtgttgcatatccactctgttgtcgaagagtgtgagattgttgaactcatagaggaaattgacatgaagaaaaagaaaggagatccgaagaagaaaaaaccaaagaggaagcctctttttgtgaagaatggtgcaattgttgtttgccgcattcaggtgaataacttgatatgcatagagaagttctctgatttcccacagcttggaaggtttacacttagaactgaagttttctttgggagaagtgagattagttgagcataggttttttccgagcccggcttgagaatggtctatgccttaatggtttaggcaacaagcctgtttagattggttccataatgttacatctctggttacatgtgaggtataatcagtatggatgagtgttccaaccttaatgcactgccaaattgtggtggcatttttgcgtacaatgctgtaactgtacagttgtgtgtgaagtcaaatgggcaggctgcattactcggatgtgcagcgtcg

SEQ ID NO: 103283 - DNA, 2216 bp, Zea Mays
gaaacacaatcgccgaacacacacaaaaaaaaccctagaccgccgagcccagtccagcagtgtctctccaccgctgccgcgccacctcgagctccacttgcacttgcatcgcgggatggagcacgatgcgcacgccgaggccccaccacacgccgtcccgccaccggaggtcgccaccgtcgatgattgggctcgcgacgacgcggagcccatgtccgttgaatctggcgttgccgctgcggagctaactgcggcagattcgggcgctgatgccccgctcgcgcccgcgccctcggccgcggtcgcggcagaaggtgtcaaggaaattcaatcatctctgcaatccttggagcttaaaacaaatgttgctactcaagaaggtgctcatgtggttgaagacgatgtagatgaaacaaaaagacacttgaacgtggttttcatcggccatgttgatgctggaaaatcaactactggaggacaaatattgtttttgagtggtcaagttgatgataggaccatccagaagtatgagaaggaagcaaaggataaaagtcgggaaagctggtacatggcttacatcatggacacaaatgaggaagaaagggttaagggaaagactgttgaagttggtagagcccactttgagacagaacacacaagattcactatcttggatgcaccgggtcacaaaagttatgttccaaatatgatcagtggtgcatctcaagctgacattggtgttctggtcatatctgctcggaaaggggaattcgaaacaggttatgaaagaggaggacagacccgtgaacatgtactacttgcaaaaactttgggtgttgctaagctggtagttgtaataaataagatggatgaacctactgttaaatggtctaaggaaaggtatgatgagattgaagcaaaaatggttccattccttaaatcttcagggtacaatgttaagaaagatgtacaattcttgccaatttctggtcttgtgggaaccaatatgaagaccaggatggataaaagcatttgtagttggtgggatggaccttgtctttttgaagttctggaccgtattgaaattcctttacgcgaccccaaaggtccagtaaggatgccgattattgataaatataaggatatgggcactgttgtaatgggcaaaatagaggctggcactatcagagagggtgacagtttattgattatgccaaacaagtctcatgtgaaagtcattggtttgaacttggacgagagcaaagtacgtcgtgctggacctgctgagaatgttcgtgtcaaattgtccggagttgaggaggaggatgtaatgtctggttttgtactttcaagtgtcgctaatcctgttggtgccgttaatgaattcatcgctcagttacagattttagagttgcttgacaatgctattttcacggctggctacaaagctgtgttgcatatccactctgttgtcgaagagtgtgagattgttgaactcatagaggaaattgacatgaagaaaaagaaaggagatccgaagaagaaaaaaccaaagaggaagcctctttttgtgaagaatggtgcaattgttgtttgccgcattcaggtgaataacttgatatgcatagagaagttctctgatttcccacagcttggaaggtttacacttagaactgaagggaagacggtagccgtaggcaaggttgttgatgttccgcctgctggcagcccaacattctgagcttaagccaattttgaacaggatggataatcatgaagcagtgcgttgtcttgagatacttttctttgggagaagtgagattagttgagcataggttttttccgagcccggcttgagaatggtctatgccttaatggtttaggcaacaagcctgtttagattggttccataatgttacatctctggttacatgtgaggtataatcagtatggatgagtgttccaaccttaatgcactgccaaattgtggtggcatttttgcgtacaatgctgtaactgtacagttgtgtgtgaagtcaaatgggcaggctgcattactcggatgtgcagcgtcgtgtcacacctggttttaagggtaaaaccgaatgcataacatatgtgtgctaggatctattttaacatatatgttgacatcatgagtgtaatatatctaaagaacaatgcataaaagcgtaaataaagattatattaacata

SEQ ID NO: 103284 - DNA, 161 bp, Zea Mays
gccctacggcggccaataacaagcataaatgaaaccatccatgacaaaaacactgctaccaaaacagcactacagctatctagctaacaggtagacctgggatgggggcagtaagcaaggacagcttctttgcaccagccataacccaaagatcaatctcc

SEQ ID NO: 103285 - DNA, 1134 bp, Zea Mays
agcgggtttcactgtatgcagacgatgtcgtgttatttctacaacctgaagagaatgagttaaatctggtcaaagaaatcctgagaattttttgtgaagcctccggcctgatcacaaacatcggtaagtgctcaatgacccctattcagtgtaatgcccatcatattgaaacagcccagagtattctgccttgcaatgtgatatccttcccgtgcaaatatttgggtctaccactataagtacgtaaactttccaagcatgatttccttgagctcatcgataaagtggttgatagacttctggggtggaagggcacaatggtcaacctggctgggagaacaactctagtaaaagcagtgttaactgctatccctatctatcacttaattgctcttcaatgtcccaagtgggtcatcaaggccattgataaaatttggagagggtttctttggaaaggccgtaaagatgtcaaaggaggccactgtatggtcagttgggcaaaggtttgcaaaccattgaccttagaaggctaggtctgcacaatttagaggtccttggttgggatcttaatatgaggtggctttggatgaagaaaactcaaccgaatcctatgtgggctgatgtgaaaattagagtacacccaaatgctacagccagggttgcatgtccagtggtttctttggcaggagacgggtcccaaacctcctttggacggatcgctggctccatggacaggctctgcgtgacttggctccgatccttgtctctcgggttccgaacagatttctccatagtagaacagtaaaggatgccttgactgaaaatggctgggtaaatgatatctcaggaagcatatcagctcaatttctatctgagtacttcatggtctgggacctgattcaaggcttccaacttcacccaggagtttcagaccaacaccgctggaccccttctgcctcaggggaatactcctctaaatctgcttatcatcgtttctttgaggggatggtcacctttgaaccggcagcaagggtctggaaaagttgggcacctccaagatgtaaattttttatctggctggcttctttaaatcgctgctggacagcggatcgattggctcgtcgaggtttggac

SEQ ID NO: 103286 - DNA, 640 bp, Zea Mays
atgagatctgcatccgcgcagactggagatcaaaataacgaaagaaacgtagctcaccaacaacaccgcggagcgggggaagtatcggaagatgtggtctccgacgcgcttggcgactggcgggagctcggtgtcgtcgcagcgcgggttggcgtgatagtacccgacgacggcgaggccttcgccctgggttgcgaagtggtcctcgacgagggtgagcgcgagctcgagcgtggggagcagcggcagatggtgcgggtggtgagaaagcggcacggcgtcaatgaccgagacgacggccggtgaggacgaaggctcgacgaggcgaccgacgaggaggccgttgacggcggtcgccgggtgcttcagtgcgtgcagcgccagcttgatgtacgccgcctgcgccacctcgtaccggcactccgctcccatctccgccgccgctgatttcgtccggaggatgatttttggtggggaatgtggagatccggatgctgattttgttttggctgcaggggcgtgagatctgatttgatggaggtgccggatttttttcaacggataggccaaatttatctatctgttctataatataaaaggattataaaaaatcaataataaattacaaaataacttttca

SEQ ID NO: 103287 - DNA, 345 bp, Zea Mays
atggcgattgtgagcacgagctgggagttccacggcggggtcgcgacaggggaagtcgtagcgcgcgcgtccagggagagagaaaagcacgggagcgagcagcgggcgcagccatggagaagcaccacacgtagccagggatggacagagggagcaggcgcggctgaggaaaatggagaggaggctgagctggagaaaccagggagcgggggcgcgccatgggcgaccaggggaagaacgggcgccatgggagagggcaggaagaggaagccgagcgccatgggagagatggagaagatgacctggcggccgccacgcgcaggtagccagcatgtgcgcggctga

SEQ ID NO: 103288 - DNA, 255 bp, Zea Mays
ggtaaagatttttcttatccgatggtagataaattattgagattacttttaactctccctgtgtcaactacgaccacatacagagccttttcagctatgaaatttgtgaagacacgtcttcgaagaaaaatgggagatgcctatttacgagattatctggtcgtttatattgaaagggaattaacggtaatgatttgttctgatgatattatcaaagtctatgatctagctaatatacgtagagctaaattcaaa

SEQ ID NO: 103289 - DNA, 117 bp, Zea Mays
caaaatatccaaaacgagtcaaattcatgttttgatttccaaattctcaagtgccaaagttgatacttttgggattataacctttattgtggcccacgaaaatttatgcgtttcctg

SEQ ID NO: 103290 - DNA, 343 bp, Zea Mays
ccgaagcagagaagtttgtccgagcagctgcaggctatacgtcgacggcgagatacccatggtggccgggaagcaagcaccaagcaagtctccccacatctgtagagcttggacagcagggtcgggcaccaggaagttgatgacgccggctgtggcaaatgcaagcacggacaccggcatggaacaactaagaaaatagagacgccatggctgggcaacaagatgtagatcagggtgatgatggcagcgccgagacacccaaggcgcagaggggctaggaaaatgcaatgtccgagcaagaggaaaggagctaagcgatggaatggtgaagagctggacgcct

SEQ ID NO: 103291 - DNA, 116 bp, Zea Mays
aattttatttcgcaccacacatatttatttaatctatctaacaattcggctaacaaacttagtctaagacacctaattttgggaataagcataggagcacatcaactttctaaacc

SEQ ID NO: 103292 - DNA, 1176 bp, Zea Mays
accacttccctccgttcctatcccattatgtacgacgttcagcttcctaggatattttctagcgctcctttcttcttccgtcccatgcaacacttggttgcttgcctccctggccgcatcacttctgaacctccccaagcaaatgtgccatctctcagctgtcgtgctcatcggagccagcctccaccaccgtccacagctctctggtgctcgcccatggcgcccgccctgccccaggtccgaagctggtcgtcgtgtatgctcggtctcacgggcgccatcgttccgcgcaccggcctcggcaaactccaagaacctgggccgcctgggcccagcacgttatcctcgtcaccagctcgctcgcgtgcccagcttcctgttttccctcttcctcccgcgctcggacatcgccagtgaaggcccgcgcgcgccgtcgtttgaatcctggttttctccctactcgctgcgctcacgtcgtcgtcttcctgctcgttccgcgacgtcgctcccagtccacagctcgttggcttccctgtgcgcggttgcggatgccgtcgcccgatccttgtgccttggcccgatccttgtgccttgccgagctcatcaccgccgcgagactctgcatcgctgtgctcagccacgcctccctagtcgtcttgcacatactcatctccaaacaggaccacgctgccgactattgaccccgtcgttgcctcgcagcgctcgaacactatcgttgtcactcgacaacgtgtttgcccgtcaccacgttaccttcagcaacacggctctactggactccgtgcgctcgtcgacacctggttatcgatctccgccacgccgtgcccccgctcttcagcatcgtcgtcaccctttttctgttatgtcgcaggcgttcgtggattggtaagctgatttataaattttgctagttggtttaatgaatggattagctagatagattagtcacaatgatgttgtgattatattaagtgttgttgaagcgtatcgtctcatgcagtaatgtgattgtgaagtggttgcgtcgtgtgaagcttagtgttaagatttaagttttacaatgagtattttgatagatgaatatgtcatgtgttgctaggacaagtaaattagtaacacaaagaatcattctgtcgtttagtgttgtcagcagtg

SEQ ID NO: 103293 - DNA, 300 bp, Zea Mays
actcctggagatccgcctcgacgccgtcttctttacctgagcatagattgcaccaaaggcaaccttcaccaaacagatgctcagggtcttcaaccttgtagaactcgaagaaccaggtcacttggtgaccgaagcttgaccgtcgattcctcgaagctcgaaaacggatcgcaatcagagtcatggcagcgatgtcccctcacgacggttgctgctcgacgaagctggtgatggtggtgtcaccccgggatggagattgcgagaacgggcggtggttctgtgtggcgatgggcaaggagc

SEQ ID NO: 103294 - DNA, 1543 bp, Zea Mays
gaccgaaccgttgaattgcaatttccgctagaaagccgacgagacaatttcttccgttcgtttcagatcgggcggtggtcctgaccaaggcgctgccggccactggcctctcgcaaccggcgaccgcatctcgaagtagagggtgctggccgccgctctcggaagcgctctggaaggacacggccatggcgatgcgggccgctgcgcgtcaagccatactctctccaccgcttgggccccgcagtcctcgccccttcctctgtggttgttccttgtctatcgctcctcggttggagccgtgccgagcggcgagctccaccaccgcgccggccgccggaaagcatctccctccattgttcagcgtcgcgccgatgatggactggacggacaaccactatcggacgctcgcgcggcttatctcgcggcatgcctggctttatactgagatggtcgtcgccgagaccatcgtgcatcagaaggataacctggttagagtgttatgttgccgcttatcttgatttttttcgagcctggcagataaagaataggataggtttctagcatttccggaggaacaacatcctattgtgctgcagattggtggaagtaaccttgaaaatttagcaaaagcaacagaactggcaaatgattattcatatgatgagatcaacctaaactgtggctgtccaagcggcaaagttgctggtcatggttgctttggtgctcgcttaatgtttgatccagagtttgtaggagatgccatgtcaactatcgcagctaattgtgatgtcccagttagtgttaaatgcagaattggtgttgacgatcgtgattcttatgaagaactatgtgaatttgtagataaagttatctcaaaatctccaaccaggcatttcattattcatgctcggaaggcattgcttagtggtctcagtcccgcagagaatcggaagattcctccattgaaatatgagtactattttgctttgttgcgggacttcccagaaataaaatttactctaaatggtggcataaccaatgttagtcaagttagtgcatccatgagacaaggtgcacacggagttatggttggccgggctgcttataacaatccatggaacatgctaggacatgtggatggggaaatctatggcaagcaaacaagatacatttctcgtcgccagatacttgagaactaccaagcttatggtgattcaataattgaccagtatggccccagcaggccaaatgtgagacaacttgtcaagccactgttaaacttattccactcagaacctggcaacagcctatggaaacgcaaagctgactctgcattgcgtcattgcaagacagtgaaaactttcttggaggagactcttgacgcaatatcggacagcgttcttgacaagccagtaaacagggaaccatccagtgacgaagaatattttgctagtgtcgattctctgttgccaccaaaatacacgacaccgatgcatgaaagacttgtagccgcatccacttgaacagcgtgtcgggaagcgga

SEQ ID NO: 103295 - DNA, 1725 bp, Zea Mays
gaccgaaccgttgaattgcaatttccgctagaaagccgacgagacaatttcttccgttcgtttcagatcgggcggtggtcctgaccaaggcgctgccggccactggcctctcgcaaccggcgaccgcatctcgaagtagagggtgctggccgccgctctcggaagcgctctggaaggacacggccatggcgatgcgggccgctgcgcgtcaagccatactctctccaccgcttgggccccgcagtcctcgccccttcctctgtggttgttccttgtctatcgctcctcggttggagccgtgccgagcggcgagctccaccaccgcgccggccgccggaaagcatctccctccattgttcagcgtcgcgccgatgatggactggacggacaaccactatcggacgctcgcgcggcttatctcgcggcatgcctggctttatactgagatggtcgtcgccgagaccatcgtgcatcagaaggataacctggataggtttctagcatttccggaggaacaacatcctattgtgctgcagattggtggaagtaaccttgaaaatttagcaaaagcaacagaactggcaaatgattattcatatgatgagatcaacctaaactgtggctgtccaagcggcaaagttgctggtcatggttgctttggtgctcgcttaatgtttgatccagagtttgtaggagatgccatgtcaactatcgcagctaattgtgatgtcccagttagtgttaaatgcagaattggtgttgacgatcgtgattcttatgaagaactatgtgaatttgtagataaagttatctcaaaatctccaaccaggcatttcattattcatgctcggaaggcattgcttagtggtctcagtcccgcagagaatcggaagattcctccattgaaatatgagtactattttgctttgttgcgggacttcccagaaataaaatttactctaaatggtggcataaccaatgttagtcaagttagtgcatccatgagacaaggtgcacacggagttatggttggccgggctgcttataacaatccatggaacatgctaggacatgtggatggggaaatctatggcaagcaaacaagatacatttctcgtcgccagatacttgagaactaccaagcttatggtgattcaataattgaccagtatggccccagcaggccaaatgtgagacaacttgtcaagccactgttaaacttattccactcagaacctggcaacagcctatggaaacgcaaagctgactctgcattgcgtcattgcaagacagtgaaaactttcttggaggagactcttgacgcaatatcggacagcgttcttgacaagccagtaaacagggaaccatccagtgacgaagaatattttgctagtgtcgattctctgttgccaccaaaatacacgacaccgatgcatgaaagacttgtagccgcatccacttgaacagcgtgtcgggaagcggattgcctgcggtactgcagggtgtagttgggtcactgcgcgtgggccctgtcgcacggggcagtgcccacgcagggggggctgtgaaaatgatctatgtaattgttgtaacacatatacgtcgccacgtcggggtatatcaatagctgtagacataaccattttgactttgcggtaaaatccttgctcatgcttgcatggaacatgtacccatttttttcatcaggattcttagccgtgaaga

SEQ ID NO: 103296 - DNA, 477 bp, Zea Mays
atgcaaggcgaagagggtgctgctgtagggaatcgacgacgcaaggtttgttgtgcattccgtcgagcgcatagcaagcatgaacggtgcattgcggagcagcacacagcaggggggaatggagctcggacgccgagcgtccaccatggcagggacaccaagctcggctcgatggagaggagcaaggccggcggaggtacgacctgctcgagaagaggggtctgttcagccattgggggtgtcgagcgccaaagcgaggccaccaaacaccacggctacaaggaaggggagggcgcagtggatcttggcactggtgagtgccgggacagactgttgctgctgggcaaggccgacggcgaggccgagttgggcgtcggctggacacttgccaagcagggaggtcgagggggaggggcactagatgctcatggcgcagccatggccgagcagggaggtcaccgactcatgctggcttga

SEQ ID NO: 103297 - DNA, 179 bp, Zea Mays
ggcttgttatgcacatataagggggagaattgcccaaaccctaattcaaacccctttggacaagtggagcactagaagtaagtatgaacaaaagggtatgaaaaccacatgatcatgacttgggccaattataaaagatgtagtacacttaataccctacaaatgatagtaagaaagtg

SEQ ID NO: 103298 - DNA, 866 bp, Zea Mays
acctcacccctccccataaatgcactgtatcacccctgccttcctgctagttctccagagagagccgggagaacttggctgtctgccctgtctgcaagtacctcgtcttcttcctggagagaaaaagcagaagacaatacaaagatgtccaagatggcggaggagaaggcggcggcagtgggcggactcggaggagccggggcggcggacgcggcgcagcagcagcagctggcagcaggggaggccgcggcggcgcgggtgcggcccgtggagacgctgcttcgcgcggcaccgctggggctctgcgtggccgccatgaccgtcatgctccgtaaccagcagagcaacgagtacggcgccgtcgcctactccgacctgggaggcttcaagtacctcgtctacgccaacggcctctgcgctgcctactcgctggtatccgcgttctacactgccgtgccgaggcctgccaccgtgtcgcgctcctggctcgtcttcctcctcgaccaggtcggttcttgcctcccgtctctgctctgctctactcacactttttcacacggttctagtagcaagttgagaatgctccaaagaatcttttttttttctttttctgccaacatcacgtgacgaattttacgagtaatatgacggtacaaaagtttattcttcatgtgttcgttatatttttgttgttgtgacctactcctacaataatcaaggctggattactttgatgatgttggaggatctgttcgttctacaaaactcatgcgaaactcgtgactgaagaaacaaattaacacatggaaagaaattagctctggcagagactgtatggcagcttatgcgttggatttgttttattt

SEQ ID NO: 103299 - DNA, 1288 bp, Zea Mays
aacttccgaaaaagcggacagagaaaaagaatagatgctcgaaatgttcattcctacccgtcggcaatggcctctcactcgccgtctcactcctctcgcactagcgctcgcttctcccaaaccctagctcctcctccgtagctctcagctccagctccagctccggcgatggcctccgtcccgcactcgccgccggtgatccgcaagtcgggcaacctaatggtgttcgtcacgccaccggcggagcccgagagcccgaggtccgagttctctacgcccccgacgagtccccgcgccgaggaatcccctgaatcgccgccggcgcagatggcccctccgcccacgcctatttattcggtttcggtctccacgccgccacttgtcaagacggtctctccgccacttcatgcggagaagctctcccgaccctcgctggtccaggtaccgccgccgcttgtcaaaacggtgtctccacctcttcccgcggagaagctctcccgacccccacttgtccaggtgccgccgttgcagttcgcgaaggtgtcggcagggtcggacggatcgctgctagcgttcttctgggacgcggttgcacacgtgcaaaaagcacactcgaggttggacaagcacatctcgagatggttcgggctggaccagtccaagtaccagtgggcgctcaacgactattttgagaggaccggacaggagatagattcgagcacgctggagcacagttgtaaaaattcagaaagcatgacaaagtgaattatttatacctttatgtgtgtaactaagctgatgccgtgtcaagctgcatataccttttggtttcatgaagattgaggcctccttttctgcatacggaagcgcttggttgtaacaaatccatctgttagcagcttcactgtagttccgttgttgataaagaaaaaaaacctagttcctacttttttaatcgctttcacaacagctactctgccccgttgaaattactgtcttttcctcctggaccatccactggtgcatcgacagatttccatgggataaattcctcgacaacgacggggatggaagaaaaagcttcaccgacatgactagtttggcagtgaggagagaaaaatcctttggaaaccaatccatggattttagatgtcaccttattttcggatagaatctcccctcttcggtgtactctcctcttcggtgtactctcctctcggtgtacttatttaacattgtttgggaagcaataagctaaatgcccctcttgaacaaaaaatacataaaa

SEQ ID NO: 103300 - DNA, 1389 bp, Zea Mays
aacttccgaaaaagcggacagagaaaaagaatagatgctcgaaatgttcattcctacccgtcggcaatggcctctcactcgccgtctcactcctctcgcactagcgctcgcttctcccaaaccctagctcctcctccgtagctctcagctccagctccagctccggcgatggcctccgtcccgcactcgccgccggtgatccgcaagtcgggcaacctaatggtgttcgtcacgccaccggcggagcccgagagcccgaggtccgagttctctacgcccccgacgagtccccgcgccgaggaatcccctgaatcgccgccggcgcagatggcccctccgcccacgcctatttattcggtttcggtctccacgccgccacttgtcaagacggtctctccgccacttcatgcggagaagctctcccgaccctcgctggtccaggtaccgccgccgcttgtcaaaacggtgtctccacctcttcccgcggagaagctctcccgacccccacttgtccaggtgccgccgttgcagttcgcgaaggtgtcggcagggtcggacggatcgctgctagcgttcttctgggacgcggttgcacacgtgcaaaaaggtgatgtggaagagaatccttgttcaacgctctgatttattttattttaatgtttgtgactttgaattttgatctgtgagcaaaatattttcctggtttagcacactcgaggttggacaagcacatctcgagatggttcgggctggaccagtccaagtaccagtgggcgctcaacgactattttgagaggaccggacaggagatagattcgagcacgctggagcacagttgtaaaaattcagaaagcatgacaaagtgaattatttatacctttatgtgtgtaactaagctgatgccgtgtcaagctgcatataccttttggtttcatgaagattgaggcctccttttctgcatacggaagcgcttggttgtaacaaatccatctgttagcagcttcactgtagttccgttgttgataaagaaaaaaaacctagttcctacttttttaatcgctttcacaacagctactctgccccgttgaaattactgtcttttcctcctggaccatccactggtgcatcgacagatttccatgggataaattcctcgacaacgacggggatggaagaaaaagcttcaccgacatgactagtttggcagtgaggagagaaaaatcctttggaaaccaatccatggattttagatgtcaccttattttcggatagaatctcccctcttcggtgtactctcctcttcggtgtactctcctctcggtgtacttatttaacattgtttgggaagcaataagctaaatgcccctcttgaacaaaaaatacataaaa

SEQ ID NO: 103301 - DNA, 1371 bp, Zea Mays
aacttccgaaaaagcggacagagaaaaagaatagatgctcgaaatgttcattcctacccgtcggcaatggcctctcactcgccgtctcactcctctcgcactagcgctcgcttctcccaaaccctagctcctcctccgtagctctcagctccagctccagctccggcgatggcctccgtcccgcactcgccgccggtgatccgcaagtcgggcaacctaatggtgttcgtcacgccaccggcggagcccgagagcccgaggtccgagttctctacgcccccgacgagtccccgcgccgaggaatcccctgaatcgccgccggcgcagatggcccctccgcccacgcctatttattcggtttcggtctccacgccgccacttgtcaagacggtctctccgccacttcatgcggagaagctctcccgaccctcgctggtccaggtaccgccgccgcttgtcaaaacggtgtctccacctcttcccgcggagaagctctcccgacccccacttgtccaggtaccgccgcagcccgtcaagtctctctcaacgtcgctgcaggcaccaaacctctcttccggctccttgccatccgttcaggtgccgccgttgcagttcgcgaaggtgtcggcagggtcggacggatcgctgctagcgttcttctgggacgcggttgcacacgtgcaaaaagcacactcgaggttggacaagcacatctcgagatggttcgggctggaccagtccaagtaccagtgggcgctcaacgactattttgagaggaccggacaggagatagattcgagcacgctggagcacagttgtaaaaattcagaaagcatgacaaagtgaattatttatacctttatgtgtgtaactaagctgatgccgtgtcaagctgcatataccttttggtttcatgaagattgaggcctccttttctgcatacggaagcgcttggttgtaacaaatccatctgttagcagcttcactgtagttccgttgttgataaagaaaaaaaacctagttcctacttttttaatcgctttcacaacagctactctgccccgttgaaattactgtcttttcctcctggaccatccactggtgcatcgacagatttccatgggataaattcctcgacaacgacggggatggaagaaaaagcttcaccgacatgactagtttggcagtgaggagagaaaaatcctttggaaaccaatccatggattttagatgtcaccttattttcggatagaatctcccctcttcggtgtactctcctcttcggtgtactctcctctcggtgtacttatttaacattgtttgggaagcaataagctaaatgcccctcttgaacaaaaaatacataaaaaa

SEQ ID NO: 103302 - DNA, 1212 bp, Zea Mays
gaaatgttcattcctacccgtcggcaatggcctctcactcgccgtctcactcctctcgcactagcgctcgcttctcccaaaccctagctcctcctccgtagctctcagctccagctccagctccggcgatggcctccgtcccgcactcgccgccggtgatccgcaagtcgggcaacctaatggtgttcgtcacgccaccggcggagcccgagagcccgaggtccgagttctctacgcccccgacgagtccccgcgccgaggaatcccctgaatcgccgccggcgcagatggcccctccgcccacgcctatttattcggtttcggtctccacgccgccacttgtcaagacggtctctccgccacttcatgcggagaagctctcccgaccctcgctggtccaggcaccaaacctctcttccggctccttgccatccgttcaggtgccgccgttgcagttcgcgaaggtgtcggcagggtcggacggatcgctgctagcgttcttctgggacgcggttgcacacgtgcaaaaagcacactcgaggttggacaagcacatctcgagatggttcgggctggaccagtccaagtaccagtgggcgctcaacgactattttgagaggaccggacaggagatagattcgagcacgctggagcacagttgtaaaaattcagaaagcatgacaaagtgaattatttatacctttatgtgtgtaactaagctgatgccgtgtcaagctgcatataccttttggtttcatgaagattgaggcctccttttctgcatacggaagcgcttggttgtaacaaatccatctgttagcagcttcactgtagttccgttgttgataaagaaaaaaaacctagttcctacttttttaatcgctttcacaacagctactctgccccgttgaaattactgtcttttcctcctggaccatccactggtgcatcgacagatttccatgggataaattcctcgacaacgacggggatggaagaaaaagcttcaccgacatgactagtttggcagtgaggagagaaaaatcctttggaaaccaatccatggattttagatgtcaccttattttcggatagaatctcccctcttcggtgtactctcctcttcggtgtactctcctctcggtgtacttatttaacattgtttgggaagcaataagctaaatgcccctcttgaacaaaaaatacataaaa

SEQ ID NO: 103303 - DNA, 746 bp, Zea Mays
atccaataataatccatctatcttgagctcctgtaggtagaaagaaacgatgtcgggagtgtgggtgttcgaggacgggatcgtgcggcgtgcggacagcgagccgcccagcggcgccggcgccggcgggtcgcggccgaacaaggtgctggtgcacgtgccgagcggggaggtggtgacgtcgtacgaagtgctggagcggcggctccgcgagctcggctgggagcgctacctctacgacccctgcctgctgcagttccaccagcgctccaccgtgcacctcatcaccgtaccccgtgacttcgcccgcctcaagctcgtccacatgtacgacgtcgtcgtcaagacccggaacgtcttcgaggttcgcgacgccgccgcagcctgatggtcttcgtggcgacgcaagctagctcttttctgcgggctcgatcgtcaggccagtgctgtgctgggagatctgccggcctgtcgccgccgtttcagcgtacgtacgtattgtatgtttgtgattggtatgagtacagacgtgcgctttgcatggcgcaggccgggctcgtgcgtgcgtggccacctctgccgccaaataaatgctacgcgaaagcgcgccgccgctgccgtatgtatgcttcttatgtccggacttgcttggcggcgtgtgtttctttgacacgaaggcttgtacgtatatagattgattttatttggccaaccgtggccaattttggtattcaactttgtcaaag

SEQ ID NO: 103304 - DNA, 2321 bp, Zea Mays
caggacgacggcaaatccgcccacgcaaaatatcagcccaagtgcccatcgcccaagcttcctagctcacccgccgccacccactagccaaattccccatccctctcctgccgccacccatcagccacatctctccctcctactccctctccggcagccatcatcagacaagatccctcccccaccatcgagccatgtcgagtcgagtgcatcttctgcaagcacggccatcttacgaaaccctagctggctcgaaggaccactactgtccggcgccctgaacaacttggcatgatgccgacgaagggtggagcaaacaaatcacaatgacatcgggtagtagatccaccattgcatccctatgaagaggagcgccttagacaatgtatgaggaacaattcgaggttgcaacaacttggaattcctgctttagtcagcatgtgtgggaacataaattccatctctaggaacaaaaagccaaataacagggataatgaagattctgaatctgagtatgatccttcacatgacgattctattgaaggggatttgtttgaccatgatgatcataataagaagggctcaaaggacactaacagaagaactattcacatggctcctggtggaatcaagcctcgaactaagagagtttatgcagagcaacatactactagaaatacaaggtcaaagaaaagcattgctcagcctgacacaagtctaacacgaagtgacatctatgtgccaccaccctcgctatctcatttgacccaagttggagaagttgctcgtagcattgaaaaccatagaaagactagtgttgaagctaatggccctacccaggttgacaacacccacatggccaatcgagaagatggctttgaccaatttgatgacaacatgaccaaccaaggggaaggcattacccagcctggtggaaaaggtgatggagtaaatcagcatagagaaaggggacttaatatgggacttggtctccaaaggatgaaccgagctcggcgtggcaaactgccaattgtcattactgaaggaaggataaggcctgtggcaccaattgttgctgcaaagtttgcaactgagtgcaacattgcagttcggaatcatgtgcttgtgcttaagtcatggaaggaatacgagaagcatcctgggctctttaaattgtttacagcaaaacttagtgcaaagtttgatatcaatacagaagatgcgctagttaaaaatgcttgtttccaaatgatgaggaatgcactgcgccaacaacgatataagctgaagaaacaatattttgacccttttccgctacatctagtgaggaaaacatctcctatcaaatcgacaagtgatgaacaatggaatgaccttgtggaacattggaaaggtccaaaaaatatggcgacatgtgaacataacaaaggcaaccgaggcaaagttaagttccatcaaacaactggatctcgtagctatatggttcatgtagaaaatttgggggacaagtacatggatcaagaacctgatgcattggatctgttcaaggagtgccactacagtaagaaaaagcaaggctacacttccactgtacaactggctattactcaaatggaagacaagcgatctacaccaggagaaggtgaacaaccaatgtctacgactcaggttgtagctgatgtgcttgctgagaacacaaagaagaatcggtttcttcaaaatgtgggaatccaaaatgcacgacctagatctagtgtacaaaatattgaagcacaacttgaagtagagaggaaggcaaatgcagagcttcaatcacttgtcagcatccaacgtgagcgcatggatgtattattaaagcaagtgcatgaagcagaactggtaaggattagagagcaagaagagatgaagaagaagcaagatgccatggatgctcaacttgagcttatgctaagtcagattcaaccaagttaaagctaactagtatggggtgttaggctttgttggtacttctcttttgctgatgctattgcattctattgatggataaatacgtttcaatccattttttgtctattgtgctgctagagtagctttagcggcatgtgtggtgtgttggagtggcttacgtgtcagtggttggatacttgctgtaatgacatgctattggatacttgcatgtaatgacatgctggagtgtggtcagtattttttgtgatgagatgctggattaaaatctgagttgtgatgtaatagaattcaacattttgtcattatgttctggattataattaatatatatttaaattattgtgtttgcaaaa

SEQ ID NO: 103305 - DNA, 2312 bp, Zea Mays
caggacgacggcaaatccgcccacgcaaaatatcagcccaagtgcccatcgcccaagcttcctagctcacccgccgccacccactagccaaattccccatccctctcctgccgccacccatcagccacatctctccctcctactccctctccggcagccatcatcagacaagatccctcccccaccatcgagccatgtcgagtcgagtgcatcttctgcaagcacggccatcttacgaaaccctagctggctcgaaggaccactactgtccggcgccctgaacaacttggcatgatgccgacgaagggtggagcaaacaaatcacaatgacatcgggtagtagatccaccattgcatccctatgaagaggagcgccttagacaatgtatgaggaacaattcgaggttgcaacaacttggaattcctgctttagtcagcatgtgtgggaacataaattccatctctaggaacaaaaagccaaataacagggataatgaagattctgaatctgagtatgatccttcacatgacgattctattgaaggggatttgtttgaccatgatgatcataataagggctcaaaggacactaacagaagaactattcacatggctcctggtggaatcaagcctcgaactaagagagtttatgcagagcaacatactactagaaatacaaggtcaaagaaaagcattgctcagcctgacacaagtctaacacgaagtgacatctatgtgccaccaccctcgctatctcatttgacccaagttggagaagttgctcgtagcattgaaaaccatagaaagactagtgttgaagctaatggccctacccaggttgacaacacccacatggccaatcgagatggctttgaccaatttgatgacaacatgaccaaccaaggggaaggcattacccagcctggtggaaaaggtgatgtaaatcagcatagagaaaggggacttaatatgggacttggtctccaaaggatgaaccgagctcggcgtggcaaactgccaattgtcattactgaaggaaggataaggcctgtggcaccaattgttgctgcaaagtttgcaactgagtgcaacattgcagttcggaatcatgtgcttgtgcttaagtcatggaaggaatacgagaagcatcctgggctctttaaattgtttacagcaaaacttagtgcaaagtttgatatcaatacagaagatgcgctagttaaaaatgcttgtttccaaatgatgaggaatgcactgcgccaacaacgatataagctgaagaaacaatattttgacccttttccgctacatctagtgaggaaaacatctcctatcaaatcgacaagtgatgaacaatggaatgaccttgtggaacattggaaaggtccaaaaaatatggcgacatgtgaacataacaaaggcaaccgaggcaaagttaagttccatcaaacaactggatctcgtagctatatggttcatgtagaaaatttgggggacaagtacatggatcaagaacctgatgcattggatctgttcaaggagtgccactacagtaagaaaaagcaaggctacacttccactgtacaactggctattactcaaatggaagacaagcgatctacaccaggagaaggtgaacaaccaatgtctacgactcaggttgtagctgatgtgcttgctgagaacacaaagaagaatcggtttcttcaaaatgtgggaatccaaaatgcacgacctagatctagtgtacaaaatattgaagcacaacttgaagtagagaggaaggcaaatgcagagcttcaatcacttgtcagcatccaacgtgagcgcatggatgtattattaaagcaagtgcatgaagcagaactggtaaggattagagagcaagaagagatgaagaagaagcaagatgccatggatgctcaacttgagcttatgctaagtcagattcaaccaagttaaagctaactagtatggggtgttaggctttgttggtacttctcttttgctgatgctattgcattctattgatggataaatacgtttcaatccattttttgtctattgtgctgctagagtagctttagcggcatgtgtggtgtgttggagtggcttacgtgtcagtggttggatacttgctgtaatgacatgctattggatacttgcatgtaatgacatgctggagtgtggtcagtattttttgtgatgagatgctggattaaaatctgagttgtgatgtaatagaattcaacattttgtcattatgttctggattataattaatatatatttaaattattgtgtttgcaaaa

SEQ ID NO: 103306 - DNA, 777 bp, Zea Mays
aataatattgtgatccctgaccacggaaccacacccccagagaaaccattctacatattctcatatacactcattagcacatagcgctaggcgccataccaaccatgagcgacctgttatcctacatttccaaggtcatgtgcatcaaggcaagatcggaggcaacacaagccggcgaggacagcggctgcccagcggacgagtgccgcgtctgcctgtccaagattcggctcggcgaggctacccgccgactgccgtgtcgccatgtgttccaccgggactgcgtcgaccggtggctctcgtcctgcaagcgaacctgtccgctgtgccgagtttatgtggccgatgggaacaagcagccggtggcggcaaagcacaccagccgtgaagcacaggcactcgccgacgaccttgttatctggttctccaccgtgcttgttcccggtttctgatgccaaattccttcgtctgttcgttcgtttgaaaaagcttgattggtgtgtattttttttattgcatgcatgatacatgtacgtactacgttactgttaattgtccttagaacagtttctagaaaatctgtgtgtatgtagcatcttgttgcatgaactgattggaacttctgtgtttgcagctgattactgaaaataagaagttcgagcaaatatatgttatcgaaatttatggtactatatggtgttgtttggtttcacaaatgttaacgtgaatgtagtactatgattcgaaaaaaaaaacaaatagcgttggtacttttcg

SEQ ID NO: 103307 - DNA, 521 bp, Zea Mays
catgagcgacctgttatcctacatttccaaggtcatgtgcatcaaggcaagatcggaggcaacacaagccggcgaggacagcggctgcccagcggacgagtgccgcgtctgcctgtccaagattcggctcggcgaggctacccgccgactgccgtgtcgccatgtgttccaccgggactgcgtcgaccggtggctctcgtcctgcaagcgaacctgtccgctgtgccgagtttatgtggccgatgggaacaagcagccggtggcggcaaagcacaccagccgtgaagcacaggcactcgccgacgaccttgttatctggttctccaccgtgcttgttcccggtttctgatgccaaattccttcgtctgttcgttcgtttgaaaaagcttgattgctgattactgaaaataagaagttcgagcaaatatatgttatcgaaatttatggtactatatggtgttgtttggtttcacaaatgttaacgtgaatgtagtactatgattcgaaaaaaaaaacaaata

SEQ ID NO: 103308 - DNA, 3139 bp, Zea Mays
cgactgctctctgccatcgctgtggcgaccccgacggagccaagcgacggttcatcttcttgcggcggcggcgacctcgagctgattgcagcgagaaggcggggacaaatcgatctcccctagctggctacacccgatggagccgagggttccttgcgttgacggcggcggcgacggcctcgagctgagggccgcgagaaggcatcgacgggagggcgggcgaatccacgtcctcgatgcgcaaatcctggagcctcagcgacagagatcgaatccattcaggaacatctttcatctattaactcaacgagaggtcttacctcgaacgaaacaccatgctaaaaggatatggaataactctccaaaatatgatcctcatttaattgagttaaggttttcagatgcagatgctaaacttggtattttatcttgggcagaatcactgtccctgcatcgctggtctgccaagtattgccctcttttgccacctcctaggtcaactattgcagctgctttcagtccagatggaaaatcacttgcgtccacacatggtgaccatactgtgaaaataatggactgccatacagggaaatgtgtgaaggttttgagtggacatcgacgcactccttgggtggtcaggtaccatcctttacattctgacattctggctagtggaagtttggatcatgaggttcgtctgtgggatgctaatacttcagactgtattggatcacaagacttccatcggccaattgcgtccattgcatttcatggaagaggagagattctggcagttgcatcaggtcacaaattgtacatatggaactacaataagagagatgatgcttctgtcccaaccatcatactaaggacccgccgttcgttgagagctgtgcattttcacccgcatggcgctccatatcttctaacagcagaggttaataatatagagtctgcagactcaccgctgactctggcaagatcatctggatattcaaactacccttcggccctgctggtgtcaaacactaattctagattctgtccacttcctgagtccaatgtgacgtcaccgtgcttactgtggcctgcgtacctcagagatgatgggattttacatgtgcttggcaatgccagtagttcaaccattgtgcagcagagatcatcattagttcaaccttccacatcagatactgcaaatctacagcttgaacagtttgctacccctatggatgtatgtcctggagagccaacttcatttaataacatatcagatgcagtaactgtgcctacttcaaatgcaattgaaatgcatggtgctggcggccagtctaacccaagactgcagggcagcagctctattagtaatcttgagaggttcagtgctagagatgctttgcaagtgtcttccctgagcagcattgagccaatcccatcaacagctgggtcttcgggatccaattcacgccgtgctatgccactgaatatgctcctcactggtggattagatgttcaaatgttccaaagaaatgtaggaagtggacaacaggatcattttctcttcggcgactcaagtaactgggaagtgccatttgtgcagggttttttgatgacccaaaaccatacaggtgcttcatcatcgattccccttacttctggcagttctaggagaccaaatcgacactatgcctcacgctctgtgcctggggttgggagtttgctcctagtaggtcctcaaattgacgaagctgaagctcatgctgcttcactaggtgctggttcagaaatcactgcgtcgatgcttgctcctggtactgaattgccttgtacagtgaagctcagaatatggcggcatgatatcaatgaaccatgtgttcctttagcacctgaggcatgccgtctgacgatttctcatgccgttctttgcagtgaaatgggtgcccatttttccccatgtggacgatttcttgtagcctgcgttgcatgtttgttgcctcaaacagaaggtggccgtggtagccaattgcctgtgccttatgaagaggctggatcatcaccaactcgtcatccacttccctctcaccgagttatttatgagcttcgggtttattcgcttgaggaggagacatttggggatattcttgcttctagagcaataagggcagcacattgcttaacttccattcagttctcacctacatccgaacacatacttttggcatatggtcgtcgtcatagctcgctgcttaggagcatagtcgtggagggagaaaatgggattcctgtatatactattttggaggtatatagagtttcagatatggagcttgtgagagtgcttcctagtgccgaagatgaagtcaatgttgcatgctttcatcctttaccaggaggtggccttgtttatgggactaagggaagctcaggatccttcaacacaatggcgcaaacatgataaacatggggtcgggttgcttcattgaggaaaatatggttgagatccagaggtatgcattggaatgctgaataagcttgaccacatcatgtgaattttaggcttacttccatgaaagacttctctgcaggcttcatctgtgtgatccgtccaagggaaaacattagatccatctccaactacattagaacagataattctcaatgggctctttcaagtgccttggggactggtatgggactctttgcactttaggattaactaatattcctggtatggatataatatcttttctctgctgctagctacaagggacgtctttgcaggggcggcaggagatgtaaatctacatggccaccgtcgtggctgccatcacgatgctgtaattataccttttgtacatgtattccaatcagcttaactcgattgctgttgtatttcagaacgttgacggtgctaatacttctgaagtctttttgttgtatacttcacctatcctaacaagcggtcgatgatgcaagaaattacaaaggcgaatgggattctctgggtttgattttacacgtgataatcatgtatttttttcctgttctcgtctgggttgattaatcattaaacgtttggagtttctatatctgtatgaaatagcatctgttgcaacataagaatatggttgacactaga

SEQ ID NO: 103309 - DNA, 2668 bp, Zea Mays
ccccgacggagccaagcgacggttcatcttcttgcggcggcggcgacctcgagctgattgcagcgagaaggcggggacaaatcgatctcccctagctggctacacccgatggagccgagggttccttgcgttgacggcggcggcgacggcctcgagctgagggccgcgagaaggcatcgacgggagggcgggcgaatccacgtcctcgatgcgcaaatcctggagcctcagcgacagagatcgaatccattcaggaacatctttcatctattaactcaacgagaggtcttacctcgaacgaaacaccatgctaaaaggatatggaataactctccaaaatatgatcctcatttaattgagttaaggttttcagatgcagatgctaaacttggtattttatcttgggcagaatcactgtccctgcatcgctggtctgccaagtattgccctcttttgccacctcctaggtcaactattgcagctgctttcagtccagatggaaaatcacttgcgtccacacatggtgaccatactgtgaaaataatggactgccatacagggaaatgtgtgaaggttttgagtggacatcgacgcactccttgggtggtcaggtaccatcctttacattctgacattctggctagtggaagtttggatcatgaggttcgtctgtgggatgctaatacttcagactgtattggatcacaagacttccatcggccaattgcgtccattgcatttcatggaagaggagagattctggcagttgcatcaggtcacaaattgtacatatggaactacaataagagagatgatgcttctgtcccaaccatcatactaaggacccgccgttcgttgagagctgtgcattttcacccgcatggcgctccatatcttctaacagcagaggttaataatatagagtctgcagactcaccgctgactctggcaagatcatctggatattcaaactacccttcggccctgctggtgtcaaacactaattctagattctgtccacttcctgagtccaatgtgacgtcaccgtgcttactgtggcctgcgtacctcagagatgatgggattttacatgtgcttggcaatgccagtagttcaaccattgtgcagcagagatcatcattagttcaaccttccacatcagatactgcaaatctacagcttgaacagtttgctacccctatggatgtatgtcctggagagccaacttcatttaataacatatcagatgcagtaactgtgcctacttcaaatgcaattgaaatgcatggtgctggcggccagtctaacccaagactgcagggcagcagctctattagtaatcttgagaggttcagtgctagagatgctttgcaagtgtcttccctgagcagcattgagccaatcccatcaacagctgggtcttcgggatccaattcacgccgtgctatgccactgaatatgctcctcactggtggattagatgttcaaatgttccaaagaaatgtaggaagtggacaacaggatcattttctcttcggcgactcaagtaactgggaagtgccatttgtgcagggttttttgatgacccaaaaccatacaggtgcttcatcatcgattccccttacttctggcagttctaggagaccaaatcgacactatgcctcacgctctgtgcctggggttgggagtttgctcctagtaggtcctcaaattgacgaagctgaagctcatgctgcttcactaggtgctggttcagaaatcactgcgtcgatgcttgctcctggtactgaattgccttgtacagtgaagctcagaatatggcggcatgatatcaatgaaccatgtgttcctttagcacctgaggcatgccgtctgacgatttctcatgccgttctttgcagtgaaatgggtgcccatttttccccatgtggacgatttcttgtagcctgcgttgcatgtttgttgcctcaaacagaaggtggccgtggtagccaattgcctgtgccttatgaagaggctggatcatcaccaactcgtcatccacttccctctcaccgagttatttatgagcttcgggtttattcgcttgaggaggagacatttggggatattcttgcttctagagcaataagggcagcacattgcttaacttccattcagttctcacctacatccgaacacatacttttggcatatggtcgtcgtcatagctcgctgcttaggagcatagtcgtggagggagaaaatgggattcctgtatatactattttggaggtatatagagtttcagatatggagcttgtgagagtgcttcctagtgccgaagatgaagtcaatgttgcatgctttcatcctttaccaggaggtggccttgtttatgggactaaggaagggaagctcaggatccttcaacacaatggcgcaaacatgataaacatggggtcgggttgcttcattgaggaaaatatggttgagatccagaggtatgcattggaatgctgaataagcttgaccacatcatgtgaattttaggcttacttccatggtctttgcaggggcggcaggagatgtaaatctacatggccaccgtcgtggctgccatcacgatgcttctttttgttgtatacttcacctatcctaacaagcggtcgatgatgcaagaaattac

SEQ ID NO: 103310 - DNA, 3234 bp, Zea Mays
ccccgacggagccaagcgacggttcatcttcttgcggcggcggcgacctcgagctgattgcagcgagaaggcggggacaaatcgatctcccctagctggctacacccgatggagccgagggttccttgcgttgacggcggcggcgacggcctcgagctgagggccgcgagaaggcatcgacgggagggcgggcgaatccacgtcctcgatgcgcaaatcctggagcctcagcgacagagatcgaatccattcaggaacatctttcatctattaactcaacgagaggtcttacctcgaacgaaacaccatgctaaaaggatatggaataactctccaaaatatgatcctcatttaattgagttaaggttttcagatgcagatgctaaacttggtattttatcttgggcagaatcactgtccctgcatcgctggtctgccaagtattgccctcttttgccacctcctaggtcaactattgcagctgctttcagtccagatggaaaatcacttgcgtccacacatggtgaccatactgtgaaaataatggactgccatacagggaaatgtgtgaaggttttgagtggacatcgacgcactccttgggtggtcaggtaccatcctttacattctgacattctggctagtggaagtttggatcatgaggttcgtctgtgggatgctaatacttcagactgtattggatcacaagacttccatcggccaattgcgtccattgcatttcatggaagaggagagattctggcagttgcatcaggtcacaaattgtacatatggaactacaataagagagatgatgcttctgtcccaaccatcatactaaggacccgccgttcgttgagagctgtgcattttcacccgcatggcgctccatatcttctaacagcagaggttaataatatagagtctgcagactcaccgctgactctggcaagatcatctggatattcaaactacccttcggccctgctggtgtcaaacactaattctagattctgtccacttcctgagtccaatgtgacgtcaccgtgcttactgtggcctgcgtacctcagagatgatgggattttacatgtgcttggcaatgccagtagttcaaccattgtgcagcagagatcatcattagttcaaccttccacatcagatactgcaaatctacagcttgaacagtttgctacccctatggatgtatgtcctggagagccaacttcatttaataacatatcagatgcagtaactgtgcctacttcaaatgcaattgaaatgcatggtgctggcggccagtctaacccaagactgcagggcagcagctctattagtaatcttgagaggttcagtgctagagatgctttgcaagtgtcttccctgagcagcattgagccaatcccatcaacagctgggtcttcgggatccaattcacgccgtgctatgccactgaatatgctcctcactggtggattagatgttcaaatgttccaaagaaatgtaggaagtggacaacaggatcattttctcttcggcgactcaagtaactgggaagtgccatttgtgcagggttttttgatgacccaaaaccatacaggtgcttcatcatcgattccccttacttctggcagttctaggagaccaaatcgacactatgcctcacgctctgtgcctggggttgggagtttgctcctagtaggtcctcaaattgacgaagctgaagctcatgctgcttcactaggtgctggttcagaaatcactgcgtcgatgcttgctcctggtactgaattgccttgtacagtgaagctcagaatatggcggcatgatatcaatgaaccatgtgttcctttagcacctgaggcatgccgtctgacgatttctcatgccgttctttgcagtgaaatgggtgcccatttttccccatgtggacgatttcttgtagcctgcgttgcatgtttgttgcctcaaacagaaggtggccgtggtagccaattgcctgtgccttatgaagaggctggatcatcaccaactcgtcatccacttccctctcaccgagttatttatgagcttcgggtttattcgcttgaggaggagacatttggggatattcttgcttctagagcaataagggcagcacattgcttaacttccattcagttctcacctacatccgaacacatacttttggcatatggtcgtcgtcatagctcgctgcttaggagcatagtcgtggagggagaaaatgggattcctgtatatactattttggaggtatatagagtttcagatatggagcttgtgagagtgcttcctagtgccgaagatgaagtcaatgttgcatgctttcatcctttaccaggaggtggccttgtttatgggactaaggaagggaagctcaggatccttcaacacaatggcgcaaacatgataaacatggggtcgggttgcttcattgaggaaaatatggttgagatccagaggtatgcattggaatgctgaataagcttgaccacatcatgtgaattttaggcttacttccatggcttcatctgtgtgatccgtccaagggaaaacattagatccatctccaactacattagaacagataattctcaatgggctctttcaagtgccttggggactggaaacattggtatccagtttactgattggaatcgtgtccttacaagcatcattagctcttacaacttgctgaagcaagctgccctacaaattttttccgctggatcaggagccttgaatatttgtccagttttgcaggtctttgcaggggcggcaggagatgtaaatctacatggccaccgtcgtggctgccatcacgatgctgtaattataccttttgtacatgtattccaatcagcttaactcgattgctgttgtatttcagaacgttgacggtgctaatacttctgaagtctttttgttgtatacttcacctatcctaacaagcggtcgatgatgcaagaaattacaaaggcgaatgggattctctgggtttgattttacacgtgataatcatgtatttttttcctgttctcgtctgggttgattaatcattaaacgtttggagtttctatatctgtatgaaatagcatctgttgcaacataagaatatggttgacactagacgtctacaagggctggtctagaatgccgtgctattgtcattattttttaagtttaccaagagctatctgaacgcgttccatt

SEQ ID NO: 103311 - DNA, 3342 bp, Zea Mays
ccccgacggagccaagcgacggttcatcttcttgcggcggcggcgacctcgagctgattgcagcgagaaggcggggacaaatcgatctcccctagctggctacacccgatggagccgagggttccttgcgttgacggcggcggcgacggcctcgagctgagggccgcgagaaggcatcgacgggagggcgggcgaatccacgtcctcgatgcgcaaatcctggagcctcagcgacagagatcgaatccattcaggaacatctttcatctattaactcaacgagaggtcttacctcgaacgaaacaccatgctaaaaggatatggaataactctccaaaatatgatcctcatttaattgagttaaggttttcagatgcagatgctaaacttggtattttatcttgggcagaatcactgtccctgcatcgctggtctgccaagtattgccctcttttgccacctcctaggtcaactattgcagctgctttcagtccagatggaaaatcacttgcgtccacacatggtgaccatactgtgaaaataatggactgccatacagggaaatgtgtgaaggttttgagtggacatcgacgcactccttgggtggtcaggtaccatcctttacattctgacattctggctagtggaagtttggatcatgaggttcgtctgtgggatgctaatacttcagactgtattggatcacaagacttccatcggccaattgcgtccattgcatttcatggaagaggagagattctggcagttgcatcaggtcacaaattgtacatatggaactacaataagagagatgatgcttctgtcccaaccatcatactaaggacccgccgttcgttgagagctgtgcattttcacccgcatggcgctccatatcttctaacagcagaggttaataatatagagtctgcagactcaccgctgactctggcaagatcatctggatattcaaactacccttcggccctgctggtgtcaaacactaattctagattctgtccacttcctgagtccaatgtgacgtcaccgtgcttactgtggcctgcgtacctcagagatgatgggattttacatgtgcttggcaatgccagtagttcaaccattgtgcagcagagatcatcattagttcaaccttccacatcagatactgcaaatctacagcttgaacagtttgctacccctatggatgtatgtcctggagagccaacttcatttaataacatatcagatgcagtaactgtgcctacttcaaatgcaattgaaatgcatggtgctggcggccagtctaacccaagactgcagggcagcagctctattagtaatcttgagaggttcagtgctagagatgctttgcaagtgtcttccctgagcagcattgagccaatcccatcaacagctgggtcttcgggatccaattcacgccgtgctatgccactgaatatgctcctcactggtggattagatgttcaaatgttccaaagaaatgtaggaagtggacaacaggatcattttctcttcggcgactcaagtaactgggaagtgccatttgtgcagggttttttgatgacccaaaaccatacaggtgcttcatcatcgattccccttacttctggcagttctaggagaccaaatcgacactatgcctcacgctctgtgcctggggttgggagtttgctcctagtaggtcctcaaattgacgaagctgaagctcatgctgcttcactaggtgctggttcagaaatcactgcgtcgatgcttgctcctggtactgaattgccttgtacagtgaagctcagaatatggcggcatgatatcaatgaaccatgtgttcctttagcacctgaggcatgccgtctgacgatttctcatgccgttctttgcagtgaaatgggtgcccatttttccccatgtggacgatttcttgtagcctgcgttgcatgtttgttgcctcaaacagaaggtggccgtggtagccaattgcctgtgccttatgaagaggctggatcatcaccaactcgtcatccacttccctctcaccgagttatttatgagcttcgggtttattcgcttgaggaggagacatttggggatattcttgcttctagagcaataagggcagcacattgcttaacttccattcagttctcacctacatccgaacacatacttttggcatatggtcgtcgtcatagctcgctgcttaggagcatagtcgtggagggagaaaatgggattcctgtatatactattttggaggtatatagagtttcagatatggagcttgtgagagtgcttcctagtgccgaagatgaagtcaatgttgcatgctttcatcctttaccaggaggtggccttgtttatgggactaaggaagggaagctcaggatccttcaacacaatggcgcaaacatgataaacatggggtcgggttgcttcattgaggaaaatatggttgagatccagaggtatgcattggaatgctgaataagcttgaccacatcatgtgaattttaggcttacttccatggcttcatctgtgtgatccgtccaagggaaaacattagatccatctccaactacattagaacagataattctcaatgggctctttcaagtgccttggggactggtctttgcaggggcggcaggagatgtaaatctacatggccaccgtcgtggctgccatcacgatgctgtaattataccttttgtacatgtattccaatcagcttaactcgattgctgttgtatttcagaacgttgacggtgctaatacttctgaagtctttttgttgtatacttcacctatcctaacaagcggtcgatgatgcaagaaattacaaaggcgaatgggattctctgggtttgattttacacgtgataatcatgtatttttttcctgttctcgtctgggttgattaatcattaaacgtttggagtttctatatctgtatgaaatagcatctgttgcaacataagaatatggttgacactagacgtctacaagggctggtctagaatgccgtgctattgtcattattttttaagtttaccaagagctatctgaacgcgttccatttggattgaggtgtattgaagtggatggatgaggattttgattagtagtggatttattccctcttaatccttgtagatttaggagaaaacgaacatggcctaaattatttttttcatttcttccctggtggaatattattagacgccagttacatttaatgctcggtcgacaaagttgtcatgaaaatcatggaatcatttggtttctttgggatttttatttttaaccctcaaaaaaataaaaaa

SEQ ID NO: 103312 - DNA, 955 bp, Zea Mays
agctcgattttgacagtaggttgctttatgtttttaaccctttggagcgcctttgcaacctttgatcatccttatctgcctttacgttttttgtgtggcaaccgtgctatttatggttaagtctgtctaggttaatcatgttttgtaaaaaatggatatggttctagtggaaaattgtttttctaaccttggaaaaattattctagtcccgttcatactattttctgcatttaggtgtttggtttcttagtcaccctcctttctatttgggaggcctccttgagacatattgtttggctttttagggacaaagtgactaagtttaggaggtaggaaccaacaccctcttagtgcatgttgtatggacactaaagttacttttgaactacatatgttacgtgtaaacacgatccagtaaaagaatgtttttatcatagcctctagaatatatatttctttggcagtagaatgattctaatgccttgctatttacaacttgatttaggtctttgcaggggcggcaggagatgtaaatctacatggccaccgtcgtggctgccatcacgatgctgtaattataccttttgtacatgtattccaatcagcttaactcgattgctgttgtatttcagaacgttgacggtgctaatacttctgaagtctttttgttgtatacttcacctatcctaacaagcggtcgatgatgcaagaaattacaaaggcgaatgggattctctgggtttgattttacacgtgataatcatgtatttttttcctgttctcgtctgggttgattaatcattaaacgtttggagtttctatatctgtatgaaatagcatctgttgcaacataagaatatggttgacactagacgtctacaagggctggtctagaatgccgtgctattgtcattattttttaagtttaccaagagctatctgaacgcgttccatt

SEQ ID NO: 103313 - DNA, 182 bp, Zea Mays
tagggtttgggagggctaatgggccgaaacaccaattgcggcccaactaacccacgcgacagctcccgaccgcaacgcaaacgtcaaaccaaataaattctactaccctagttgcgaatgttattcacaaaattccaaatccccaaaacaacaactggatgagggaaaaaaacaaaaagaac

SEQ ID NO: 103314 - DNA, 120 bp, Zea Mays
ccgcacctgagcgatcaacgaacggcttcagtgagtcccgccgagctattcccccccagttttgtggtttctttccccccttctcctacggtggcggctagggaccccaaaactcaattt

SEQ ID NO: 103315 - DNA, 108 bp, Zea Mays
ccttttattccaaattcaaatcagtcccaagtttaaaattccagatttttgtggcaaatctatcttctcatcaaatgttcaatttgaacatgatatgaactttatagg

SEQ ID NO: 103316 - DNA, 101 bp, Zea Mays
gtcgcttgtggttagctgatttttgtttgtgtggtgaaattagctctagcgtagcactcttccgatgttcgttaaaatgagtgaattatagatcatcgtcg

SEQ ID NO: 103317 - DNA, 1256 bp, Zea Mays
actgcgcgccaggcgtggttcgctctcgaggactagttcctcgggaatggggatgtgcgggcgctccacctcgatgcccagttccaccttttctctcagggggacctctccatgggagagtactgccgctaaatgaagggccttgcagactctccacgacctcggtgagccaatcgccgatcgtaccttggtgctgaatctcctgcgtggccttagcccccgctacggccacctgaaggctctcatcaagaggagcgtgcccttccccaccttccacgccgtgcggaacgagcttctcctcaaggagctcaccatggcgaatgaggcgcccactccagcctcggctctctacaacgctcctaccagcgctcagccgccttcagggggccaggccacccatcctccatcgaccggggctcctaccctccctccacccaccgttctggtggatccttgttcggcttccacgaccgatggaggtcgtctctccaacaagggcggccatgggggtggcgtcccctctcgtggtggtcccttcggccagggttgcggccacgcgtgtccgtccttctacaacccctggaccgggaccatcgccatgtggccgtgccaggcaccgagtgcctcccgtcccccggcaccggccctcctgactgcacctcactacggcatgccctcgacgcctccctacggtgtgctcgtcgtgccccaggctccacccgcgctcctgccccctgggacccccacatcgacgacttggtacccaccggctgatgggtgggacaatgcctccctcgatgctgctttcagcaccatggcaatgacccctccctcctccgactgggtgattgactctggtgcctcataccacaccactcccactgcaggcacgctctctcgctctcatcccccctttcctctcacccatcctcgatcgtcattggaaatggttccactctgccagtcacctcagtaggtgcctcggttctccctaggccgttttacctcaacgatgttctcgtagctccccacatcacttacaatcttctttctgtctgtcgattcaccactgacaactcatgttccattgagtttgacccctctggtttttctgtgaaggatctggccaccaggacccctctcgcccgctgtgacagctcggaaccgctctacacgctccagccctccaccgccggcgtgtctccacctcacgtcctggtctccacacctcctccaccacttggcatcgtcgtctc

SEQ ID NO: 103318 - DNA, 822 bp, Zea Mays
agatatagaacctagctcatgtctataaatacagcacaccccgtcgtcatcttcagtcctcggacacaagcaaataagagcaaatcatagctgaccgatccaaacaacacgcccccgctctctcccaggtccctaagtgaaccaccctgtctggctaggcatggcctattgcgcatttgctccatctgcaccacctcaatattctgagcttaagatgactctatacacaaacaaggaggtgtatcgttctgggccagatcaaaacggagtaaccatcacagagagatcaaacatgggcacaacctgggtcttctcgtggcctgtagccgatgggccaacacctgatgcgaacatcgtcggccaactccagggcactagtgttcaagtagccaatactcccgttgtggtgtaccactactccctgggattagtgttcgaggataaaaggtgagaactgatgcgcagacaaaactaatttgtatagtacgtacttccacaacctctctcaaggatcatgtagtttattcatcttttctgttctcatttttcaagaaagaaagcctactcacggcatttttcgctttccttcaacataccccgcgcgcgtgatgatgtatacctcatttttcaagaaagaagcctactcatgtacatacattaatcagaaaactgcaagtaacaaacgtaattaatgctgtcatcaactaaatgatatatagtatatatatgttcatgagaaaactagtttcttatattctgttgcacaacacgtacaggttcaatgggtccacactccaaatacaagggacctcccaaataaat

SEQ ID NO: 103319 - DNA, 861 bp, Zea Mays
agtcctcggacacaagcaaataagagcaaatcatagctgaccgatccaaacaacacgcccccgctctctcccaggtccctaagtgaaccaccctgtctggctaggcatggcctattgcgcatttgctccatctgcaccacctcaatattctgagcttaagatgactctatacacaaacaaggaggtgtatcgttctgggccagatcaaaacggagtaaccatcacagagagatcaaacatgggcacaacctgggtcttctcgtggcctgtagccgatgggccaacacctgatgcgaacatcgtcggccaactccagggcactagtgttcaagtagccaatactcccgttgtggtgtaccactactccctgggattagtgttcgaggataaaaggttcaatgggtccacactccaaatacaagggacctcccaaataaatggcgagtggagcattgttggagggacaggacaacttactatggcaatgggtactgtcaaacgcactgaagttgtgtacaaagacaataccaggatctcagaactcaaaatacatgcctatttcgctccagtgaattaagcctactacaactagtgtaagtaaaatactagattaattattcacacgagcaactataaaggctagtttggaaacccattttcacaaataatttttattttcttagaaaaatagaaatctattagaaaaatggagtttccaaactaaccgtaagaatatctttgcattctccctagtagatacaaatagagatttttctgggaaaaaacagaatcctttacctatgtacttttttattttgatctctaagctaggggatgtttagtttgaggaataactacatc

SEQ ID NO: 103320 - DNA, 850 bp, Zea Mays
agtcctcggacacaagcaaataagagcaaatcatagctgaccgatccaaacaacacgcccccgctctctcccaggtccctaagtgaaccaccctgtctggctaggcatggcctattgcgcatttgctccatctgcaccacctcaatattctgagcttaagatgactctatacacaaacaaggaggtgtatcgttctgggccagatcaaaacggagtaaccatcacagagagatcaaacatgggcacaacctgggtcttctcgtggcctgtagccgatgggccaacacctgatgcgaacatcgtcggccaactccagggcactagtgttcaagtagccaatactcccgttgtggtgtaccactactccctgggattagtgttcgaggataaaaggttcaatgggtccacactccaaatacaagggacctcccaaataaatggcgagtggagcattgttggagggacaggacaacttactatggcaatgggtttatgaggctactgcatccgattaacctccccaaggcgtgagctttatgcagtcatttagcctggagtttgtatccgtgtcacctagtactttacggtaataataagagactgtatctgtatgtttcggtaaactagagttctggtcacctcttgtactcttttgtattttaatgaaatttagaatccgagtgtttctcttttgtactgatgcatcagtagttgtacatgcatcggtagatcgatcttttgttctttctaagctgtgatttgttgttggccttcttgtataatggtatatgaaaatacctttagccgagccggttaggtgtttgagtagcacttcttagtgttagagtgt

SEQ ID NO: 103321 - DNA, 1018 bp, Zea Mays
agtcctcggacacaagcaaataagagcaaatcatagctgaccgatccaaacaacacgcccccgctctctcccaggtccctaagtgaaccaccctgtctggctaggcatggcctattgcgcatttgctccatctgcaccacctcaatattctgagcttaagatgactctatacacaaacaaggaggtgtatcgttctgggccagatcaaaacggagtaaccatcacagagagatcaaacatgggcacaacctgggtcttctcgtggcctgtagccgatgggccaacacctgatgcgaacatcgtcggccaactccagggcactagtgttcaagtagccaatactcccgttgtggtgtaccactactccctgggattagtgttcgaggataaaaggttcaatgggtccacactccaaatacaagggacctcccaaataaatggcgagtggagcattgttggagggacaggacaacttactatggcaatgggtactgtcaaacgcactgaagttgtgtacaaagacaataccaggatctcagaactcaaaatacatgcctatttcgctccagtgaattaagcctactacaactagtgtttatgaggctactgcatccgattaacctccccaaggcgtgagctttatgcagtcatttagcctggagtttgtatccgtgtcacctagtactttacggtaataataagagactgtatctgtatgtttcggtaaactagagttctggtcacctcttgtactcttttgtattttaatgaaatttagaatccgagtgtttctcttttgtactgatgcatcagtagttgtacatgcatcggtagatcgatcttttgttctttctaagctgtgatttgttgttggccttcttgtataatggtatatgaaaatacctttagccgagccggttaggtgtttgagtagcacttcttagtgttagagtgttcatgggcctggcccatgcattaggatttctatgttacctgtactgtagctagggttagggtt

SEQ ID NO: 103322 - DNA, 1564 bp, Zea Mays
cccaaaaccagccgtggagcgatgtcgttcttccccaacgcgcagaagcccctggcagtcgctcccttcttccatttcctggccaccaggcttctcacgtacgccacccctgccaacaggcgagcagagccgccgagtggccgctcggcctgggcaccgcctggctggccagtggatggctgccgccccgtcccaaccaatggagtaccagcgacgtttcgttaaatcccagccagccactcttctccctacgcaatccctctctcccacacggcggcaggcagcgactccatctccctggctcctcggacaccgaagctccatggccgcccagctccttccctagccgagctatggcttctcccatggcgccaccctttccctcggcgcccttcttccccaggccggtgtgcaggccctcttcctcctcatgccgagcgtccctgcgtccccttctccccctctgcaccatggctggttccttgttcccctcagaacccagcagggagagtaggcgccccttcccctagcggatccatgatgctaggaggatctcctcctcggccggcgctccaacccggcgtccatggcgtcggtgccctccctcagcagtgcgccgtcgacccgctccactcgccggccaacatcttccacaggacgtcgacgagctttcccacctccaatgtcgggaccgcgcgcgagcataagctcagggccccgctcggccctctcgttcgcgcgcagggtgcccctgcttccccatggccgagctcaacctgctaggacaagctgcaagcccctctgctcctactcgtccatggcgccctggaacttctcgtccagagtcttgcccctccttgctcttgtcgaagccgacgtcccctgctcctccatggcggcgagtcggtgcaggcaactactcccatgacgcctctgctccagccatggcggagactttctctggtccaagctcgagcaggtggcccaccgtcgcccatggccaacctcgccactccccctcagctccgatggttggtgctcgcagagctcttctagggtgttgccctccctgctccatggctcaagcctgagctcaccccatgggcgcgccccttctccacggcgttctgcagtagggagctcttctccccggtgcgcagaagcttctccatgggcatgccatccctgctgttccctgcgccctacttttccatggaaatcagcaggagcaatgccgcctagctctaggcccctgctcctcctctcttccccacaaaacagcagccgcagcgagctcgccgtcaacctcgcgcagcagccacgacgctagttcgcgcagccacatgggttctcgctgtgtcgcgccctcggcgtgctcgatgaaatgccgcagcagcagcagcgacgcccttcgctgcgtcgcgctcgccaggacgggcctcacgctattgatctgcgcagcatttgcgcgtcgtcgtcgaaacccgcggtgagctcctcgctgtcctgtgttccctgattttataaaataactgaactaataaagctgtgaaataattgtgta

SEQ ID NO: 103323 - DNA, 620 bp, Zea Mays
ctagcctagtggttaaaggcttccgattagcacctccaagacccgggttcgattcccctcgggggcgaattttccagcttggttaaaaaaattccttcgatgtgccacatccgctttcgagttacgatgtcatgtgcgccaccctccagttgggttgttgctaagtggacggttgacgtcggcccgttattgatggggttcgggaatttgctttcgggttacgatgtcatgtgtgccaccctccagttgggttgttgctaagtggacggttgacgtcggcccgttattgatggggttcgggaattttctcagccgagaccattgtttcagtctcttcttaatataatgccgagagggtggtcattcccaccctggccgagttttttatatcccattggtgagcagtgatactacagaataatggccaattaagcatgtattcattctagtaaggaacaatttattcattcaaactgcaaatgatgcaagacacatgccagtacagtaaaatatagccttttgtaagatagtaacgtctattgagctcttggccctaatcatggcaataacacttcactgttcatattgtggtatttctcacaatatgaagacaaagacag

SEQ ID NO: 103324 - DNA, 111 bp, Zea Mays
gtattgtaagtataactactgtagagaattactattgtaattatacatactgtacaaatttacgcaactgttttatgtacaccgtaaaaatttatagaaaactgatattgc

SEQ ID NO: 103325 - DNA, 568 bp, Zea Mays
atggttcttgtgtgcacttacatcaatcaggatgtttcagtttcattttgcttatatcatgttggagctgcaactgagactgagcttgaggaccgccaactaagaattgaggatgcaaaaaatgccacttttgcagctatagaggagggcatcgttccaggaggtggtgcggcatatgtgcacctatctacggttgtccctaagatcaaagaagcaattgaggaccctgatcagcgtcttggcgctaatattattcaaaaggcattggtagcacctgcttcattgattgcacacaatgctggagtagagggtgaagtggttgtcgagaagatcaaggagagcgattgggaggtgggctacaatgcaatgactgacaagtacgagatcctgatggaggctggtgtgatcgaccctgccaaggtgaccaggtgtgcgctctagaatgcggcctcagtagctggaatggtcctaaccacacaggccattgttgttgagaagccaaagccgaagcctcaagtggcagagccaccggagggagcccttaccatttaaaatttaacgttcttga

SEQ ID NO: 103326 - DNA, 504 bp, Zea Mays
atggttcttgtgtgcacttacatcaatcaggatgtttcagtttcattttgcttatatcatgttggagctgcaactgagactgagcttgaggaccgccaactaagaattgaggatgcaaaaaatgccacttttgcagctatagaggagggcatcgttccaggaggtggtgcggcatatgtgcacctatctacggttgtccctaagatcaaagaagcaattgaggaccctgatcagcgtcttggcgctaatattattcaaaaggcattggtagcacctgcttcattgattgcacacaatgctggagtagagggtgaagtggttgtcgagaagatcaaggagagcgattgggaggtgggctacaatgcaatgactgacaagtacgagatcctgatggaggctggtgtgatcgaccctgccaaggtgaccagacggttcagatcagttgagagggtagaactttggtttgagaattttggttcagatccactaggagttgtagagtag

SEQ ID NO: 103327 - DNA, 699 bp, Zea Mays
atggccatcacaagcctcctggtcctggacccctacttccgagggaagaagccgaggggagactacgggacggcgagcgtagaaggcaggctagacgacggggaagaagccagtggccgagagacaacagaccgcgtgaggcagcgacagtacgaggcacgccacctagcctgcagagagttcgcttcttctacgtactgtggcacagtggccaaccagagtcaaggttgtgcaccaccagattgcgttgtctcaatgtccttggctccgaaaaggtccagattaccagctccgggtgatgctgatgagctatctgtcattgaagaccaaattgcatggattgttcacataattacatccattgtcaagaagagcccgcagagaggtcgaggagcagcactagttgtttctctaacgttgatcaaggcaagcacatcaaggggtctcgggcacctccctctcattggtgttgtcgttgaactagttatggaagctaaaattgaaaagatgaaatatgagcatctgacgagggaggctgctttggcagagaaggagcttcttgaagaggagtacaagaaaaagtttgatgaggcaaagaaggaactatctctggagaatgatctagcaggcatgtgggttcttgttgctaagttgaaaagaggggctttagacatatctgatttgaatgttgatgattga

SEQ ID NO: 103328 - DNA, 2253 bp, Zea Mays
atggtgcacgaggggcagctgaagaacactgaaccggatatcggcgtcaacatgggagatgatgagttaatctatctgccagacatagaagaatatgatatggatgctctcatgggagacgaggaccagttgaacactgatcaggctattttttgtgaggaacacaacctcgacaaggtgtcatcgtccaagcgtcccaaacgcttcaccgtgcagcagcttcagcaacttgaatcttcgttccaaaagtgtagccatccagatgatgaaatgcgccaggaactggctgccaaggttggtataagtgcaaggcaggttaagttttggtttcaaaaccgacgctctcagattaaggtgaggtcctgtggaactgagaacaacaaatatcggcgacaaaacgctgagctgctcgcaacgaacatggaactcaaggagcaactgaaaggaatgacatgcagtagatgcgatgccccaacaataatgcagaaatggcagttgatggatgaaaatgctaagcttagggaaatgtactcgctcgccagtgcagaactgaccaagctcatgcaggaagcaaatctccctccctctgtgatactagaggatatggcattagttacttccatgaacccattgtccagcaatgctagcagcagtcgtagcaccatcaaccaggatgagcttctctcatatgttgagtgtgctatcaaagagtttgagatgctagtaagggatggtacgccgttgtggctgccgaccatcggtggcgacgtgctcaacagtaaggagtatgcctgccagagattcccaagattacatgggacgatccgcccagaagggtttgttgtggaggccacaagggacactgccatagtcaagggatcagccccagacattgttgacatcctcactgatgtgccacgatggtacaaggcgttcccttgcattgtagcagcactaagggcctaccacgtcatctttagtggaccttttgcatctggcaacgtgctaattcaggagctcctgcagataaatgtagatctatctgtggaatcacctcgcccgcctcttcgcaacatgaaatttctaaggattaccaagcagaatgcaaatggggactttgttgtagtggatgtgtcaatcaatgatgtccaaggaattcatgaacaacaaggcagccaacataagcataccatgctaccctctggttgcctcattaaagacaagggcgatggctattgtcaggtcacatggattgtccatgcagagtacgaggaggcctccgtgccacccctcttccgacagttctaccagtctgggctggcattcggtgcaagccgttggcttgcatcactccaaaggcactgtgaatacatggttgttaagcattccatccaagttccaactggttgtgtctctggctcaggggtgctcaccttgtctgctctgggtagatggaacctcctagagctggcacagcggatgatggcgatcttctacaagactacatctgggctgcccaccgtggaaccaggcaacattgtcaccaggtggggtcgtggctgcatgggcactacaggcgagatgcttgagccagctgtgcgcatggtactagggaattactttggcgccatggatgggcagccatcgcccctccaagtgctaagcgccaccacaactgtgtggctgccaggaacgcctccggagagtgtttttaactacctgtgcaatgggcaacgccgtggcgagtgggatgccttcgtctgtgccggcgcagtgcaggagttgagctcagttgccacgtgcccccaccttcatggcaatgctgtttctgttctctgccctaatgtgaccaatgcagctaacaacgccatgctgttcctgcaacagacaagcatcgatgtctcgcgcgcgctagttgtgtacagcgttgttgaagagaccatgcttcgttccgtcctggatgttagcgacgacacttcaaacttagtcctcctgccatctggattcgccatcctcccagatggccatggcagggctcaccatgccgctgcttccaactcctccagcgctcttgccggactcaacggaactgcaggatgtcttctcaccgcagcctaccaggtaccggtgccattcaacaatctccgtcatccagatgtgcaagagacctacgagaatgctggaaagcggatctgccatgcgataaagaagatcatggatgctgttggggcacctattgttgtcccaatctaa

SEQ ID NO: 103329 - DNA, 652 bp, Zea Mays
agcagtcgcgcgccctggcttctctcccagccgccgccgcctctatctctcccctcacctctctcctcgagccatggacgtcgtcgagccgcccgtgactgcgcgtccgccggcgcaacgaacaccaggccgtgaccccgcgtccgccggcaacagtggcgcgggcgcgacagcggacgccgcggcacgcagcgaggggcggcgcctcctgaggcgcggccgcctccgttcgagcggttcttccggtacctgcagtacgcgtggcgccacgcggcggcgcgggaggacgccgtcatggccgtggaggacgaggcgagctgcgcctccatggtggcggacatggaggtgggcctagtggtggacgcgcacgccagcctccgcgtgatggcgccgcggcggcccgggtatctgctgaggctggtggccggggtgcaggcgctcggcctcgccgtgctgcacctcaacgtggccaccgcgcccgacgcgacggcgctctacacgctcagcctcaaggtacgtacgacgtcgacactcgacacacgcttcctgataagcataacatagctagcaacggtctcttgctttcctccgttcacgggccaaccgtcgccgtgaaagactcaacactcatcagcatcattccctggctcgt

SEQ ID NO: 103330 - DNA, 285 bp, Zea Mays
tggacatgcagggatcagatcgaagcaaagaagatgcatgaggaagaggttcatattgcagtcggcaagaactcaagaaaggagaagcttaacatactatggtctgttgccaattttccaagggccgctatagttcttgtgcacgttcactggccctccaagtggatgccgttcatgggtggaagactgttatacaaattcgcggatgaaatggagaaagagaagcatagaaacacagaaatggcagcaatggtcaatatgttatctaagtacaaaagtctatgc

SEQ ID NO: 103331 - DNA, 201 bp, Zea Mays
atgcttgcgctgatggttgcgatgagatcacgcaccaagtcgctggcttgcttgatctggtcaaaattgccttccagctcgatgttcttttggttagggttagactcgtggtcgcggatggatagcttgacgcctgtaactctgcttagtgttgaccccacccttgtcgattatgccaccggccagagaggcgtccacact

SEQ ID NO: 103332 - DNA, 2215 bp, Zea Mays
ttgcgagcgattcgagttaaaaaagaacatacacaatcatatcaccaggccagggcacgcacaagcgagctgatctgcagcattatttggctgattttttaatcgttgacggtgggcgaacatatggcggatgactcgttcgacctccccagcgctagcgaggaggatgtgatgggaggcctggatgaggacgaggccatgaaggacctcgagaccgggatggacgatgaggactatttgccaccgacgatgaaggttggggaggagaaggagatcgggaacgaggggctcaagaagaagcttgtcaaggagggcgaggggtgggatcgccccgagtttggagacgaggtggaagtgcattacactggtacccttttggacggaacgaagtttgattcgagccgtgaccgtggaaccccattcagattcaaacttgggcaagggcaagtgattaagggatgggacctggccatcaagaccatgaagaagggtgagaacgcaatcttcactattccgccgggtcttgcctacggcgagatgggttcaccgcctaccatcccgcccaatgccacactccagttccatgttgagctcctttcttgggccagcgtcaaagacatatgcaaggacggtgggatttttaagaagatcatcgttgaaggggagaagtgggagaaccccaaggaccttgatgaagtttttgtcaagtacgaggtaaggctcgaggatggaactgttgtgtccaagtctgatggtgttgagtttgctgtcagagatggttatttctgcccggcactttcaaaggctgtgaagacaatgaagaagggcgaaaaggttctcctcaatgtcaagccacaatatggcttcagggaagaaggaaaaccagcgtctagagatgaagctgcagtgcctccaaatgctgtgctgcatatagatcttgagctggtctcttggaagactgtgatgcttatcggagatcacaagaggatcttgaagaaagttcttaaggaaagcgaaggctatgagggtcctaatgatggagcagtagtgaaagtgagatttattggcaaattggaggatggtactgtgtttgtaaagaaagggcatgatggtgaagagccttttgagttcaagacagatgaggagcaggttattgaagggcttgacataacggtagttaatatgaagaaaggagaggttgcgttggctagagtaccacctgaacaagcatttggatctgtagaaacaaatcaagatcttgctactgttcctcctaattctaccgtcttgtatgaagtggagcttgtttcctttgagaaggagaaagaatcttgggacttgaagaccaatattgagaagattgaagcagctgccaagaagaaagatgaagggaatgtgtggttcaagatgggcaagtacgccaaggcctccaagagatacgagaaggctgcaaaatacatcgagtatgacagctctttcaatgaggatgagaagaagcaatctaaagctctgaaagtcagttccaagctcaacaatgcagcctgcaagctgaaaatgaaagaatacagagaagcagagaaactttgcacaaaggttctggaacttgagagcacaaatgttaaggccttgtacagaagggcgcaagcatacatcgagcttgttgacctagagctagcagagttggatgtgaagaaagcactggaaattgatcctgataacagggatgtgaagctggtgtacaagaccctgaaggagagaatgagggagtacaacagacgggatgccatgttctatggcaacatgttcgcgaaatggaggaagcttgaacagctgcagaaggtgcccgggaagcaggaaccgcaacctatggccatcgacagtgccgcataagagatttgcgcccctttgacatgccccttagttagtgtgggaccagaggagaatctccttagtaaaatgtttatcatatgttaatgtctgtcatcttgcattttctttttcctgctaccatatgtattctgcctcatgcgtgtaatgtttcgtcgtctactcatgtaattttattgcggtgtcattgtataatggacctctgtgtgctaatatgggatcattttttaaggggcacagatcacaagatgtcgtcaccatcgttgatggtggggtgtttggttttagagactaacgtatcgctgatggtggggtgtttgattttaga

SEQ ID NO: 103333 - DNA, 261 bp, Zea Mays
atggctgacgaccaacgacaagggtgcagcgacacacaccacgaaccaggaagagccgaagacgacgtgcgtgaacctcacggggattcgcggcgtggactacacgccagggcgaggtccgagaacgccgacgaaattctggacgtcgagaacggtggatcaaggacgagcgccagggagctcacgcatggggctgacggggagctgagacgagcgcgtgtgacaaagctcagcgccaagctgctgctgtggagggtttga

SEQ ID NO: 103334 - DNA, 597 bp, Zea Mays
atggactcacatcttcgatattttaaacaaggatatgaactattgcatcaaatggaaccatatattaatcagaaatctggaaatgggcagcatgatgtcagaggcacacatcatcacagaactaggatgaaacctgaaaaaccaattgacttgcttaggaaagttgatggcaataatatgtgtgctgactgtggtgcttcagaacctgattgggcatcattaaaccttggcgcacttctatgcatagagtgttctggggtgcacagaaatcttggagtgcatatatcaatggttagatctctgacacatgatgtcagagtttgggagccatctgtaatcaatctctttcagtcattaggcaacatgtttgtcaacagtatttgggaagagacgctgccagatgataattcaagtgctgatggatcagacacatcacagtacctctctattagcaagcctaaacacaaagatgtattctctgccaaggagaagtttattcatgccaaggtattcactacattcacaactgcttatattcctttgttctttagcaatgtatggggtgttaaaaaccaaattatctccagtgaagaatga

SEQ ID NO: 103335 - DNA, 573 bp, Zea Mays
atggtgcggcttctcgggctacggagcctaagcttcggcccgaaggactcgccgcgggagatcccctccactgccgacgtggccccgcccgttggcagcagtgcctggcacgtgcgcttcttcaactccgccttcttctgcgggtggattttcgtcagctacctctacaagcacgaccatgctggagtgcacgactacatctgcaaccgcatgtacacgctcccgctgccggggctcgaggcctacctcttccaggtctgctacatgctcgtccacaagcctagcccttccctcgactgcttcgtcatcgacacctgcgccaagtcgctccgcatcgctctcaaggtgcactggttcctcgctgcagagcttgagctggaggatgatgacgatctcgatgggatcgatatggtgcaggagcagtgccaggatgcagcgaccgtgcagggcgagtggccaccgctggtccggccttcacttccatcccctgttgccagtccacgagaaaacacactggtgctacacgaatcaatgagaagcaaagtggaaaaccaccattaccaactaatttag

SEQ ID NO: 103336 - DNA, 333 bp, Zea Mays
accgagcagggagaacgcagaccagcggaccagggaggcaaccatggatgggagcaagggccggctgacatccatggttggggacaggaggcgagctgggaggatgagaacgacagagagcagagcgcatagaggagctcacaggcctgacaaaatccgagcagggaggagactttggcccagcatggagctcgacgcggccaggcgagcaggagatcagggaaccgcgacctccatggccgagcagataaccacggtgcgacggctgagggagaggcagagcgcgcgcgtcggcatgggagagagagctcaggggatgaagacgtgagcaac

SEQ ID NO: 103337 - DNA, 596 bp, Zea Mays
actcttccaaggccaagctccaacaagaacctgaacgaacaacgaggcatccagcatccgtcgcaactcgcaagcagcaactgtaccctaggcatctctgccttggtgtctctcccttctccggcttgcggccgcttggatcacgtcatccctacgtgtctgcactctgcacgacgacattaatggcggccttgaggatggcgcaggtgctgctgctgctcgtcttcttgatccaaatcatcaacgtcctcaccctccatgcgaggccgttgaagggccaagggggtatcgagatggcggctgcgtcggtgactggtggcgacgaagatcgcagggttaaccgacagtgccgcgctgtggtattggcggtttcgcttttttttaagattatacgaaagtatcaatgcaatgatacgaaacacaaaatgcagctggtggtgttggaaaagaaacagaaactcctccctaaagaaattgaactcagaaacggtggcttattacttgtacgtgatcttgttgcttggagccttggagccaagaaacggtccaccattatgttcaactattgcatggtcttggtgttagaagtaggatag

SEQ ID NO: 103338 - DNA, 1097 bp, Zea Mays
catcagcgctccacatcgccagccatgctcccgacgcacattcgctgcgtgctccctgcaagctccgtgcgcacgcctgctcctatgccgcgcgttcctccagctccagctcgttgaatcccctgcgctcgcccatggtgcccagcccctgttcctcgcttctccttgttcctgctgcggccgccgtgtggaagatgcagctggcggcggtgcaggctgacgccgaggtgatgctgccgagcagctccatcgcgacgctcctctccctggtgcttttctgcgccgcgccctgctctctggcgccgcaggctcaccggcgctcttccctgtgcccccaccgtgttcgcgcggacctctgcacctccatacgtcgcgcccagccgttcctcctccttgctcgccctgctctctgtccggccatggagatcgctcctggctcggatccggcgctcggctccttcttctcccttcccatggccggcttggggatcttgctcgcgagttcctggtcggattccctgcgtcctctccatcccccagttccagctcgcgacgctctctgtctgcttgccatggccgttgtgcgccgcgcgcgctgctccctggtgctcgctgcgctcctctgccggcttctcatgtgcgcgccctctcggatcgctcagccctctccccgtcgcgccgggttatgtccctgatgcgcgcgtcatcggtctttgccgtgccactgctccctgatctgcgccgcttcctagacgacctcgcgctcgtctttaatgtcgtggtcgcgcccaggttctttggcccgttctaggtgcaacgacctcccctacggggcatctcgtcgcctaaccatcagccttggtgtccattccactctccagcaaacctatggtggtagataagagacctcgaaagtttgttagatgaagaaaagagaaataaaattcgtgtagcgcccgtctggtgttcggcgaaatggttgaactgacatcatcgacgtttctgcgaactcgaagacaatatgctcttgtacctgtcaagcgcttgacaaattatctgaaccggaaaatcattaccgatctcgcggattcgagtaa

SEQ ID NO: 103339 - DNA, 569 bp, Zea Mays
atatgatatatatgaggttcctttgctcacatgtatttgcctgcacctatctaggtttagctctgttgattacatcttttgtgcagggctgatgagctatcccctgatgagcttgagcgcctcatgaatcatgaccatggttggttgattgccaacccccactagttcaaggtccctagctagttcctcaacaggaaaaagtactacaaggatggtaggttctctcaggttgtttccaacgcccttgacaagaagctcagcttagggatgaccttgagaggatgaagaagaccaggaaccaccatggtctgtcactactggggtctgcttgtccgtggcgagcacaccaagagtaccgaaaggcatggaaagactataggtgtgtcggagaatagataaagtcaatttggtgcctaccttggatgtttattatttgtaggatagatgaaccgttctggtttatgaaacttttgttgcgtattccaagctggttgaattgaatgttcttaagaactaatgtcattagaaaagttaaaagattcaataatttgaaatggtcttaccacacg

SEQ ID NO: 103340 - DNA, 351 bp, Zea Mays
atggcgacgttgaacccaaagcaagcatctggagatgtcctacaagccaataaaggaccattgttgagaaagaaagtggactgcacagagatcatcctccagctggagttagcgcaggagtccaggactctcaccgcccaagagttggaactgaagtgccacctcaaaatccgtagcatgagattggcaggcatcgagaactcaagaatgcggcagagatctaagctcacttacatccgatgtggagacgccaacaccaagctctttcatttgaaagcaaatgctcgcaagaaggaaaaactacatccactgcttacagtctcaaggtggcatggttttctcgcagcatga

SEQ ID NO: 103341 - DNA, 92 bp, Zea Mays
gacctccaacaactagaattgccatccactcttaacaaaattcggcgtaccggcttctccatgtcgtctgacaaggcactgggtcctgatgg

SEQ ID NO: 103342 - DNA, 171 bp, Zea Mays
atggcgcttaccatctcgtcggccgctggcttggccaccggcacgggaacgccgggacgtgagcgctcaagcctcgccgtcgctagagaagacaacgataactttggcaacacaacgttttcatggttccgatacaatactatgctacttgagcataccatgttattttaa

SEQ ID NO: 103343 - DNA, 1555 bp, Zea Mays
agcatccaacgttccttagcgcagaagcgtttcctggcatctccctgtcttcttcctccctctaccgagctccatccaggacagctcttccactgctccctcacgccagcagcagaccaccgacgcccttcttccacctcctgcccgcagggacatcctctggtccgaacgcgagcaggtgcccttcctccactgtgcccctcctcccatcggcataggagcttcccatggccggcgcgcacccctgctcgtgccttcacggccgtcggggcatcggctccgagctccatccctgctccatggcagctggcccctcgcccctgctctccccccttggccgcgcgtaggagctccctgggtcgaccttggccaggtgcatgtccatggcgcgacgcctctgcactcccagccgtggacagcaccctcccccttccctgctcctgccatgcaagctgagcgccctcccctgtttccctctcccggcgtcgagtttctccactctggtgccctccagcaggcgagcaatagtgccatagcgaatccccgcgctccctacgtcggtctctagccagctccccctgcgagctccctcagatctgggtcgatcaccaagctcccttcctctcccccatggagagtttccccctgcatctccccatggcgctactacctccaggacggagctcgacaccccaaaggttggaatccgaccccctctctgttcccctcaatttcgagcttccctggcgttttttgccctgcagaaattcccccctgggcgctggaggcgcctagctcacgctggagcacgcaaggcttgaccgacgccctttccatggctggctttgagcagtgggccgagcccctcttcttgccatggcacttgaccctgctcctcctctcttcccccacaaagcagcagccgcagcagctctttctccatggacgcccacaccccactgttttccctccttttccccatcgttgtgcagccccactgtggcgaacgccgctgttcctgcagctcgtgcatcgcggcgcgcgtcatgtgttcgacataatgctaaaaaggggcattgtgtcgtggacagcgccttggtggtgccctgtgtcctcgctactcgctgcacagcctcgtcttgcgcttgcctactctccaagcagcaccagtagcagcgctccttgcgctcgacctcggcaaggacgagcagccccatcctcgacgccaaaattcttcggtgagacctcgctgttccgtgttgcttgattttataaaataactgaacaaataagccatgaaataattgtgtatgtaggcatgtgcgacacgagtcagtcaggttgttcgctttagaaaaattgtgattttgttttatttacgattcagtcgatggcatgaatatgtgcgtgaaaatataattgtatgaatgaacgcgtgtagagaagaaaatgaagtagaaaagaactcgggtatttttattttgataggaaaattatgcgatgcattgtatgatgcgaaaactaagttacaaaatgcggattatgttttgggaaa

SEQ ID NO: 103344 - DNA, 239 bp, Zea Mays
cccgtccgtgtcgccagcgtcgacccgatctgcacagcggtgccggtccaccgcagcagccccatgctgcgccattgatctgcgcggttcggctgtctccgcgtctcgcttcgccgaatctgcgcagcgccgacgtgccatcgtgggaacccgtgcccttatcgacgtcacgccttgcgcatcgctcgtcggcaaagagcccaaactaatggcatgcatgcgcggcacgagtcggccag

SEQ ID NO: 103345 - DNA, 1442 bp, Zea Mays
gagaatggagactggagccgtctcctcctgtcctcccgagacccgactcaactttttctctgcacgccactgccaattccccgccagcagcagaaatcacactccgcttcatcttccgctggatccctagtctacgccggcctaacgccttgggacctccgctgctgttctctcgccggtcatttttggttcaggggctgatcgcttgatcggatcggtgtcgcagccctatacatcatacatgacgacgcccggctcctgtcctgcgacaaccgccgccacccaccctcccatgtgcgccgctagcgccgcaggtggatcgcaaaaaatggtgcgtccgcgactagtgctcttcggggactccatcaccgagcagtccttccgccccggtggctggggtgccgcactggctgatacctactcgcgcaaggctgatgtagttgtcagaggctatggtggatacaacacaagatgggctcttttcttagtacatcacatctttccgctggatggtttagcaccccctcttgcaaccactattttctttggagcaaatgacgcagccctgttaggaagaactggcgagcgacaacatgttccagtttcagaatataaaaataatctcaaaatgattgttaatcatttgaaggattgttctaattccatggttattgtgcttattacgccacctccaattgatgaagaaggaagagaaagatttgcacggtcactttatggacagaatgcgaggaagctacctgaaaggacaaatgaaatggctggggtctatgctggttattgcgtcgaactagctagagaaatgtgtataccctgtgttaatatctggtcaaagatgcaggagacagaaggatggcagaaactttacctaagtgacggtctgcatctgacacaggaaggaaacgcagttgtccacaaggaggttgtcgaagcattgagaaatgctggtttcaaagctgaacagatgccgtacgactttcctcatcactccaaaatagatggcagttgtccagaaaaggccttccaatgaaatgatttcgagttgtgtgatgttttggagttttggatcctgcattgaagattacgataacgtccaatgacatgagcttgagctgttacattttgggagtttgaaatcttgcgtatattttggagtttgagatcctgcattgaagattgtaatttcctccgtgcaaaattaaggacctaggcttctccaagatgctggtgttgcttcttctacacttacattttctggattaagacatgttagcttccatttctcgttattgtggtggatggtttggatattgaacgaattgaatattcggatatcatggtgttctgaagataccggatacagatctggatgactggatacagaaacggatactgatatgtagatagttgattagttgtcactt

SEQ ID NO: 103346 - DNA, 1367 bp, Zea Mays
tctctgcacgccactgccaattccccgccagcagcagaaatcacactccgcttcatcttccgctggatccctagtctacgccggcctaacgccttgggacctccgctgctgttctctcgccggtcatttttggttcaggggctgatcgcttgatcggatcggtgtcgcagccctatacatcatacatgacgacgcccggctcctgtcctgcgacaaccgccgccacccaccctcccatgtgcgccgctagcgccgcaggtggatcgcaaaaaatggtgcgtccgcgactagtgctcttcggggactccatcaccgagcagtccttccgccccggtggctggggtgccgcactggctgatacctactcgcgcaaggctgatgtagttgtcagaggctatggtggatacaacacaagatgggctcttttcttagtacatcacatctttccgctggatggtttagcaccccctcttgcaaccactattttctttggagcaaatgacgcagccctgttaggaagaactggcgagcgacaacatgttccagtttcagaatataaaaataatctcaaaatgattgttaatcatttgaaggattgttctaattccatggttattgtgcttattacgccacctccaattgatgaagaaggaagagaaagatttgcacggtcactttatggacagaatgcgaggaagctacctgaaaggacaaatgaaatggctggggtctatgctggttattgcgtcgaactagctagagaaatgtgtataccctgtgttaatatctggtcaaagatgcaggagacagaaggatggcagaaactttacctaagtgacgttttgatcctgcagtgacggtctgcatctgacacaggaaggaaacgcagttgtccacaaggaggttgtcgaagcattgagaaatgctggtttcaaagctgaacagatgccgtacgactttcctcatcactccaaaatagatggcagttgtccagaaaaggccttccaatgaaatgatttcgagttgtgtgatgttttggagttttggatcctgcattgaagattacgataacgtccaatgacatgagcttgagctgttacattttgggagtttgaaatcttgcgtatattttggagtttgagatcctgcattgaagattgtaatttcctccgtgcaaaattaaggacctaggcttctccaagatgctggtgttgcttcttctacacttacattttctggattaagacatgttagcttccatttctcgttattgtggtggatggtttggatattgaacgaattgaatattcggatatcatggtgttctgaagataccggatacagatctggatgactggatacagaaa

SEQ ID NO: 103347 - DNA, 1326 bp, Zea Mays
tctctgcacgccactgccaattccccgccagcagcagaaatcacactccgcttcatcttccgctggatccctagtctacgccggcctaacgccttgggacctccgctgctgttctctcgccggtcatttttggttcaggggctgatcgcttgatcggatcggtgtcgcagccctatacatcatacatgacgacgcccggctcctgtcctgcgacaaccgccgccacccaccctcccatgtgcgccgctagcgccgcaggtggatcgcaaaaaatggtgcgtccgcgactagtgctcttcggggactccatcaccgagcagtccttccgccccggtggctggggtgccgcactggctgatacctactcgcgcaaggctgatgtagttgtcagaggctatggtggatacaacacaagatgggctcttttcttagtacatcacatctttccgctggatggtttagcaccccctcttgcaaccactattttctttggagcaaatgacgcagccctgttaggaagaactggcgagcgacaacatgttccagtttcagaatataaaaataatctcaaaatgattgttaatcatttgaaggattgttctaattccatggttattgtgcttattacgccacctccaattgatgaagaaggaagagaaagatttgcacggtcactttatggacagaatgcgaggaagctacctgaaaggacaaatgaaatggctggggtctatgctggttattgcgtcgaactagctagagaaatgtgtataccctgtgttaatatctggtcaaagatgcaggagacagaaggatggcagaaactttacctaaggaaggaaacgcagttgtccacaaggaggttgtcgaagcattgagaaatgctggtttcaaagctgaacagatgccgtacgactttcctcatcactccaaaatagatggcagttgtccagaaaaggccttccaatgaaatgatttcgagttgtgtgatgttttggagttttggatcctgcattgaagattacgataacgtccaatgacatgagcttgagctgttacattttgggagtttgaaatcttgcgtatattttggagtttgagatcctgcattgaagattgtaatttcctccgtgcaaaattaaggacctaggcttctccaagatgctggtgttgcttcttctacacttacattttctggattaagacatgttagcttccatttctcgttattgtggtggatggtttggatattgaacgaattgaatattcggatatcatggtgttctgaagataccggatacagatctggatgactggatacagaaa

SEQ ID NO: 103348 - DNA, 432 bp, Zea Mays
ttgcaatcattgtttgtttaacagatttttggacatagttatatagaagttgcaatcacaccagaccagcagttgcaattacaccagacaacagttgcaatcattgtttgtttaacaaatttttgaacatagttataaagaagttgcaatcacaccagaccaacagttgcaattacaccagacagcagttgcaatcattgtttgtttaacaaatttttggacatagttatatagaagttgcaatcacaccagaccagcagttgcaatcacaccagaccagcagttgcaatcatatgtttttaacaaaatttccagagttattcagtacttgcaatcacatcagagcaactcagcagttgcatccacaccacaccagcagttgcaattacaacacaccagcatttgcaatcattgtgtttacatttttaacag

SEQ ID NO: 103349 - DNA, 586 bp, Zea Mays
gaggagagaggtccgaggaattccagcgccgagaactcagcacgggcgtggcgatttggcagacagggagaagagaccgagctgggcgaacagaggaggagaagggagcagcgagggcgcggctgctggcgcgcgcaggaaggagcttcagggcgcagcgagctggggtccaagcactggccatgggagcaaggaacatactggagcaacagagacgcgcgcggctgagggaacggaagggaggaagaagaccacgacgctggggctggagctcgggcgagcgcacagggagacggcaaggctgaacggaaaagtggctgggcgcgcaggagactccacggcacagggagcaatcaagactgggcgccatgggaaactcgccgacagagaggggagagatgagagagaaaggagcgcgcgaactggaggaccgcagggacgcgcgcgagccatggcgggggactcggctggggatgagagcggagcaccatgggactttgcggcaggaagcagaccagagagagaaaggcgcggtggacagaagcaagcgatgccgcggctggagaggaagaagaagcagattgcg

SEQ ID NO: 103350 - DNA, 216 bp, Zea Mays
atggccgagcagaggaactccggccgggcgagcgggagagagaacgcgaggtctaccaggggaaaagtagggagcgagcagggcgcgtcagagagctcagcacgcggcagggaagagggaggagcagggagcttgggcgcgccagcagaagtgcggacacggtgcagcaggcgttggggcgtgcagcgcgatggaaggaagtcggagatggcatga

SEQ ID NO: 103351 - DNA, 734 bp, Zea Mays
cacaggttcatttttttccatcgtgtcccctaactgggaaaaaataagaaaaggtacaagccatcgcccatgttttattgaacaccatgtatatgtccacgcatatatgaccatgttctacaggttggtttacatagtatatgaccatgttatgttgcatggcagatatgtgaacaccaaaaggggacgcaactgcgaactgtgagaaattttccacatactacactcacattgtctgggacaatgggatagcatactcatacagtaatactgctgcctgtcgatcttaacaaatttcattcaagaactagggcatgctaatgttcaaaagagttgtcagcgattcatgacacctggtagcactataaccagcaatgtatggatgaattgaaggaagtaaagaagacacacaatcttacagaaactttacagaaactctgcatcttgaaactgccatgattgacaaagaagctggatgcatcatgtgcattggtgtcttcttatcaccatgcattaaagtgaagcaagttcatttgttgactaagaatggatgaacacaaatcagtggagttcgttgcactagagatggaggttggagaggtgtggtaggtgtcaatatggctttgatacaattttgcccgtacaatctttgtacggaaaagaaaaatgacattgtacgtggatactatattgtaattcaataatttttttctaaataataaatatatttgttt

SEQ ID NO: 103352 - DNA, 444 bp, Zea Mays
atggatgttgatccggccgccgaggcggccgccgaggctgaggagcatgcacttgaggattacaatgagcaccttgttgagatggcgttgtttggccataatgtggatgctgctgtcaacatcgacgcggtggagccacagccaacaccgaccatggccgggacagtgacggggtcttcgagccccgctggcactggtagtggtagcactgttcgtgacacccgatccaggaagaggctacccacgtccagagtatggtctgactttgatgaggtaactggtgtagacgacaaaggtaagaaggtaagggtctctgccatttgcaaacactgcaaaactaccttgtctgctagatcttcctctggtactggacatttgcttaggcaccaacaacattgtaaagctaagattgagcatgatcgagctggcagattatgtgtgtaa

SEQ ID NO: 103353 - DNA, 656 bp, Zea Mays
gtgtgtgcgcgctccatcgctctcacgccgctcggtctgcgcgtccttgcgtccggatcctctccctccagctcggcgcccatccctgccgcgtcgccctctctctcatctccaagccgagacccccaccgtgaagcttccctgtggccgcgcctactccctctgcttctccctcgtggcgctcaaccttgccgagcttccttgccgcggctcttccacagcccggctctgccccagcgtcgatcgcccatctccatggccgcgcgccctccagttctatggccgtgccgcgcgtcctggagctcaccgcgcccggccaagcttccctgcgcacgcccagccactcctctctcccttgcagcgcgcatctctctgcttgcccaggcaccagctcggtcgctctgttgctgcttccgcggcggccgcaactcttcctctagtacgtgcgccccatctccctggtgctcggccagctcgcccatggcgcgccgtgctcctctgctctccctgccggccgagctccccatggcgcgcatctccctggccaaagctctctcttccctctcccatggcgcgtctcgagctccacctcgggtcgtcgtctccgagctcaaccccaaactgttgtgcgtcctgtcctatctcctagtcgaggt

SEQ ID NO: 103354 - DNA, 1026 bp, Zea Mays
ctttctgccaatcgcccatagcacccagccgcttggcctccctggtactcgctctccctcagtgctctggctcctgcttccctcgccagcgcgctccaatcccctgcacgcggagcttctcctctgccagtgctcctccatgtgtgcacggtccatcgctctcgcgtcgctcggtctgcgcgtccctgcgtccggatcctctccctccagctcggcgcccatccatgctgcgtcgccctctctctcatctccaagccgagaccctcgccgtgaagcttccatgtggccgcgcgtactccctctgcttctccctcgtggcgctcaaccttgccgagcttccttgccatggctcttccacagcccggctctgccccatcgtcgatcgcccatctccatggtcgcgcgccctccagttctatggccgtgccgcgcgtcctggagctcaccgcgcccggccaagctcccctgtgcacgcccagccactcctctctcccttgcagcgcgcgtccctctgcttgccaaagcaccagctcggtcgctccgttcgtgcttccgcggaggccgcagctcttcctctggtgcgcgcgccccatctccctggtgctcggccagctcacccatggcgcgccgtgctcctctgctctccccgccggcccgagctccctatggcgtgcatctccctggcaaaagctctctcttccctctcccatggcgcgtctcgagctccacctcgggtcgtcgtctccgagctcgaccccaaactgttgtgcgtcctatcctatctccgagtcgaggttcctgaaagtcgcctatagagggtgaatagggtgaatctgaaatttacaaacttaagcacaaactacaagccaggttagcgttagaaatagaaacgagtccgatagagagggcgcaaaacaaatcgtgagcgaataaagagcgagacacgatgatttgttttaccgaggttcgatttttgtaaacctaatccccgttgaggtggtcacaaaaactggatctctttcaacc

SEQ ID NO: 103355 - DNA, 411 bp, Zea Mays
atggtgaggtcgcggccgagccgggcaaggagcacgcggccagcaccaagggcgagcgccaaggagagcagtgatgcgacggtggcgcagataagccacagcaggagcggggattcggacggtacggtacgcaggggccatagccgagcagaggggcgccactacgcgcagaggagctggtcggactcggcggcccgatggagcagcagcggccagccatggccggacccgagggggccagcccccaagccgagcggcgcgtcgagggtagaacggcaccagggagatggatggttggcgctggagattgacggcggccatggagggactcggcagggagaaacagagcagaggctaggggaggaccgcgacgctgggaagaaggctaagccggagctccgcagcgtgtag

SEQ ID NO: 103356 - DNA, 1272 bp, Zea Mays
cgctaaactttaggatctaattcctttctattctagccactaatccgtcttctctggcggccatcagctggttcccttgctggctccgctggctctggactggagagcatacagacgcctgtctcctcgccatcctcggcccagcaacctcgattcctgcccaaggcttggtttggtccaaccaatcttgttgtgattgtaaccactgtagtcggagggctctgccaaatttatccaggtctgttattcctagacctccaatctcctttggcctggtcaggttcaatatttaatacgggtagaaaatgaatggtgaatgttcttgaataattttaatcagattcatatatgagtatatcacattgtacagatgggagccacttaatgcttagtagaaccatcaggtaccctctttgtagttcaagtgaactgggtaacacaaatctagaatagtggtgctctacatgtcagcatgatgcctttggttatgcattgtaccagatagatgctaaatcacaagcttttagttttgcagcatcttcttgctgtcagtgaccaccatttggttttgttgtaatgcctatagcatggccttctgcaatcattccctcaagtatccaacctttttatcagatggataatgacacatatgtctcgtttggttgccatatacctctagcctagcctgtattaggccagattgtgtggatacatacagtagcagtttgttttgttgtatgtcttaattaagagtggccattatgtatcctacctctttagaacatggataaggaaacatgtttcattttgttgccatacacctctaatctatcctgtataggcgagaccgtgtggatgcagttgcagtttgcttcattagctgaattaattaagaatggtcataaaggatggttttttttgcccgtataaatacatgctgcatgatatgaaggttgaaaccatgtgtaacttagtatattgtttgtaaagacactgaccattagtttatgggatatttcatccccgttgaggtatcatcatagccaagatccacttcctctgcttgacatgtcatggctgtagagagaaaatgtgagtgacaagagtaaaggacattcatattatgccatcgctcttcatatgttaattgtagaatttctggaggaacttaacttacctatcattttgatgcctcgacttctggatggggctaagtattttaactggctcagctgtcagcctactaatgtgcttctgcagttctttccctag

SEQ ID NO: 103357 - DNA, 548 bp, Zea Mays
tctggactggagagcatacagacgcctgtctcctcgccatcctcggcccagcaacctcgattcctgcccaaggcttggtttggtccaaccaatcttgttgtgattgtaaccactgtagtcggagggctctgccaaatttatccaggtctgttattcctagacctccaatctcctttggcctggtcaggttcaatatttaatacgggtagaaaatgaatggtgaatgttcttgaataattttaatcagattcatatatgagtatatcacattgtacagatgggagccacttaatgcttagtagaaccatcaggtaccctctttgtagttcaagtgaactgggtaacacaaatctagaatagtggtgctctacatgtcagcatgatgcctttggttatgcattgtaccagatagatgctaaatcacaagcttttagttttgcagcatcttcttgctgtcagtgaccaccatttggttttgttgtaatgcctatagcatggccttctgcaatcattccctcaagtatccaacctttttatcagatggataa

SEQ ID NO: 103358 - DNA, 294 bp, Zea Mays
atgccgtgtgatcacggtgccacgctcgcgctgaccgcgtgggggccgctgcacagggctttctcctacctcctacccgcaatcccgcatgttgcaacaaacccaggatgggttccatccggattcttcgccaatccgaactcaatctttctcttggcgcctataaaaaccggggccatgaacccctcgggcattcgtaccacgccgacgtcgagaccgtgggggagaaaaaggaaggtgggcgtctctgtggcctacggtcaccttacaaccacaccatggctcagaggatga

SEQ ID NO: 103359 - DNA, 1183 bp, Zea Mays
caccgttcttcatctgactctctcacggccacacgtactcggtctcatcctgagccgttctctacgtgcactctttgctctctctgaccaacaagccatgtctcctccgcgtttggttcctgctgtacgcgcctcctccttgttgtccgtccatggagctcgctccggcctcctgctccctcagtcggcactgtgctcggcttccagctcatcaagctcagcccccatggccgagcgccctcccagccatgacccccccggtgtttggccctagtcgctcgccctcaactgtgctgcgccaacgctccagccatggagtccctacgcgcacacctccactcggatttcgccaaggctcgtgctgttccctggcgcttcttcctgcgccgcgcccctggctcctctgttggccgcgcggccgtctcctgctccctgctcgccgagctccttgtgcaggccgcattcctctactcggccacggatgtcacattgtcggccgcggctttctctctctacttcacctccctgtgcgtggtagtgcccctctgctcgccacggcgcgtcgaactctcgcgccgagtccttttcctgctcggccgcccgtgttgctgttctttgcatgtgcgcagctccctgtgcgtcgctgtcctccctccccaactccctctggtccgcgctttcttcagttcggccagacaggacatcgttccctgctgcagttcgttgttgaatcgcctgctcgttgtctgtgccatcgaaactttccgagctgtgcgctcctctgtccggaccaccagcctacaattccagtattctcgccattgaagaatagtcgccgcactctgcgtcctcgccgtgttcgtgaagctgtcgtggagttgttgtcatttttcttcgcgtcgtgtgcacaccacgccgccgccttcgtatttttggcaagccccaacgtgcgctcacgctcatcatcccctgttcgaccttgtcgtcgagcttcgtctcagccttagcttgtcggtcacgctcgccagatgttcgatcgaggacttcagctgaaggccgtcgtcgttcaggcaactaccaaatcaaattgagatgtggtgagccgattcgctatttttactattggttttatgattgtaaaataagacgcatcgtatgtgtataagattaagttagaaatacc

SEQ ID NO: 103360 - DNA, 867 bp, Zea Mays
atggagtccctacgcgcacacctccgctcggatttcgccaaggcccgcactgttccctggcgcttcttcctgcgccgcgcccctggtcctctgttggccgcgcggccgtctcctgctccctgctcaccgagctccttgtgcgggccgcattcctctactcggccacgaatgtcgcgttgtcggccgcggctttctctctctacttcacctccctgtgcgtggtagtgcccctctgctcgccgcggcgcgtcgaactcccacgccgagtccttttcctgcttggccgcccatgttgctgttctctgcgtgtgcgtagctccctgcgcgctgcggtcctccctccctaactccctctggtccacgctttcttcagctcggccagacaggacatcgttccctgctgcagttcgccgttgaatcgcctgctcgctgtctgtgccgtcgaaacttcccgagccgtgcgctcctctgtccggaccaccagcctccaattccagtattcttgccattgaagaatagtcgccgcactctgcgtcctcgccgtgttcgtgaagctgtcgtggagttgtcatttttcttcgcgtcgtgtgcacaccacgccaccgtcttcgtatttttggcaagccccggcgtgcgctcacgctcatcatcccctgttcgacctcgtcgtcgagcttcgcctcagccttagctcgtcggtcacgctcgccagatgttcgatcgaggacttcagctgaaggccatcgtcgttcaggcaactaccaaatcgaattgagatgtggtgagccaattcgttatttttactattggttttaagattgtaaaataagacgcttcgtatgtgtatatgattaagttagaaatacc

SEQ ID NO: 103361 - DNA, 354 bp, Zea Mays
caacaacaaggcagtttcaccaaaatttgacgtgcggaaccttgtgaagcgtcacagaatggtgtatgatcttttgagggataagcttagctcaggtctccatgttgtctccactctccattgttgcaaccccccccccccggaaaagttaggatcttgattgtataataatgttgaaaagcattgttctatgtttcaaaataagtctgtcatagcagtgtcgtgtaaccatgaactgattgccaaaacaatgtcattgtcatgctcttcttatgaagatctggtatttggattatattggagtgaagaatttatttcaactatttttgatgagtaatggtcatgctaatcaag

SEQ ID NO: 103362 - DNA, 75 bp, Zea Mays
atggccgccgctatcacgcagcgcctgccccactccgccgcggcccagcgtgtgcagctgggcgccgctccgtag

SEQ ID NO: 103363 - DNA, 1033 bp, Zea Mays
caaagagtgagagcctccaactcgcaactccgccgcagcagagcacgcacgcagagaagctcatcagtgcccatcccctgctccagtgaggagagagatagagagtcgccgccgccgccgctgccgccatgaagatcctagtcgcggtgaagcgggtggtggactacgccgtcaaggtgcgcgtgaggccggaccggacgggcgtggagacggccaacgtcaagatgtcgatgaaccccttctgcgaaatcgccgtcgaggaggcgctccggctccgcgaggccggcgctgctgctgaggtcgtcgcggccactgtgggccccgcccagtccgctgaaacgctccgcaccgcgctcgccaatggtgcggaccgcgccatccacgtgctccacgatccggaccccgcgcggcccctcctcccgctcaccgtcgccaagatcctccgcgctgtcgcgctccaggagaagcctggcctcgtcatcctcggcaagcaggcgattgatgatgattgcaaccaaacaggacaaatgctagctggattgcttcagtggccacaaggaacctttgcctccaaggttatattggacaccgagaaacaaaaagctactgttgagcgagaagttgatggtggaattgaaaccatatgccttgatttgccagcagtgatcaccacggatttgagacttaaccagccaaggtatgcaactttgccgaacataatgaaggcaaagtccaaagttattaagaaagttgtccctaaagacctcggtgtagacattagatcagacatggaggttattgaggtcaacgaaccaccaaaacggaaggcaggggtgattctttcgtctgtcgacgagctcattgacaggttgaaaaatgaagcacgtgtcttgtaacaatttgtatattattccgactgaatatggtctgacgttcatttatgtaagttataataaaagcgttctccaaatgttcagaccatatttacaaataagagaagtgtttctacaaaccagtcaagatgctattccag

SEQ ID NO: 103364 - DNA, 2275 bp, Zea Mays
tctcgaaatgaagctccatcttctgtggctgcatccaaggtgcagcctagttctggtacagcagccaaaaaaagacaatcgaccttgcaattttaggcaaacagtaaagcacagccaaagacagccaagtccgtagttgggatgttgcggaaaacaccagaggaggtggtggatgagagactttcaggctcttatcagcccacaatcttggctagtgcaaaaagcaaggaggacaaacactatgtggacatgcagtgggctttgttcttctatgagtgcggtgtacctttcaatgccgcagcagctaggcagtttcagattgcaattgaggccacaacacagtttggttcagggtataagcctccaacaccttaccaactaggcgagccattgctacaagaggctgtgaagacaacaaatacaatgagggaggaacatgagcgtgcatggaaacactatggttgcacactcatgtctgatggatggtctgataggaggggacgccatctcattaacttcttagtgaacagcccagagggcacttattttttagagtccgttgatgcatctaagaagtacatgatgcatacatgcttgctgatttgcttgagaaaaaagttgatgagattgggagagacaagggttgtacaagttgttactgataatggtgccaattacaaagctgcaggcaagcttctaatggagaggattcctactttattttggagtccatgtgctgcacattgcttggacctaatgttggaggacataggaaacttgaaggaattcaagaaaccaattgcacgtgcaaggcgtgtgacaactttcatataccgacacgggagaattcttgctgccatgagagagaaaactggtggggctgatcttgtgaggcctgcagccactcgttttgctacttcctttctcacattgaagagcttgtacaagcacaaggatgctttgaaggctttatttgcaagcacagcttggactgataacagattgtcaaagaccagtgctggattggatgtgtataacattgtcttctccacacagttttggaattcagtagaagattgccttagagcttcagggccactacttattgtacttagggtggtagatggagatgagaggccagctatgccagaggtccaagcattgatgaaatgtgcaaaggaaaagatcaatcaaagctttgctgtccaaagcaagaagactttactcaagaaaatcataactataattcaacggcgttgggagaaacaaatggatcacccattgtatggggctgcaatgtatttgaacccaggaaagttgcatcctctcataagaaatgatgatgatgctactgttggtcagctaagaggttgctttcttgatgtgcttgcaagaatggtagatgatgaggaaactagagacaagatcaattctcaagcaatggattacgagtttcttagaggagcagctttttcaaataagatgaccaaagataacctacaaactatgaccccacttgagtggtggcgttcgtatggtggtcgtgctattgagttacagagatttgctagacgtttggtgagtctttgtgcgtcttcatcaggttgtgaacgcaattggagtacctttgaatttatccatataaagaaaagaaaccgattgttacataagaggttgaattctattgtcttcatttcctacaacagaaagatgaaagctaggttccaaaaactatgccagaagaaggggaaaaactttgatccattggttcatgaggacttcaactgggacaatgagtgggctgattctttgcatgtagtccctgaaggtgggcgtgggtgtgagtgtgaccttacatgggaccttgtggataatgccattggagcatcgcaagcacttcgtggccgaaacttaccaagaagggcccataatgtgtattcaagaagaaattctgttgctgcacaaaacatgtcagaggctgaagaggaagatgaagatgaagatgttcgacatgacgatgcagaaatcacagattgtgaagatgaatctaatggtggcaatgatggtgaagaaggggaggcacccaatatcccaggagagtttgatgatgatttttgagcgacgggagacggggagagtagctattgctagattgcattagcatatttgctgcattactaactgcagatagttactattaattatgccattacaaactatctatgtggctatttcagatttggacatttggtattgtgttgttttaaattttgtg

SEQ ID NO: 103365 - DNA, 100 bp, Zea Mays
agataagtgtcactcatatctcataaataagcattgtaaaataactcatacacaagtgtcctctaaatccaaaatgaaatactaattgaaaaacttagtc

SEQ ID NO: 103366 - DNA, 345 bp, Zea Mays
gaattcaagtctccacacttgtgcggccacaaaaatttgagttccattccatcttttcctgtacaaaaacttggagaaggcaataattagtagttagagacagttcaacaccgcacattgtgacatatcgtaaaggttatatggatgtaacatcttacctaaacagccatgctaggtttagttatatgaagctccttcaaccctgcatgatccaccaatgtctatcatctcattcaccaagaagtcgaacaaccgttctcgaacatttgctatctcatcaaacaatagctggaccaatatcatgatccaaactttccaagaaatgttcccatgaaacatttcaag

SEQ ID NO: 103367 - DNA, 2089 bp, Zea Mays
gccgcaacccctctctcattttcttcctcgtctacacctccttctctcctcctcgatacattcgagcacgcccggacgcggtcagaagggagaaagcagcaagcggcgccgggttccccctcccttcgtcgcccccgatcgacgccgatcggggccgactgctcgtgggggacgccgaccgaagcccgggcggcgctgcttcaatatacggaagcagtttctagttttcttcagttcgccgctgcagtttctagtttccagcggttcccaccagttgtctaataacttattgttgttgtacgtgaggatcaccatgctgtcttcttcagagacttgccagcttggttctagttctagcaaccctgtcatggatcagcagaatttacttcccaacaactctaacgtggatgaacagattttactcccaaatgcattagagcatgaggactacccacactatttgctcaatagtcatgaggtgggaatgccaagtggaagcctgattggtcagcaaaatacaagcttgagcttgtgggaaccagctggatctagctcaatggagtgcttagttgatcatgacaactttttccaggcaaaaagagaacatcttgcctcttctcggtctattggtgccccgttaagtatagagaggaggagacatgaaggcactagttcattgccttcacacaacctaaacatagacctcaacattaatcaggctgatcaatttggctctgatgatgttgatcttgcacatggtaatggacaaccaagagcaaatactgtcacagcccacaggggctctttcataactgagcatattctgcatcatggagtttcttcggatgctataggaaattcttccaggaatgcagagtgttttgttggtgcagcaggccaagacagtcatcatgcagcctttaagagaaagtatcttgatggatgtcatgcagagtcttctgctaacggaagctcacgcaatcgtcaccagaataatagtactctgctacctcctccgaccacctgtgaaagttttactatacccaccgcaacaaattttagtgttccgtaccatcctgtggagcagctaaaccagagtactaatattgctgcaagctctactttgtctgatcactattcttcatacagtgatccacgtggaaacgaattcgtgcgaaatacacggatgcgaataaaccctagtgattatgatcaatcgctgcccagtctattacctgaggggagtttcaggtgctcggcttaccaatctacacagcagcagtcatcatttattccagcgcaacctagacaagttagctcttcttctggttctcatagtcgatctcatgtgcctgctgttactcagttttcacaaaatcttcgccgtccatcaactgttagttttgggtcaagaattgggaattcttccacttctggttctacaataccaatacctgcttcacaagatcctggtacaagcttgttgggaagcgattatcctgagccacttttgttaggttctttgtttacagctgattcaacaaatttcttatctgcatctggaagcataagtaaccagcaaaattctggatccagctctagttccatgctcaggcctgctgttaatgttggaacacaagtccctgagttcaacgtatctcagccaagtacaactttaagaggttcatctgatgtgttcaggaggtccttaatttctgctggcatttctcattctagaagttcaagcatcccattgcagcaccgtggaaattcatccacatcacatgagattaggaatcatcagccaggatcaagctctcgtgcacatcagcagcaccccttaagacccggtcattcctctgtagacaggcagagctctggttacttggaccttcagtcttttatgcagaccatagcttcaagggaaggaggcagaccaatgtcagagatccgcaatgtcttcgatcagattcgtcaggggagaaatgcacgattggaggtcagatttacttcctgttttgcatattgttgttatagcatgccaggaggtgtaacattccgtgtcgtttgcacacatgattgaatcacc

SEQ ID NO: 103368 - DNA, 2905 bp, Zea Mays
gccgcaacccctctctcattttcttcctcgtctacacctccttctctcctcctcgatacattcgagcacgcccggacgcggtcagaagggagaaagcagcaagcggcgccgggttccccctcccttcgtcgcccccgatcgacgccgatcggggccgactgctcgtgggggacgccgaccgaagcccgggcggcgctgcttcaatatacggaagcagtttctagttttcttcagttcgccgctgcagtttctagtttccagcggttcccaccagttgtctaataacttattgttgttgtacgtgaggttgcttttgtcgtatttgccaggttgcttttgttgtatttgccaggttgacacacttggtgttgtaaatcattgctatttttgggtcatgacttgtttttattgaaatcaattggctgccaagggtacactaaatctttgatgcaacataataggatcaccatgctgtcttcttcagagacttgccagcttggttctagttctagcaaccctgtcatggatcagcagaatttacttcccaacaactctaacgtggatgaacagattttactcccaaatgcattagagcatgaggactacccacactatttgctcaatagtcatgaggtgggaatgccaagtggaagcctgattggtcagcaaaatacaagcttgagcttgtgggaaccagctggatctagctcaatggagtgcttagttgatcatgacaactttttccaggcaaaaagagaacatcttgcctcttctcggtctattggtgccccgttaagtatagagaggaggagacatgaaggcactagttcattgccttcacacaacctaaacatagacctcaacattaatcaggctgatcaatttggctctgatgatgttgatcttgcacatggtaatggacaaccaagagcaaatactgtcacagcccacaggggctctttcataactgagcatattctgcatcatggagtttcttcggatgctataggaaattcttccaggaatgcagagtgttttgttggtgcagcaggccaagacagtcatcatgcagcctttaagagaaagtatcttgatggatgtcatgcagagtcttctgctaacggaagctcacgcaatcgtcaccagaataatagtactctgctacctcctccgaccacctgtgaaagttttactatacccaccgcaacaaattttagtgttccgtaccatcctgtggagcagctaaaccagagtactaatattgctgcaagctctactttgtctgatcactattcttcatacagtgatccacgtggaaacgaattcgtgcgaaatacacggatgcgaataaaccctagtgattatgatcaatcgctgcccagtctattacctgaggggagtttcaggtgctcggcttaccaatctacacagcagcagtcatcatttattccagcgcaacctagacaagttagctcttcttctggttctcatagtcgatctcatgtgcctgctgttactcagttttcacaaaatcttcgccgtccatcaactgttagttttgggtcaagaattgggaattcttccacttctggttctacaataccaatacctgcttcacaagatcctggtacaagcttgttgggaagcgattatcctgagccacttttgttaggttctttgtttacagctgattcaacaaatttcttatctgcatctggaagcataagtaaccagcaaaattctggatccagctctagttccatgctcaggcctgctgttaatgttggaacacaagtccctgagttcaacgtatctcagccaagtacaactttaagaggttcatctgatgtgttcaggaggtccttaatttctgctggcatttctcattctagaagttcaagcatcccattgcagcaccgtggaaattcatccacatcacatgagattaggaatcatcagccaggatcaagctctcgtgcacatcagcagcaccccttaagacccggtcattcctctgtagacaggcagagctctggttacttggaccttcagtcttttatgcagaccatagcttcaagggaaggaggcagaccaatgtcagagatccgcaatgtcttcgatcagattcgtcaggggagaaatgcacgattggaggatttgcttctcattgaccggtcacttattatgagacgagctaatttgattgatagacatcgggatatgaggcttgatgtggataatatgtcctatgaggaattgctggcactaggtgaacgcattgggtacgtaaacacaggacttactgaagaaaagattttgagtaacttgaaacaatggaaatgtgtcttaaaatcattggatgatcctccaacaagtgttgaaccatgctgtatttgccaggaagactatgtggaaggcgaggacctgggcaggctggattgtggtcatgacttccacaccgcatgtatcaaacaatggctggttataaaaaacctgtgcccaatctgcaagaaaacagcactggacacctaaaaacatggctgcctttttccttaggaaaaagccggtagcggcagggcaagtggttgccatctaaccacaccctcccatgactagcaaagtatgttacacctttcccatcatcaacatacatgtgggaatctatactataggtggtacatggcacttgcctgaagccaatggctgtagaccatggagttttatcctttgtttttttcaatcttagatttgggatttaaaatttattcaatgacatttgatttacttgggcaatctgcgatatttgctatcatcatcgatcgcttatcatctcagattttgttgtttgatttgtgctgtgactagcagcttgtaattcgttcacctcgattcttgaacacgctgt

SEQ ID NO: 103369 - DNA, 857 bp, Zea Mays
gccgcaacccctctctcattttcttcctcgtctacacctccttctctcctcctcgatacattcgagcacgcccggacgcggtcagaagggagaaagcagcaagcggcgccgggttccccctcccttcgtcgcccccgatcgacgccgatcggggccgactgctcgtgggggacgccgaccgaagcccgggcggcgctgcttcaatatacggaagcagtttctagttttcttcagttcgccgctgcagtttctagtttccagcggttcccaccagttgtctaataacttattgttgttgtacgtgaggttgcttttgtcgtatttgccaggttgcttttgttgtatttgccaggaagactatgtggaaggcgaggacctgggcaggctggattgtggtcatgacttccacaccgcatgtatcaaacaatggctggttataaaaaacctgtgcccaatctgcaagaaaacagcactggacacctaaaaacatggctgcctttttccttaggaaaaagccggtagcggcagggcaagtggttgccatctaaccacaccctcccatgactagcaaagtatgttacacctttcccatcatcaacatacatgtgggaatctatactataggtggtacatggcacttgcctgaagccaatggctgtagaccatggagttttatcctttgtttttttcaatcttagatttgggatttaaaatttattcaatgacatttgatttacttgggcaatctgcgatatttgctatcatcatcgatcgcttatcatctcagattttgttgtttgatttgtgctgtgactagcagcttgtaattcgttcacctcgattcttgaacacgctgt

SEQ ID NO: 103370 - DNA, 2750 bp, Zea Mays
gccgcaacccctctctcattttcttcctcgtctacacctccttctctcctcctcgatacattcgagcacgcccggacgcggtcagaagggagaaagcagcaagcggcgccgggttccccctcccttcgtcgcccccgatcgacgccgatcggggccgactgctcgtgggggacgccgaccgaagcccgggcggcgctgcttcaatatacggaagcagtttctagttttcttcagttcgccgctgcagtttctagtttccagcggttcccaccagttgtctaataacttattgttgttgtacgtgaggatcaccatgctgtcttcttcagagacttgccagcttggttctagttctagcaaccctgtcatggatcagcagaatttacttcccaacaactctaacgtggatgaacagattttactcccaaatgcattagagcatgaggactacccacactatttgctcaatagtcatgaggtgggaatgccaagtggaagcctgattggtcagcaaaatacaagcttgagcttgtgggaaccagctggatctagctcaatggagtgcttagttgatcatgacaactttttccaggcaaaaagagaacatcttgcctcttctcggtctattggtgccccgttaagtatagagaggaggagacatgaaggcactagttcattgccttcacacaacctaaacatagacctcaacattaatcaggctgatcaatttggctctgatgatgttgatcttgcacatggtaatggacaaccaagagcaaatactgtcacagcccacaggggctctttcataactgagcatattctgcatcatggagtttcttcggatgctataggaaattcttccaggaatgcagagtgttttgttggtgcagcaggccaagacagtcatcatgcagcctttaagagaaagtatcttgatggatgtcatgcagagtcttctgctaacggaagctcacgcaatcgtcaccagaataatagtactctgctacctcctccgaccacctgtgaaagttttactatacccaccgcaacaaattttagtgttccgtaccatcctgtggagcagctaaaccagagtactaatattgctgcaagctctactttgtctgatcactattcttcatacagtgatccacgtggaaacgaattcgtgcgaaatacacggatgcgaataaaccctagtgattatgatcaatcgctgcccagtctattacctgaggggagtttcaggtgctcggcttaccaatctacacagcagcagtcatcatttattccagcgcaacctagacaagttagctcttcttctggttctcatagtcgatctcatgtgcctgctgttactcagttttcacaaaatcttcgccgtccatcaactgttagttttgggtcaagaattgggaattcttccacttctggttctacaataccaatacctgcttcacaagatcctggtacaagcttgttgggaagcgattatcctgagccacttttgttaggttctttgtttacagctgattcaacaaatttcttatctgcatctggaagcataagtaaccagcaaaattctggatccagctctagttccatgctcaggcctgctgttaatgttggaacacaagtccctgagttcaacgtatctcagccaagtacaactttaagaggttcatctgatgtgttcaggaggtccttaatttctgctggcatttctcattctagaagttcaagcatcccattgcagcaccgtggaaattcatccacatcacatgagattaggaatcatcagccaggatcaagctctcgtgcacatcagcagcaccccttaagacccggtcattcctctgtagacaggcagagctctggttacttggaccttcagtcttttatgcagaccatagcttcaagggaaggaggcagaccaatgtcagagatccgcaatgtcttcgatcagattcgtcaggggagaaatgcacgattggaggatttgcttctcattgaccggtcacttattatgagacgagctaatttgattgatagacatcgggatatgaggcttgatgtggataatatgtcctatgaggaattgctggcactaggtgaacgcattgggtacgtaaacacaggacttactgaagaaaagattttgagtaacttgaaacaatggaaatgtgtcttaaaatcattggatgatcctccaacaagtgttgaaccatgctgtatttgccaggaagactatgtggaaggcgaggacctgggcaggctggattgtggtcatgacttccacaccgcatgtatcaaacaatggctggttataaaaaacctgtgcccaatctgcaagaaaacagcactggacacctaaaaacatggctgcctttttccttaggaaaaagccggtagcggcagggcaagtggttgccatctaaccacaccctcccatgactagcaaagtatgttacacctttcccatcatcaacatacatgtgggaatctatactataggtggtacatggcacttgcctgaagccaatggctgtagaccatggagttttatcctttgtttttttcaatcttagatttgggatttaaaatttattcaatgacatttgatttacttgggcaatctgcgatatttgctatcatcatcgatcgcttatcatctcagattttgttgtttgatttgtgctgtgactagcagcttgtaattcgttcacctcgattcttgaacacgctgt

SEQ ID NO: 103371 - DNA, 417 bp, Zea Mays
atgacgacacgagcgagcgcggatcggcgccacagaagccgagcgcacggtgtcaacaacagagggggtggacgtgagctgggcaccatgagtgagctgttcggccaccagcgagggagtaagctgagcaggaaaaatacacagggcgcgcacgagctgagcgacggcaggacagacagatcggcaccatgggagagcaccagagaagggcagcggtggccggacgccatagctgagggcaggggcgagctcggcgtgcaaggagaagcaccggcgagctgggagcggaagagagctggacgctgcgtagaggctagcagaaagctttgcgagctagagcagatgcgcgcgcaggaaacatggccagggcgcggcttccaagggcgagcagagaaccagcaggacgcggcgggctga

SEQ ID NO: 103372 - DNA, 1870 bp, Zea Mays
aagtatgtcgtagcagcaagccaaacagatacaaatcagtacgtcgcctaagtatagctttgtgagcagcaggtgactcgtagccaagagtcgttacagaaatggcacacgatcacaaggtgctggacgcgctggacgcagccaagacacagtggtaccacttcacggcggtggtggtcgccggcatgggcttcttcaccgatgcgtacgacctcttctccatctccctcgtcaccaagctcctcggccgcatctactactcggaccccagctccaagacccccggctccctcccgcccaacgtctccgcagccgtcaacggcgtcgccttctgcggcacgctcgccgggcagctcttcttcggctggctcggcgacaagatgggccgcaagaaggtgtacgggatgacgctcatgctcatggccatctgctgcctcgcctccggcctctcgttcgggtccacgcccaaggacgtcatggtcacgctctgcttcttccgcttctggctcggcgtcggcatcggcggcgactacccgctgtccgcgaccatcatgtccgagtacgccaacaaacggacgcgcggcgcattcatcgcggccgtcttcgccatgcagggcttcggcaacctcgccggcggcatcgtcgccattgccgtctcggcggcgtttaagtcccgcttcgacgcgccggcgtacaaggacgaccccgccggctccacggtgccacaggccgactacgtgtggcgcatcgtcctcatgttcggcgccgtcccggctctgctcacctactactggcgcatgaagatgcccgagacggcgcggtacaccgcgctggtcgccaagaacgccaagcaggccacgtccgacatggcgcgtgtgctcgacgtcgacctggccgaggagcggcagaagccggtagaggagttggagcgccgccgcgaggagttcggtctcttctcccgccagttcgcgaagcggcatggcctccacctgctgggcacgacggtgtgctggttcacgctggacatcgccttctactcgcagaacctgttccagaaggacatgtacgccgccgtgaactggctgccgagggcggacaccatgaacgccctggaggagatgttcaggatctcccgcgcgcagacgctcgtcgcgctgtgcggcaccatcccgggctactggttcaccgtcttcttcatcgacatcgtcggccgcttcgccatccagctcggcggcttcttcttcatgacggcgttcatgctgggcctcgccatcccgtaccaccactggacgaccccagggcaccacgtcggcttcgtcgtcatgtacgccctcactttcttcttcgccaacttcgggcccaactccaccaccttcatcgtgccggcggagatcttcccagcaaggctgcggtccacctgccacggtatttcttcagctgcaggaaagtgtggcgccattgtcgggtcatttgggttcctgtacgcggcgcagagcacggatcccaccaagacggactccgggtacccgccgggcatcggagtgcgcaactcgctgttcatgctcaccggatgcaatgttatcggtttcctgttcacgttcctggtgccggagtccaagggaaaatcgctggaagagctctccggcgagaacgacgaggaggcagcaccgcagcaacagcagaccgtgccgacagatttgagtgaataaaacagagaaacagtacactcctactactacttgtcaatgtcttgtatttctgtagaactttcttttagtttcaggacgactattgtattgaactggcatgtttgaaggaaccgacgacagatctaaaagaccataattctaatcgaaataaagtaaatgct

SEQ ID NO: 103373 - DNA, 211 bp, Zea Mays
atggcggatgttggagatgccgtggtccacgtcccctcgctttcccttgccgccggcgagcctctggccggctattttgctctccccgtggagatacatggaggtagaagacagatggaccgcgggcacaaatttgaccaagcgcagggggctaactgcgcatcccgtgacccacttcaatagtaccaaaaggacctgtttgctggaataa

SEQ ID NO: 103374 - DNA, 126 bp, Zea Mays
tctttttttcagttttctattttttgtttttcctatttctttcctatttcaaatttcaatcattcaaatcaaattcaaatttcaaactgaattacaaatacaaaaataaatcccagcatgagattc

SEQ ID NO: 103375 - DNA, 564 bp, Zea Mays
cgtgtgcggcgttctcaataatcttgttgcgccgccggcctctaccgatcatcaccttcctagctacacgccactggccagtttctttcattcaccatgacgaagctccttcctctgttgttccttgcaatgatgatgctgaacgtcgcttgcagtgcggcacatcacaaggtggaattattggtgcacaaggtgaaggcggggacgacgacggcggaggggacgtcggtcgacaatcaccatgcgataccacggcccgagtatgatagctggagcagccctggaaacatgccgggaagtggccatgacgttgggagccaagaagttaagccatgagcagccttcgctctatacatttctagtacgtcgtagcaaagcttgcatgctagggtacgtacacatataatatatatatgcactatctatgtatacatgttgggttgttgttgccatatgtctggatgatggtatatctctttgttttgtgcacttgtgctgtttgtgtaataatggtcatcacttattatgtataccaatgtcaattccatactgaataaagaaaat

SEQ ID NO: 103376 - DNA, 666 bp, Zea Mays
attcgagaaacagtagaaggctaacgcgcgacgtccattctatcagcggaggccttccagattttttgtcatcatgatggaggaaatgaaagccaggacgaccaagttcgcagctatcgttcttgtatttgctgtagtcagccatggcctgatgagccctgccatggggatgctcgagaacaagggtgccggcggagagacgacgacgacggccacggccaggtccgcttataagcccacccttggtgttggcggcggaaccgccgtggacaaccaccatgccatcccacgagaccagtacagcagtcatggaggagacgacggagggagtggtggtgatacaaacaactagtgcgcaagcatgcagctgctcatgttctctctgtgtggtgccagtttctacatatatgcatgttgctctgtttgcgtggaagacaaaggatatatatatatatatatatatatatatatatatgtaattttgccgaaacactagttttcgtgatatatcttgtacatgtatatatgtacaaaaccctagtcttgtagcatcacaaaatctaccctctgcttgtacatgtatatactgcaccgcgcgctgattccttaagagcggtatatgtataatacaatatgataaattaacgatatttgtgtaataatata

SEQ ID NO: 103377 - DNA, 255 bp, Zea Mays
atggcactcccaaagcagacaagtggtggcgacacacccaggcttgatggcaacaacagttgtgtgaggtgttgtaggcttcgacagatgtggtggcggccatgggagacacaggtggctgcgacggtcgcgcgaggcgtggtcgcctccggcgatggcgaccacgtgaggcgtgggtggctccggcatcctccgatgatcatctcctccgatctggtggcctcagcggcgtcctccagcgacgacctccactaa

SEQ ID NO: 103378 - DNA, 199 bp, Zea Mays
cggttcaactaattttctcaggtctcatcatgaagcttcgcgtgttcatcgttgctgtcctgattgtgatcaacttgggcacctgcatggcaaaggttggatcttacggcacaactgtgtcagcgtcaccgaggcaaatccgagtacttaccgccgcaactgatggaagaaatggacctcccagcaatgatcaccagtg

SEQ ID NO: 103379 - DNA, 332 bp, Zea Mays
ggtcaaagtcatcaacaacatccatagaatgaagggaattgtgcctcagtttctctgcatccttttgattgctaccacctctagctctagtactgctctggcgaggaagctggccgagaaccaacgtggactgcaggcaggccaagtgcaagcggaaccagcaattaacgtcgacggaaggccctctactggctatggtgaccatgtctgcccccgaaacatgtttcctaactgcaataggttggatcaggcctcttccaacaataatcttggctaggtgaacggaaacatgtattattgtatagcaactaagaacatatatataggtatat

SEQ ID NO: 103380 - DNA, 582 bp, Zea Mays
ctcacacaatttaagaagagccatatttgaaacagttaagaattcatatataagagtgcatatatatatataatcctgccaagacaaaggtaatggagtcgtcacgcatgttccagccggccatcatcctgcttctcctgctcattgtgaccaccgatgtggcgcaggcggcgagggaatgcgagaaggacagcgagcgattccttggggcatgcatggcgtcggacaactgcgccaacgtgtgccgcggtgagggcttctccggcggcaggtgcagcaccttccgccgccgctgcatctgcactaagccgtgctaaattaacctactcccggcagttcgatggtggacgtttattctatttattggcttacttgattttttcccccctaacaataagaaaacgcacgtgctggcatgtacgttgtgttgtatatgcttttcttgctggcttcatttgctgattactgatgagttgtaaggtccctgcacgatccatttcacatggatatgatgcttaattgtattcctgcttatatggtatgtatatttaattaattaatgatggaccatcgagtttattt

SEQ ID NO: 103381 - DNA, 109 bp, Zea Mays
tactttatacaggtttctacacacagaatactgagctatcactaactacagtttcctcaaccaagaaaaaacttgatatggaaacagaagctaagcattagaatccttg

SEQ ID NO: 103382 - DNA, 631 bp, Zea Mays
acatgaacaagataatgaaccttgagctcattagaagataattcatacatgaacaaaataataaatattgagttattcataacatacttaatacatgaacaagataatgaaccttgagcatacatgaacaagatacatgacagtcatcagaatatacatgacagtcaccagaacatacatgacattcgtcataaataagaacgagataatgaacgttattaagaataggttgtcgatgcatggcgaacgatcgagcgatcttgtttagcactgcctagtgcagatgcagcggcggcggaaggtgctgcacctgccggccaagaagccctcaccgcggcacacattggcgcagttgtctgcgatcatgcatgccccaacaaatcgctcactgtacttctcgcattcccttgcctaaagaacataccggtggacacaatgagcaggagaagcaggatgacggccggctggaacctgcgtgacgactccattacctttatcttggcaggaatatatatatgcacgcttcagggattcacgaactatttattcccaattatttcaaatcactgttctttgagtgagagagaccatggaaccctgtttatttatacacaaggataccatcatgcaa

SEQ ID NO: 103383 - DNA, 111 bp, Zea Mays
ctttatcctcatccaacccaaccgaaatatatcatacaaaccattgggattgactctggctcgatcagcctaatcccctgaccgttgttatttttgccctaatcccgtcac

SEQ ID NO: 103384 - DNA, 110 bp, Zea Mays
cctaagatagaattttgggtgttacactgcggaagatgacgagcgtgacccaaaatcagtttggtttcatgcctgggagatcaactatggaggccattttcttactaaga

SEQ ID NO: 103385 - DNA, 943 bp, Zea Mays
ggatcagctcattccgggccttattccaggtggaaccaatggacctggtttggaatttggtacagcccattaaaagtgttcgtttcggcccgaactggaatcgaaactggcccggattaaaattttccttcacgccacggcctggaaccaacccttgtgtcgtaccctccggatcgaatcctggacgacgcgaccggcacggcggcggcgcacagccccgacgacgaccctccccgctgccttctccccgatctctacgacaccaattatagatggggaaggtgaacctcctccctcttgggatccggcaccaactccaaaagttctacactcagatgagacaggcgaggttaaggttcgacgactcctcgagggacatgccaagaactatcaagttacattgttgtttattttccctgtcttattgggaagcaaagtattggaaaaaaactgcatttagttgatgatccactagaagtttaggctatgtcccactcgagtctttatactgtggtgttgtctcttgttatgcaatgttccctgcatgatttttgtttttggcatgtctacaactggttcagctgttcggctgctcattatggttgcagtcaaccataagattgttgtcttagcacctttgatatgtcgtagcaaaaactgctagttcactctttgatatgtctagattgaaccagtccactctttaatatgtcttagcattgaacttgttttagatttaacaaatattcttgtcacggtgccagcagtatattaaatccgcattgtgcaatatattgtcaaacaagacttgggttgctagctttaactgcatggaatggaattagtccaggctgaaacaaacaggctttagtggccatcaggttttattccagagccggatctataacagaccaggtttcagtgaaccagccggatccactct

SEQ ID NO: 103386 - DNA, 507 bp, Zea Mays
gcgtacacataacagcagcacatcaagatccacatagcataaaccagatcttctctctttattataacttcaattcatttcctcatggcgctgctggccaagatgggcaccggtgtcctattgtttgctgctcttttcatcgtcatggccatggtcatgtcatcctgcagtgcagcaatagactactgccagtatgtggtgccgtgcaacgcgacgacgtgcttcgagtactgccagaagaacaactacaagaacttccagacgtactgcactccggggaaatactaccccatctgctgctgccgagtgccatgaacggccgccggcgtatattagaaaaggtttggtttcaaatgaaatggaggcacttcgatcttcctggttcgcttcctatgaggttatatccaggcgttcagcaataatgatttttgtaacggctaggattcaatataatatactgaatggatattattccttaccgaaaggcgtatgcatgaacttgttatt

SEQ ID NO: 103387 - DNA, 177 bp, Zea Mays
ctaaaattaagatctagctaatggtatatagtttacaatcgtttgaaacttttataaatcttatttatgttttcttacttgttattactcttgatacatatattcataatttgcacgagtacttaagaatatcaagtggacactaattatattgactacgccaagtagtaggagtac

SEQ ID NO: 103388 - DNA, 228 bp, Zea Mays
cgatgtcgttttcgttttcggagttactgttttcgatctcgtttccgagaaaaatatgaaaacaaaaatggttttagtgtttaccgatcatttgcgaccgttttcacccctacttccgacaattttttttggtttaatttggtatgtgtgtagtttttctatgtaccttgttcattatagtaaaaactgtagaagacacgacgtataatttgaaatagacaaagtgcg

SEQ ID NO: 103389 - DNA, 240 bp, Zea Mays
aacaaaatttccagagttattcagtacttgcaatcacatcagagcaactcagcagttgcatccacaccacacccgtagttgcaattacaacacaccagcagttgcaatcattttgtttacattttttaatagatatttgggtagaattatacagcagttgcaatcacacctaatgcggggttgcaatcacaccacaccagcagttgcaattacacctctttgtcctgacactaaaaccag

SEQ ID NO: 103390 - DNA, 492 bp, Zea Mays
gtaatcttctcccacacgtctgtgtgtccctctccatgcgttcctcttctcacgcagcctctcctcgcgccaccacctaccatcgcgccaccacttgccatcgcgccgccaccttccctctccctctcaccgctccacggtgacgagccccgccaccccgcgcctaccgccgacgagcagtgccactccgtgctaggtctattcaacaacaggcagaacagacacctctccaacaccccagatcttctattcaagaacttgctccaggctagagatgaagctcaaaggaagtgacttgtcaaattatcaatgaagaatgtcaggagcatttggtgaagagtgattggcatatgaacttctggaagttgaattttcaagacgtttgaagtcctaagacatttctagatcatgaaaattatgaattcttaagactagctttattgcctggctgtgttgttaactgtgtgtgaaaataaactgttgtttgaaacc

SEQ ID NO: 103391 - DNA, 1675 bp, Zea Mays
cacgcagcctctcctcgcgccaccacctaccatcgcgccaccacttgccatcgcgccgccaccttccctctccctctcaccgctccacggtgacgagccccgccaccccgcgcctaccgccgacgagcagtgccactccgtgctaggtctattcaacaacaggcagaacagacacctctccaacaccccagatcttctattcaagaacttgctccaggctagaggacatgaaccaatcagagagctcaagtgttgctcggggaagagggaaaacaaaaggatctggacttattatgaggatgaggagttaattaaagcactatatgagatatcttttgatccaaagtggaaaagtgagggaggttttaagaatgggtattgttatgttctagaaaatgaactcaaagcaaggctaccagggtgtggtctcagtgctattccacacattgagtctagagtgaggcattttaggaccaagtatggtgctattgaggtcatgcttgctaaagagtggttttaattgggatgacaacagaaaaatggtgcaatgtgagaaacatcaatatgaagcccattgtaaggataatcctgatgcaaagggactttatggtgttgcatttccatattttgataccttggctgctatatatggcaaggacatagctactggagaaggggccgaggggcttggtgaggctataactaacatggagaaagaaatagctatgggagaagattgtccagtagtggaagaggatatgatttctatggatacaccacaacggtctatggataataggaactcagatcattcaacttcatcgagcagcaaaagaaggaagaaacacaaagatagtatgtcaagtgacccattcttggatctagcaagtggaatccgtggtgatcttaacaaagcctcacaacactttggaaggatggcagaagtgatggagatggaagcaaaaaaggatcaaatgcaagagttacaagagaagtctgttgttgagttgactagacttggttttgggggtagtgaactcctcaaagccgctactatttttgtgaaggtccataatcagatgacgatgcttttcacgcttcctgagactcttaggagagaattcatcctcaacatgattgcagataataactagttgaattttagaattaatctcttatactagttgatgcatgtactcatgtttatagacctgtatgttctcatgtttatagacgtgtatgcactcccaaatgatcttgtatgtactcatgtttatagacctatatcctttcttcagatgaagctcaaaggaagtgacttgtcaaattatcaatgaagaatgtcaggagcatttggtgaagagtgattggcatatgaacttctggaagttgaattttcaagacgtttgaagtcctaagacatttctagatcatgaaaattatgaattcttaagactagctttattgcctggctgtgttgttaactgtgtgtgaaaataaactgttgtttgaaacctattatgtttgctagcacaaagctggtagttttatttgatgttcagcaagacaaataaagctgctaactttattggttgtttgtgttgtcaactgtttgtgaaaataaccagtataaagttgttgtttagaacatgttatttgtgctagcacaaagctg

SEQ ID NO: 103392 - DNA, 1799 bp, Zea Mays
cggaagagaaatttgacacttagaaatgtaacatttgccattatgcttatgtattattatatcttggctttattagtattatcacataagtggaagagttggaagatagaaaggaggataaagattaaagaacttagaagtcaatgtatgtaccatctaatctgtgagagcaatgttaagtgtataaatgaccttcgcatcgataggaaaatatttcatatattgtgtgagatgcttagagatgttggtggtttgaggggtacaagaaatgcaccattggaatagatagtagccgcattcttacacacactggctcatcatgtgaagaatagaacaatagggggtttcttcttaaggagtggtgagacagtgagcagaaacttcaatgcatgcctcctagcagtattgaagcttcaccaattgctccttaagaaaccagaacctatacctgagggctgcacagactttaggtggaagcacttcaagagttgcttgggtgcattggatggcacacatgtaaaggtgattgtcccaactaagctgaaggggagatataggtcaagaaaaagagaaattgtgacaaatgtgttgggttgctattatcttgttgatgctggttacacaaatgcaaatggtttcttagcaccatatcgaggacagaggtatcatctaggaggtttcactactcgacatgaaccaatcagagagctcaagtgttgctcggggaagagggaaaacaaaaggatctggacttattatgaggatgaggagttaattaaagcactatatgagatatcttttgatccaaagtggaaaagtgagggaggttttaagaatgggtattgttatgttctagaaaatgaactcaaagcaaggctaccagggtgtggtctcagtgctattccacacattgagtctagagtgaggcattttaggaccaagtatggtgctattgaggtcatgcttgctaaagagtggttttaattgggatgacaacagaaaaatggtgcaatgtgagaaacatcaatatgaagcccattgtaaggataatcctgatgcaaagggactttatggtgttgcatttccatattttgataccttggctgctatatatggcaaggacatagctactggagaaggggccgaggggcttggtgaggctataactaacatggagaaagaaatagctatgggagaagattgtccagtagtggaagaggatatgatttctatggatacaccacaacggtctatggataataggaactcagatcattcaacttcatcgagcagcaaaagaaggaagaaacacaaagatagtatgtcaagtgacccattcttggatctagcaagtggaatccgtggtgatcttaacaaagcctcacaacactttggaaggatggcagaagtgatggagatggaagcaaaaaaggatcaaatgcaagagttacaagagaagtctgttgttgagttgactagacttggttttgggggtagtgaactcctcaaagccgctactatttttgtgaaggtccataatcagatgacgatgcttttcacgcttcctgagactcttaggagagaattcatcctcaacatgattgcagataataactagttgaattttagaattaatctcttatactagttgatgcatgtactcatgtttatagacctgtatgttctcatgtttatagacgtgtatgcactcccaaatgatcttgtatgtactcatgtttatagacctatatcctttcttcagatgaagctcaaaggaagtgacttgtcaaattatcaat

SEQ ID NO: 103393 - DNA, 423 bp, Zea Mays
atgtcgactaaatttgatattccgaagtttgatagcataattagttttggtatttggcagattcagatgaaggctgttcttacccagttggttgttcaaaaggcattgcagatgcgacctgctgacatgaatgatgaaaagtggcaagatattgataagagagctttgttcgccatacaactcagtttatcttttcatgttctgcgtgaagtaatgcatgaaaaattcgtagcaacattgtggaagaaattagagaagctgtatatgaccaagagtcttacaaacaagctacgtctcaaggagtgtatttacactattcgcatgtcagaaagtacatctatgcagtcacctcttaatgaatttaattcaattattgtggaccttgagagtcttgatgtgaagataagacaattttgttggtag

SEQ ID NO: 103394 - DNA, 345 bp, Zea Mays
atgacctcgacgtgcggtggtggaggttcctcgatccggattaacggcggtggttcccaggtcggtggcggcggctccccgatccggagggcaagcggcggcgtccccgagttcccgaggaggcgacacttccaaggccggcgagcaagcggcggcgtccccgaggtcccgaggaggtggcacttccaaggccggcgagcaagcggcggcgtccccgaggtcccgaggaggcggcacttcgacgtgcgagtagcgacggcgacgcatgaggcgcgatcttcgagcgagcggcgtcacagaaggcccgagatgcgcgcaacgatgatcgcgcgtgacatcctctga

SEQ ID NO: 103395 - DNA, 101 bp, Zea Mays
cgattattgtgttttatgcctaccacatgtattatttacgccaaaaactgtacgagtttatgcttaaacacggagttcgtatatcagtttactgcatgcac

SEQ ID NO: 103396 - DNA, 159 bp, Zea Mays
actgggtgccggcaacacgaaaacaaaggcgagcgtcgatagccggcttggagactcggcacggctgagaaggggctcggcaagctcgatgaatggacgaggagtgaggggacgccgacgaggtgactccacggtggggcgaagcacagatgctgggag

SEQ ID NO: 103397 - DNA, 296 bp, Zea Mays
acaatgcatgtgcttaattatctaccatttactgattaatagtaaaaaaataatgaacatgcactaagcaaagattatgtcaaattacaatttacaagttggtaatgaatcatgacataacaagacatgttcaaactttggtagtagaacaagacattcaaatattcaataaagacgaattaataaaccatatgaggacatcttctagatatttcttattattttgttttcattgtatgcatataatacagcagcacgtggagctaggcgtaggacagaccttcttgacattaaag

SEQ ID NO: 103398 - DNA, 1840 bp, Zea Mays
ccgccggcccctccaccacctcgatctcatccgatgccctagctaggcgagcttcgcatggattcacctgcggctgcgtcgccttcgctgctccgggacgactcgtgccgccgccgctctccgtccaccgcgtgaccgcaccaccgcccgctgatgaccagcgccggcgtcaacgtaccgggcgacgacggggtcgggaacccggccgccgcgtccgggtccgcctccgccccagaatgccggacgatgcagcgcaggcggcggcgcctcgagccacaaggatccggcgacgccgccgcggggccgagctgggtgcgccggctccgcccggccgcctcccggttctcgccgtcgccgtcgcagggctctgcggacaggcccaacgacgaggagcaggaagaggatgacccggacgtgcaggagatggagctcgtcccgctcccgccggcggggccgcaggagctccagcctgccgacgtccccgcgcaggtgtggcccgtggcgttcggctccctgtccatggcggggcggatgcgcatgatggaggacaccatctcgctccacccggacctgtgcacctgggccgacggctcgcccgtgcacttcttcgcggtcttcgacggccacggcggctcccatgtgtccgcgctgtgccgcgaccggatgcacgagttcgtggcggaggagctgggcaaggagggggccgccttccttcggcggcggcaggagtggctggcgtggggcgacggcgccggcgccgagacgagcgccgcggcgttcgtcagggggccccgcggcgcgtggccggagcgcgaggaggaggagcgcgcgtggcgctcggcgctgcggaggagcttccgtcgcgccgacgcgatggcggcgctggcgtgcgcgtgcgggcgcgtggcgcgcccgagctgccgctgcccgctttccagcgtcgtctccggcatcgtcgggtccacggccgtggtggcgctcctcgtccgcggccgcctcgtcgtcgccaactgcggcgactcccgcgccgtgctctgccgcgggcccgccggcacgccgcccgtcccgctctcctccgaccacaagccaaaccggccggacgagagggcgcggatcgaggcggccggcggcctggtggtgttcaacaacggccaccgcgtgcgtgggatcctcgccatgtcacgcgcgctaggggacaggctgctgaggcctgaagtgatcgcggagccggagatcaccgtgacggagcggacggcggaggacgagtgcatgatcctggcgaccgacgggatgtgggacgtgatcgccaacgacgtcgcctgcaacgtcgcccgccactgcctggaggacgggaacccgcctccagccgccaccgccgccgccgccaccgccggccgcgaggaggagccgcggtgcgtccgcgccacctcgctcctggccaggctcgccatcggcagggagaccctggataacgtcagcatcatcgtcgttgacctcaagcacagggagtgaatgactgagtgcctgcctgcctcgcttgcttgctctgtcgccgtgcatcagcagcttagtcgatctaggagtgaactggtaccgtgagaggaggtgtgatcgtctagacctggcatttccttcgttctttcgattcgaagataagattctagctgtttccttttttttggagagaaagaaagtggatggaagattgccgtccttaattaaatgaagacaacaacaacaacaaaaaaagagaggaaaaagagagcaattgtacagagtatgatatggtgcgacatttctgtgcattagtgaacttgcttccattttctcaaggacaata

SEQ ID NO: 103399 - DNA, 2011 bp, Zea Mays
ctgacccctctatttactcatgtcattcaaggcaacccgggccgcacgctggcacgctgcagtgcagcgttcagcttcagcagcgccatgccattgcccagcgactctggttctggtgcgcgcgccatgtcgaagcagttcaaggtcctgcttcctacttccttccacaagcttcgcatctccgacgagctcgccggttgcttcgacgccggcgagggcgaaggggcgcccgagccgacggccctcgtggtcagtccgttcgggaaggtgtggcgtgtggaggtggtccgggacggccacggtgcgtcgctcgggcgcgggtgggcggagttcttggccgcgcacggcgtcggcatcggctggttcgtcgtgctccgttatgagggcggcggcgcgctcaccgtcaaggtgttcgacaccagcttgtgcattaaggagttcggcgctccggctgcagttatgccatccaaaagctgcaaaagtattttctgtaagccacaattcatcaggatttttcattcgaatctctcggaaaagatgatgttgcctgctaggtttgtgaaagattacgtcagtgaagagtgcctaaacagccggatagccatcattttcagccccattgccaaattttggcgtgttgagcttaagaacgatcaatcaggcatcttcttcacaggtggctggtcacagtttctagacttccatggaataaagaatggtgaagttttgctcttgaaatacgaagggaacatggttttcaaattcaaagcatttggacttagtggatgccagaaagatttcaagaaccagaatgctgggattcaactaaatactaaaaaacaacaggaaacacctcccatcaggaaacgtaaaagcaatgatgagaagtcaagcagtgaagaaaacaagaggctaaaaactccagtgacttctccatcaccttctgatccgtcactggaaaaaccctatcagattgggacatcatcttggataaagaaaaggatcaacacctatgcacttgagcaatttcttgcgttatcagtgaagttctgcaactcgattgggttccggatggcttgcacaatcacccttaagacagcaacgaacagcaccagatcatggcaggtgcgtggtactgcatacaagtggcatcgctacatcatcggagtgggctggaagagcttctgccaggataacagactcaaggcaggcgacctgtgcaccttcaacatcatcgagaccacgctgtggcatgttactatcacgcgctcagcattagcagcagatacttttaataagcaaaaaaagccaccttgttcatccagtagggacaagaagggcagttcaagcagagaaggagcaaagaggccgaaaccttccatggcacatttcagcaaggttcaggttccgccatcgtacgcaagacgatgtgcctacgacgttggaccgccgccctggatacggaagcagatgaatgccagcacaataagaaatcgtcttgtaaggatggtcattctcgcgtttgattctaggaagttagtgataggggttaagatcatccaaaatacatatgaacctgtctggcaccggccttctgcaatcagattgagttgcggcgacgctgcgagatcgtgctcaagacctcgatcaacagcaatcattcttggcgggttggtggtctctcgcagaagaagggtagttacattattgggcccggttggaaaaaattctgcacggagaacagagttaaggttggtgatgtctgcaccttcaatgtcatcgaaacccagctgtggcatgtcgtcatcacacgccgttgctaagctatggctgttgcaaccagcatagcttgggtttgttgtaactagtatgttcgtttgactttaatccgtaccagcttttactggttctacggtgtttttacctcttcttagggaattggctgcacttgcatgtttcgaaacactagtttgacactatgcgtgaaattaaactagctcacgttaacaaa

SEQ ID NO: 103400 - DNA, 1947 bp, Zea Mays
ctgacccctctatttactcatgtcattcaaggcaacccgggccgcacgctggcacgctgcagtgcagcgttcagcttcagcagcgccatgccattgcccagcgactctggttctggtgcgcgcgccatgtcgaagcagttcaaggtcctgcttcctacttccttccacaagcttcgcatctccgacgagctcgccggttgcttcgacgccggcgagggcgaaggggcgcccgagccgacggccctcgtggtcagtccgttcgggaaggtgtggcgtgtggaggtggtccgggacggccacggtgcgtcgctcgggcgcgggtgggcggagttcttggccgcgcacggcgtcggcatcggctggttcgtcgtgctccgttatgagggcggcggcgcgctcaccgtcaaggtgttcgacaccagcttgtgcattaaggagttcggcgctccggctgcagttatgccatccaaaagctgcaaaagtattttctgtaagccacaattcatcaggatttttcattcgaatctctcggaaaagatgatgttgcctgctaggtttgtgaaagattacgtcagtgaagagtgcctaaacagccggatagccatcattttcagccccattgccaaattttggcgtgttgagcttaagaacgatcaatcaggcatcttcttcacaggtggctggtcacagtttctagacttccatggaataaagaatggtgaagttttgctcttgaaatacgaagggaacatggttttcaaattcaaagcatttggacttagtggatgccagaaagatttcaagaaccagaatgctgggattcaactaaatactaaaaaacaacaggaaacacctcccatcaggaaacgtaaaagcaatgatgagaagtcaagcagtgaagaaaacaagaggctaaaaactccagtgacttctccatcaccttctgatccgtcactggaaaaaccctatcagattgggacatcatcttggataaagaaaaggatcaacacctatgcacttgagcaatttcttgcgttatcagtgaagttctgcaactcgattgggttccggatggcttgcacaatcacccttaagacagcaacgaacagcaccagatcatggcaggtgcgtggtactgcatacaagtggcatcgctacatcatcggagtgggctggaagagcttctgccaggataacagactcaaggcaggcgacctgtgcaccttcaacatcatcgagaccacgctgtggcatgttactatcacgcgctcagcattagcagcagatacttttaataagcaaaaaaagccaccttgttcatccagtagggacaagaagggcagttcaagcagagaaggagcaaagaggccgaaaccttccatggcacatttcagcaaggttcaggttccgccatcgtacgcaagacgatgtgcctacgacgttggaccgccgccctggatacggaagcagatgaatgccagcacaataagaaatcgtctttgtctggcaccggccttctgcaatcagattgagttgcggcgacgctgcgagatcgtgctcaagacctcgatcaacagcaatcattcttggcgggttggtggtctctcgcagaagaagggtagttacattattgggcccggttggaaaaaattctgcacggagaacagagttaaggttggtgatgtctgcaccttcaatgtcatcgaaacccagctgtggcatgtcgtcatcacacgccgttgctaagctatggctgttgcaaccagcatagcttgggtttgttgtaactagtatgttcgtttgactttaatccgtaccagcttttactggttctacggtgtttttacctcttcttagggaattggctgcacttgcatgtttcgaaacactagtttgacactatgcgtgaaattaaactagctcacgttaacaaatctccttttttta

SEQ ID NO: 103401 - DNA, 569 bp, Zea Mays
ggtgcaacaaccaccttctcaccctttccaatggatctagagcgtagagaagggattctaactactgtagtaggctgaaaatgttcaggtttctctacttgacaacgttgctccaccagttccattgaactgtcatgagcagcaacaagatcggcaaaatcagaatctgcttctattaattcatcatactttcctgattgtgcaatcataccatctctcatgacctgcggatttttgcatgtacaaaaaggataaaaaaaagtcactgacatattgggaactctactattgttcccttttacaagaagaagatggccaatccaaaaatctctatcatattcatacatactcatctagaggccctaccgcatacaagtgtcgttataactggaatagatactaatgaactgaaattataagtgtgatagttagtttgctggattaactccaacctttagacctatgatatgctctgaaattgctatggttttattggttgtatcaaatagtagttggaagtttgttttttaccttttaaaaaaaaagaaagattgttttcttgctagata

SEQ ID NO: 103402 - DNA, 372 bp, Zea Mays
atgggacttagcgtggggaaggagatgggaggggatgggggcgttggcataggacttgagggcgctagtgtcacaaagctggagagggctagtgccaggacgagcttgttcatgggagacgaggacgagcgccagggaggagagggcgaggggagctaccagcggcgcagcaggggcaaggtccaacgagtggcagcggaggaggacaaccctggtgacacagctgacagccagggcccgacgccgggtcaagctcgccagagagaggggctgggcgggctcctgcagatgcaagtacgccgagcagggggagagcggccgtggagggagcggcaacaaggggttgggagagcgccatggcagaagaggtga

SEQ ID NO: 103403 - DNA, 1797 bp, Zea Mays
atgagtgtagaggtactcagatgcatgccaacagctagcgaaacaaagcaagcatggccgcccaaacgatactctcgctcgtgttcttggctctcctaaccttcgtgctgctgcggcgcaggggcgcgaggcgcagcggcaacggcgtgcaccaccgtctcccaccatcgcctccgggactgcccgtcatcggccacctccacctgctgggctccaacccgcacatctccctccgcgagatcgccggcaggcacggcgcgggcgacggcttcatgctgctccgcctcggccaggtcccggccctggtggtgtcgtccccgcgcgccgcggaggccgtgctgcgctcgcacgaccacgccttcgcgtcgcggccgccgtccgccgtggccgacatcctcctcagctactccgacgtggccctggccccctacggcgactactggcgcctggtgcggaggctggtgaccacgcacgtgctcagcgccagcaaggtgcagtccctgcgccgcgcgcgccaggaggaggtcgccctggtcgtcggccgtgtccggggtgccgcggccgccgcctccgccaccgcggtggacatgacggaactgttcagcgtgttcaccaacgacgtggtgtgccgcgccgtgttgggcaggttcttccgccgggtggacggccggcatagcgcgttccaggagatcatcaacagccaggtggtgctcatcgcggggttcaacctggacgactgcttcccgtgcctggccagagttggcgtgctcgcgagggtgctgttcgccaaggtcttcagcttgaagaagaagtgggacgtgttgcttgatgagatcatcacagagcatgcggccaagctggcgtcagcgcaggaggaacgtcgcgacaaggttgacgacgacgatggacagatgagccaagaagaggacgacgctgacttcgtgcatgttctgctctcgctccagcaggagtaccgtctcacgagacagcaagtcaagtccatcttggtggacatgtttggagcgggaacagatacgtcatccatcctgctggaatacgcgatgatcgagctgataagaaacccacgcatcatggccaaggtacgagacgagatcatcaagaacactcccaaggaccaaggaatggtgaaggaagaggacctagcgaacatggcctacctgagggccgtgatcaaggagacgctccgtctgtacccgccgacgccgctgctgctgccgcacttctgcatggaggacagcgaggtgggcgggtacacgatcgcggcggggacgcgcgttatcgtcaacgcgtgggcgctcggcagggacgccagcgcgtgggagaaggcggacgagttcgcgccggagaggttcctggacggcggcagcagcgcggatgccgacttcaggggcagggatttcaagttcgtgccgttcggggctgggaggaggatgtgccccgggatcaacttcgggatggccgtcgtcgagctcatgctggcgaaccttctctactgctttcgctgggagctcccgcctgggatgacgccacaggacgtggacatgtctgtcaggtacggactcacaagccgtcgcaaggagaagctcctgctcgtcccaaggctggccgtgtaatgccagcaaccctgcttgctgcagaattatgaaataaaagactagcgatgaatggccggttcagcaagcttctttagctgacgtttcctttgatatatctgttttttttttttgttcatgatttcagcaacatacactcatgcttttaagtctgtgtctttat

SEQ ID NO: 103404 - DNA, 97 bp, Zea Mays
atttccccatttgtagcggcggaagaggtccttggtctgcgtgttgcggaacgcgctgcagccgacgacgtagacaaagatgagcgcgacagtggcc

SEQ ID NO: 103405 - DNA, 228 bp, Zea Mays
cctttcaaaaaatagaatactttcattgcaatttaggagatcatggaccatgccaacaaggccaataacagctcggtcgactcgacaggtaaaaccaacaatcattcctttcctgctccttgtaacagatatcctatgtaaagtaccttcaattcctgcacggttgtcacttccaaactctcctacagccttttgggcatcctacaactctttctgtgagatctatga

SEQ ID NO: 103406 - DNA, 262 bp, Zea Mays
caatataaaaactaagtttgttcttcacacaactatcctgtgtatcaaataagcatgtaaaaataatatagacttagaataagtagctggagtaagaaaaaacaaacatatgatgtggcaacagagtaagcaatcatgtcagacacagggttatgatgaagctaccattctagctacttattcatgccagactgctacaaacagagtaagtaatcatgtttacatgtacttatcatgccagactactacaaacgtgaatacc

SEQ ID NO: 103407 - DNA, 3315 bp, Zea Mays
cccaacccccctgctcgacccgctgaactgccgaagcatcgcctactcttcctactcagctccgctggtccggtcgtcgcgtagcgccctcacccccagccacccccaccacgaaggccgcgcgctccccgccttccgacgtcgctctctccgcccagctcaagcgcccagcggtgagggaagggaaggaaaaacagacctttttttttcttctcggcggcctcgtgactatggatccgccgagctccggtctcccgccggtgccgaggtttcctggctcgatccgtgaccggcccacgtggagacggtgctggtgctagtaccggtgcctccaccgtgtttcttggcgaccttactacctcctctcctcctctggaagattgctgctgcagcctgcaggaaagatggccgaacgccgaaggagcgtcggcgcgtgcagtgtggaatcgacgccgagcgcctccagtcggtgcaggaatgcgcaaatgcacgtctgaatgaagcctggttggtggtagagccgatggtggtgggaacggcgccgtgcggggtctccgtctcctccgtgtggatcctcctgctcctttcctccctgctcctctcgccgtcggcggcgtccgtcgatttcggccactgcggctgcgacgacgccgacgacggcgccctctcgagcacctacaacatcctgcaatgccagaaggtcagcgacttcctcatcgccgcggcctacttctccatcccgctcgagctgctctacttcgccacctgctccgaccttttccccctcaaatggatcgtgctgcagttcggcgccttcatcgtgctctgcggcctcacgcacctcatcaccgtgttcacctacgacccgcactccttccacctcgtgctcgccctcaccgtcgccaagttcatgacggcactagtctccttcgccacagccatcacgctgctgacactgataccgcagctcctgagggtgaaggtcagggaaaacttcctggtgaacaaggcacgtgagctggaccgggaggtggggatgatgaaaatgaaagaagaggcgagctggcatgtgcgtatgctcacacaggagatccgcaagtcgctcgacaggcacaccatcttgtacaccaccatggttgagctctcgaaagcgctggaactgcagaattgtgctgtctggatgcccgatgaaaccaggagcgagatgatcttaactcatcagccaagggaaagggatataatggaccagcagaactgctcgattcctattgatgatccagatgttcaagaaataaaggctaccaaggacgcaaaagttcttgggccagattcggcactaggggttgctacccgcaagcttgacgtggggcctgtggctgcaataaggatgccgatgttaagggtgtcaaatttcaaaggagggactccagaagtgatgcagacgagctatgctatcttggttctggttttgcctaatgatggttcattggggtggggtagaagagagttggagattgttgaagtagttgctgaccaagttgcggtcgctttgtcacatgctgcactcctagaggagtctcagctgatgcgagagaaacttgctgagcagtatagggacttgctgcaggcaaagcatgaagccatgagggcaggggaagctcggaattccttccagactgcaatgtacgacggaatgcgaaggccaatgcactcaatccttggtcttgtctcaatgatgcaacaggagagcatgaatccagagcaaagggttgtgatggatgccattgccaagacaagcagtgttgcgtccacactgatgaatgatgtgatgcaaacatcgacaatgaactgtgagcacttgtctttggtgaggaggccgttcaatcttcattcttttattaaagaagctgttggagtggtcagatgtctaactggttgcaagggtgtagagtttgagtttcaagtggataattctttgccagaaaggatcattggtgatgagaagagagtcttccacattgtcctgcacatggtaggcaccctaataaaccgatgtaatgtcggctgtatctcgttatatgtcaatggtcataatgaggttgaagagaggcataatcatgactggatgctgcggagaacaaacttctctgggggctatgtttgtgtgaaatttgagattaggattagaaaatccaaggactatcttttgagttcaaacggtcagataagtcatgggtccaaaccaaacaattctgagatggggcttagcttcaatatgtgcaagaagattgtgcagatgatgaacggcaacatttggtcagtatcagattctaaaagcgttggagaaaccatcatgctggtcctccagttccagctgcagcctctgactgcggtctcctccgcggcgtcttcagacttgagccgatcgtccgcaatccccaacttcaacgggctcagagtcctcctggcggacagcgacgacaccaacagagcagtaacacacaggctcctggagaagctcggctgccgggtcctttcggtcgcctccggtgtccaatgcacgagctccttcgccgccgagccgtccttccagctggtggtcctggacctcgccttgcagaggacggacgggctcgaagtggcccgcgcgatcaggaagttcagtagcaatagctggctgccgctgatcgtcgccctagctgcgaggatcgatgacaaggtccgagacggatgccagaggtcggggataagcggcctgatccagaaaccggccacgttagctgcgctgggagatgagctgtatagggtccttcagaacagttgaaagtgccgcctgatggttctcattgctttcagaattctcaatagaccgctgtagcttggttagatccatacattcacaaaacatttgggggcaggcgaagggaaatgtataggaaaagctggaagaccgctgcttctcgcttggttcctcagtagtgaaggacgacggtgacaggaaggtacagaattttggagagatcatactggtagagcttagactcattcatttgtaaaaccctcggataatccaaggtttagattcttgcactagcactaaccacggtataaatagtttggacgaaatccatggatgggttcagtgaatgctggcatagtagatgcctaaagggggcaaggaacttttgttatcggttagacatgctgaaaagcaggccggatgagattgcggacaggaaggcagctgatacggccgatgctgaccttgtatcttgttgaagattaaatactatggtagtagtacttgcagtcttg

SEQ ID NO: 103408 - DNA, 1719 bp, Zea Mays
cccaacccccctgctcgacccgctgaactgccgaagcatcgcctactcttcctactcagctccgctggtccggtcgtcgcgtagcgccctcacccccagccacccccaccacgaaggccgcgcgctccccgccttccgacgtcgctctctccgcccagctcaagcgcccagcggtgagggaagggaaggaaaaacagacctttttttttcttctcggcggcctcgtgactatggatccgccgagctccggtctcccgccggtgccgaggtttcctggctcgatccgtgaccggcccacgtggagacggtgctggtgctagtaccggtgcctccaccgtgtttcttggcgaccttactacctcctctcctcctctggaagattgctgctgcagcctgcaggaaagatggccgaacgccgaaggagcgtcggcgcgtgcagtgtggaatcgacgccgagcgcctccagtcggtgcaggaatgcgcaaatgcacgtctgaatgaagcctggttggtggtagagccgatggtggtgggaacggcgccgtgcggggtctccgtctcctccgtgtggatcctcctgctcctttcctccctgctcctctcgccgtcggcggcgtccgtcgatttcggccactgcggctgcgacgacgccgacgacggcgccctctcgagcacctacaacatcctgcaatgccagaagatgatgaacggcaacatttggtcagtatcagattctaaaagcgttggagaaaccatcatgctggtcctccagttccagctgcagcctctgactgcggtctcctccgcggcgtcttcagacttgagccgatcgtccgcaatccccaacttcaacgggctcagagtcctcctggcggacagcgacgacaccaacagagcagtaacacacaggctcctggagaagctcggctgccgggtcctttcggtcgcctccggtgtccaatgcacgagctccttcgccgccgagccgtccttccagctggtggtcctggacctcgccttgcagaggacggacgggctcgaagtggcccgcgcgatcaggaagttcagtagcaatagctggctgccgctgatcgtcgccctagctgcgaggatcgatgacaaggtccgagacggatgccagaggtcggggataagcggcctgatccagaaaccggccacgttagctgcgctgggagatgagctgtatagggtccttcagaacagttgaaagtgccgcctgatggttctcattgctttcagaattctcaatagaccgctgtagcttggttagatccatacattcacaaaacatttgggggcaggcgaagggaaatgtataggaaaagctggaagaccgctgcttctcgcttggttcctcagtagtgaaggacgacggtgacaggaaggtacagaattttggagagatcatactggtagagcttagactcattcatttgtaaaaccctcggataatccaaggtttagattcttgcactagcactaaccacggtataaatagtttggacgaaatccatggatgggttcagtgaatgctggcatagtagatgcctaaagggggcaaggaacttttgttatcggttagacatgctgaaaagcaggccggatgagattgcggacaggaaggcagctgatacggccgatgctgaccttgtatcttgttgaagattaaatactatggtagtagtacttgcagtcttg

SEQ ID NO: 103409 - DNA, 3321 bp, Zea Mays
cccaacccccctgctcgacccgctgaactgccgaagcatcgcctactcttcctactcagctccgctggtccggtcgtcgcgtagcgccctcacccccagccacccccaccacgaaggccgcgcgctccccgccttccgacgtcgctctctccgcccagctcaagcgcccagcggtgagggaagggaaggaaaaacagacctttttttttcttctcggcggcctcgtgactatggatccgccgagctccggtctcccgccggtgccgaggtttcctggctcgatccgtgaccggcccacgtggagacggtgctggtgctagtaccggtgcctccaccgtgtttcttggcgaccttactacctcctctcctcctctggaagattgctgctgcagcctgcaggaaagatggccgaacgccgaaggagcgtcggcgcgtgcagtgtggaatcgacgccgagcgcctccagtcggtgcaggaatgcgcaaatgcacgtctgaatgaagcctggttggtggtagagccgatggtggtgggaacggcgccgtgcggggtctccgtctcctccgtgtggatcctcctgctcctttcctccctgctcctctcgccgtcggcggcgtccgtcgatttcggccactgcggctgcgacgacgccgacgacggcgccctctcgagcacctacaacatcctgcaatgccagaagttcggcgccttcatcgtgctctgcggcctcacgcacctcatcaccgtgttcacctacgacccgcactccttccacctcgtgctcgccctcaccgtcgccaagttcatgacggcactagtctccttcgccacagccatcacgctgctgacactgataccgcagctcctgagggtgaaggtcagggaaaacttcctggtgaacaaggcacgtgagctggaccgggaggtggggatgatgaaaatgaaagaagaggcgagctggcatgtgcgtatgctcacacaggagatccgcaagtcgctcgacaggcacaccatcttgtacaccaccatggttgagctctcgaaagcgctggaactgcagaattgtgctgtctggatgcccgatgaaaccaggagcgagatgatcttaactcatcagccaagggaaagggatataatggaccagcagaactgctcgattcctattgatgatccagatgttcaagaaataaaggctaccaaggacgcaaaagttcttgggccagattcggcactaggggttgctacccgcaagcttgacgtggggcctgtggctgcaataaggatgccgatgttaagggtgtcaaatttcaaaggagggactccagaagtgatgcagacgagctatgctatcttggttctggttttgcctaatgatggttcattggggtggggtagaagagagttggagattgttgaagtagttgctgaccaagttgcggtcgctttgtcacatgctgcactcctagaggagtctcagctgatgcgagagaaacttgctgagcagtatagggacttgctgcaggcaaagcatgaagccatgagggcaggggaagctcggaattccttccagactgcaatgtacgacggaatgcgaaggccaatgcactcaatccttggtcttgtctcaatgatgcaacaggagagcatgaatccagagcaaagggttgtgatggatgccattgccaagacaagcagtgttgcgtccacactgatgaatgatgtgatgcaaacatcgacaatgaactgtgagcacttgtctttggtgaggaggccgttcaatcttcattcttttattaaagaagctgttggagtggtcagatgtctaactggttgcaagggtgtagagtttgagtttcaagtggataattctttgccagaaaggatcattggtgatgagaagagagtcttccacattgtcctgcacatggtaggcaccctaataaaccgatgtaatgtcggctgtatctcgttatatgtcaatggtcataatgaggttgaagagaggcataatcatgactggatgctgcggagaacaaacttctctgggggctatgtttgtgtgaaatttgagattaggattagaaaatccaaggactatcttttgagttcaaacggtcagataagtcatgggtccaaaccaaacaattctgagatggggcttagcttcaatatgtgcaagaagattgtgcagatgatgaacggcaacatttggtcagtatcagattctaaaagcgttggagaaaccatcatgctggtcctccagttccagctgcagcctctgactgcggtctcctccgcggcgtcttcagacttgagccgatcgtccgcaatccccaacttcaacgggctcagagtcctcctggcggacagcgacgacaccaacagagcagtaacacacaggctcctggagaagctcggctgccgggtcctttcggtcgcctccggtgtccaatgcacgagctccttcgccgccgagccgtccttccagctggtggtcctggacctcgccttgcagaggacggacgggctcgaagtggcccgcgcgatcaggaagttcagtagcaatagctggctgccgctgatcgtcgccctagctgcgaggatcgatgacaaggtccgagacggatgccagaggtcggggataagcggcctgatccagaaaccggccacgttagctgcgctgggagatgagctgtatagggtccttcagaacagttgaaagtgccgcctgatggttctcattgctttcagaattctcaatagaccgctgtagcttggttagatccatacattcacaaaacatttgggggcaggcgaagggaaatgtataggaaaagctggaagaccgctgcttctcgcttggttcctcagtagtgaaggacgacggtgacaggaaggtacagaattttggagagatcatactggtagagcttagactcattcatttgtaaaaccctcggataatccaaggtttagattcttgcactagcactaaccacggtataaatagtttggacgaaatccatggatgggttcagtgaatgctggcatagtagatgcctaaagggggcaaggaacttttgttatcggttagacatgctgaaaagcaggccggatgagattgcggacaggaaggcagctgatacggccgatgctgaccttgtatcttgttgaagattaaatactatggtagtagtacttgcagtcttgatctggtgggtagtgctggtgctcctgctgcatttcttacttgcttggcctgcttctggccagcaaactcctgcttgccatcttcttagcactgattcctatggttttttt

SEQ ID NO: 103410 - DNA, 2247 bp, Zea Mays
cccgctccaatttaatgccaccacaccagccaggagttggggccgcgcatcaatggcgtcacctctcgcatccagatctcacacctcgtcgtagctactaccttcgtctcactcctcctcgtccccttgctgtcgttcgttcgttccttctacctccatctccacttctccaccttggggttcttggcgcaccatccgagaaatgctgttctcctttttcggttttccattctacaagtgccagccttgccttgtctcggagtgttgacatctctacgtgctctggcccgccattaattccctcctccctcacactgctgctgctgctgaccgagggcgcctagccagtcacgcacgaaatcccagcgttccaattcaaacacacccttccttcttggctactcctctcgacgacgcgaccggagcggagggagtcatggtggcggagccgctggtgcacaaggtgctctccatggcgacgtcgtcgtcctcctcctccaagaaggcgcggccggcggcggcgagcgccaacaagggcggcgcggctgcggcgggcgacggcaggctgggcatcctgtccctggaggtggccaacgccatgtcgcgcgcggcgaacctgtaccgctcgctctccgacgccgaggcggcgcgcctgctcgggccgctctgcctcggctcccgcgccgtgcgcgcgctggtcccgggcgacgacgcgcgcctcctggcgctcgcgctggccgagaagctcgacgcgctgaaccgcgtcgcggccgtggcctcgcgcctcggccgccgttgcacggcgccgccgctcgtgggcttcgaccacgtctacgctgacctcctcgccggccgctccggcgccaccggcgcgctcttcgccgtggcctccgcgtccgacgccgcgtcgctcgtgcgcaggctcgaccgcctcgcggccgccaccgcggctctctacgccgcgctcgaggcgctcaccgagctggagcagtcggcgcggaagctgcccaccgacgaggcccgccgcgcgctggagcagcgggcgcggtggcgccgccacgacgtgcgccgcctcagggacgcctcgctctggaactggacctacgacaaggccgtgctcctgctcgcgcgcgccgcctgcgccatctacgcccgcatccgcctcgtgttcggcgaccccatgctggggctcgacctgctgctggccacgccgtccagcgagtcgtcgaggcaatgcgaccagagccggcggctctccggtccaataacagcaaactcaggccccgtccgaagcgatctcagtgattgcggcaactcagggccggtttccagagtcgatccggacatgtcgcggccagtgaatcttcggtcaggctgtggagcgagcccggggaagatgctcatggagtgcttgagcctgagcagctcggcgtcatggaacgatgggttcgaggacgagttcctggaagattccagccgcatcagcacgatcagatcagggatgctggtgccattcagcagcgagcaggggctgtcgacaacgacgacgatgacgacaacgccaccatccaagagtggcaggattaccagaaaggcggcgcggttcgggcccaagagcacggtgacatcactggcgccgccgtccacagtcggcggctccgctctcgcgctgcactacgcgaacgtcgtcatcatcatcgagaagctgctccggtacccgcacctcgtcggcgaggaggcgcgggacgacctgtaccagatgctgccgtcgagcctgaaggcggcgctgcggaggagcctgaagacgcacgcgaagagcgtggcgatctacgacgcgttcctggcgcacgactggcgggaggcgctggagaagacgctggcgtggctggctccgatggcgcacgacacggtccgatggcaggccgagaggaacttcgagcagcagcagatcgtgatgaaggggaacgtgctgctgctgcagaccctgtatttcgctgaccgggagacgacggaggcggtgctctgcgagctgctcgttggcctgaattacatctgccggtacgagcagcagcagaacgccctgctcgactgctccagcagcctcgacttggatgactgtgtggagtggcaagttcagtagggaagacgatcgttttaaaattcttggcggtacatatcgatcttgttgaatccttgtgtgaagcaacatgaaaacaggttttgttacttaaagagaaaaaaaaaaga

SEQ ID NO: 103411 - DNA, 2270 bp, Zea Mays
gtgtagactgcccccgctcccgcaacgcccgcgcgccagctcccgcacgcgccgccagccatggattccgcacgcgcgcgccgcggattcggtacgaccgccgcggattccgctcccacgcagccagccatggcggggctcggccgcctccctacgcccgctggaacaaccgcgccaacaaccgcaacgcccgcgctccagcacgaccgccgtggattccgcagatccacctccatccgcgtcactcaccagtctcctcacctaatcccactccgccgccgccagcttgcccaccatggcggcgacaacccacgccgcctccatgtcgttcctcctctcccacccccagtcgcgctctgccaccccaagccgccacctcccgctccgtccggcagcccgccgcatccggtgtgccaccgacgccgccgccctttccccggcggtcaccaccaagcaccggcgcgcggcggatgagaacatccgcgaggaggcggcgcggcacccggccccgaagcagggcctgtcggcgtggtacgagcccttcccgccggccccgaacggcgaccccaacgagcgctactccctggacgagatcgtgtaccgctccagctcggggggcctcctcgacgtgcggcacgacatggagacgctggcccgcttctcgggtgcctactggcgcgacctcttcgactcccgcatcgggcgcatcacctggccgtacgggtctggcgtgtggtccaagaaggagttcgtgctccccgagatcgagcccgaccacatcgtctccctgttcgagggcaactcgaacctgttctgggccgagcggctggggcgcgaccacctcggcgggatgaacgacctgtgggtgaagcactgcggcatctcccacacgggctcgttcaaggacctcggcatgaccgtgctggtcagccaggtgaaccgcctccgccgcgcgccgctgtcgcgccccatcgccggcgtcgggtgcgcgtccacgggggacacctccgccgcgctctccgcctactgcgccgccgcggggatcccggccatcgtcttcctccccgccaaccgcatctcgctggagcagctcatccagcccatcgccaacggcgccaccgtgctctcgctcgacaccgacttcgacgggtgcatgcggctcatcagggaggtgaccgccgagctacctatctacctcgccaactcgctcaactccctccgcctcgaggggcagaagacggcggccatcgagatattgcagcagttcgactgggaggtgcccgactgggtgatcgtgcctggaggcaacctgaggaacatatacacgttctacaaggggttcgagatgtgtcgtgtcctcgggctcgtcgaccgcgtgccgcgcctcgtctgcgcgcaggcggccaacgcgaacccgctctacggctactacaagtcaggctgggccgagttccagccgcaggtggccaggccgacgttcgcgtcagcgatccagatcggcgacccggtgtccgtcgaccgggccgtggtcgcgctcaaggcgacggacggcattgttgaggaggccacggaggaagagctcatgaatgcgatgtcgctggccgaccgcactgggatgttcgcttgcccgtacaccggggtcgcgctcgccgccctgttcaagctcagggaccagcgcgtcatcgggacgaacgaccgcaccgtggtcgtcagcacggctcacggcctcaagttctcgcagtcgaagattgactaccatgacagcaagatcgaggacatggcttgcaagtactccaacccgcctgtgagcgtgaaggctgactttggcgctgtgatggatgtgctgaagaagaggctcaagggcaagctctgagcgcctgtgcctggctaatgcaatcaactgattggaatgcagtggtttcgtcggtatcggggggtcttttaggcttcagaaattctgtctgggttagactatctgtttgtggagtttagcaggagaatggctgtctctcctgcaagactagcgctctctgttgtgctacgaatgtgttaccatggataataagtgtagtcgctgtcggattgaataatcatcactcgctcctttgtcctctgtgctggcaacgcttgtcgagtactttggatgtaactgcatgtattgttgttttgatcattttggtgttgcaatgctggctgttgttgttttgatcattttggtgttgcaatgctggctgaaagctactggtgacagtggatgtcaaccttgctgt

SEQ ID NO: 103412 - DNA, 522 bp, Zea Mays
tcttcggctgcgagccggccggccggcgccaagaactcgaagacaaccaggaattcctctgccgggtacaagaagacacgttgttattgcatcgcatcgaccgagaaagctagtgtggcggtcgtgatgatggccatggggtacttccgggcgccgaggcggctgtacgggaggaagccggcggagagggagcaccgggccctgctggtggacgaggacgaccaaggcgaggcggcggcggcggcgggcgcggtgcccaagggctacttcgccgtgtacgtgggcgcggagtcccggcggttcgtggtccgcaccagctacctcagccacccggcgttccgggagctcatggagcgcgccgcggaggagttcggcttcgcgcaggccggcggcctccgcatcccctgccgcgaggaggacttccaggccaccgtcgccgcgctcgagcagtccaggcgtcgcggcggcagggctcgggggtcgccggcggccggaccgacgcggtgggcgcgtgccagctag

SEQ ID NO: 103413 - DNA, 672 bp, Zea Mays
tgaggcacttgtggccgacgttggggaagagaagtcccttggtgacggcgatgttggcggtgtcctcgtcgtcggaggagtcgctagagctttcgtcggagtcccaccgctggcgtcgctgaaccacatcagcatcgtgtgccggtcggtggaggcgtcgctgcgcttctacacggacgtgctcggcttcgtccccatccgccgccccggctctttcgacttcgacggcgcctggctgttcaactacgggatcggcatccacctgctgcagtcggaggaccccggcagcctcccgccggagaagggagagatcaaccccaaggacaaccatatctccttccaggtcagttgtcaccacagctagcacctctcgccatccagtagctgtacgtcgtcggtgtccttttcatccatatctgtctctgtcgcgggcggaggcgagagatgcgcgcggtgcacgctagctgctagcttgccagttgccacgctggctgggtcgacagagtgcgttgcgggtaaacactattccaggttcgatagatcagttgagttcttctctaatttgcccgttccgttcgttctgccaacttgattatatttttccgtcgatcgtcgttccatatatcgtgtgcaggaaattaaggcacacactacaacaagcagtgaaatata

SEQ ID NO: 103414 - DNA, 2265 bp, Zea Mays
atggaggcgaaggaaggcgtgatggcgacggacttcttctggtcgtacacggacgagctgcacgcgtcgcgccaccgggagatcctggccaatcgtggcttgccttatgatggtccagttatcccacccgcaccacagcctacaccttcaccggtcaggaagacgcacaagaatttgaagtacgtactgatcggggccattggtggaggcctcctgctgatagccattgttgcagccattgtgttctgctttgtgtgttctgggagtacagggaggaggaatgatcagagagaaagtggggcatcaccaagtgcaccattgggagtgtcagctaccggcacaactgcagctactggtggcacctcgggatttggggaagataggctcatcaagcacggtcactcaggtgatctataccatggtgtgctccaagacgggactgtcgtggtggtgaagaggatcacttcgcgtgtgcctcggaaggatgcttatctggcagagttatatttgtttgcaaaaggagtgcatgaaacgctggttcctttgttggggcactgccttgataaagaagaagaaaaggttcttgtgtataggtttgtccgaaatggtgacttgtcaactgcactgcacagaaagtcaagggaggaaaatgaaggcttgcaatctttggactggattaaaaggttgaagattgcaacaggggttgctgaggctctttgctatctgcatcatgagtgttctccaccaatggttcacaaggatgtgcaagccagcagcatccttcttgatgataaatttgatgttcgtcttggtagcttgagcgagatatttcttcacgatagctctctgctcgcaaccatctcccagctgagccgccgcgccatctccctggccatcaccagttgtgccctcgcggcatttgcaagggattttaagcaacgcacgcacgagcatcacctagtgttctcaagaataacggaacgaaattctttccgtgacaaactgagcaccctaatcccaaatcgagcggctgaagcgctgggctccagctactgctgctcgcctgcttcgggacggccgattgggtgccggtttgccaaggacatggaggatgcgagcggcagctcgtcgtctccagccgtcctacggaacaagtattgggtcctccgccacggccgcagcgtccccaacgagcgcggtctcatcgtctcatctctggagaacggcacgaagccggagttcgggctggccccgcagggggtcgagcaggcgcgcgcggccggcgaaaagttccggaaggagcttgacgagattggtgtgccggtgggttccgtcaagattcgttactcgccgttctcacggaccaccgagacggctagagtggtcgccggtgtgctcggcatcccctttgaagctcctagttgcgaagttggctcatagaaggacttttgcaggcggtgctgggacttcgtgagcgctactttgggccatcatatgagttactttcacatgataagtatgcagacatatggtcagtagatgaagcacatccctgtatggctcctgaaggtggcgagagcgtcgcagatgttgctagtagattttcagctgtgctgttatctgcagagacacagtttcatggctctgcaattcttattgtcagccatggggacccactacaaatctttcaagctgtcctcagtggagccaaggagaacatgtctttccttgacgatctcaccaacctgaaggtgaaagatactgacgatctcaccaacctggaagtgaaagacacgatggtggcatccattctgtcacagcatcgtaagtttgcgctcatcacaggagagctgcgccgagttgtgtaacttgctgctgcttgggtttaacgtcgcctgtcaattgaccatatgtaaacctgcaatgtttgcctagcacattcctccgtaacttgacagggatatgaaattcgtctcctatggaatgctataacctcagaagtcttaaattattttgaagaagcggcctaaatatttggttgcttgttgaattgtacgattgaaacccagctgccttttattttgtccttttttgcagtgttttgctaatttctcttacgaattacgatttgagcttcggttcatattttacttccaggtcagagcttgagcgatttggcttgtttgcccttgtaatcttcaatcatcggggccagagctatttgttggccactcgttttttattctttcggaatataaaaaataa

SEQ ID NO: 103415 - DNA, 2239 bp, Zea Mays
atggaggcgaaggaaggcgtgatggcgacggacttcttctggtcgtacacggacgagctgcacgcgtcgcgccaccgggagatcctggccaatcgtggcttgccttatgatggtccagttatcccacccgcaccacagcctacaccttcaccggtcaggaagacgcacaagaatttgaagtacgtactgatcggggccattggtggaggcctcctgctgatagccattgttgcagccattgtgttctgctttgtgtgttctgggagtacagggaggaggaatgatcagagagaaagtggggcatcaccaagtgcaccattgggagtgtcagctaccggcacaactgcagctactggtggcacctcgggatttggggaagataggctcatcaagcacggtcactcaggtgatctataccatggtgtgctccaagacgggactgtcgtggtggtgaagaggatcacttcgcgtgtgcctcggaaggatgcttatctggcagagttatatttgtttgcaaaaggagtgcatgaaacgctggttcctttgttggggcactgccttgataaagaagaagaaaaggttcttgtgtataggtttgtccgaaatggtgacttgtcaactgcactgcacagaaagtcaagggaggaaaatgaaggcttgcaatctttggactggattaaaaggttgaagattgcaacaggggttgctgaggctctttgctatctgcatcatgagtgttctccaccaatggttcacaaggatgtgcaagccagcagcatccttcttgatgataaatttgatgttcgtcttggtagcttgagcgagatatttcttcacgatagctctctgctcgcaaccatctcccagctgagccgccgcgccatctccctggccatcaccagttgtgccctcgcggcatttgcaagggattttaagcaacgcacgcacgagcatcacctagtgttctcaagaataacggaacgaaattctttccgtgacaaactgagcaccctaatcccaaatcgagcggctgaagcgctgggctccagctactgctgctcgcctgcttcgggacggccgattgggtgccggtttgccaaggacatggaggatgcgagcggcagctcgtcgtctccagccgtcctacggaacaagtattgggtcctccgccacggccgcagcgtccccaacgagcgcggtctcatcgtctcatctctggagaacggcacgaagccggagttcgggctggccccgcagggggtcgagcaggcgcgcgcggccggcgaaaagttccggaaggagcttgacgagattggtgtgccggtgggttccgtcaagattcgttactcgccgttctcacggaccaccgagacggctagagtggtcgccggtgtgctcggcatcccctttgaagctcctagttgcgaagcggtgctgggacttcgtgagcgctactttgggccatcatatgagttactttcacatgataagtatgcagacatatggtcagtagatgaagcacatccctgtatggctcctgaaggtggcgagagcgtcgcagatgttgctagtagattttcagctgtgctgttatctgcagagacacagtttcatggctctgcaattcttattgtcagccatggggacccactacaaatctttcaagctgtcctcagtggagccaaggagaacatgtctttccttgacgatctcaccaacctgaaggtgaaagatactgacgatctcaccaacctggaagtgaaagacacgatggtggcatccattctgtcacagcatcgtaagtttgcgctcatcacaggagagctgcgccgagttgtgtaacttgctgctgcttgggtttaacgtcgcctgtcaattgaccatatgtaaacctgcaatgtttgcctagcacattcctccgtaacttgacagggatatgaaattcgtctcctatggaatgctataacctcagaagtcttaaattattttgaagaagcggcctaaatatttggttgcttgttgaattgtacgattgaaacccagctgccttttattttgtccttttttgcagtgttttgctaatttctcttacgaattacgatttgagcttcggttcatattttacttccaggtcagagcttgagcgatttggcttgtttgcccttgtaatcttcaatcatcggggccagagctatttgttggccactcgttttttattctttcggaatataaaaaataa

SEQ ID NO: 103416 - DNA, 2232 bp, Zea Mays
atggaggcgaaggaaggcgtgatggcgacggacttcttctggtcgtacacggacgagctgcacgcgtcgcgccaccgggagatcctggccaatcgtggcttgccttatgatggtccagttatcccacccgcaccacagcctacaccttcaccggtcaggaagacgcacaagaatttgaagtacgtactgatcggggccattggtggaggcctcctgctgatagccattgttgcagccattgtgttctgctttgtgtgttctgggagtacagggaggaggaatgatcagagagaaagtggggcatcaccaagtgcaccattgggagtgtcagctaccggcacaactgcagctactggtggcacctcgggatttggggaagataggctcatcaagcacggtcactcaggtgatctataccatggtgtgctccaagacgggactgtcgtggtggtgaagaggatcacttcgcgtgtgcctcggaaggatgcttatctggcagagttatatttgtttgcaaaaggagtgcatgaaacgctggttcctttgttggggcactgccttgataaagaagaagaaaaggttcttgtgtataggtttgtccgaaatggtgacttgtcaactgcactgcacagaaagtcaagggaggaaaatgaaggcttgcaatctttggactggattaaaaggttgaagattgcaacaggggttgctgaggctctttgctatctgcatcatgagtgttctccaccaatggttcacaaggatgtgcaagccagcagcatccttcttgatgataaatttgatgttcgtcttggtagcttgagcgagatatttcttcacgatagctctctgctcgcaaccatctcccagctgagccgccgcgccatctccctggccatcaccagttgtgccctcgcggcatttgcaagggattttaagcaacgcacgcacgagcatcacctagtgttctcaagaataacggaacgaaattctttccgtgacaaactgagcaccctaatcccaaatcgagcggctgaagcgctgggctccagctactgctgctcgcctgcttcgggacggccgattgggtgccggtttgccaaggacatggaggatgcgagcggcagctcgtcgtctccagccgtcctacggaacaagtattgggtcctccgccacggccgcagcgtccccaacgagcgcggtctcatcgtctcatctctggagaacggcacgaagccggagttcgggctggccccgcagggggtcgagcaggcgcgcgcggccggcgaaaagttccggaaggagcttgacgagattggtgtgccggtgggttccgtcaagattcgttactcgccgttctcacggaccaccgagacggctagagtggtcgccggtgtgctcggcatcccctttgaagctcctagttgcgaagcggtgctgggacttcgtgagcgctactttgggccatcatatgagttactttcacatgataagacatatggtcagtagatgaagcacatccctgtatggctcctgaaggtggcgagagcgtcgcagatgttgctagtagattttcagctgtgctgttatctgcagagacacagtttcatggctctgcaattcttattgtcagccatggggacccactacaaatctttcaagctgtcctcagtggagccaaggagaacatgtctttccttgacgatctcaccaacctgaaggtgaaagatactgacgatctcaccaacctggaagtgaaagacacgatggtggcatccattctgtcacagcatcgtaagtttgcgctcatcacaggagagctgcgccgagttgtgtaacttgctgctgcttgggtttaacgtcgcctgtcaattgaccatatgtaaacctgcaatgtttgcctagcacattcctccgtaacttgacagggatatgaaattcgtctcctatggaatgctataacctcagaagtcttaaattattttgaagaagcggcctaaatatttggttgcttgttgaattgtacgattgaaacccagctgccttttattttgtccttttttgcagtgttttgctaatttctcttacgaattacgatttgagcttcggttcatattttacttccaggtcagagcttgagcgatttggcttgtttgcccttgtaatcttcaatcatcggggccagagctatttgttggccactcgttttttattctttcggaatataaaaaataa

SEQ ID NO: 103417 - DNA, 1110 bp, Zea Mays
ttccttcggcttcgcgctccaagcatcgcctaccccaagtcccaacctaattctctccaaccgatgctatcctggtctgtcgacggcaggagaacggcacgaagccggagttcgggctggccccgcagggggtcgagcaggcgcgcgcggccggcgaaaagttccggaaggagcttgacgagattggtgtgccggtgggttccgtcaagattcgttactcgccgttctcacggaccaccgagacggctagagtggtcgccggtgtgctcggcatcccctttgaagctcctagttgcgaagcggtgctgggacttcgtgagcgctactttgggccatcatatgagttactttcacatgataagtatgcagacatatggtcagtagatgaagcacatccctgtatggctcctgaaggtggcgagagcgtcgcagatgttgctagtagattttcagctgtgctgttatctgcagagacacagtttcatggctctgcaattcttattgtcagccatggggacccactacaaatctttcaagctgtcctcagtggagccaaggagaacatgtctttccttgacgatctcaccaacctgaaggtgaaagatactgacgatctcaccaacctggaagtgaaagacacgatggtggcatccattctgtcacagcatcgtaagtttgcgctcatcacaggagagctgcgccgagttgtgtaacttgctgctgcttgggtttaacgtcgcctgtcaattgaccatatgtaaacctgcaatgtttgcctagcacattcctccgtaacttgacagggatatgaaattcgtctcctatggaatgctataacctcagaagtcttaaattattttgaagaagcggcctaaatatttggttgcttgttgaattgtacgattgaaacccagctgccttttattttgtccttttttgcagtgttttgctaatttctcttacgaattacgatttgagcttcggttcatattttacttccaggtcagagcttgagcgatttggcttgtttgcccttgtaatcttcaatcatcggggccagagctatttgttggccactcgttttttattctttcggaatataaaaaataa

SEQ ID NO: 103418 - DNA, 309 bp, Zea Mays
tgcaggaatctctaaggcagtagaactagggatggcaatcgggcgggtagtacacggatatatagttcacaaatttatacccgcaaaacaaaactcaatccatatccgtacccataaacattcgtgggtatggatctgtatccatacccgtacccgccgggtatccgctatccagtggatacccgttacccgtccgcccactacaattttagcattaaacaccaaacaacaattttattacatttcaaaataattatcattataatatcattaaatgataatttcagcaacaaacaacatgttatggat

SEQ ID NO: 103419 - DNA, 159 bp, Zea Mays
atggagacgaagcgggtggccatcgtgggcgccggcgtgatccgagaaggaagaaaagctctgttgaggaactgttcggagtctatggccctggcgattatgctgaccttcacccggccccaaggatggaccttctgcggcagcagtcgttatctataa

SEQ ID NO: 103420 - DNA, 1574 bp, Zea Mays
atggagacgaagcgggtggccatcgtgggcgccggcgtgagcggcctggcggcgtgcaagcacatcctagagcgcggctgccggcctgtcgtgttcgaggccagcgccgtcacgggcggcgtgtgggcgtgcgtgccggacagcacggcgctgcagacgtcgcggcccatgtaccagtactccgatttcccgtggccggacaccgtcaccgacgagttccccgaccaccggcaggtcatgtcctacctggacgcctacgcgcgccgcttcggtgtgctggactgcgtccgcttcggccgccgcgtgctcgggatggagtaccatggcgtcgccgaggacgacgtggcggcgtgggaggagtggggcgggaacggcgaggcgttcggctgcgccggcgctggcgagtggcacctcaaggtggccgacgccgagggacgccttgagacacacaaggcagacttcgtagttctctgcattgggaggttcagtggtgtacccaacatgcctacgttccctccaggcaaaggtccagaagcatttgaggggcaagtgatgcactccatggactacgcgaagatggccactgagaaaaccagggagatgatcaaaggcaagcgcgtcactgtcgtcggctacctgaagtcagcgatcgacattgccgccgaatgcgctgaagtgaacggcactgatcatccatgcacaatggtggtccggacgaagcactggatcatacctacttcgcttggggagtccacatatcgctgctatacctaaaccgcttcgcagagctactgatccacaagccgggcgaaggcttcctcctttgcctcctcgctaccctgctggcgcctttgaggtggctgttttcaaagttcgctgagagctactacgccatcccgatgaagaagttcggcatggtgccggaccacagcctgttccaagcgctggccacatgcctggtggcgatcctgccgaaggggttctatgagaggctggacgaacgcagcatcgttctgaagaggtcgaagacgttcagcttctccagggaaggcgtcgtcgtggacggcgaggtgttgtcgtcgctggtgaagagcgacgtggtgatctacgcaaccgggttcagaggcgacctgaagatcatggacatgttcacgtcggagtacttccggagtgttgcggttgggtcagcgtgcactactgtgcctctctacagggagtgcatcaaccctaggataccacagcttgcagtcctcggttactcggagagcatcgcgagtctgcacacctcagagatccaatccaagtggctggcccatttcatggacggtggcttcaggctgccgagcgttgctgcgatgcagaaggatgtcctcgaatgggagaagtggatgagaaggtacgccggcggtaggtacttacgctggtcctgcatcggagtccttcacatctggtacaatgaccagctgtgcttggatatggggtgtgatccgagaaggaagaaaagctttcttgaagaactgttcggagtctatggccctggcgattatgctgaccttcacccggccccaaggaag

SEQ ID NO: 103421 - DNA, 1920 bp, Zea Mays
cagcaacgagtcgctctacggatacagttgcactgcctgccttagagataagatattttccgctcaagaaacatcgccatcgccatcgcatcgctgatatataccaaccacccagcaagcagcagtacacgctacgacctcgcttccggcgccatggagacgaagcgggtggccatcatcggcgccggcgtgagcgggctggcggcgtgcaagcacctgctggagcgcggctgccggcccgtggtgttcgaggccggcaccgtcgtgggcggcgtgtgggcgcgcgtgccagacagcacggcgctgcacacgccgcggcccatgtaccagtactccgacttcccgtggccggacaccgtcaccgaggtgttccccgaccaccggcaggtcatgtcctacctggacgcctacgcgcgccacttcggcgtgttggactgcgtccgcttcggccgccgcgtgctcgggatggagtaccacggcgtcgccgaggacgacgtggcggcgtgggaggagtggggcggaaacggccaggcgttcggctgcgccggcgctggcgagtggcgcctcaaggtggccgacgccgagggacgcattgagacacacaaggcagacttcgtagttctctgcatcgggaggttcagcggcgttcccaacacgcctacattccctccaggcgaaggtccagaagcgttcgacgggcaggtgatccactccatggactacgccaagatgggcaccaagaaagccagggagatgatcaaaggcaagcgcgtcactgtcgtcggctacctgaaatcagcggtcgacattgccgccgaatgcgctgaagtgaacggcgctgatcatccatgcacaatggtggtccggacgaagcactggatcataccagactacttcgcttggggagtccacatatcgctgctattcctaaaccgcttcgcagagctactgatccacaagccgggcgaaggcttcctcctttgcctcctcgccaccctgctggcgcctttgagatggctgttctcgaagttcgccgagagctactacgccatcccgatgaggaagcacggcatggtgccggaccacagcctgttccaggcgctggccacgtgcctgatcgcgatccagccgaaggggttctacgagaggctggaagaaggcagcatcgttctcaagaggtcgaagacgttcagcttctgcagggaaggcgtcgtcgtggaaggcgaggtgtcgtcgtcgtcgctggtggagagcgacgtggtgatctacgcgaccgggttcagaggcgacctcaagatcaaggacatgttcgcgtcggagtacttccggagcgtcgcagttgggtcagcttgcactactgtgcctctctacagggagtgcatccaccctaagataccgcagctcgcagtgctcggttactcggagagcatcgcgaatctgtacacctcggagatccgggccaagtggctggcccatttcatggacggcggcttcaggatgccgagcgtcgctgcgatgcagaaggacgtcctcgagtgggagaagtgcatgaagaggtacgccggcggcaggtacttccgcaggtcctgtatagggctccttcacatctggtacaatgatcagctgtgccgggacatggggtgtgatccgaggaggaagaagggctttcttgaggaactgttcggagtctatggccctgctgattatgctgaccttcaccccgaccgcaagaaagacgactagaccttctgaggcggcactcgtaatctagaccttcattataaagtgggtattgtgggtaccaacgttcacagctcctgttaatgtccatatcatatggatgctgaatatataaagtgggtattattgtgcctattaatatcgcaaaccgaataataaaaatggtcgaacaggtcgatt

SEQ ID NO: 103422 - DNA, 81 bp, Zea Mays
caaaatgctattttcctaaaaagaaaggaacaatatgagtgtgttcatatttcaaacatctaccaaacaaataaataaatt

SEQ ID NO: 103423 - DNA, 415 bp, Zea Mays
gacttaaagtgtataaaaatctttgaaaatcacaaggaaggggttgcatgcaccggggctttcctttttgcagtgaagaggttctagatccttctacctaacctttagttagatagcaccatccacttgatgagcaggcactggagtagacttcgtcaagtaccaccttgtctaggtgttcaaattctcggtgcgcgcactaaaccgcttagggaagatacaggttggtcggtcgacggtgaagttgtccacgacgctggcctgccgcggtgcgacgatgttctagactccacaccatgggagtgccggtcacggtgaggcaagtgagaaagagcacggcgaggtccggcagggtaaagagcatgctgtggcgagctcggacgaggtcaggattttatacttgggctacacggtc

SEQ ID NO: 103424 - DNA, 476 bp, Zea Mays
gcctcctgagcggtgggcaaagcaacccagaccctcgaggcagtccattctgcaaagccattcccaacaaagacgcaaggggcccaagccgcctctattgagcggtgcacacaccttgctcaagggatggggcaatggctgccccggaagaaacgcacggcggcgacgaaccggtgggtgatcctcaaggagtacgtggagggataccctcgcgaggagcacatggagctgctccggggcgccgaggtgtccctccgcctgacaggcaccgagctggccgggtccgcagcgggctacgagcagtcgtggtgctacgacccctacatcacgggctacgagcggtcgcagagggagacgaacctcgtcgtcatcgatgccgtcgtcggccagaacagtcccgctgccgccgccgccgtggtgctcgaggcacgagcagtgaaacctagctaactttctaaacctttccgacgggtgag

SEQ ID NO: 103425 - DNA, 297 bp, Zea Mays
atgcaggcgatgtgggagcggccatgggctctacggaggttggcgacgatcatgatgaccggcttcggcgtcagcatggttgtcgcgctcaccatgccagctagtgccttcagccccacgtgtgtcgtcatcccagagggctcagcggcgcgaatgggagctgagttcctctcccttctcgaccaccatgcccttctcagcctgaagttgagccctctgaaacgttggtgcttcaggctaactcgagtgggtactaggcgcatgactcaaggtgctctaaccatgtgtgcacaatag

SEQ ID NO: 103426 - DNA, 81 bp, Zea Mays
taatcaataatatacctcatgcacattcaaattttctcctcttagttaattccagcctgcaaggttggagtatagccaatc

SEQ ID NO: 103427 - DNA, 100 bp, Zea Mays
gtatctttgtcgtagttcaactgcacctttgccgctataccatccaccattacccatatcacaagtcgatccaccccattaatcaacttgccctaaccgc

SEQ ID NO: 103428 - DNA, 556 bp, Zea Mays
atctagaaagaaccagatggacttataatttgaaacggaacgttctgtctatactagcatttaacaattgattgttttcgcaccaggaagaataattacaaacattacaggaataaaatacatgggggtgccatctcaacggcatattcgatacaatggacctaacagcatgaagcagaagcaccatgcaaaaataggtcgtgctgccaaaactcagatttcttctataccagcatctaaccgatatcagcttcccaacgggaaccaaattgctattgtaacaaaacaaaacaaaaaatggcctgaaatggcaaagtgtggagccaaaatttcatcttgggaagtgctaagattagcacatgttactttgttgacatcagaggagctgatttttttttcacaaccccgcacagcaacacctgcatcgaagaatttactccaaccacctaggcaacagcagaggaaagtagaatcattttttagttggactggatcataatcactctatctaccactctattagtgccttactacttaagcttccaccatgaaacat

SEQ ID NO: 103429 - DNA, 110 bp, Zea Mays
ctatttaaaaccttgcgtcaatgctccatcccctccgttgtgggatcacatgctagtctctactatacttaaagcactagtttcaacggtcgtcctgcgtcatcttttta

SEQ ID NO: 103430 - DNA, 1184 bp, Zea Mays
acctttagcctgcttgctataaaggcagcacacatctgccctgcccaacgacgcacacttcactcacccatccaccgcaaacgccaaacggccggcacacaactacacaagccgctggcaaagatggcctcctccttggtcctcatcgcagcggccctgcttgcgctggcctcgtcgtggcagcaggccatcgcctacgatcctagccccctccaggacttctgtgtcgcagacaagaactcgcctgttcgcgtcaacgggttcccttgcaaggacccgatggcggtcaccccggacgacttcttcaacgcggcgatgatcatcgacaagcggagggacacgaacaacaaggtggggtccaacgtcaccaacgtgaacgtggagagcttcccggggctgaacacgctgggcatctcgctggcgcgcatcgactacgcgccgctcggggtgaacccgccgcacatccacccacgcgctaccgagctgctcaccgtgctcgagggcaccctctacctcggcttcgtcacgtccaaccccaaccgcctcttctccaaggtggtcaagaagggcgacgtcttcgtcttccccaaggccatgatccacttccagatgaacctcgaccacgacaagcccgccgcggcgctctcgtcgctcagcagccagaaccctggcgtcatcaccatcgccagcgccgtcttcggctccaagccgcccatctcggacgacgtcttggccaaggcgttccaggtggagaagaaactcatcgactggctccagtctcagttctgggataccaactactagctgcctagctagctagtaatatacttgcttgcttatttgttgcatgcatgcaccaccaacacaagccttatattaattacgtacgtacatctatgtataatattgaataaatggccggtatgcatgtggaggagtgaaacttattactgtgcgtgattaataatatttaatgtaaacttttcattattatctaatataaaaaaaagaatacgagttcattgcaagtgtaattaacgatgattggggatgatgctctggattacatatgtacagccgaattcagtccgtcggcatgtacaacctcagagactgcataagcctttagctttgcatcataaatacaattaagagaccgttgagcaccatatgtgccacacaat

SEQ ID NO: 103431 - DNA, 508 bp, Zea Mays
ggaggtgatgatcactttcgtttggcaaaacgaatgataagtacatgaagctagcaatggtgtagtgcccagtgatgatcattttttgttgattgtatatgacttgatgtcatttctgattataatgtttgtcaaatgtacgtacaggaagctagcagtggtgtagtgcccaatgatgttcaaatatacctgagggggcacagaggaccagatcctgcaaacccagatgtgttgtgtagccaaaaggcaacagatcgtctggctacatatggtgaggcaatgtctagtcagcatggatcggactatgactggaggaccgcacttattgatcctcaggctgtgtatgcaagtggtggaaaaccccatggaaggtactcgatgttcgataacgtcatcgactcaagccaggtgacggttcagaggggaggttcatcgaggtctgctgctcgtagctcccgtcgctctactcaggatactgcagaagttgagcgactacgagaagagctta

SEQ ID NO: 103432 - DNA, 489 bp, Zea Mays
ttttgtcctaccattattctatccttgctaaacaagatggccatgaaacatgttattatctgttgtcttctcttagccctcatgctgcagtcagatcaaacatctgctgctgacatatgcagctatgcagattttagggccatgttttgcaagaattggatgtgcaagagccagtgctggtttcaatcgcagctaataacgcctccgaatgtagtgaaggaacacaggtgtataaaaggaggaatctatgggttgtgtcactgtgtcttctgtaaaaagtagttgtatcatctttgttaatttttattaggaacataatgtctcttggcagggacctctcagacatttagatagtagtttagcctcatcctctctatagtagttgtctgtttctgctctaggaattcaacatatttgcttcaatcttctgttttctgaaaaggaaaatctttgcatgaataatacaatggtctccaacattggttcaat

SEQ ID NO: 103433 - DNA, 1070 bp, Zea Mays
ctacctgcccgccgccgccgccctgcgcgcgccccgccgccccaccgcgcgccacccagcacgccaccacccagcgcggcccgccctcaccaccccgcggccccgccgccgccgccagcgcctagccacgcgcgccccaccctcgccaccccgcggccccccgccgccgccagcgcctagccgtgcgcgccccgccgccccatcgcgcacctgctagcgcgccgcccagcacgtcgcccgccctcgccaccccaaccgccgccgcagccgccgcccgatgtgccctcgtgcacgagacctctcgaaccctctcagaaggcggtgcgatccggtttgggtcgccgtgccgagcccaatgtgcccgacgcgcgcgcggctgagtcaaagccgaaactggcgctcggagacgacgatgataggccgccccttgaggagaagcaccgctgcagcggtgagggcggattcatcttcctctgcgcccttgttggacacaccgaggctatcggtgggatttctatgccgtctggttcgaacaagctctactccggcagcgtcgacggatctgttcgcatctgggactacaattccggcaaggctaccaacaatctctttgattatggacgagtaacgggctgcttccacggaggttccagtgaggaggttgtcattgttcgtggtggttcatgtgctgattagcaatgtgtgcaccctatggaaccaaccataaccgaatggtgactcctaattttttctgattggttgtgcctaaatcaccaatcgtcagcggatttcttatgattagttgggtgatcctgtgctcctggtttggattggatgttatctgtcaggctagccttgttgctatatattggaggctcttcgcctgattcggttacccgtttgcctgggatcagtttgtggcgctatctggttggttgtcacttggttgatacatatgattgcatgatctgcaagtgaatcttcagagattacaactatctcattagtggatagtcatgcatttatgtaaaaatatagcaatgagaaaaaggaacaaagtaaagaaaaag

SEQ ID NO: 103434 - DNA, 1368 bp, Zea Mays
atgggtactcattggaattccaaagtttgtggaggtgacattctgattctagtgagagtacacctttattttgtattatgtatggtgacattgaggggtgactttgcttggtacaaggcattgaacacaaagacagggatgaaactaagatttcaagggccttctagtctagtttgttccatggctatcacgaatgagatgttgtttgctggtactggagatggtcgcatcatggcctggagatttcctgctaaggatagtaacactgaaccagtgttgatcctcagtggccatcaacggccagtgatttcactgtctatcttggcaagaagactttactctggctcacttgacaagtccatcaaagtatggatttttcttcaagatattgctcaattggcagttagaagttatgctcattctgacacattcttcaattctctgtatttaccaggcatgggaccttacaactcggcaactctgtcagagtctggaaaccttcaagtcaaatatgcccatgccgaggagaatggtttgcgcacactcttcggcatgcaccgagttgggaagacaccagttctcttctgctccctccacaacagcaattgcgtccgcttgctcgacttgccatcatccactagtgtggaacatgcagaaatgcaggctgccaagaggcaaacagttgctactggatcaccgaccccagggcgcactgcatgggttggcaagggaacagtaacagcactaatgataatctgcaaaatgaagacgcaaatgatgcttctaggtggccatatccctggtgggcccatatccctggtgctttgttctttgatgttgatggaatatccgacagaacatctagtttaccacacatgctgccatctgaaaaggcattttcagttgctgtatctgctcttggcatctacaacaaagatgggatagtagtttatgatggaaaggggatgttcagtgctgcttgtgtttggtggtggggaggactgcacagttcgcatttggagcatcaaaacaggcgagctaatctttgtgcggagcatggcagacagtcccttcacgacatcttgttggcccaaaagcagccatggcttgtagtccttggctgtttgatgtaaaccacagctgggaagtcagacatcacctagagctagggtgtccattcttgacatgtttctcttagtgataggtggatactgtctaggtaggaacagagtcttgagggattgatgggcgcatgcatcttcaattcctgtgtgttgtattactactggtacaatctccaatgcttgtgaacttatgtgtttggactgtgaatttgtgatatgaacatatatcaatatgtttaaaatc

SEQ ID NO: 103435 - DNA, 1132 bp, Zea Mays
aatacacgtttctttaccctgaacttttcgctactccatcgagggcagagccgccgccgtttcttcaatctcgcagcgccggcgcttcatcttccctcccttttttactcgcgatcggcacgcaggcggcggctgcggcgctcaggctcgggctctgcgactgcgtcagcggcttcccctccggcctctcgccagtcaccgcgcgccctcggccccggtcctctgcacaccggccggtgaccctgcgtgcttgcctttctcctcccgcctccggtggatcgtcaacggcgcccggccccggcggcagcgctgcgcgcgtctcgagggcagcgggagccagcagccgctgctccaccaaggcggaagcattttggaaccctgaactctgggctttaagaagacactactgctgcaaccatgagcaccatgaagttttgtcgcgagtgcaacaacattctgtaccccaaggaggacagggacaggcgcaccctgttctttgcatgtcgcaactgcgagcatcaggaggtctctgacaataactgtgtctatcggaacgaggtgcaccatactgctggggagcgaacacaggtcttgcaggatgtagcttctgatccaactcttcccagaaccaagactgtccgctgcaatctctgtgggcatggagaggctgttttcttccaggccgcagcaagaggggaggaggggatgaccctgttctttgtgtgctgcagccctgattgtggtcatcggtggagggaatgatgcgatgaaatcttcgctctaatagttgtttcatcagagcatgaaacttaacttgttttgtagttttcttggactatgtatttcgaatctgacctaagattaatgagagaatgtctttccaatattttatttaattctacgcatatatgatatgtagctgcaccacatagtacgtagtctcatatgcttgttctgccccaaaactccgaggaggagcaaagaaggtattcttaatgagttaggaggtgtttggttagctctgcctagagttttcctacggatcaatgccaaacaccccataaattggagactcacatactgctctcctaaatgggagactctttgctttatgtacattttttccctcttc

SEQ ID NO: 103436 - DNA, 2054 bp, Zea Mays
taattctgacaacatactagggtaatcacaatagttaacacacaagtaccaacgatacagaaaactagatttgtggccttagcatgaccattggtccattagctcgacaaaagcatcattaagtaaagtaacaattgcatataacaaaatatgacatctccaaacatagcagcaacagggggctatgctcctgcactatctttcattactgcctaaaaaatgaaaacagcgatatattcatatgtataacattcctggtccatgccgcacgcaaatacacaaaggaaacaatgcatcaagtccaaacaaagtcctttattgacctgagtaacaattggcccagaatttcagaacagcaacgtccagccattttgcattgataaacacttaaaaattacagctcagccattgcacaaatgctaagtccaatgttttcaacatcgcaatcacaacagtttgactccagcttctctgactgaatctataacggccttcactttcccatggtacttttgttctctcttcatgtggatggacactgcaggtattcccttgaggagcaggcgctcgccgagcaactttccaatctttgcagctgctgcgacgtcgcgggtcgactccatgtttggtctcaacagcttctcctgcgagcttgcagaacatgcaacagttgctgttggggtgtggacgacctgagcagatacatacttgtttgagaaatgcatcctcaacaggtagggcttgaggaaacgggtgactctagctgcccttgctggtggagggatcaccatggctcctggtctctccgctgcaagtgaacaggagcaacaaaggcttattggctagagaagcacagcatgactgcatttcctataataaccctgtgggaacaaatacagagtagagaagtacaacagtgtacaaaccagtctcgaagcagtaaattcgtaacacatcatcacggattctaaaaacaaggatccaaacagtatgtcagtgtgtaggaccaacacaaaaggtgtggagttatttgtttttcaaccctgctgacagggtgaaaatgcatgagaaagttataagctttataggacaaaaaagaaacaattatagcatccaactaaggcacaaatggatatttgatctgaggtagaactaggaaagtctcctgcttaaaatagctagctgactattccacttcaaccggatagataaaaccatctatgaaagaaaacaatatcttttatctgttatatgcaacaacattttctgttatgcaattatttggacaaattgccagggcagtgacctggtaatcaatttaggaggcacagggaagcttatctgatgaatcagccatgtaggaaaataaatcacatgatctaaaacttaatcggccttggactcagcagaacggcgccagccacagcaacaaaatgcacactaaagatcatcactcaccctaaaaatggtgccagatatgtagggtacaaagagagcagatttaatggtatccaacacatggagggagctgaaccttagagtattcgattcatgcatgttacttgtttttcttaagttttagcaagatgaaaaaatatcattccatgaaacagagtattttgaaggtactgagtacagagtacaagaacaatgtgttccagcacttgaaggcttagcggcttctcatccacatgtgttcaagcacttgattcatggcagacaccaccaccattccgcaaagcatgacagactaggaccgaaatcatagagggggtatctcatcttcaaaccaaaccagcaagatcatccatcaatgcattcgattcgattcaaggatttgaataataaactcatgaaccagcgtatctaataagaaacgcaccaagaagaggaggaggcgcccaacctgtggctagccgctagcagaccacggggctgcgaggctggccggggacgcggcaggcggcggcgcgacgagggtggagtgacgaatcggagttggagcagggtttgcaaaaggaaatcgttgggctgagccgtagtatcatcacata

SEQ ID NO: 103437 - DNA, 1099 bp, Zea Mays
tttctcaagccgattagttcaatagttccctggaacaaaatcacgtacacgcctggtcttctgcttgcttgtgcccaggtggctaccagaggtccagagccgttgcttgttcttggcgcttgccccagcaccagcctcgcgcttccttggctcgcccaggtcgccgccgtcgctcagctcggcgcccatctatctgctcagcctccagcggcggccttcccctgccggtgcccagcccagcggcccctcctctctctccctcaagctctctgcgcgccgtgaagcccctgcgcgtcgcagtctcccaagctcgccatggctgccggacgagtctctcccgtctctgcttgtcctcttcgagcttggttcctgcgcgcgcgctcctctgctcccatggcgtgttcctgcgcccgcctggatttccctgctgagctcggtctcatggccggcatacggcttcgtgttcgccggagcttcctggtgctcgcccatggccgccggtgctcgccctcttgcgtcgcgcccgacccagccgtgtgctcgcccgaccgtacgctcgctctgctcggccatgccgcctgctgcgcgtgcgtctgctccgtcccggcgcccaagctccaagtctgtcaatccacggcgcgccggcagttcgccgccaacgtccggtcgccggttagcccctgcgtgtggcctctgcacgtcgggatggctcgtctccgctggccggacgtcgatctcctatttgccatggacagcgcatcgacgcctcattacagcagcccgttatggaactctagtgcttgtcgttgattcccgatcgtctccgacatttgtcttgccgtcgtcgttcggtcaccccgcctcgatgctggcccctacatgctgtcttcgacttgtgttcgtgtcgacaaaagaatctcaataggatgtggagaagcaagcccctggtcgatgcccccaaatgctcggcgaaaggcctgaacaagaatcatcgtcatttttgcgaagttgtagtaatatggagagagtgtttgatcgaagacttcaatcgaagactatcatcgttctcacaaatattgagtcgagttaactatggtga

SEQ ID NO: 103438 - DNA, 1204 bp, Zea Mays
aaacggaaacccattttagcgtaaacagagtaacaaccgcgagccctacatgtttacgctattccattcttccgtttatacataatagtgatttagcataactactccagccgacccacgttccagaaataaaggaatgagcccactaccccacttcccacgcggtcaaacacttctataccctaacccccgcgcggtcaaccatcctggccgactcgccgcgtttcttcagcggtcgcctgggcgattcttgttcatccgccgccgccagcccgtttcgccgtcctccaccgccgcacgccctcaacattaatcgccgccgccgttgacagcatcgtcgagccgctgccgttgtcaatcttgcgcgccccgcgtcacattggctcacgtccgcggtcgctatgtcgtccggattccaagtgtgaatcgccttcatttgtctccgcgcgaactcaaccctaatcggcgccgccgttgacagtgtcgtcgagccggccgctgctgtcaatcctccgccaccgcgtcctataggttgctgtttcaacaatgtggaaggttgatcaacccccaaccaatccgaagcgtttaatcattgagtcaagtcaagaatgtttcagtgttgacattccacgctcgactgacatggcagaccctacaaatacgccgtctgatggtgatcctccgcagcatagaaagacgggcgttgcagctgctgctaaaaacattgttatgcctaatgtggatgatgatgatgactttgagccacccaaaaagaagtgcaatatctcaatggatgccccaaataagacgcagtgacttatgtgaggctgcccagagatggcacaacaggagcattaacaatgtgtcggcgacgatatatggttgttccatcattgttcttctgtattatttggatcatttgcatcatgctgctgctccaaacaacaaaaatggcactccacgcataaagtattttaataagaatattataagggcgttgtcaatggccgataagcggaagcctcgccagggtggtgaaccatttggtgtttgcccttttcgtagcagcagtgagacatgttacgtctcaaaatcgccaactacttgccagattgaggttaggtcatatacccactatgatctttgtttgtctgttgctttaccatacttatcatatcattattatctttttttacttcagttt

SEQ ID NO: 103439 - DNA, 851 bp, Zea Mays
caggagcaacatagtaagtctcctcgtccatttgacccttcagttttggagagttacctattgaagacactgccttctttcaagcagctggatgactacaaatcaataatggtacccatgctacgatctggacattggacattgtatgttgttaatcttcagattggacgcatacatgtgttagattccaacccttatggaccagagatgggtgggactatctggaaaaattaccattgtatacctatggatttgggtgataggaaggtttcatgggccaggttaatgatgagtatgctcaatctagctattcaaaatgctcgaccaagatcagctctccctgcttttttgaagtaccctattgaactcatgaataactgcccaacaatgaaattggggtctaatgattgtggattctttgtcatgagatatatgcagaactacgactacatggttggagctatgaatgcagtcattgatccggattattcagaggacattcgctctcttgtactgcattacctaatattccatcgactaaatagaaacagcttcgtggtctcccacctggacagattcaagttctctcagtagtagcctagtatagtttactatcttaatattagtatgaacatcatggtctgatggcttttggtggcttcaagttatctcagttctagcttagtttagggtagtgtcactgaatggtgttcatgtaaatattggtctgttggcttatgttaggattcagataatacttatgtccatatgcagctcttagcaaactcttatatatatcgtaccagatatgttttagatggttatatttatatatgatagttctgcacttt

SEQ ID NO: 103440 - DNA, 1771 bp, Zea Mays
ggtgcattgcacctgcacctgctgcacatgcacatgcacgcagcagggccgaaacgaaacgaaaggaacgtgctgggtcgtctccttctccatttgcctcttggcttccttgggcagcccccctgtccctgcccaccccacgacagcccaaagccccaaacccaaccccggcacacagactgcagcccgctacatacaaaacgagctggtggcttggcctctcctccaccagtggcagtggcagtggctggccacccaatcgtctcgttcgtcatctacctctccctcctccaacccaagctaagctaaacagcttacacagcttgctccgccatcaccgtatcgagagagacagagacaggctagcgagggaatggagaggatgctggccaggctgatgcggcggcggagctccgtccccctgtccggcctcctccaccacggaggagcgcccgccccgctgcaggccgccggcgccactggggcctccccgctgatcttgtcgcaccagcagcagcagcagcacacggccgcctccgccgtcctgccggggctcaagatcagggactccgcgtcccagctgatcgggaggaccccgatggtgtacctgaacaaggtgaccgaggggtgcggcgcccgggtggctgccaagctcgagttcctgcagccgtccttcagcgtcaaagacagaccggcgatctcgatgctggaagacgctgaaaagagggggctcatcactccaggaaagaccacgttgatcgagcccacgtcggggaacatgggcatcgggctggcgttcatggcggcgctcaaggggtacgagctcgtgctcaccatgccgtcctacaccagcctggagaggagggtgacgatgcgggcgttcggcgccaacctggtgctgaccgacccggccaaagggatgggcgggacggtgaggaaggcgacggagctgtacgagagacatcccagcgcgcacatgctccagcagttccagaaccctgccaacgtcaaggtgcactacgacacgacgggaccggagatctgggaggacacgcttggccaggtcgatatcttcgtcatggggatcgggagcggcggcaccgtcacgggagtcggcaagtacctcaaggagaaaaaccctaacgcaaagatctatggagttgaacctgccgaggcaaatgttctgaatggtggaaagccaggacctcacctcatcactggaaacggagtagggttcaagccagatattctggacatggacgtgatggaaaaggtgctcgaggtgaaaggtgaggacgccgtcaagatggctcgagagctggcagtcaaggagggtcttttggtcgggatatcatcgggagccaacaccgttgctgctctcgagctagccaagaggccggagaacaaggggaagctcatcgtgaccgttcttccgagccttggcgagcggtacctgtcgtccgcgctgttcgatgagctgaggaaggaggcacaagccatggaaccggtcgcggtggattgatctcgccggtcaagctagctagcctgccgggcacgctggagatctggttcctatcgtcacagctgccagccaagccaattgtacttccattcccccctcatccagttttttattttattttaccgtcagtgtgtcacctcatctatgaaccttgcgaaaaggaaaaaaaaagtgcatgaataatgatgggaaaatgttgaaagagagataaggttagtctctagccatttgagatggccattatttctt

SEQ ID NO: 103441 - DNA, 1656 bp, Zea Mays
cctgcccaccccacgacagcccaaagccccaaacccaaccccggcacacagactgcagcccgctacatacaaaacgagctggtggcttggcctctcctccaccagtggcagtggcagtggctggccacccaatcgtctcgttcgtcatctacctctccctcctccaacccaagctaagctaaacagcttacacagcttgctccgccatcaccgtatcgagagagacagagacaggctagcgagggaatggagaggatgctggccaggctgatgcggcggcggagctccgtccccctgtccggcctcctccaccacggaggagcgcccgccccgctgcaggccgccggcgccactggggcctccccgctgatcttgtcgcaccagcagcagcagcagcacacggccgcctccgccgtcctgccggggctcaagatcagggactccgcgtcccagctgatcgggaggaccccgatggtgtacctgaacaaggtgaccgaggggtgcggcgcccgggtggctgccaagctcgagttcctgcagccgtccttcagcgtcaaagacagaccggcgatctcgatgctggaagacgctgaaaagagggggctcatcactccaggaaagaccacgttgatcgagcccacgtcggggaacatgggcatcgggctggcgttcatggcggcgctcaaggggtacgagctcgtgctcaccatgccgtcctacaccagcctggagaggagggtgacgatgcgggcgttcggcgccaacctggtgctgaccgacccggccaaagggatgggcgggacggtgaggaaggcgacggagctgtacgagagacatcccagcgcgcacatgctccagcagttccagaaccctgccaacgtcaaggtgcactacgacacgacgggaccggagatctgggaggacacgcttggccaggtcgatatcttcgtcatggggatcgggagcggcggcaccgtcacgggagtcggcaagtacctcaaggagaaaaaccctaacgcaaagatctatggagttgaacctgccgaggcaaatgttctgaatggtggaaagccaggtatacaagaactagccccctatctttccaaaccgtggatggtttacatactatctgttaattacttgcaggacctcacctcatcactggaaacggagtagggttcaagccagatattctggacatggacgtgatggaaaaggtgctcgaggtgaaaggtgaggacgccgtcaagatggctcgagagctggcagtcaaggagggtcttttggtcgggatatcatcgggagccaacaccgttgctgctctcgagctagccaagaggccggagaacaaggggaagctcatcgtgaccgttcttccgagccttggcgagcggtacctgtcgtccgcgctgttcgatgagctgaggaaggaggcacaagccatggaaccggtcgcggtggattgatctcgccggtcaagctagctagcctgccgggcacgctggagatctggttcctatcgtcacagctgccagccaagccaattgtacttccattcccccctcatccagttttttattttattttaccgtcagtgtgtcacctcatctatgaaccttgcgaaaaggaaaaaaaaagtgcatgaataatgatggg

SEQ ID NO: 103442 - DNA, 1923 bp, Zea Mays
ccggtaataatagactgcctagcctcctccgtcttcctccgtctctctctctgcttgctgtgtgcttccattctgttagataggctaacatttggtatcagaagtccgtcgatccttggatctcgcatggcgaccacaggcgcagttgatgcccagctcaccctcgcgttggaatctcaaacgcgctccctgctgtctgaattggacaagcgcatccatgccatcgactccaagtgggcaaaccgcgtgggaatcctggagactcaagttgccgattccaccaagcgtttggagtcgttctccagggggatccatgaagacctggaggcccgtttggtgacagccgatgaagccgtggatgatcggatccgctatctggaggcgagtacgatctcccgtgtcgcggtgctcgagtcgtcttctcaagccgttgagctctggcggccccaaatcgatgcgtcgattgacgggctctacgccaacatccagacgattcgcgccgacatcgcgcagatcgtgacccaacaaccttccaacagccgttccggcgggttcggcgcagccggcatcctcggaacccccagatcggtgattgggcgttcccctgctaccttcgacaacaccgattgctcacgttttgggcccggcgctgcaatctctcaccgggacagtggtattgggtataatcaacccaatttccgctgcccggtcacgggtgcgtggaacaatccttctcctccttcgtttacgtttcctactcagtatgatcatagtggccatgttcccttgcaccgtcagttagggggtttgcccaagctttcatttcccaagtttgatggcactagcccaaaattatggcagaaacgatgcgaggattattttgctatgtatgccactgaaatcactgtttgggtcagagtagcgtccatgcactttgagggggttgctgggcgttggtttcagtctattgaaccacaagtgtcttcctggtcatggcaacagttttgtcaagctgtgcacgatcgttttgggcgtgaacagcacgagcttgttattcgcaagctgttccatatccgtcagacatcttcggtccaggattatgttgatcgtttttgtgaacttattgatgtccttgtcacctatgagcacactacagatcctttgtattataccatgaaattcattgatggcctccgtgacgatattaaatctgttatattggttcaacgccccagtactttggatactgcctgcgctcttgctttgttacaggaagaggcagattcatcccggcgtcgtgagcatcgtgggtcggagggtacgttcccagggcgttcatatccgaagttacctgctcctcctcctcccaggtgggataaatcgctgggaggggaaactgtcgccaccaagcctgtggtccctcagccgggttcttctactgacaagctcgcatcccttcgtgcttatcgtcgtgcccgaggtctgtgtcaatattgcgctgaaaaatgggacaagggtcacaagtgcgctcagacagttcagctgcatgctatccaggaagtatgggatctgttgaatccggaactcaccggatcagaaggtgatttcgaagattccacggatcagttcatgatgttattgtcccgggaggccagttctccaaaaactgcatattctacgttcaaacttcaagggtatatccaaggaattccactgctgattttgttggactccggaagttctcattcctttttgaatgtggttcacagctcctctctgcagggtgtcgcctccctggctcagcccctatcagttagagttgctaatggaaatattataaattgtaccagtcacctctccaatgcggtttggtctgtacagaacattcagtttcagtcagacttcaagattataccgcttccc

SEQ ID NO: 103443 - DNA, 1466 bp, Zea Mays
caagcaagatcattatcaaaccaatctctctcccttgcaatgaccctctcaagcgcctagggctgctaccctagaaccaagcctgcggcagaggggtataacctcgccggagaagacagctatccccatggaccgaaggtccatgtcacctggtatcagctccaggttatcctcaccaccaccagtcgcccatccctcaccaccaccagtcgccgcgccatcagccaccgcaacgccctcccacccgccctctctaactccagatgcattcactcggctcgaagagagttttggtcgtctcgcagagaagtgggatcagttcgttgtgatgttccaccgctacaaggagaagacagagaaggaactccaagcagcggtgcggcttcaggcggcagcgcgagggttcctggcacgccgccaggtacagtcccttcgtggggagaagcacattgctgtggcctccagggccaccccatggccgtcatcacatgagcaggccgtggtgcgcctgcaagccgcagtgcgcggcttccttgttaggcgggcggtgcggaagctgcacttgctgatcaactcatcgctgcaccaactcgcaccatgcgcgcccaaccaccaggtctcgtctatactttttgaaccccctgcagaagtcgagatctgggtatgcagcccccctgcacggccaaagagggtcgtctccttcattcgggcaactgccttggtgctggacagacccaacataagaacgggctggttcctccttcacctttcatccaacgtgaagtccgcagttcagctctttccttgggatccaggaggacaggaggacatagctgccgttcaaatttatattttagttccacaattattttgtattttcatcttaaataataaaggtaagccgagatgtaaaaagcttaaccttaagtcgtgtcaggtaagtctatggcagctcgaggacgagctggtcctcaagggagggggagatgtcatgggcatcatagggagcgagaggcaacaaccaggctgggataaggctagagaataagattgagatgagctggaataaggctagagaataagattgagatgagagaattgtggagagttggttagcatcagataagtccaagaaagtaggagttagttgagagtttgtaggagaagttggttagccatagggctatttataagccgcatggcagcagggaataaatcaagcaagatcattatcaaaccaaactctctctctcttgcaatgaccctctcaagcgcctagggctgctaccctagaaccaagcctgcggcagaggggtataacctcgccggagaagacaactatcctcatggaccgaaggtccatgacacatctaacaaaaggcaactaaaagctgaacaatgtagaatcactaatagttggtgtgaagagaatgaacacaataaaaacgaaacacaaatacaaaata

SEQ ID NO: 103444 - DNA, 1546 bp, Zea Mays
ttttgcactcccacccctcaaaaattttcagccgccagcaacctttcttcctcccacgcacagcagccagcgcgcagggagcttccctgtccatggcgtctcctccccttcctcgagcaagctccagcgtgcgcggggggcagcaacctcgacggtcggcctctctcccctgctgtcgctcgccctacagggatggagagcagccgtgcgctccctgcaggcaagcagaacctccagccgagcgcgctccctgtccttctcctgggcgtgtcccctgctccacggccagcaggaagccagcgcccctctgcagctccttctcccagggcgctcgacgctcctgcagcaaggccagcccccatggcgcccttcctcctcggctcaatggtgtggccgagcagcaacctcttctctctgtttcctgtgcgtgcgcaggggcagaaactccatggccgccgagctccattcctccaagcagcagctccctccatggcgccatttctcccagccggcgccctcattcctccctgcgcagcgccccttttcttctacctcttgtcggcgcccagaaattccagcagcgagcagcgcacgtcctgctgtccatggcgtgcagcaaacgtggagctcagctccacctctccccatggctgcgagctcctttccctagctgctcggctccccctcccatggaaaccagcagcctcatctcctctccccaaccgatgccttttttttccacctccggcagcaagctgcgaactccattcctccatggccacaagcctttccttgctgcgactccttcccaaggacagcaccaaccccctccttctccatcgcagcagcatcagtgcttccctcgccgcttgcatgccacccgctcgatgtattgcgcagccacattgtcgctgctcgttgtccgtcaacgcagcccctctgttttccccgttggcgcagcggccccgacgcctccacgcgctgccggttccctgttttataaagcgcagtgaacagcacgccgtcgacactcgccggttgtttgctgtttttgcgcagccccgtcgtcgtcgtcgttcaccccggtgagaccgcgacgctccgtgttcgattccgcatcgacattattttcctatgattaattatgtatgtgtgctgctttgttttatttttatggaggagaaaaccccgtgcttgcgtggagaaggcaagtcgctcgacgctcgtcgatgttcgtagcgatgcacaaatcggaatcaccgtcgttcttgcaaacgccgatttgggtttgtttatggtgagccgatgcatgtcgctctcgattaacttgattaataaattatatagatgtggttgaaatgttttggcggtaggtcgtaatatggtcgtgctcatgatttcgagttagagattggtggtcgtcgattcatagaaattgatcgatgtggtgcgtgtttaaaaattgtattggtatggattgaagtttgtggcgaaagaaaaagaaagtagaaaagaactcggatgtttttacatttcaataggaaga

SEQ ID NO: 103445 - DNA, 384 bp, Zea Mays
tattactcagttgagacatttagagctgcatatgacactcttatccctgccatgcctgacaagttccaatggccagaatctgatcatggcttcttcatgcatccaccacttctaaaatctacagctggtagaagatataatgagaggttcaaaggatgttatgaggcaggcagtagcacaaaaaagaaggggtcacaccagtgccccatttgcaagtcatatggccaccgttggtacaactttaagaatggtaaccctgaagacatagctgctatggtagctgtgaagtaagcactatgttgccttatataatttcacttttctgattttatgattatattaaggggtccattatacatgttatcattgttgttcatgccttgc

SEQ ID NO: 103446 - DNA, 426 bp, Zea Mays
ggtcctccaaagaaaaggaaaaagaatgctaagccatcatgtgagagcgccatcgtgatcgctgcctcaacacccaagacaatgtgttttcctcctagccaaggtgcctcaggaagctttggttcaaactctcataggtatggacatggctcaaatcaacctgaccaacttgccattgagtatcccttgttgtccttagctgaatccacaccaccacctacaacctccaaaccaacagcaaagaaggtgaaaacaaaagagaaggcacaagagaaggagaaggcgaaggcaaaaggaaataaaaagagacaaattccactactacctgatagtccagcaatgtctactagaagcaagacacctcaaaggcaaagccctgcctcatacaccagggcaaaaagaaaactcccggacttgaatctgtag

SEQ ID NO: 103447 - DNA, 566 bp, Zea Mays
gtagagttcaagcagtaaatggtgtgagcttcactgacctgagatgattacggaacaagcttcatacgagctagcaactcattaggacgtccgagccatggcgaggtgggagaactgcaggcgtggtcaccagcacagggggtggcacataccagctcaagcaaatcgatctagggactggggagaagaataatactagcaggaacacatgcgccacaacacccttgcagttatatttggacagaattcgtgagcagggaggaaaccttcactgaagccaaccaaagggttgtatatatatgggcagacatcactgattatgtaggcagggagatggaactcgaccacaacttggtgaacatgaattctggggcatgccagcactgcaggagcaactcaacgtggctcccatgcacatatactttgctggctcacatgcactgtccaaagaaacattgaacctggtcaagccctacaccaaaatatcacttgagaataactagagaagcaacagatgagaactccatcgagggcaggcttcaaatatcccaaaacctgatattttt

SEQ ID NO: 103448 - DNA, 456 bp, Zea Mays
ctgagatgattacggaacaagcttcatacgagctagcaactcattaggacgtccgagccatggcgaggtgggagaactgcaggcgtggtcaccagcacagggggtggcacataccagctcaagcaaatcgatctagggactggggagaagaataatactagcaggaacacatgcgccacaacacccttgcagttatatttggacagaattcgtgagcagggaggaaaccttcactgaagccaaccaaagggttgtatatatatgggcagacatcactgattatgtaggcagggagatggaactcgaccacaacttggtgaacatgaattctggggcatgccagcactgcaggagcaactcaacgtggctcccatgcacatatactttgctggctcacatgcactgtccaaagaaacattgaacctggtcaagccctacaccaaaatatcacttgag

SEQ ID NO: 103449 - DNA, 226 bp, Zea Mays
atgatccgcatggtcgttactgctcggatcgtgatgccagggcaatggtgagcgtttcagcaggccgaatactgttctccatgccatgcaagcactctgcttccttggtggggccaactcaatctttgctgatgagaaacttctcacaaccgtgaacaacgaatttgacgtggaccaagcgatgtttacattccgttcacctatatatgcctatgctatttattga

SEQ ID NO: 103450 - DNA, 965 bp, Zea Mays
catcactgtgtcgcccccacccccctcgccgcatgatgcccgcaacgtccgtggccgtcgcgcccgcccctccccccacctcgagagcggcacccggcaaccaccccactgtcaagatcaccgtgtccatataaggatggatcccctcacccgagaaccactcacgtcgagactaacgcatcccaagccagataaggatggatcccctcacatctccgattatttcgccgtccaaacacatgatttcctggttcaccctcctcccctttggcgtcctccagatcttgccttcgcccgcatcgacgtaggcgacgggggcatgacaggtcggttggtggagcggggctagaggccatcgatggtggttgtggcgacgtgctgctgggaagacgaggcaactctctcctccagcacaccctgtggtggagacttgccatacatatgacgcagctgaagctgcagagggcgcgcctgtgccgacgacggaagcaaagaagctggcgtcctctgtcacgaggtccaagcaggagatcacagaggacttctcgtcgattggcgggacatggcccccacggccgcccaagaagagaccagatcacaaagaagatccgaaaggcgagaggatttcatttcccggatcgacttacttctaccctccggttgtttgtggacagtattttggtgctggttttgttatcatgtgttgtgtttgttttattttaacatcactccagatttgatgaatcttagctcggcttctgcacgatgctaaccctaggctcgtcaggtttttttaagaaggaagccccaattcctgtgctagatccaccatgccattcaatgttgcagatcatgacgaatcttgtgattggtttgtgtcaaagcaatggatacacatatattcgcattgcatcatttctatggtttgttgtctcatttgatcgattgacgacagtgattataca

SEQ ID NO: 103451 - DNA, 1175 bp, Zea Mays
catcactgtgtcgcccccacccccctcgccgcatgatgcccgcaacgtccgtggccgtcgcgcccgcccctccccccacctcgagagcggcacccggcaaccaccccactgtcaagatcaccgtgtccatataaggatggatcccctcacccgagaaccactcacgtcgagactaacgcatcccaagccagataaggatggatcccctcacatctccgattatttcgccgtccaaacacatgatttcctggttcaccctcctcccctttggcgtcctccagatcttgccttcgcccgcatcgacgtaggcgacgggggcatgacaggtcggttggtggagcggggctagaggccatcgatggtggttgtggcgacgtgctgctgggaagacgaggcaactctctcctccagcacaccctgtggtggagacttgccatacatatgacgcagctgaagctgcagagggcgcgcctgtgccgacgacggaagcaaagaagctggcgtcctctgtcacgaggtccaagcaggagatcacagaggacttctcgtcgattggcgggacatggcccccacggccgcccaagaagagaccaggtgcaacgacaactcaatgatgagtgattggaaaatgttcggattcttttgcaagatcaaagtttctatgcacttaatcagcttgtggatttcatcatcttggtcggcaagtttgtacgacaaaggcgacccggagtcaccgtcccttgaaagcgccccacttccggatgatgataggttgcgcattgccagcgagtttagaattgtgccacatggtgatgggggccattatctccttgtcgccctctgtgacaaagtgaaattgaaggattacatgtttcacatcttctttatgttgaaattgtcttgtatgttgtttagaccttttaaaggcaacatgccacacatatctttgttttggtgttcagagctacatatggtactcttcatggtttctgttgcgagtaacagggatatcaggtttttgtacttacctatatggtcatatctgaacctataaactgttgttaggatagatacaaggtgtgcatgatcttctttctattgattcatacttacatatgtagaccatattttatcaacttatctatactatactcaaagcaccagtttcaacggtc

SEQ ID NO: 103452 - DNA, 2275 bp, Zea Mays
catcactgtgtcgcccccacccccctcgccgcatgatgcccgcaacgtccgtggccgtcgcgcccgcccctccccccacctcgagagcggcacccggcaaccaccccactgtcaagatcaccgtgtccatataaggatggatcccctcacccgagaaccactcacgtcgagactaacgcatcccaagccagataaggatggatcccctcacatctccgattatttcgccgtccaaacacatgatttcctggttcaccctcctcccctttggcgtcctccagatcttgccttcgcccgcatcgacgtaggcgacgggggcatgacaggtcggttggtggagcggggctagaggccatcgatggtggttgtggcgacgtgctgctgggaagacgaggcaactctctcctccagcacaccctgtggtggagacttgccatacatatgacgcagctgaagctgcagagggcgcgcctgtgccgacgacggaagcaaagaagctggcgtcctctgtcacgaggtccaagcaggagatcacagaggacttctcgtcgattggcgggacatggcccccacggccgcccaagaagagaccaggtgcaacgacaactcaatgtaagaattgttggattttgtctcccctccaaattcagtgtttcatgagattttgtcccttttcctttaattttcctagatcacaaagaagatccgaaaggcgagaggatttcatttcccggatcgacttacttctaccctccggttgtttgtggacagtattttggtgctggttttgttatcatgtgttgtgtttgttttattttaacatcactccagatttgatgaatcttagctcggcttctgcacgatgctaaccctaggctcgtcaggtttttttaagaaggaagccccaattcctgtgctagatccaccatgccattcaatgttgcagatcatgacgaatcttgtgattggtttgtgtcaaagcaatggatacacatatattcgcattgcatcatttctatggtttgttgtctcatttgatcgattgacgacagtgattatacattaccagttcttttgatgtatcctatgatggaaagggaaaattaatggttgaatttcttaatatgagtaggaggtgaaggatgaggaagaaaaaggggaggagttgcctccagatgttgagactttgaccacaacaattgaataaacatgtgattatcatgaactattatgtgtgctaccatttccttttgtgcttttctaattactagcgggaatgtttagcttctacaaaaataataggaatgagtttctgtacaccggtggctatgtttgaattgttaatagtgagactgagagagtggtatggttaggatgttagatttgtgcttccagtgattgattagtatcttttttggtagctggtatgtgttagttttaccataagctaaaagtttaagtagaatgaagtggatgtgttgtgccaaattaaatgaattttcatatgctcctacccaggctctgctttgtgtgttttgaactcctttgtgatgttgaacaattgtgcttattagttggtaatttactgatattccattgtcagtccattatattgttgtttaatagaatatttgtgtgtgtctcattggatattgagttattgacagatatgttttccataccaaaacaatgttcttaaacatgcatttcaggatgagtgattggaaaatgttcggattcttttgcaagatcaaagtttctatgcacttaatcagcttgtggatttcatcatcttggtcggcaagtttgtacgacaaaggcgacccggagtcaccgtcccttgaaagcgccccacttccggatgatgataggttgcgcattgccagcgagtttagaattgtgccacatggtgatgggggccattatctccttgtcgccctctgtgacaaagtgaaattgaaggattacatgtttcacatcttctttatgttgaaattgtcttgtatgttgtttagaccttttaaaggcaacatgccacacatatctttgttttggtgttcagagctacatatggtactcttcatggtttctgttgcgagtaacagggatatcaggtttttgtacttacctatatggtcatatctgaacctataaactgttgttaggatagatacaaggtgtgcatgatcttctttctattgattcatacttacatatgtagaccatattttatcaacttatctatactatactcaaagcaccagtttcaacggtc

SEQ ID NO: 103453 - DNA, 908 bp, Zea Mays
atggggtccaggcacagtgcttgctctgccgaggctgggtgccgaggttctttcgttttgcttttgttagtcacccctcctgcggggagaggtactgtgtttatcaaactggagaaacctaacgggcggctataacctctagggaatctttgtaaaagctacgtagtgataccctgccggaccacctaggaagtgatcaatggggagtcatgatccccgggcaaaacgggaatcacggctcatgggtaaagtgtgcgacctctgcagagggtaatgaaactgatatatcagccgtgctcacggttaagagcagccttgggatcctctttgattagagatactccggatacacctcagatgatgactttaatgatgatggttaatgatggtgactttaattatgtgttctagtatttcctctctaaggaggtactttttgggattataacttgggttttatgataaaacctggcttctactaacaataaatacttgaccaactaaaagcaactgcttgagcctaaccccatataaaagctagtccactccagccaaacggggcatttgctgagtacgttgatgtgtactcacccttgctttcacaaaacaccaggttgcctttggtgcaatctatgctcaggtaaagaagaaggcgtcgaggcgaatctccaggagttccaggacttcgacgagtttgaggattaggctagcgacctcccccagtcagctgcctgtggtgggttgtttacgttggctacgtttcgattttgtgtactttgatttatattatgtaaatggctctagactataataatattacttactctttattgtaattcgaagcattgtgctatgatgagtcatttatgtaatcgctgtgtacgtgaattactgatcctggcacgtac

SEQ ID NO: 103454 - DNA, 270 bp, Zea Mays
aaaacggaacgcccgacggcgatctgcgagaacaaggaagcgcaatagcaacagaacagatcagccaaagtcgaatagggaaggacggggttcgacggcaccctgggtgatgaggacatcacttctatacatacaatgaatggaccgataacacgatctcgtgcacgacagctaaatctccaggtacgttctaccctagtcaattgtgtttcagagcttacgcttggggccatggatgttttgatgattaggtaccttggagaggaccag

SEQ ID NO: 103455 - DNA, 762 bp, Zea Mays
cctctcctcactccctcccatctagcggcggccgggcggcgcctccgcacgctgccggcgttgtgcctcgcctctacgcggctccatcagtcctgcgtggccgtcgagtagatctccgtcacaggcgcgagctcatcaccgtccaggcaagcgcgctctagctcccaagccgcgcgctccaggccgcacgtcatccaggtgtcgagctccaggtcgcgccacgccgcgcgccgtctaggcgtcgagctccaggccgcgccacgcctcgcgctccaggccgtgcgctgtccaggcgtccagctccctaggccgcgcgctccagcgtccagacacgccacgcgctccaggccgcgcgccgtccaggcgtcgagttccaggccgcgcgctccagcggtccagccatatcgccctcagcgtctcagccacatcacgtcgaggcgtccagtggctccagcgtctcagcgtatgataagccatgggatatttgttctcataatgaaggaaacaactcagacggggttgattggttggaagataaatcgggtggtgatgtcggcaagaacaaatcagattacactgaaggcggaggtagtggtagtagaccttggtgccagtgcgtctgctcctgctagggctgcgcccagtcttccacaattgatccatattcgtctgagatcaattagaaaaaggaagccaatacataagagtgtctatgatctatgaaaggtaagctcatgaactttggtgtccatatgtccagct

SEQ ID NO: 103456 - DNA, 1029 bp, Zea Mays
caatcggtataagtagtgactggattagtttggatccttagattcagattcttgcctactgtttttttcttcttttcattagtcccttttcattgctgcagctggaacaagcgtgctcatcatgtagttctgttcccacgaatcagcagttggagaaatcttcggctggagttagagtgggcattttacttctctgtcctgaactgctctatcataggttgcacttggatatttagaaggggatgcatgctcatatctctagattcaaattctgcattagtgatttgtttggatattgaccccccttttcattgctgcagctggaacaagagcacgcgtgctcatcctgtagttctgttcccacgaatcagcagttggagaaatcttcggctggagttagagaggggatgcatgctcatatccctaaattcaaattctgcattagtgatttgtttggatattgaccgtaagcaccttcccatccagattgagccaaagggtgtgaacttatctcggtccattgacatcgatcagcagtcggagaagcacaagagtatgtcaagggtgtcagcttcagtggagagagagcttgttcatgaacaacccactgacgacgatgcgtctgcgctggcgtatttggttcgacgtcgttgtccaaacacgtatctctttttttatggacatgcactggaggaccgtgttgttcggatgacttttatagctaagccgacctattccagtaggagaaaatacctcaatgacttgctagatgctgatcttgtgagcctgagtcgaggtgacaggaaaagatggcataacatgtgggctgctgctgaggcagctgctcaagctgcgaggctgctgctcaggctgagcctgctgaccatgcgggccatgaagactaaacctgatggcgctgccggttctgtctgtagtttagagctgcagtcgcttatctactttctactaattctagatcttgtgaacttaggacattgtgcttgtcatgccgaatgtttggtgttctaa

SEQ ID NO: 103457 - DNA, 704 bp, Zea Mays
agttgtcaagtggcgcaggcccgataaagctctcacttgaagagataaaaaaagaacttgaatcgggtaaatacgaatgtatgttgcaatatttggatcagctcacacatatatttgtaacgtgtgatgagcataagtcaccatcagtagctgcgtattgtgccaatattagatgtgggaacttaagtagtgcaagtactgggaagcgcaacattgacgagacctcttccagccatgttcggcagaagagctcgaaagttcatgtggctcagtcattacaaaatggcatgacccacgaggatgcaatgcaatttcttaaagaccatgacatcttaggtggtactttaaaattttgtatagccaataagttacttaaagactatcaaaatctgagtacgttctcccgtctggaatcccttgaggaaaggatcagtttcctggaaggaacctggaaattagaatctgatgggtcagtttcctggcagtaacctggaaattagaatctgatccctcttccttaaaggtaagccagtttgtttaggtcttctgtagtcatgtcagttatttatcttgttcttgtgtttttttgctagtctagtctgaccttgatatctaaggggccagctaaaagcaaatacatgtcatggagactgcattcagccttggtttctttctgtctaccttttgaaagtaatgatgactgt

SEQ ID NO: 103458 - DNA, 1412 bp, Zea Mays
gctacaaccaccgtacatgctgggcctagctagcttcttgattttacttgctataaatacacgtacagacagataccagcgtcgatctgagatcgacatcgatccaccgaggtttcttgtgcgtgccgccatggccatggcagtagctcaccttcttcctcagctctccgccgaaggcaatggagctagcaggaacagaatggccattctcttgattcttcagctttttctcttgacgggtgcggtggcattctttttcattcccacgttgtttgtgtgtttctctgtttggtgctatttttttaatcttaaactggttcagcgtctctgctgagaaatctgattaattcatcatcggttctggacttgtggtctgtgtggcaaattggatacacatcaagttctttgttccataactgattcagcgctaggcgtggatggagcggcgtcgttcatcttcaccaacgcctgcaagcacgcggtgtgggtgggcgcgctccacggcgccagctcgccgccgctcgcgcggtcgggcttctacctggcgccgtccgccacgtccagcatggacgcgccgtcgtcggggacatggtccggcacgttgtgggcgcgcacgggctgcgtggccgaccccgccaccgggcgcttctcctgcgccacggccgactgcggcacgggcgacgtcgcgtgccagggccgcgggccggcgcctccggtctcgctcgtcgaggtcacgctcgccgcgccgggcagcggcaggccggacttctacgacgtcagcctcgtcgacggcttcaacgtgccggtgcgcgtggcgccctcgggcggcggcggcgactgccgccccgcggcttgcgcgggcgacgtaaacgccgtgtgccccggggacctccgcgtcgtcgcatcgtccggcggcggcgtcgtagcgtgcaagagcgcgtgcatcgcctacggcagcgcgcgctactgctgcaccgggcagtacggcacgccggcgatgtgcggcccgaccaactactcgcaggtgttcaagagcgcatgcccgtcggcctacagctacgcctacgacgacgccaccagcaccttcacctgctccggaccttccagctatgacgtcaccttctgccctgcgaactaatgaacgccctgatatcatatagtagctagggaattacgatattacatctagactaggtatttcttcaaaaaaaattatagagagatcaagtagaagcaatatgttgatgttgtcatccacgacacaacacacaaatgcataaaattaatttatattattattccatacatatgctaatcacaattcacacatggaaactggaaaatagggtggttcacctctataaagaaatgttccaatgcttttgtacctctataacatcatttatttattt

SEQ ID NO: 103459 - DNA, 1223 bp, Zea Mays
agctagcttcttgattttacttgctataaatacacgtacagacagataccagcgtcgatctgagatcgacatcgatccaccgaggtttcttgtgcgtgccgccatggccatggcagtagctcaccttcttcctcagctctccgccgaaggcaatggagctagcaggaacagaatggccattctcttgattcttcagctttttctcttgacggttctttgttccataactgattcagcgctaggcgtggatggagcggcgtcgttcatcttcaccaacgcctgcaagcacgcggtgtgggtgggcgcgctccacggcgccagctcgccgccgctcgcgcggtcgggcttctacctggcgccgtccgccacgtccagcatggacgcgccgtcgtcggggacatggtccggcacgttgtgggcgcgcacgggctgcgtggccgaccccgccaccgggcgcttctcctgcgccacggccgactgcggcacgggcgacgtcgcgtgccagggccgcgggccggcgcctccggtctcgctcgtcgaggtcacgctcgccgcgccgggcagcggcaggccggacttctacgacgtcagcctcgtcgacggcttcaacgtgccggtgcgcgtggcgccctcgggcggcggcggcgactgccgccccgcggcttgcgcgggcgacgtaaacgccgtgtgccccggggacctccgcgtcgtcgcatcgtccggcggcggcgtcgtagcgtgcaagagcgcgtgcatcgcctacggcagcgcgcgctactgctgcaccgggcagtacggcacgccggcgatgtgcggcccgaccaactactcgcaggtgttcaagagcgcatgcccgtcggcctacagctacgcctacgacgacgccaccagcaccttcacctgctccggaccttccagctatgacgtcaccttctgccctgcgaactaatgaacgccctgatatcatatagtagctagggaattacgatattacatctagactaggtatttcttcaaaaaaaattatagagagatcaagtagaagcaatatgttgatgttgtcatccacgacacaacacacaaatgcataaaattaatttatattattattccatacatatgctaatcacaattcacacatggaaactggaaaatagggtggttcacctctataaagaaatgttccaatgcttttgtacctctataacatcatttatttattt

SEQ ID NO: 103460 - DNA, 1199 bp, Zea Mays
agctagcttcttgattttacttgctataaatacacgtacagacagataccagcgtcgatctgagatcgacatcgatccaccgaggtttcttgtgcgtgccgccatggccatggcagtagctcaccttcttcctcagctctccgccgaaggcaatggagctagcaggaacagaatggccattctcttgattcttcagctttttctcttgacggcgctaggcgtggatggagcggcgtcgttcatcttcaccaacgcctgcaagcacgcggtgtgggtgggcgcgctccacggcgccagctcgccgccgctcgcgcggtcgggcttctacctggcgccgtccgccacgtccagcatggacgcgccgtcgtcggggacatggtccggcacgttgtgggcgcgcacgggctgcgtggccgaccccgccaccgggcgcttctcctgcgccacggccgactgcggcacgggcgacgtcgcgtgccagggccgcgggccggcgcctccggtctcgctcgtcgaggtcacgctcgccgcgccgggcagcggcaggccggacttctacgacgtcagcctcgtcgacggcttcaacgtgccggtgcgcgtggcgccctcgggcggcggcggcgactgccgccccgcggcttgcgcgggcgacgtaaacgccgtgtgccccggggacctccgcgtcgtcgcatcgtccggcggcggcgtcgtagcgtgcaagagcgcgtgcatcgcctacggcagcgcgcgctactgctgcaccgggcagtacggcacgccggcgatgtgcggcccgaccaactactcgcaggtgttcaagagcgcatgcccgtcggcctacagctacgcctacgacgacgccaccagcaccttcacctgctccggaccttccagctatgacgtcaccttctgccctgcgaactaatgaacgccctgatatcatatagtagctagggaattacgatattacatctagactaggtatttcttcaaaaaaaattatagagagatcaagtagaagcaatatgttgatgttgtcatccacgacacaacacacaaatgcataaaattaatttatattattattccatacatatgctaatcacaattcacacatggaaactggaaaatagggtggttcacctctataaagaaatgttccaatgcttttgtacctctataacatcatttatttattt

SEQ ID NO: 103461 - DNA, 1193 bp, Zea Mays
agctagcttcttgattttacttgctataaatacacgtacagacagataccagcgtcgatctgagatcgacatcgatccaccgaggtttcttgtgcgtgccgccatggccatggcagtagctcaccttcttcctcagctctccgccgaaggcaatggagctagcaggaacagaatggccattctcttgattcttcagctttttctcttgacgggcgtggatggagcggcgtcgttcatcttcaccaacgcctgcaagcacgcggtgtgggtgggcgcgctccacggcgccagctcgccgccgctcgcgcggtcgggcttctacctggcgccgtccgccacgtccagcatggacgcgccgtcgtcggggacatggtccggcacgttgtgggcgcgcacgggctgcgtggccgaccccgccaccgggcgcttctcctgcgccacggccgactgcggcacgggcgacgtcgcgtgccagggccgcgggccggcgcctccggtctcgctcgtcgaggtcacgctcgccgcgccgggcagcggcaggccggacttctacgacgtcagcctcgtcgacggcttcaacgtgccggtgcgcgtggcgccctcgggcggcggcggcgactgccgccccgcggcttgcgcgggcgacgtaaacgccgtgtgccccggggacctccgcgtcgtcgcatcgtccggcggcggcgtcgtagcgtgcaagagcgcgtgcatcgcctacggcagcgcgcgctactgctgcaccgggcagtacggcacgccggcgatgtgcggcccgaccaactactcgcaggtgttcaagagcgcatgcccgtcggcctacagctacgcctacgacgacgccaccagcaccttcacctgctccggaccttccagctatgacgtcaccttctgccctgcgaactaatgaacgccctgatatcatatagtagctagggaattacgatattacatctagactaggtatttcttcaaaaaaaattatagagagatcaagtagaagcaatatgttgatgttgtcatccacgacacaacacacaaatgcataaaattaatttatattattattccatacatatgctaatcacaattcacacatggaaactggaaaatagggtggttcacctctataaagaaatgttccaatgcttttgtacctctataacatcatttatttattt

SEQ ID NO: 103462 - DNA, 117 bp, Zea Mays
tttttttattttttattttcagctttgatgatgagcttccgcctagcttagcattggtagtacatcctagtgctcacccaaaggttggtattgactgggacgcacttcaaattgttg

SEQ ID NO: 103463 - DNA, 267 bp, Zea Mays
atggggataatgccaaaatccccaaaagtcgacttcaagaaagtgtccaaggtcaaggtgttgtccaaggtcaaggtgctgtccaaggtgaagctaatgtcgaacttgaaattgttcaagatcatggtgctgtccaaagtgaagctgatgtccaacttgaagaagctatccaactcgaagtttctcttccggttacaccaacaagggagtctattttacaggacagcccaatcagagtcactaggagcaagcttgctatgttgctag

SEQ ID NO: 103464 - DNA, 348 bp, Zea Mays
atgatgatggtcctcgatacagttgtcaccacctcgttcgccattctacttcttttctctctctcctcatgcctccacctccgcgccaccccattctcggcagagggcgtaggagcatgcgcctactccccgtattcgtctgacaccagccccgacagcgactcacgcagtggctattgcacgtccatgaggacgtttcacatcatgcgcgcaccatcgttttcgccgtcgtcggacgtcccattcgtcttcacgaccttcatcctgttcttcctccccaacctgttgcccccacccacggtcgcagccacgagccgaccgacgctcgtcgacgcgggtacagggtga

SEQ ID NO: 103465 - DNA, 1055 bp, Zea Mays
cacaaacaccgccaccaaacgcgtctctggaagttaggatatggaagaccatggcagccaccctttgctgcagtcgtccccagcagcagcaggtggcgccacgctcgcctacgcgtggggctactaccagcagcagcagcccagcgctccgttcggcgagcatcaggccgacagcggcgagcagcagctggacctgacgacggcgccggagctgaggcgggcgctggtccgcgcgctggccgagctgcacgcgtcgcgcgccgcgcaccaggccgagctccggcgcgtggagtccgaggccgcgcggctcgcggcgctcgtgtcgtccgccgccgccgagcgggacgagctccggcgccagtgccactcgctcctgctcctcctccaccaccaggcccaggcggcggcggcggcggcggcggtggcgcctgctccgagcctccacgctgcagcaagcgtcctgtcggcaggagggggaggatgctctgcctctgcctctgctactgcggctgcggtcgtcacgaacgagaacgcgccggacgccgacgacgcggagctggaaatggcgctcgcgcggcggctgccggagaagggccggctggtggaggccgtggtgtcggccgggccgctcctccagacgctcctcctcgccggcccgctcccgcggtggcggcacccgccgccgcccgcgccggccgacatcccgccgttccaccccggcggccgccacagccccctcgcggccggcgacgcgtccaactccttctcgtcggcctcggcggggtcgtcgtctcccgagagcaactgcagcggtgggcctccgccgccggtggcgccgcatgcgcttccttcttttcacatgagccccttctgcatgtaggcagctagctgcacggctgcaccactgatcgacaggagcaaggggcatagttgtcattagtgctagcttaagtacccaataatttctgcggcgatgtcttgtaaagactttgcacccttgcttggagcctttggacgcttgggggcccgtatgtaaattgttttggtacgccatg

SEQ ID NO: 103466 - DNA, 153 bp, Zea Mays
attttcctaatttcaaatcaagtttaaattcaaatttcgaattacatttaaatggagctcaaagtgcaagcctatttaaatgcacaaaccaaaatctctgcatggatgcaaattttcttttacttatttatttattactcacttaaataaatg

SEQ ID NO: 103467 - DNA, 1244 bp, Zea Mays
ggttttttttttcccgcgcgcagcacgggcttgcctgctagtcccacaagccgccggcaccggcgcacggggagcagaggcagagcagcgctcgccgcagcaagcgtgccctgcacacaacagaccagccaacgctccagcggcagacgacggcagcaggtccggccaccttccgcgcctcgccccggccagtggcgttcacgccttccgccatgaaggccgccgcggtccactccgtcccgccgccgtccgccgtgacacttgtgtcagtggtggcgcggcgcgcgctggtgccggcggccctgcgcggcaacgcgcggcgtggcgcggcgctggtggcgtccgccgcgcccgatggccagatgaggaggagcccgggcccggcagtggcgaagttgaccgacgtgatgtcgcgccccgtgcaggtggccacgccggggcagcggctctcggaggtggacgacgccttcttcgccgcgcggcagtactccggcctgctgcccgtggtcgacgacgacggcaggtgcgttggcgtgatctccaacaaggacaaggccaaggcgcccaatgggatggagtcaactgtagctgaagtcatgacatctcctgcgataacgctgacactctacaagactgtcttggaagctgcagcgctgatgctcaaggagaaggttcacaggataccggttgtgaatgagcagcagcacgtgatcggaatcgtgactcgctccgacgtgttccaggctcttgaggccaccagcaaagcatgggagtgagtcagtgaggtacggtaggcttgttctcgccagatgttaccccctttatttgtgtagtgatctcagcagagagtatagttatgctaccaatatggcgagaagaggacagaaaaagctaggtgtttatactggaatcgctgcaatacaagacaaataatggtgtaaatttatggagttactgaaacttatacgggctgattggttcgccggccgcgctaagccgggcgggtgcgagcctggccagccaggtaaccaaacatgtgattgcataaagtcaatgcatacgatggctcaggattaaatggtgcgggtaaccaatcacatggataaagaaggtatttatgaaggatgacgaactgttcgtcactacatgtaacacacaatagatagaatagattgtatgtcctttaggatttagacatgtacaagatacatcactatcggaattcggctctttgccgagtgtca

SEQ ID NO: 103468 - DNA, 1348 bp, Zea Mays
ggttttttttttcccgcgcgcagcacgggcttgcctgctagtcccacaagccgccggcaccggcgcacggggagcagaggcagagcagcgctcgccgcagcaagcgtgccctgcacacaacagaccagccaacgctccagcggcagacgacggcagcaggtccggccaccttccgcgcctcgccccggccagtggcgttcacgccttccgccatgaaggccgccgcggtccactccgtcccgccgccgtccgccgtgacacttgtgtcagtggtggcgcggcgcgcgctggtgccggcggccctgcgcggcaacgcgcggcgtggcgcggcgctggtggcgtccgccgcgcccgatggccagatgaggaggagcccgggcccggcagtggcgaagttgaccgacgtgatgtcgcgccccgtgcaggtggccacgccggggcagcggctctcggaggtggacgacgccttcttcgccgcgcggcagtactccggcctgctgcccgtggtcgacgacgacggcaggtgcgttggcgtgatctccaacaaggacaaggccaaggcgcccaatgggatggagtcaactgtagctgaagtcatgacatctcctgcgataacgctgacactctacaagactgtcttggaagctgcagcgctgatgctcaaggagaaggttcacaggataccggttgtgaatgagcagcagcacgtgatcggaatcgtgactcgctccgacgtgttccaggctcttgaggccaccagcaaagcatgggagtgagtcagtgaggtacggtaggcttgttctcgccagatgttaccccctttatttgtgtagtgatctcagcagagagtatagttatgctaccaatatggcgagaagaggacagaaaaagctaggtgtttatactggaatcgctgcaatacaagacaaataatggtgtaaatttatggagttactgaaacttatacgggctgattggttcgccggccgcgctaagccgggcgggtgcgagcctggccagccaggtacgcgtgttttgggcgtatcagctgatgcagaaaaatagatgtaaaataaattattttgcatctactcatgcaaccaacatctaccatatacaggtaaccaaacatgtgattgcataaagtcaatgcatacgatggctcaggattaaatggtgcgggtaaccaatcacatggataaagaaggtatttatgaaggatgacgaactgttcgtcactacatgtaacacacaatagatagaatagattgtatgtcctttaggatttagacatgtacaagatacatcactatcggaattcggctctttgccgagtgtcaaatgtttt

SEQ ID NO: 103469 - DNA, 398 bp, Zea Mays
ttggcagggataatctagcagagatttgtcagattttttgtgcaacacggaggctacatgaggcagcaacgatcccattcttctcgcatgccactttacacaagctagggatagcttctggtctcactcatggttgtggcaggggaagccgagtcggtagggtttgtcatgtagctggagttatctcaggccgcatattagatgcggtgatgatgttaatgaaggatatttacatttaccgtgcaagcaagatgacttatattatgccttgggacaataagtattgttttcactctaatgaaatacttggtaaaaagtcgtctatgtagttgtatatttgactgtgaatatttgaacccactgttacaattgttgctaattgaggtcagattttagag

SEQ ID NO: 103470 - DNA, 243 bp, Zea Mays
ccaccgccttagttcgcggacaacggcctcatcttcctcgtgtagaccaccagagccccctcctcttcctcgtgcagagcactggatccccatcttcctcacgcagagcacgaacataggagatttgcaaagcctcatcaagacggcaagagatctacaaagtccaaatcagtaaccatctgctgaaggtgatacaatgtaacatgtgcaagcataagaagttttttcagaagatcaaaggta

SEQ ID NO: 103471 - DNA, 960 bp, Zea Mays
ccagctgcctctcctaagctatccgccgtcgccgtcgccgtcgccgtcgctctcctctctcctccgagccgctgctccctctcccctgcgcgccgccactgtgggcatctacaccgctgccgctctcctctctcctctgtgccgcagctcttctctctccctctcccctgcgcgccgccactgcgggcaccctgcacgccgccactgcgggcaccctgcacgccgccgctgcgtggccctacacgccaccgctacgggtgccctacgcgccgccgtcattgctccagctcttctctcctctgtttcccagccaatgccgccgctctaactccccaaggcatcgccccgacgacggctcaacgacgccccgtcgacgcctcgcggacgccctgcgccgcagcgggcgctttacgctccatggcaaggtaccggcatctgggccaattcgccccactaggagggaaacaaactgctgcacaacttcccggggactggatctccattggccacagcacccagtggctctggtactccgtgtacgcaacctgcttccattaagaattggtcatcatggcgtgggagctcattgaagttccgggcaacttgaatccctctctcaaagactcttcagttgatgtggtggccgccaagattgatcccaagttagccaatactctcattaggcagttaagccaggtgtgccctttggagaatctgaggcatgtaaagcgtgtacgtcgacgtactgaatgtggtggaaaatctgagttatcaataatcctatgtgtttctactgggtctgaaacttgtaacatacagttctctgaagatctacagaagatagtggatacttatcagctgagtcctttcaccgcaaaagttgccaggtgttgtgctacatcaaaagaggagtgggaggaacagtgcaaactttggccaacatcttaccatcctgcacat

SEQ ID NO: 103472 - DNA, 1083 bp, Zea Mays
atgccattggtgctggcaagccttggtattgtccgtggatttcaagaggaggaattaccatcaatatttaattgcatgaaggctgctattcagttatcaaaggcaggcaatgctgcaatcattgttgatccatcaagcatgcaaatagttgcaaaggccactgaccatacacacaagcatgatacggctgaagaagggaacacattttctgaagcgaatgcagatgttacctgcccttggaatacatcgactgatgatgacaacaatctgtcacttccaggatcctttcttcctaaactcaacagtttgaacatggaaatcccatgtataaatccttggggatggatgaaaaaaaggacttgtgagcagaagccatcgccatgggatggctgttctgcatggcatcctctgagacatgctcccatggctgccattgaaaatgctgctgagagggacagaacgatgtttccttcttcgatttcaataaccaagccagattcagatggcagtcccgagaactgctgcgacaatgaaccagcaaaaaggctgaagacggatacaaaagataatgagaaaccggcatctgaatcatctggtggcgacctgtttgagaccagcagaccatatctctgcacagggtttgatatctaccttgtttgggaaccatgcacaatgtgtgcgatggcgcttgtgcatcataggttcaagcgcgtgttctacgccttccccaatcctgtggccggagcactcggtggagtctacaggttgcatggggagaggagtctaaaccatcactataatgtgtttagggtttcagtacctgaggcgtacttgaatgggttgaactgttattcgaaggaatgctgatccaacacctttccgtttttatttagaaaaaaagaggatccaagactgttttccttttttttttatttttggcacaagggcttcatattaggcctaaacttgcccatctgtattattaaatgttttggtaacaaatgtgtttatggatgtaaacgttggtgctatttttttattagtttacttaaatttaatgaaatatgatcggtttcaaacatg

SEQ ID NO: 103473 - DNA, 913 bp, Zea Mays
aaatattggtaatatattgtataaatctagtcaaatttaagaatgttttactaacatttatgcacggaacgagtgatttttataaaaataacaaaggaaaacattttttatataataaataaataaaaacggaaaagaaaatcacagcgaaggagtaggcagtcagcggccagcgccagcgaggtcgaggcatcggcgcatcgcatcgcccactttgctttgctcgctcgtctcttcgctttccgccgtggtgcatggccagtgaattccaattcgttctccctctccggctctccccaccaaaaacgtgaggcccgccggaacgagcaagcatattcacggaggcgtggatccagaggctcccccgcagcgcttgtccagaagcagccgacgcggcgtctgtccgcgggccgacggtcggtcgggcggcctgtcgtgtataaatggcggacgaggaggggggcagcggcgttgcgggagggagaggaggagaagcgctggcggcatctgctcccaacggggaccgctcagggaatagccccctcgccgtgccgtcgttctctgcagatgacagaggcttccatagatcaagcaccatgccgttgccggtggtgattaagaatgatgaaattgccaatgaaactgctggaccatcaagttcggaaaggtccagaactgagcgtcgtcggcaaaataatccagctgatgatcctgctaaacagttacttgatgaaaggattccaataaaaaagaaggtgcatatatcttacactcttcatgtacctatttcttttcagtagcttagttccttttgttttgccatgcaggcatctgaaatacacatctgtttatgaactgggaattgaatcattgaaaattgcactaactaatgtataatagtgttcaaagtatg

SEQ ID NO: 103474 - DNA, 651 bp, Zea Mays
cacatgtggcagaagcgctaaaagtaccaattcatatactgtttaccatgccatggacgccaactagtaaatttcctcatcccttttctcgtgtgaagcagcctgctggatatagactttcatatcaaattgtggactcgatgatttggcttggaataagggatatgataaatgagttcagaaagaaaaagttgaagctgcgtccagtaacatatctaagtggttctcagggttctggcaatgacatccctcatggatacatttggagtcctcatctagtcccgaaaccaaaagattggggtccaaagatcgatgttgttggattttgcttccttgatcttgcttccaattacgtgcctcctgaaccacttgtgaaatggcttcaagctggtgacaagcccatatatgttggttttggtagccttgtaagatcagtttgaccttgctttatgttttcatataaatctttttgtcatttgatctaatcgaccgtatattttaatatgttatattaaagtattctagttatcctgcgcgttcgccgttcgataataaaaagtattctagttatgctggcaatttttgtaactttcacttgtgtatgtagtttgtacttcaaagttcaaacttgtattttaatatgttatattt

SEQ ID NO: 103475 - DNA, 1283 bp, Zea Mays
cacatgtggcagaagcgctaaaagtaccaattcatatactgtttaccatgccatggacgccaactagtaaatttcctcatcccttttctcgtgtgaagcagcctgctggatatagactttcatatcaaattgtggactcgatgatttggcttggaataagggatatgataaatgagttcagaaagaaaaagttgaagctgcgtccagtaacatatctaagtggttctcagggttctggcaatgacatccctcatggatacatttggagtcctcatctagtcccgaaaccaaaagattggggtccaaagatcgatgttgttggattttgcttccttgatcttgcttccaattacgtgcctcctgaaccacttgtgaaatggcttcaagctggtgacaagcccatatatgttggttttggtagccttccagttcaagacccacaaaagatgactgaaattattgtcaaagcgctggaaattactggacagagaggtatcattaacaaaggctggggtggccttggaaccttggcagaaccaaaagattttgtatatctactagacaactgccctcatgactggctttttctgcaatgcaaagcagtggtgcatcatggtggcgctggaacaacagccgcaggtctcaaagcagcgtgtcctacgactattgtacctttctttggtgaccaacctttctggggcgaccgggtgcatgcaagagggctagggcctccgcctattccagttgatcagtttggtttgcagaagttggtggatgctataaagttcatgacgaaaccagtggtgaaagacaaggctgtagaggtggcgaaagccatggaatctgaagacggggtgacaggtgccgtcagggcattcctcagacacctgccttcgaaaaccgaggaaccgagcccaccgcaaccgtcaggctttcttgaattcttcttaggcccactaagtaaatgtttgggatgctcttagtgcagaacgcaatctgtcacggattggcgccttggcggcataccacaagagtttgccgtgatatcccatgcaaagaagctctggctcttcttttctttgtttccttttcctttcctgcgggtatttgtagtgtgcaaagagtggttgcttgtggtgtgcatggtctgcagcggatggcctgcgccctgtggtgcgtgtcattttgatgtttgccgtggagcaggcgacgatttcacgtccaacccgtacgttctgtatatttatgaaagaaagaaacagaggctaggttttccttgttct

SEQ ID NO: 103476 - DNA, 100 bp, Zea Mays
tccgagtcatttcgtgcgctagagttattaccacacaattaacaaacacatgcaccaaaataaagtacttcggcacacatgtccaatatcacacaaaatt

SEQ ID NO: 103477 - DNA, 2608 bp, Zea Mays
aaacacgaggacctcgcgacgcgactccacccacacgcacagctccatgcctgcccacgcggacgcctgagcatcagaccagaggagagctatatctactccgctcgccaccaccaccaccccagtccagcccagcccaccacacccagctctctcccttctccaccagacacagccaggccttgtcttcttcttcctcccgattcgtgtttttttcctttctttttcgctgctgcaaaatatcgccgtttcctatctcttatcccccacgcatctcccgcctcgcctccgccacacgttccgcgcctccacacctctctcgatctcgcgcgtctggatttttccgacccgatcttttccccccgcatcagctgtcttctccttgcgccgggccaggccgcctctccctcctcccttcgcttgcgtctcactactcatcactgctactgctacttcgttcgagagggatacggataccccattgccggcccactgcgcgagagagattttggtgcgactacagagtcccaatcctataccccggccccaaaactcttctctgctaccagtaaccgttccttccgccggaatcgattttgtgagggggcgagttccgccaccgtgggcgtatcaatatcggcgaacgctcgagttctcgcggcgaaaaacaacgcgttctgcgaggattccgtggtgaaagaccgggtccttttttctgcggattccagctgccaaacagagatgtcggctctcctcgacctactgatggggatcttccgccagcagaccctcggcggcgccgccctggagctggccgcgctggcggcgcccctctggcttgccgcgctcgttggcctcctcatcgggtgggcgtggcgcccgaggtgggcgggggtcgtcgtcggcgaccacaacgcccagcaggcggcgcagctccctccgccgcccgccgctgccgcggtggtccctcgcaacgaggcgcccgccgtcgtaacgagaactgtggtggctcctgcggcgcccgaggacgagcagctggcggtgaacacccgtgacttgatgcacctctggcggctcgtccaggagaaggacggtggcccgtcgtggatccacatgatggaccgcaccttgccgaccatgaggtaccaagcctggcggagagacccaccgaatggtccaccacagtaccgcagtagcactatctttgaggatgcatcaccagaggttgtgagagatttcttctgggacgacgagttccgggtgaagaacagctgggatgacatgcttcttcagtacgagacactggaacagtgcgccaagactggaaccatggttgtccggtgggtcaggaagttcccgttcttctgcagcgacagggagtacatcataggccgcaggatatgggcatctgggaagacgttttactgtgtgaccaagggcgtgcctcgtccctctgttccaagacaaaacaaacctcgtcgtgtggacttgtactactcgagctggtgcatccgtccagttgaatcaagaaaaggcgacggtgcaatgactgcatgtgaggtgctcttattccaccatgaagatatggggatcccatgggagattgcgaagctcggtgtccggcaggggatgtggggctgcgtcaagaggatagagcctggccttcgggcataccaggttgcgaggactgctggagagcctatctcaaaacatgccgccatggcgcatgttaccaccaggttcgatgccgacgagctcgtcacggaagacagcgcggaggccagttcatccagtgacaacaacaagaccgccgaggttgagaagccaaagcactggacaaacaacatacccaaggttctcatgatcggcggcgccgtcgccctggcttgcaccttcgacggtggattgatgaccaaggccgccatattcggcacggcgaggaggtttgcagggccaggaaggcggtaggtggatggagctggtcaccctagagcaatgccatgctaatcatgtgtagcaaagcgttggttggatggatgcctggaagtgccctaagcagtcctttttgtagcaatgcactgcagaggacagaatgccttgtctagttgctcagtctagacatcatcctcatgttgcagataaggtggtgtgctcttattacagatcagtatcagttgagaaaaatagatccctgcacatcccgagaaaggaaatggacgacaaagatccagcgacacagagaagtgtacgtaagcagaccgggcatgcttgtgctgctgctgcagccgcgccgccgggttagagccagctggataggttagaaatgtagcattattatgaggacaaagtgtacgatgaacaaggttcattctggcagctgtacgacgaacaaggttcattgtcgttagatgaaacgacaagaattcactgctgtttagtaacaagaattcttggtcttgtagctctggcatctatttgttctcccctatggaaactagatgttgacctttttggcagttggtgcaggatttttgcacgtacaagtttttacccaatgctgtgtccaatccagctacgctgtgtgtttggaataagaaattttttctct

SEQ ID NO: 103478 - DNA, 130 bp, Zea Mays
ctccttttcccatttccattttcaaaccctaatctcctttttgggttccaattcaattttcttattagtacattttgattaatagtattgctattattattattattattatatgcttaacaaacaaaac

SEQ ID NO: 103479 - DNA, 194 bp, Zea Mays
acacatgatccacggctaattctgtagtaagcatgccaaatgcttggaagggtcgggacggggagagcgatggcgatgggtctggtggccgcaaggacagtgttgaagaggcagagcagttcctgtgctccatgctcggggataattccgagcttgacatgggtgttgtcagagacgtgccaggtgagcctgtg

SEQ ID NO: 103480 - DNA, 1001 bp, Zea Mays
caccgtttggtttgttcgtagggttttctgcggggatttgtttgtcgccaactcgccggcagccaagatgaggccggtcttcgtggggaacctggactatgacacccgccactcggagctcgaccgcctcttctaccgctacggcagggtcgagcgcatcgacatcaagtcaggctatgcttttgtctactttgaggatgaacgtgatggcaatgatgctatacgggctcttgatggttatccatttggccctggcagacgcaggctttcagtagagtggtcacggggtgagcaagctggtagacgtgatggcaacaaaccagaagcaaatactaagccaactaggacactgtttgtcattaactttgatccaatgaacacaagagtcagtgacatcgaaaggcacttcacaccatttgggaacatatcaagtgttcggataaggaagaactttgcttttgttcagtttgaaactatggaagaagcaagaaaggctcttgaagctactcatgctaccacccttttggacagggtgatttctgtcgagtacgccttcagggatgatagtgaagtgagtgataggtacggcagcccaagaagaggtggtggctatggtaggcggggtgatagcccagtgtaccggtcacgtcctagtccagactatggtcgcccagcaagtcctgtatatggttcatatgacggtcctggtcctgttcgtgatcgctatcggagatctcctgcttatcgatcaaggtccccacctgcgaaacgaagagcatatgactaatcgagaaccctctgttatgccatatatggcctaggaacaccctgtagcaagaacttactgtacctgtaccggagcgtcaccttaatgtccttaaattcccgtgtttaatggtctgtacatggttatgctatgcgactgtcaggtttcactgcatgcaatattgtcatttggctgctaccctttgtttggccttgggatgctcgatctctatttt

SEQ ID NO: 103481 - DNA, 1379 bp, Zea Mays
caccgtttggtttgttcgtagggttttctgcggggatttgtttgtcgccaactcgccggcagccaagatgaggccggtcttcgtggggaacctggactatgacacccgccactcggagctcgaccgcctcttctaccgctacggcagggtcgagcgcatcgacatcaagtcaggaactaccagggcaaaacatagcttccccagggctcttcaactccttccattcaataacctggccatcatttccttcacttgaaaccatctgttcatgtgccctgatgcaaactgttactgctgctcgagcatgtttagcgggatcgtgccatcagtaccatcatgccttaccatgccacgactagaagtatcaccaacatgacaacatgctatgtgtactacattgataagcaagagttctatttatggcgaagcatgtccaatgtctccggtcattctttcttactttggatataagttgttcaacaccatgcttaggtcttatcatgaatggaatctaccactctagtgctcttcataccatcagaactatgcaggctatgcttttgtctactttgaggatgaacgtgatggcaatgatgctatacgggctcttgatggttatccatttggccctggcagacgcaggctttcagtagagtggtcacggggtgagcaagctggtagacgtgatggcaacaaaccagaagcaaatactaagccaactaggacactgtttgtcattaactttgatccaatgaacacaagagtcagtgacatcgaaaggcacttcacaccatttgggaacatatcaagtgttcggataaggaagaactttgcttttgttcagtttgaaactatggaagaagcaagaaaggctcttgaagctactcatgctaccacccttttggacagggtgatttctgtcgagtacgccttcagggatgatagtgaagtgagtgataggtacggcagcccaagaagaggtggtggctatggtaggcggggtgatagcccagtgtaccggtcacgtcctagtccagactatggtcgcccagcaagtcctgtatatggttcatatgacggtcctggtcctgttcgtgatcgctatcggagatctcctgcttatcgatcaaggtccccacctgcgaaacgaagagcatatgactaatcgagaaccctctgttatgccatatatggcctaggaacaccctgtagcaagaacttactgtacctgtaccggagcgtcaccttaatgtccttaaattcccgtgtttaatggtctgtacatggttatgctatgcgactgtcaggtttcactgcatgcaatattgtcatttggctgctaccctttgtttggccttgggatgctcgatctctatttt

SEQ ID NO: 103482 - DNA, 1776 bp, Zea Mays
caccgtttggtttgttcgtagggttttctgcggggatttgtttgtcgccaactcgccggcagccaagatgaggccggtcttcgtggggaacctggactatgacacccgccactcggagctcgaccgcctcttctaccgctacggcagggtcgagcgcatcgacatcaagtcaggtctgcctgcccttgcattccctccttttgcccacccccttgtttatcttcgtcttcggccggttttagattcgatctcatcttattgtgtacctagccacttggtatatcttcatgtttaaatttcaacgaattgaagaaaaaaaaggtggtggagtaagatactctgatactttgcggttgttgtgctgctccatgcgatgtaactgcagttgcaggcacagatgtttaaatctttactctggcgcaggaactaccagggcaaaacatagcttccccagggctcttcaactccttccattcaataacctggccatcatttccttcacttgaaaccatctgttcatgtgccctgatgcaaactgttactgctgctcgagcatgtttagcgggatcgtgccatcagtaccatcatgccttaccatgccacgactagaagtatcaccaacatgacaacatgctatgtgtactacattgataagcaagagttctatttatggcgaagcatgtccaatgtctccggtcattctttcttactttggatataagttgttcaacaccatgcttaggtcttatcatgaatggaatctaccactctagtgctcttcataccatcagaactatgcaggtgcagtacatttctgattattttaggcttgggtatactcatgtgttgagttgttaattgtaaaaacagaggtgcaactattctcgtgattgtttagacatttgttattaattttcatcgttctgacttgcacgtttacatctgtaggctatgcttttgtctactttgaggatgaacgtgatggcaatgatgctatacgggctcttgatggttatccatttggccctggcagacgcaggctttcagtagagtggtcacggggtgagcaagctggtagacgtgatggcaacaaaccagaagcaaatactaagccaactaggacactgtttgtcattaactttgatccaatgaacacaagagtcagtgacatcgaaaggcacttcacaccatttgggaacatatcaagtgttcggataaggaagaactttgcttttgttcagtttgaaactatggaagaagcaagaaaggctcttgaagctactcatgctaccacccttttggacagggtgatttctgtcgagtacgccttcagggatgatagtgaagtgagtgataggtacggcagcccaagaagaggtggtggctatggtaggcggggtgatagcccagtgtaccggtcacgtcctagtccagactatggtcgcccagcaagtcctgtatatggttcatatgacggtcctggtcctgttcgtgatcgctatcggagatctcctgcttatcgatcaaggtccccacctgcgaaacgaagagcatatgactaatcgagaaccctctgttatgccatatatggcctaggaacaccctgtagcaagaacttactgtacctgtaccggagcgtcaccttaatgtccttaaattcccgtgtttaatggtctgtacatggttatgctatgcgactgtcaggtttcactgcatgcaatattgtcatttggctgctaccctttgtttggccttgggatgctcgatctctatttt

SEQ ID NO: 103483 - DNA, 342 bp, Zea Mays
cctttttagtatttttacttattattaggggttctcttgttatctaatgagaacacaattgtatattctgcagatctcctgcttatcgatcaaggtccccacctgcgaaacgaagagcatatgactaatcgagaaccctctgttatgccatatatggcctaggaacaccctgtagcaagaacttactgtacctgtaccggagcgtcaccttaatgtccttaaattcccgtgtttaatggtctgtacatggttatgctatgcgactgtcaggtttcactgcatgcaatattgtcatttggctgctaccctttgtttggccttgggatgctcgatctctatttt

SEQ ID NO: 103484 - DNA, 174 bp, Zea Mays
atggacctcctcgagaagatgatggggcggggagtgctctcggacctgcagaacttctccggcctgatggagcacctggccagcgttgtcgacctcaatggcatggctggacgattggaaatatatctcactgtgatccatgtacagttaatgattcaagtccctctcacttaa

SEQ ID NO: 103485 - DNA, 186 bp, Zea Mays
atggacctcctcgagaagatgatggggcggggagtgctctcggacctgcagaacttctccggcctgatggagcacctggccagcgttgtcgacctcaatggcatggctggacgcctcgatggtatctacctaacctgtggtatttgtaggttgacttggatttggggaattatgagtgtttcatag

SEQ ID NO: 103486 - DNA, 321 bp, Zea Mays
atggacctaccaggttggtacctcacgtactcatatcatctaatgtcaaactgctactctccccagcccctctctgttacttcgaacctatacacaaataatgattgtgagacttcgcgcatgaagatcagcctgcaccgtgaggtgctaggcgtgcgttccatcgtcaggagctcctccgtcgagtggggttctgtggccaaaaagcagcccatgacatggcacaaggacacaagagactccatgtggagctccacattgaacatcacaatgcatcaagatgattgggtccctgcatttgaacgggggatgggtccttga

SEQ ID NO: 103487 - DNA, 934 bp, Zea Mays
gacgcacaccggccagcgggcagctcttcctctcaggccaagtctactctcacctcccccgtctctcagatccacgctgcctagttgttcggacttcagaccccgccgtgcgctgcccatggccgcgggtcgcggcgacgcggcgagcatggtggcggtgggtctggtgtggggcgccaccaacgcgctgatgcggcggggcgcgctcgtctgggaccgccgcgcccgtgcctgcccctccggcaacgtcctccggcggtgggcggagctgctcctgacgtggcagtactcggcgccgttcgccgccaacctgagcgcgtccgcggccttcttcgcgctcctcggcggcgcgcccatctccgtggccgtccccgtcaccaacgccgtcactttcgccgccacggccgccgccgccgcggcccttggcgagcgcgtccggccagcgcccgcggtccttggtaccacgctcatcgtcctcggcgtctgggtctgcatctcgtaggcttaggctgaagatctgcttggtttagttctggcattacagtcgtcgcatggggggaaaaaaggaagttttgagggcaattctcagattccatttcactcctctgtgctgtgttgccaattgccatatgagtgaattattcccagtttgttgatggcagcggcgtttcattagctagatggtcagaatataatgcagtttcattctggtaattttggttactgaatccatttctgcttaggtgatgaatgaatataacactacggttccattcattacatcctgagggttgacatcccacagcagagcattcttctacccttggagctaatttgagaaccttattttatcaattgatttctaaattctccttggcattgaattggatcaacagagttgtttttccaaattcatttcaagctgaaatggtat

SEQ ID NO: 103488 - DNA, 937 bp, Zea Mays
gggaagtggtggtggaagggcgaggcgataatggtgacgacgaaaaggaggagctgcgggaggagaacggggaagaagattctgtgtcgtgatgtgactgtgagagcacactgggcctccaacgatcttcctttctgcttcttgggctgacgatggatcgagcgggagacgtcgccgtcgaggtgggggcaccgccaaatatgatctgcgtttgggggcccatatagacatgagtagggcccggctggccaagcccgttcatcggcggcggagccggagcagaagaagcctcgtggacggtcgcagtacgtggacgcggcggcgtcggcgtccggtatggatccggtttcgccggaggatgcgacgcctgctgcggcacgcctaccgggtaggccatgacgggtgacttattctgagccgcctcgtcgtgctgcggcacgcccaccggtgcataggcgctgaagttggccgccttgtccgggacccgctttaccaccggcgcgacgacggggcccaggcggtaggacacgttcagcacgccgcgcggttcccaccggtgcaccttccggacctggtacgacgccacctgcggcggctggggcccggcgccggtcgcgccggcgaggatgtcggcgagcgggacgacgacctcgcccacgtcgcggtcacccaggagccgctcggcccggagcagcacgtggagggacgcgccggacgccgtcggagggacggcgaaccggaacgtcgcgttccagcacgggttccgcccgccgtatgggtccggctccgtgcactgccgcgtcagcgggtcgccggagatgctcaccacggcgtacacgtgcatgcgcgtcatcaggttcacgctcttcagctcctgcgctgacaggaggctcagctccaactcccggtatgccatgctacgactgatcgatctctg

SEQ ID NO: 103489 - DNA, 359 bp, Zea Mays
atgacctacaccacaggcttgagcgtagtccgcatctcgtgcttctaccttcctgtttctattgatgcatctgtctcgaaagatacactcaaatctccagccatcctcttcataagacaaacaaaccaggcattttgtccatggatgttcatccttcaaaggatgttgcaactgggggtatcgatacaaatgcagtaatctttgatcggtcatctggtcaaatcttgtgcacgcttactggtcactcaaagaagataaccactttgaagtttgttccacgggatcaactctttgtaactggatcagcagataaggcaatttccatttaccataggtttaaaaatggtgctttcaactgt

SEQ ID NO: 103490 - DNA, 413 bp, Zea Mays
gtcgctgctcgcttcgcatcaaccgtatccgcttcttgggaaggctccatgcctcgccccgccgcaacaaactcctccgctccacacctctcaccaagaccgccccttccctgcccgcacacggcggcgccccaatctctccaccacgtgtgacggcgacggcgccccatccctctccagcgcgcgtagaggcggcgtccctccctctcccgtgcgtggcggtggccggatgcggtggaggcggagggtatcgccatcggcggtagcggcggcggcggaggaggcggcgccatgaggggggcgcgggcgggagtgggcgctggctgcggcggcaggaggtgggacagcgagcctgtgagctctcaaggttcatctcctttacatgtctccttcaccataccaatcccattgat

SEQ ID NO: 103491 - DNA, 646 bp, Zea Mays
gtcgctgctcgcttcgcatcaaccgtatccgcttcttgggaaggctccatgcctcgccccgccgcaacaaactcctccgctccacacctctcaccaagaccgccccttccctgcccgcacacggcggcgccccaatctctccaccacgtgtgacggcgacggcgccccatccctctccagcgcgcgtagaggcggcgtccctccctctcccgtgcgtggcggtggccggatgcggtggaggcggagggtatcgccatcggcggtagcggcggcggcggaggaggcggcgccatgaggggggcgcgggcgggagtgggcgctggctgcggcggcaggaggtgggacagcgagcctgtgagctctcaagataatttccaggcttcagaactttgacaggagcagtgttgcatctgttgtcacagctgcagataaggtgtggacaatacatctacctgtcaacgcttactagagttactatttcgttcttgcagacttctttgagactatatgatgtgaaaagagaggtctctattacactgtttttatctgttgttttcttctagaggtacgaataatctaagattgtgtcgctgatgattttgtcaagaaagaagtctagaatcagacggcaggtcattgtgcagga

SEQ ID NO: 103492 - DNA, 711 bp, Zea Mays
gtcgctgctcgcttcgcatcaaccgtatccgcttcttgggaaggctccatgcctcgccccgccgcaacaaactcctccgctccacacctctcaccaagaccgccccttccctgcccgcacacggcggcgccccaatctctccaccacgtgtgacggcgacggcgccccatccctctccagcgcgcgtagaggcggcgtccctccctctcccgtgcgtggcggtggccggatgcggtggaggcggagggtatcgccatcggcggtagcggcggcggcggaggaggcggcgccatgaggggggcgcgggcgggagtgggcgctggctgcggcggcaggaggtgggacagcgagcctgtgagctctcaagataatttccaggcttcagaactttgacaggagcagtgttgcatctgttgtcacagctgcagataagaggtacgaataatctaagattgtgtcgctgatgattttgtcaagaaagaagtctagaatcagacggcaggtcattgtgcaggactcaagtttccttattcttcatccaagatgttaattgaagtcattatcaacacaagttagctgtataatcaacctactctcttcgcatacaatcaacatctatgaaaaccaggaagcaacctataattttctcacatgtgtgtattttttaaagacaaaatagaatgcggcctataaattagttaaatttagaaa

SEQ ID NO: 103493 - DNA, 1832 bp, Zea Mays
gtcgctgctcgcttcgcatcaaccgtatccgcttcttgggaaggctccatgcctcgccccgccgcaacaaactcctccgctccacacctctcaccaagaccgccccttccctgcccgcacacggcggcgccccaatctctccaccacgtgtgacggcgacggcgccccatccctctccagcgcgcgtagaggcggcgtccctccctctcccgtgcgtggcggtggccggatgcggtggaggcggagggtatcgccatcggcggtagcggcggcggcggaggaggcggcgccatgaggggggcgcgggcgggagtgggcgctggctgcggcggcaggagataatttccaggcttcagaactttgacaggagcagtgttgcatctgttgtcacagctgcagataaggtgtggacaatacatctacctgtcaacgcttactagagttactatttcgttcttgcagacttctttgagactatatgatgtgaaaagagaggtctctattacactgtttttatctgttgttttcttctagaggtacgaataatctaagattgtgtcgctgatgattttgtcaagaaagaagtctagaatcagacggcaggtcattgtgcaggactcaagtttccttattcttcatccaagatgttaattgaagtcattatcaacacaagttagctgtataatcaacctactctcttcgcatacaatcaacatctatgaaaaccaggaagcaacctataattttctcacatgtgtgtattttttaaagacaaaatagaatgcggcctataaattagttaaatttagaaagtgcctgttaaaagagccttttttctgcacaggtgtttaaccaaaatttgtctaaatcggtggaaataaagctgttattggtctactcaaccttattcatgatcatgttacaagtccattacttgtaagccaccataacaaacttgctgcagggaggtgcaacccatgttgacatagcatgtgacaaggacttagtaaagcttgccatggatgttaccaaccttccggtaagctatccattcatagggtgattggaacctgtggttgtaattgccgttatggtttcgcctagcatcagagttggttgtgctaagtgcatttctggggaaaactgcatattgcagatctatgtctcatttgtagatccttcagcgttccattctgcagtacaagcaggagctaaaatggccaggcactaaacttccgatgctaaccatgcaaaaatttcaaaagaaagtcatttttctataacatatgtttgcacccttaaaccatctttctttatggtctgttttatttggtaatttatctatctgatcagttttcaattttgtatcgcatttcaaaattttcagaacatagggagcatcagcatgcttggtagttggcacttcttagtcttaatttgaatgtgttcacagctatactgatatacaattctccaaattgttaatgaatatgttctcaacaagtatgatattgcatcaattggatttaggaattatgaataagtatattattgccctagcattctgaactctgtacctaaatttagctttatttctctaagcctgtttcattcagttaccttggccgcaacagttgtaaagtaaaactgaatgctactaaaaacattagttctatttttatgtattttgattgttccaagcagcataattaattacatagtgattttgaagtgttcttttcagttagtcagtactttgatgtatatcaggattaatctctggtgtttaatacagtgttttgtagcgattaatggtgttgtctcaatgaact

SEQ ID NO: 103494 - DNA, 2128 bp, Zea Mays
gtcgctgctcgcttcgcatcaaccgtatccgcttcttgggaaggctccatgcctcgccccgccgcaacaaactcctccgctccacacctctcaccaagaccgccccttccctgcccgcacacggcggcgccccaatctctccaccacgtgtgacggcgacggcgccccatccctctccagcgcgcgtagaggcggcgtccctccctctcccgtgcgtggcggtggccggatgcggtggaggcggagggtatcgccatcggcggtagcggcggcggcggaggaggcggcgccatgaggggggcgcgggcgggagtgggcgctggctgcggcggcaggaggtgggacagcgagcctgtgagctctcaagataatttccaggcttcagaactttgacaggagcagtgttgcatctgttgtcacagctgcagataagaggtacgaataatctaagattgtgtcgctgatgattttgtcaagaaagaagtctagaatcagacggcaggtcattgtgcaggactcaagtttccttattcttcatccaagatgttaattgaagtcattatcaacacaagttagctgtataatcaacctactctcttcgcatacaatcaacatctatgaaaaccaggaagcaacctataattttctcacatgtgtgtattttttaaagacaaaatagaatgcggcctataaattagttaaatttagaaagtgcctgttaaaagagccttttttctgcacaggtgtttaaccaaaatttgtctaaatcggtggaaataaagctgttattggtctactcaaccttattcatgatcatgttacaagtccattacttgtaagccaccataacaaacttgctgcagggaggtgcaacccatgttgacatagcatgtgacaaggacttagtaaagcttgccatggatgttaccaaccttccggtaagctatccattcatagggtgattggaacctgtggttgtaattgccgttatggtttcgcctagcatcagagttggttgtgctaagtgcatttctggggaaaactgcatattgcagatctatgtctcatttgtagatccttcagcgttccattctgcagtacaagcaggagctaaaatggccaggcactaaacttccgatgctaaccatgcaaaaatttcaaaagaaagtcatttttctataacatatgtttgcacccttaaaccatctttctttatggtctgttttatttggtaatttatctatctgatcagttttcaattttgtatcgcatttcaaaattttcagaacatagggagcatcagcatgcttggtagttggcacttcttagtcttaatttgaatgtgttcacagctatactgatatacaattctccaaattgttaatgaatatgttctcaacaagtatgatattgcatcaattggatttaggaattatgaataagtatattattgccctagcattctgaactctgtacctaaatttagctttatttctctaagcctgtttcattcagttaccttggccgcaacagttgtaaagtaaaactgaatgctactaaaaacattagttctatttttatgtattttgattgttccaagcagcataattaattacatagtgattttgaagtgttcttttcagttagtcagtactttgatgtatatcaggattaatctctggtgtttaatacagtgttttgtagcgattaatggtgttgtctcaatgaactcatacatgcgttttcttcgatcgtaccaggaatcgaatgttgctggttagattcatttatgttctgttcgtgctcatggtgtcttgtagaatagatagagtgtatgcctgtgttctctttggaaagtgtattttggtgcaacaacctctattttttgaactcaggttgatgcttctgtttttgaatgtttctccacatataatgaatatgggttgggtttagaaggtgctagacagagaccgattttttaaggttgacagcctaattatgaggcatacaattttttggctctcctgtatgacatttcatggaaacaataattttctctgtatcgatgtttgaaagaccgtaactatttgttgataagctctagatggtgttggttgacctcttactg

SEQ ID NO: 103495 - DNA, 890 bp, Zea Mays
tgctacacttggtgttggcatatatttttgggtgctaacatttgtgattctgctgcagtaagacacgtggtatgggagttgggcgcaagctcaagacccacataaggaactagaggtgggctgacaaagcctgcaagaagagccatctcggcaacgagtggaagaaaccctttgctgggtcatctcacgcaaagggaatcatccttgagaagatcgacattgagactaagcagcctaactctactatccgtaagtgcgctcgtgtccagctggtgaagaacgggaagaagattgctgcctttgtgccaaacgatggttgcctgaactacatcgaggagaaccatagggtgcgagagcggggaagggagcgacggtggtgcatggtgaataagcagaagccatctgcgcctcgaccggacagtgacataggtgatccacagcatattgtcgctgttctatatatcagggtgactattccgtggtttctttatccaggaagtttttgcattgtgggtggttcacgggcaagtgcaagccgcgctttgggtgcaggacattgcggggccgcccgcttcttcccctacgacaactgcgttgacatgaggtccacgggcaccaacaaggggttcttcacgggtggattttatttgttgcattcttggaaaatggaaaggagggcgtattatggcggctacgagggaccgatgttcctgtgtggcggtgacaacgacaccgtggagccaagcggattcgttgccggggtgacgtccaaccacgtcgtcgcggatggcctcgggatggcacagttcctagtcaggagctgggatgtgccatggagagcatggagcatcacgagccccagcatccagccaccctcaacatcgacttga

SEQ ID NO: 103496 - DNA, 1797 bp, Zea Mays
cgccaccaccgcgagaaagcaggcatcgccttcacagccgacaaaagctacggcctatggcggatacggtcgcccctccactgcctcccttgccgcgctgtcttcttcatctcatcgcttcccatagttgtgccagttggagacccttctgttgctgaaggagacctacataaactatagttagccgctaagttaaacaagccacgcgctaggtcagaacctagcaggcttaaggatcagtaaaatgatatctgttcaacatgaggcacaacgatatctatctttcaagaatcaataaactgatataagagtgagcgcctctcaacttgagtggattatcttgtttctatgtttttgtttatcacatagacgaagttaatgcttaatccccagagatgcatataaccaagtggcacttacttggatctgagaacctctagtgcttgtttatctcaagtaagccttttgagtcttaatgtttcattgaagaacatcaatgcttaattgcaagtcaatgttgtaattcttgagaagtcatggaagcttataagaagaaaggatgggctctaacaaatcatttacctaatttaccaggtatatcaactattttacctagatttattcaggaaaatttacatttagcctttctttgggagaatcttactttttaacttatggtgcacaattagtccacttcttttgagaacaaggaggttcatcatgaaccagttgttcacaatatgctaaattgttagaaagttaactactaactacaatgaaaccgttttttatgaaacagttattattttgtcaccacttgcaatacagaagacaaaactcatgaaatttgatagatgtaatcctcacatttgaaccatagtagtgcagtgcagtaacacaagaatagtttcattcattatctgcaaagtcatcccttatagttgtcaatgaactatcatgtgaagacagaataagaactttgtgattctcacatttgcgattgcttgtttatttatgtgtctgaataaaagtgttactataaaatatttgacctattttggaaattttatttattgtgtaatcatggcctagatgtttagattattgattagcagattttctatgcattattctgagtttgtagacaacagacatgggtgtcttttgatattaattgtcaggtcaaaggtcagttttgtggaaaatatacaatatgttaatatcttcaatagtacaagatcttgtactacatgtcaatgttaatatcgactaatttcttgattattttcaataggatgggagagtgtcgaatgctttttcagatactatttcttggtccgtcaaatctatttgagctaaatgcaagtttttgctcaaatgtggcaaaaaatgattgtctcaccaattgtgagcacgactgcctccaacaaagttagaatgtaacttcttttaacagatgcaaaatctggcattattatatccttttttacacatacatatgacctttgtgatatctcgtaatgtgaggtgttcaactatgtctaactactaattattgccttcacctatttgtataggaaaagatggaatagaactttggtggccgcacatgtgtggagactagaattcatatatacttagttaggctcaacgttaacgcaaacagttgataaccaaaattttcaattagtactttagtttgaatttagattacacttttgtatgagttatttgacaatgcttatttattagatattgaatgatacttatctatattatattaattataatgttatt

SEQ ID NO: 103497 - DNA, 784 bp, Zea Mays
cgccaccaccgcgagaaagcaggcatcgccttcacagccgacaaaagctacggcctatggcggatacggtcgcccctccactgcctcccttgccgcgctgtcttcttcatctcatcgcttcccatagatataagagtgagcgcctctcaacttgagtggattatcttgtttctatgtttttgtttatcacatagacgaagttaatgcttaatccccagagatgcatataaccaagtggcacttacttggatctgagaacctctagtgcttgtttatctcaagtaagccttttgagtcttaatgtttcattgaagaacatcaatgcttaattgcaagtcaatgttgtaattcttgagaagtcatggaagcttataagaagaaaggatgggctctaacaaatcatttacctaatttaccaggatgggagagtgtcgaatgctttttcagatactatttcttggtccgtcaaatctatttgagctaaatgcaagtttttgctcaaatgtggcaaaaaatgattgtctcaccaattgtgagcacgactgcctccaacaaagttagaatgaaaagatggaatagaactttggtggccgcacatgtgtggagactagaattcatatatacttagttaggctcaacgttaacgcaaacagttgataaccaaaattttcaattagtactttagtttgaatttagattacacttttgtatgagttatttgacaatgcttatttattagatattgaatgatacttatctatattatattaattataatgttatt

SEQ ID NO: 103498 - DNA, 1235 bp, Zea Mays
ctccaacgacgacgacgacgtccattattgcaactacattcccactactgatccatccatcgcttgttattttgtctgcttgtcctagctatatatatagtctggttgccggggccggccttattcccatacacatatcatcgtctttggcggtcgagattcacctatagctagctggagtccagcagcagcaacatggtaggaggagcgggaggagaagtcatcgggggcggcggctgcagcggcgaggtcgtggtggtggtcgtcggccgggccgagatcgacaccagggcaccgttccgatcggtcaaggaggccgtggccctcttcggcgagagggtcctcgccggggagctctccgctggacgacgaggaccactctcctccgtcaccgagaatcgaatggcggcaacaagacccaagcaccacgccatgagtcctgccaccggcgcggtcaccacggctgcgctgcgcgccgtgccaccggtagtcgtcacagcgggtcagctggaggaggctaagcagaaactggagaaggagcgggaggagaagcagaagatggccgggtgcatccagaccctgcaagaggagctcagccacgccatggaggaacttaagaggctcaaggcgcgggacgacgaggaggccgccggaaccaaggtcatcgacctggagatcgacgagggcctctactttaccgaggccgccgaaaagcaaatggcgccgccgccacagggcgctgccggcggagcaggcgagctccagaagaagaggtacgtgacgttcgctgacccgccgacggtcgccaccaccgccgccgccgcgtgccgggcgccaccgttgccggacgtggtgatggaggtgcaccgcgcgccaacccaccagctccaccagccgcacccgcattactaccgggagccgcggttccagaggcagatgtcggccgggcacgaggccgccaaggcgatggcggatgagggaaggaagaagaagaagccgctcatcccgctcgtgggcgcgctcttcatgcggaggaagaagagcagcaaaagttgccacgacgacgtggcgttttgatccatcaatacatgcatacgtatatgcatgcatccacggagtgatggaggtgcttttattttaatttttttaatatatatgtctagataatggaatgcgcactgataatgcatggatctttgcaaaataaataaatatatccaatacacaaatatatc

SEQ ID NO: 103499 - DNA, 303 bp, Zea Mays
atggctggtcgtggcacgacgacaggcgccgttgctgtgggtgaagagcggcggcgactgccagaagcagggctgaaccgcatcatactgcggtgggcgttcatcgacaaggccatcagcggctttggggccctggcgctcgcctgggccaccatcgttctgcttggtggcttctccaccctgatcaagcagaaggatttttggttcgtcaccgtcatctccttcctcgaagccaccaggtttgtgtcgtcgtcacagcttgaaaatctgcaagcaaacagtagtcacggatctctcatttga

SEQ ID NO: 103500 - DNA, 427 bp, Zea Mays
aatttggaagaatgaaggaccaagcagggcgcactgctgcctgctggagagccttgttggcctcagtgttcagatctgcgcatccattcaggcaagcgagttcggcgacgcgctccgggacgccaacctcacagtggatttgctcatgcacaagcttagcaggatacttgccgtgtacaagtcaccagacaccgagtacccaggtatacggcgggggacagttgagctgatcatctggatgctgcggagcagccgacgctgcgttgagttcttccttgagcgccgagtggacagggcggtgaaagaagtcgcggaaacagaagagaggcttgagatgttcaagacgttctgctgcggcatcggcctcgctaagcacggagagcccgtctcttatcttgttgcttctgctctgcctagcattgcttga

SEQ ID NO: 103501 - DNA, 202 bp, Zea Mays
ctgccattcccattccctgttctgcctttccgattcccccctccctgcacagtccattctcaccattccctgttctgcctttccgattccccctccccgcgcagtccattctcaccattccctgttctgcctttccgactcccctccccacaaagatcattcccattcccacgtacatcccaggcctagctaaaattaaatt

SEQ ID NO: 103502 - DNA, 1921 bp, Zea Mays
agccacgcaacaccgcagcatttcttcttcttcttgtcagtagctgtggcctgcacagctagcgccactgtaccgccattgttttgttagcatggccccgagtaacatcgtcgttcagagcagcagcactccgccggttgccggcggcgacgaggagttcgcgccgtctgtatggggagatttcttcgtcacctatgccactcccgtctcacaggcatcagagcagcggatgagtgagagagcggagctgctcaaggcgcaagtacgtcaggcgttcgatgctgccagcatggatgttgcaggtctgatcacgtacgtcgacaccctcgaacgcctcggcttagacaaccacttccgcgacctcatcggagctgccctggaacgaatcggagctgaggagctgccggagcacggcggcggcctgcacatcgtcgcgcttcggtttcgcctgctccggcagcatgggatatgggtatctacagatgtgttcgacgcgttcagagaggacgcgggcggtttctgctcgagcctctgcagtgacgaccctaggggtctcctgagcttgtacaatgcggctcacatggcagtacccggcgaggtggtcctcgacgacgccatcgccttcgcgaggggccgcctcctggacatcatcagcaaaggcgaggtcaggtcaccggtgtcagagcagatcacacgagccctcgacatccccctcccacgatttacgaggcggctggaaaccatgcactatattgccgagtatgagcatgaagaggcacacgacggcctgctgcttgagctcgctaggctcaactttgtccttgtgagagcgcttcacctcagggagctgaaggacctgtcactatggtggagggagctctacaacactgtgaagctcccgtacgctcgggaccgtatggtggagatctacttttggacctgtggtatgcttcatgaggaggagtactccctggcacggatgttcttcgccaagacgttcgggatggtgtcactgatggacgacactttcgatgtccatgctactctagacgagtgtcacaagctcaaagaagctatgcagagatgggatgaaagtgaggtctccattctacccgagtatctacgcttgctgtatatcaaaacacttagcaacttcaaagagtttgaggagatcttggaaccgaacaagaagtaccgcatggcttacacaaaagaggcatacaagttgtgctccaaaaactacctaaaggaagccatctggtctaaccagaaataccagccaagcttcaaggagcatgaggagctatcaatcatgacctcaggcttgccgatgctcacgatcctaacactaatgggcttcggtgacgaggcaaccccggaggcgttcgaatgggtaagcagtgttcctgaaatggtccgcgctggttcgcaggtcactcgcttcctcaacgatttgtcttcttacaagttgggaaagaacaagaaagatatgcctggctctgtggagacctacatggtagagaatggcttaacaggagatgaggctgcagcggcaatcgcggcacttctagagaacaggtggagaatactaaaccaaacaaggatggagatagatcacacgctactgccagcggcgcaggtggtgctcaacatggcgagggcaaatgagatcatttacctccacggcagagacgcctacaccttcggtgctgacctcaaggaccttgtcaccacactcttcctcaagcaagtgctccctctctagacaatactctgatcacacaactagattggctatataacgattctcgtgttgtattacgctttgtgtttcattatgcacgctatatatatgatcaatgtacctgtttctatcatattgatggtaatataatattctaaatggatatagttaacttac

SEQ ID NO: 103503 - DNA, 880 bp, Zea Mays
tttgtgcagtatcagtacaaagacgatatcaagtatgaagaggttagtgcgactgcaattctcttgggtggttcatcagtttccaacaaggattccttttttgattccagcggtgtagtatgccagtttttcctaacatatttctacgcgattttttttgggcaggacttcttcgtgaattcacgcggaagcaagctcttcacttgtaggtggacaccgaggaaatcggagtgcaaagctttgatctttatctgccacggatacggagccgagtgcagcatatccatgggagacacgaccgctcgattagtacaccatggatacgttgttcacggaatcgaccacgagggccacggcaaatcttcaggctcgaaaggctacctgtcgagcttcggcgacgtcgttagagactgctcggaccatttcaagagtgtctgtgagaaacaggagaataggctgaagaagaggttcctctacggcttctccatgggaggaaccgtggtgcttcagctccacaggaaggatcctctctactgggacggtgccgtgctgcttgccccaatgtgcaagggttattgtatattaacagccaacagtagtgtcgaaggagcacaagatgaggtgtgagcacaaagtggccagcaagaatggagtcatggaacatgggcaggaggggtgcggcagcggcaaccgatgtatcccttggacaatctggttttgacatgatgcaaatcaatctgctgtacattgtattctgcacttgcacagattgtttggctaattacaagattatctcaatgttttggtttggatttagagtacacttatgtatgaaatatttattggtactcatctatattatattaattatattattatt

SEQ ID NO: 103504 - DNA, 1929 bp, Zea Mays
agaaacactcgtggaaagcattagacaaatcagcacctgggcttgtcatcaaccgccgcgccgcgccgcgccgactagtcggtggccgtagcgcacctgtaccgcccgcaccgcgcggtcgaacacctcgcgcgcatccatggccaccacccacctcctcactccaccccgcgtccaccacccttccccctccgcttcctcctctgtggctcgcgtccgcgccaccgcctcgctcgcgcacccgctccacctctgccgcctccgcctcgccgccccgcgctcgcgctccccctccccacggcacgggcggcgcgccatgtcggtccgcagctccctcatcgacccggacggcggcgcgctcgtcgagctcgtcgccccgcccgaccgcctcccggcgctgcgcgcggaggcggaggcgctcccgcgggtgcgcctcgcccccgtcgacctccagtgggcgcacgtgctcgccgaggggtgggccagcccgctccgcgggttcatgcgcgagcacgagtacctgcagagcctccacttcaactgcgttcgcctccccgacgggggcctcgtcaacatgtcgctccccatcgtgctcgccatcggggacgccgacaaggagcagatcgggggtaagccggacgtcgcgttacaagggcccgacggcggtgtcgtcgccatcctgcgcagagttgaaatatatccccacaataaagaagaaagaatcgcaagaacatggggtacaactgcacctggtttaccctatgttgatgaggctattgcgtcagctgggaactggctgatcggtggcgatctggaggtgttggaacccatcaaatacaatgatggtcttgatcactacagactttcacctcggcaacttaggaaggagtttgacaagcggggggctgatgctgtgtttgccttccagttgagaaacccagtacacaatggtcatgcactattgatgaatgacactagaaggcgtctcttggaaatgggttacaagaatcccattctactactacatcccttaggtggttataccaaagcggatgatgtcccactgccagttagaatggaacaacacagtaaggttttagaagatggagtgcttgatcctgagactactatagtgtctatatttccctcaccaatgcattatgctggtccaacagaagtgcagtggcatgcaaaggcacgaattaatgctggtgccaatttctatatagtaggccgagatcctgctggaatgggacatccaacagaaaagagggacttgtacaacccagatcacgggaagaaggtcctgagcatggctcctggtttagagaaactcaacatactgcccttcaaggtagcagcttatgatacagtagcaaaggagatggccttttttgatccttcacgcagtcaagattttctgttcatctctggaaccaagatgcgcacttatgccaaaactggagagaatcctccagacggtttcatgtgcccgggtgggtggaaggttcttgttgactactacaacagcctgcaagctgaagaagcgactccagtccctgtatgaggcaagctactatttgactaagagattattcaatggcggggaaacatacaagcaagtgatcagatcatttgagcttttttccttattgattctttaggttagtagttgattgatatatgatcagatcttttcgattgtttgtttgtcttaaatatgagactctgaagcatggaaaaactaaagatctgcacaagttgagccaaaacagcatggccattgttctgtagcgaagccggttgaactatataataaaagatgaaagggtgcatattttcttgttgctgtagtagatcatctatgttcccaaaacatttgttttttttgccctacgactgagtgaaaggacactacatttatgattc

SEQ ID NO: 103505 - DNA, 1376 bp, Zea Mays
agtctggtcacacccttcggatccttgttcgcttccggcttccctcgttctctgcgtccgcccctgccgggccttgtcttctcccccaaatcaatccctcgcccacggacccaaccaaatcctcctccacctcctccatctccagccccgtccctacccagctcgtgtaacctcccgatgtccgggggcggaggcggcgcaggcgcgggctcgtcgtccggcggcggcggcggaggtggagggggcggcagggagggcgactgggactgcggcagctgcggcaaccggaactacgccttccgctcgctctgcaaccgttgcaagcagccgcgcctcctcgtcgaccctaacaccccgcgcgactccaagtggctaccccgtgccggggactggatctgcaccggttgcagtaacaataattatgcatccagaaagaactgcaaaaagtgtggcctatccaaggaggaagcagcaatgccagcattgcaaatggcagggatggctatgccagcttatgcaacttatatcgcaagactacagagccttgctgcttctgcttctgcatataagatgaactttgggatggctgccaactcacctttgcagcagcaactacttgcaaatgcaaactggtcctatgggatggctggtagatatgggatgcagtcttctggttggccacttggcaacagcagcccaaatcagtttccaggtgttccaaaggattggcgtaatggagactggctctgcagctgtggatttcataattattcatctcgtactcagtgcaaagagtgtggtgcacctataccatcaggcattccctccacaacaatgaaagctacgacatctgatgcctcttccacattaggaactaagcggttagcctcagaggagctggcaaacgactgtgataataaaaggctaaatccaggaaatgacaattatccactttcaacagcaggtgcaaataatttgtttttgggtattgagcaaggagctggaagcagcaatggccaggctgctttttcgaaatttgactatgggagctcaatgtcattaccatctgggcagggaatgtctggtcttatcgtaaaaggggcaaaatggcgcgacggggactggttgtgcaacaactgcaacaaccacaactacgcatctcgtgcgttttgcaacaggtgcaaaactcagaaagaatctgcagttcaccctggtgtgctatagcttgcttttgctggttcatattgttggactcgtttgttgcagggattagtgcaccaaattaaggttttgtggccatgtttcagtcgtcgggttgaaaaagggaactataccatgtaatttcattacagattattattttttcctagaactcc

SEQ ID NO: 103506 - DNA, 1703 bp, Zea Mays
agtctggtcacacccttcggatccttgttcgcttccggcttccctcgttctctgcgtccgcccctgccgggccttgtcttctcccccaaatcaatccctcgcccacggacccaaccaaatcctcctccacctcctccatctccagccccgtccctacccagctcgtgtaacctcccgatgtccgggggcggaggcggcgcaggcgcgggctcgtcgtccggcggcggcggcggaggtggagggggcggcagggagggcgactgggactgcggcagctgcggcaaccggaactacgccttccgctcgctctgcaaccgttgcaagcagccgcgcctcctcgtcgaccctaacaccccgcgcgactccaagtggctaccccgtgccggggactggatctgcaccggttgcagtaacaataattatgcatccagaaagaactgcaaaaagtgtggcctatccaaggaggaagcagcaatgccagcattgcaaatggcagggatggctatgccagcttatgcaacttatatcgcaagactacagagccttgctgcttctgcttctgcatataagatgaactttgggatggctgccaactcacctttgcagcagcaactacttgcaaatgcaaactggtcctatgggatggctggtagatatgggatgcagtcttctggttggccacttggcaacagcagcccaaatcagtttccaggtgttccaaaggattggcgtaatggagactggctctgcagctgtggatttcataattattcatctcgtactcagtgcaaagagtgtggtgcacctataccatcaggcattccctccacaacaatgaaagctacgacatctgatgcctcttccacattaggaactaagcggttagcctcagaggagctggcaaacgactgtgataataaaaggctaaatccaggaaatgacaattatccactttcaacagcaggtgcaaataatttgtttttgggtattgagcaaggagctggaagcagcaatggccaggctgctttttcgaaatttgactatgggagctcaatgtcattaccatctgggcagggaatgtctggtcttatcgtaaaaggggcaaaatggcgcgacggggactggttgtgcaacaactgcaacaaccacaactacgcatctcgtgcgttttgcaacaggtgcaaaactcagaaagaatctgcagttcaccctggtgtgctatagcttgcttttgctggttcatattgttggactcgtttgttgcagggtatgttgctgcctgttctagctgcttcctcaagactgcagtttgagttttttcggttctgctgggtttttgctgctctcaaatgtttgtctcgatattccattagtgcttgttgaagttcccgatttatttatggtataagcgcttgaataaaatatctctggaaagtactggcctaccgcctaccatctgtttttttccaaatatttttattagttgttgtacaatgaggcaaatggtgatatacttatgttgtactttatgaactctgtaggattagtgcaccaaattaaggttttgtggccatgtttcagtcgtcgggttgaaaaagggaactataccatgtaatttcattacagattattattttttcctagaactccaactgtgctgtcataccagttttacccattcataatatttatgatgcattcac

SEQ ID NO: 103507 - DNA, 1575 bp, Zea Mays
agtctggtcacacccttcggatccttgttcgcttccggcttccctcgttctctgcgtccgcccctgccgggccttgtcttctcccccaaatcaatccctcgcccacggacccaaccaaatcctcctccacctcctccatctccagccccgtccctacccagctcgtgtaacctcccgatgtccgggggcggaggcggcgcaggcgcgggctcgtcgtccggcggcggcggcggaggtggagggggcggcagggagggcgactgggactgcggcagctgcggcaaccggaactacgccttccgctcgctctgcaaccgttgcaagcagccgcgcctcctcgtcgaccctaacaccccgcgcgactccaagtggctaccccgtgccggggactggatctgcaccggttgcagtaacaataattatgcatccagaaagaactgcaaaaagtgtggcctatccaaggaggaagcagcaatgccagcattgcaaatggcagggatggctatgccagcttatgcaacttatatcgcaagactacagagccttgctgcttctgcttctgcatataagatgaactttgggatggctgccaactcacctttgcagcagcaactacttgcaaatgcaaactggtcctatgggatggctggtagatatgggatgcagtcttctggttggccacttggcaacagcagcccaaatcagtttccaggtgttccaaaggattggcgtaatggagactggctctgcagctgtggatttcataattattcatctcgtactcagtgcaaagagtgtggtgcacctataccatcaggcattccctccacaacaatgaaagctacgacatctgatgcctcttccacattaggaactaagcggttagcctcagaggagctggcaaacgactgtgataataaaaggctaaatccaggaaatgacaattatccactttcaacagcaggtgcaaataatttgtttttgggtattgagcaaggagctggaagcagcaatggccaggctgctttttcgaaatttgactatgggagctcaatgtcattaccatctgggcagggaatgtctggtcttatcgtaaaaggggcaaaatggcgcgacggggactggttgtgcaacaactgcaacaaccacaactacgcatctcgtgcgttttgcaacaggtgcaaaactcagaaagaatctgcagttcaccctggtgtgctatagcttgcttttgctggttcatattgttggactcgtttgttgcagggtcgtgcgtatggttgtggaaaacactattttgcagctgcaatggttagagatttgaaatatgagggaaaatatgagatgagcctcatgctgttgtgcatcatcgatcagaccactataagtaggactggaaatggatgtctggagatccgaattattcgtatttgctgaaaccgttaatatggatatccgtatctttattcgatttcaatatggatgtcaaatgtatacattcgaatttgatttataatacttttctctatccgattctatatttgtattcgaaaaaaccatgaaacatcttatact

SEQ ID NO: 103508 - DNA, 1484 bp, Zea Mays
cttcggatccttgttcgcttccggcttccctcgttctctgcgtccgcccctgccgggccttgtcttctcccccaaatcaatccctcgcccacggacccaaccaaatcctcctccacctcctccatctccagccccgtccctacccagctcgtgtaacctcccgatgtccgggggcggaggcggcgcaggcgcgggctcgtcgtccggcggcggcggcggaggtggagggggcggcagggagggcgactgggactgcggcagctgcggcaaccggaactacgccttccgctcgctctgcaaccgttgcaagcagccgcgcctcctcgtcgaccctaacaccccgcgcgactccaagtggctaccccgtgccggggactggatctgcaccgaaagaactgcaaaaagtgtggcctatccaaggaggaagcagcaatgccagcattgcaaatggcagggatggctatgccagcttatgcaacttatatcgcaagactacagagccttgctgcttctgcttctgcatataagatgaactttgggatggctgccaactcacctttgcagcagcaactacttgcaaatgcaaactggtcctatgggatggctggtagatatgggatgcagtcttctggttggccacttggcaacagcagcccaaatcagtttccaggtgttccaaaggattggcgtaatggagactggctctgcagctgtggatttcataattattcatctcgtactcagtgcaaagagtgtggtgcacctataccatcaggcattccctccacaacaatgaaagctacgacatctgatgcctcttccacattaggaactaagcggttagcctcagaggagctggcaaacgactgtgataataaaaggctaaatccaggaaatgacaattatccactttcaacagcaggtgcaaataatttgtttttgggtattgagcaaggagctggaagcagcaatggccaggctgctttttcgaaatttgactatgggagctcaatgtcattaccatctgggcagggaatgtctggtcttatcgtaaaaggggcaaaatggcgcgacggggactggttgtgcaacaactgcaacaaccacaactacgcatctcgtgcgttttgcaacaggtgcaaaactcagaaagaatctgcagttcaccctggtgtgctatagcttgcttttgctggttcatattgttggactcgtttgttgcagggtcgtgcgtatggttgtggaaaacactattttgcagctgcaatggttagagatttgaaatatgagggaaaatatgagatgagcctcatgctgttgtgcatcatcgatcagaccactataagtaggactggaaatggatgtctggagatccgaattattcgtatttgctgaaaccgttaatatggatatccgtatctttattcgatttcaatatggatgtcaaatgtatacattcgaatttgatttataatacttttctc

SEQ ID NO: 103509 - DNA, 1015 bp, Zea Mays
ttaaggatggactgaagagaacagtagagtcgtacccccatctacaagctcagaatcataggagtatatcaaaggcttcaattttcctcgggaatggaaaacttgcaaaaacagtactttgggaagatgcgaagcaaactgtgacagtgcttctactgttggctgttatctactaccacttatttacatgtggttacaccttcatcacagcgatggcaaagcttttgtcactaactgctctattcttattcattcatggcatgctgccatcaaatctgttcggtcacaaggttgagaaacttgaggcctctaattttcacatcacacaggcacaggctcatcatattgctcattccattagttcgaattggaactctttagtcagtgcgctaagatctctttgtagaggaaatgattggctattgtttctcaaggtttcactatctctgctggttgtcagcatccttagttccatgtcttctcaggctgcatttaaaataggtactgctctggttttcacaggcttcaaagcgtatgagaaatgggaggacagcattgatagtatggtgggcgacgcctgtaccattcttctgcactttggttctaccaagaaatcatctagctagaaacaaatgtaggtgtaacttgcagactgccagttgctttgtttactgatattatcttcagctccagttgtttctggttttcgttgacctaaattttcttctgtattcatctgatggtgttgtagaattgcctagcggcacatatgcaagttttggactcttttcctcttgatagttgatgtacaatatgaaattgtacattttttccctttcccctcagagaggttctcttcctgttaaaatttatttctattcatttttgaactaaaatttatttagagtccaaaaaaattgtgaagaaacatttggatcgctatccattaccacccttacttcccgtattgtttgacatggatgctgaatgcatcttgcaataacttccccagatg

SEQ ID NO: 103510 - DNA, 2231 bp, Zea Mays
agatctaggcgaagggcgaccgagaactggctggaaacgaagctcgaactctgtaatacccaatttataaatagtaagaaagagttgatctcaatatatattttgccctcaactcattataacatgggaatacccatatttaaaatgaataattaactaatggcacatcaataatctatgcatcatgttggagtttatttgtgtgtgcatttaataataataacaatattaatagaaataccttaatgtccaaatttggatttaaaacctagttacaatttagagtttggagagagagaaggaaaaatactatacaaaataaagaaaataaacataaataaataaatttcttccatattagtaggctcaatttgtacatttaatatgggtgcaagttcacaatcaaattcaaattttaaatttgaaatctgaaaataaagtaggaaataaaagggaaaaagagaggagctttctgccccatgggtcgtgtccttaagctttcggcccacttccacatccccttcaccgtgcactgcccaggcaacaagttgggcacgggatagctatcaggtgggcccctcgtcgatctctacgggcatgcgccttgcttcccctcgtgacgatgccaggtgggttaaggtggttaggggtcttcccctttcttcgctcgtgcgcgcaacggccgccatgacttacccagagccgactgactcgccaactgtgacggaacctcccaaggtattaggtccacctatagttgttcttgtctaggggactttggacaaccctgtagatgcacataatcactcgataagttcggtaactgtatcctcatcaatacgcccaagagcgcttcacccgtcatgcagatattacatcacatcggaggaaagaattagcggaagcaaattacaataatttaatttacatatatagagagggtattatgagtgcataaagtattattacagacccgggaggcaaaacaccctcccgcacaaaagtttatcgatttcaaagtgggaggcaaacatcctcccacgaccaccttcactactgggctcttccttgggtaccacctttgaacagaaacaacaaaacttcgttgtttcctctcctacaacaacatgggttcgaaaaccctgagtacggagtgtgcttttgcaagtcttacccgacaaaggaaaaagactctcaaggatatgctggcttgagggagtcaaggtaagcctattcaagaatcaaagactctgttttcaaaaatgcttactaatagcggatccttaaaaatccagttttattgtcaagttaagttactacctgaatctagagttctttctaccctagttcaagcacttggcctacactagccatcttttcatcatccctttagtttactggattgctacgtgtaagtcagtgaccaagtcttcatgtctgagaagtaacggcaatccgaatcgattaatactcagttgaggatctccaatcacacgacatatgtagcacttaacccttgcatatgtcaactcgccaccgagtttctcaagatcagaccgggttcacgccaaccgagagcatagatacaccaccgtccagcctcttgccacggagggtacacgctactctcaccatctctccactcccattgcgtgttggcctttctgggattggtctgcccgaggcaaagcttacccatgatgaggcatgtgaccagttaaaaggtcctcgatcatcaggcctacatcgatagggtccttaatcgactcagacggagacactacaccgagactctcttctcgtgcaagtcacccgcccggtctcagctttatcatttaaaatcccaaagtttggtacctggcagaggtacatctttttagatgttgaacccatcacggccatgatggatccaccatcaattcttttctttgaaaactcccttcccacatgaagcatcatctttgtttaaaacaaatcattttgttttctaaggcaaggctaagcatcagaaaacttttaagtaaaacaggtatcaaggaagggtaaacagttcaaaggaaggaaatgcagcaatggtgtagcactcaactcatatcacctaatgcatcagttcaagtgataaagaatttaaaacataaaggaagggtaaatgcactggggcttgccttgtgttgtaggagattcgggatctgttccacagatatcgaaataaaaactgttcctgacaggtg

SEQ ID NO: 103511 - DNA, 2868 bp, Zea Mays
cggttcagcatggagcctaaaccctcgccgccgccggccgccccttcgcgccgccgcggcgcagcgaccaagcgcaaggagaaggccgcatctgcggtgccctccgggtccccgtcgccgaaacgccaggcccgggagcgcgggcccgtctaccagccgtcccttccgccgcctcaaccgcgcagccgccaacccgcacgcaagccgcagcgcaagcccgcacgcaataaatcgccgcggcgctccgtggagccgccgcgcgcgcaggaggaggaggagggcccgccgccactgccgccaccacggccgtcgctggagaaggagatcgaggccgttctgtcccgcggcgctggcgtccacgttgtacccaccttcgccggatggttttcatggaaggaaattcaccccatcgagaagcaaatgttggctacattttttgatgggaaatcagagagacggacacccgagatatatttgggaatcagaaatttaatcatgaacaagtttcactgtaatcccgaagtgcatctggagtccaaagatttgtgtgagttgtcagttggggagatggatgctcgtctagtaatcttggagttcttggcctactggggtttagttaatttccaccctttcccatcagttgtacaggaacacaagctggttgagagtaaaagtagtgctgagacagcagaaggaatttctcaggctgagaagttatttcagtttgaaacagttcattcttacttggtacctgtttcaaaggaagctgaagcaatatctccagttcagttcactagcttgctccctgagcctaccctagctgaagatgcaataggtgcagctgagtcttctgttgagtaccattgcaattcctgctcagttgattgttcaagaaagcgttatcattgtaggactcaggtagactttgatttttgttcagattgctacaacgaagaaaaatttgatgaaggcatgtcaaaatctgatttcatccttatggaatctgcagatgttccagggtctggtggttctaactggactgaccatgagacattgcttcttttggaagcgttagaaattttcaaaggaaaagaatggcatgagattgctgagcatgttgctacaaaaacaaaagaacagtgcatgttacacttccttcaaatgccaatttctgaaccgtttcttgatggcgatgatttcaatgaaacaccccagaagatcacaaaacaggattcagcagaaactggtccttctgatgtacctgacaagatggatgtagatggtaatgcggaaggaaaagagagcactgatgaaaaagcttacaagaaagcagattccagttccgcagaaacaagaacaaaattagctgaccaaaatatttctgctaaagaggatactatgaaattaggtgatgatgacctagttgcttccattgttgatgaaccaaataaatcttcattggtggatcctgcacataagaagaattctgctaatgctgatgtctctggggaacacccatccaactttattactaatatcctgagatccacttttgaagcagttgaccactttctgggtaaagaagacatgggttcgtttgctgaagcaggaaatcctgtgatggcactgttcgttgagagctatatcagagatgtctcctgctctccaactggcaactgaacactgttttattcttccagatccaccaagtgacctcaaagatccggcttccactttcagcccttgcgcaggcggtgagagccaagaaggtgctgatactactcaaaatgtgaatgataccgataaaaacaacagcgaaagggaagatagtgatttagctctggagaaggagagtgctacattcacctcacagaagcagcacctggaagaattatctgacgcaaaggaaacatttattggaggtcctgaggcagaggccaaatccaacagcacaaaggattctgacaatccaattgctaaggtggggagcagtgtagcatctgacaagatgagagatgggtgcaatgctaatgccattccgtgtcctgctacttcaaatcatacaactgaacccagctccgtagcttcccaggaagccagtccagcaagtacaaaagacacagctatccctgaacaagttgaaagaccaagttctgaggaattactagctgatgtttcacttccacaagggaaggtagagccgaagaagactgaacctgcacctgctgcctcgtctagtatccaacagcatgggtgcaaacaagctggaaatggcaacactgaacctaaaagcaaggaaaacgctgcggccgatgatgaccccataacaaggctacagcgagcggccggtactgccatttcggcagctgcagtgaaggccaagttccttgtggagcaggaggagggttacattcggcagctagctgcacttgtgatcgaaaagcagtttcagaagatggaaacaaaaatgtcgtttctcaccgaagttggaaacctggtgttacgatcgagagatttgacagagaggatgcggaagaagcttttgttggagcggagcatgataatcgcttctcgaatgggtgcagcagcggcttccagaacaatccagcacggggctccggtgaccaccagactcccagtagggcatgtgcatgccttgaatccgcagctgaggcgcccttgaagctttttatagtatgtatatgatcagtaagactggcctatgtaggaggtgtgctaatccgcctctgtataaaatgcagtgtactgtagacgcgtctagggttctggagtcagtaggctttgatgctcaccacaccacacgacttggcttttcttttccttttcgtttaaccaagagttttcttc

SEQ ID NO: 103512 - DNA, 2794 bp, Zea Mays
cagttctgttggtgccatgagaatgagttaatatttgttgtcattgcagtatgtgatccgtaatttaggctttgatattaccatctgtcattcaatgatgtctgaaatgttctatagttacagtgcataaaatgctagcccttttttagcataaaaatgcatctgatgctggagctacataaaattgcacttgcatattgtactgttttattgtttgttttcttcactaatattttttatttcctgaaggatggttttcatggaaggaaattcaccccatcgagaagcaaatgttggctacattttttgatgggaaatcagagagacggacacccgagatatatttgggaatcagaaatttaatcatgaacaagtttcactgtaatcccgaagtgcatctggagtccaaagatttgtgtgagttgtcagttggggagatggatgctcgtctagtaatcttggagttcttggcctactggggtttagttaatttccaccctttcccatcagttgtacaggaacacaagctggttgagagtaaaagtagtgctgagacagcagaaggaatttctcaggctgagaagttatttcagtttgaaacagttcattcttacttggtacctgtttcaaaggaagctgaagcaatatctccagttcagttcactagcttgctccctgagcctaccctagctgaagatgcaataggtgcagctgagtcttctgttgagtaccattgcaattcctgctcagttgattgttcaagaaagcgttatcattgtaggactcaggtagactttgatttttgttcagattgctacaacgaagaaaaatttgatgaaggcatgtcaaaatctgatttcatccttatggaatctgcagatgttccagggtctggtggttctaactggactgaccatgagacattgcttcttttggaagcgttagaaattttcaaaggaaaagaatggcatgagattgctgagcatgttgctacaaaaacaaaagaacagtgcatgttacacttccttcaaatgccaatttctgaaccgtttcttgatggcgatgatttcaatgaaacaccccagaagatcacaaaacaggattcagcagaaactggtccttctgatgtacctgacaagatggatgtagatggtaatgcggaaggaaaagagagcactgatgaaaaagcttacaagaaagcagattccagttccgcagaaacaagaacaaaattagctgaccaaaatatttctgctaaagaggatactatgaaattaggtgatgatgacctagttgcttccattgttgatgaaccaaataaatcttcattggtggatcctgcacataagaagaattctgctaatgctgatgtctctggggaacacccatccaactttattactaatatcctgagatccacttttgaagcagttgaccactttctgggtaaagaagacatgggttcgtttgctgaagcaggaaatcctgtgatggcactggctgcgtttcttgcttctcttgtggaacgtgatgatgctgtttcttcatgttgtagttcgttgagagctatatcagagatgtctcctgctctccaactggcaactgaacactgttttattcttccagatccaccaagtgacctcaaagatccggcttccactttcagcccttgcgcaggcggtgagagccaagaaggtgctgatactactcaaaatgtgaatgataccgataaaaacaacagcgaaagggaagatagtgatttagctctggagaaggagagtgctacattcacctcacagaagcagcacctggaagaattatctgacgcaaaggaaacatttattggaggtcctgaggcagaggccaaatccaacagcacaaaggattctgacaatccaattgctaaggtggggagcagtgtagcatctgacaagatgagagatgggtgcaatgctaatgccattccgtgtcctgctacttcaaatcatacaactgaacccagctccgtagcttcccaggaagccagtccagcaagtacaaaagacacagctatccctgaacaagttgaaagaccaagttctgaggaattactagctgatgtttcacttccacaagggaaggtagagccgaagaagactgaacctgcacctgctgcctcgtctagtatccaacagcatgggtgcaaacaagctggaaatggcaacactgaacctaaaagcaaggaaaacgctgcggccgatgatgaccccataacaaggctacagcgagcggccggtactgccatttcggcagctgcagtgaaggccaagttccttgtggagcaggaggagggttacattcggcagctagctgcacttgtgatcgaaaagcagtttcagaagatggaaacaaaaatgtcgtttctcaccgaagttggaaacctggtgttacgatcgagagatttgacagagaggatgcggaagaagcttttgttggagcggagcatgataatcgcttctcgaatgggtgcagcagcggcttccagaacaatccagcacggggctccggtgaccaccagactcccagtagggcatgtgcatgccttgaatccgcagctgaggcgcccttgaagctttttatagtatgtatatgatcagtaagactggcctatgtaggaggtgtgctaatccgcctctgtataaaatgcagtgtactgtagacgcgtctagggttctggagtcagtaggctttgatgctcaccacaccacacgacttggcttttcttttccttttcgtttaaccaagagttttcttc

SEQ ID NO: 103513 - DNA, 847 bp, Zea Mays
aagagaaaagtattatattatattatattggatttgtattcagggcagataatgcgtgagggcgtatgcgacggtcgctccgtagaagatgaggccaccgacgacgagcgcggagagggcgaaggtggcggcgacggcgagcgggatgccgcaggagaggatgccgaacttgagctggatggcgtcgaccatggagagcagcaggaagaaggtgcccatggtggagcacccggcggcgagcagcatcatgggctgcgcgaacctgagcacggcgcggcgcctctccctcggcccggcggcgcgccatgccggcatctcctcgcagtcgtcggacggcgggggcttctggtcggcgtcgccgtagaagtcgtcggtggccaggagcgtgacggcgagcttcatcccctgcgccacgaggctggacagcaggtagaagccgaaggagaggatctcgaagaggaagaagttgcgcgcgatgtcgtcccgcgcgacgcaggcgggcggcacggacgaggacggcgtgatggtgcccgtgatcccgatgaacaccgccaccgtgaagaaggtgttggccgacacgattccctccagcgccttcacgtgcagttccgggttgcgccgccgcagcgtcggcatcgctgtcgtcgctgcttacgtgttgtttccttccctggctgcgcgctgcgtgtgtgtggtgatggagagtgagggtcggtgagcgtggctactaacttgtgagtgagtgatggttgttgaggtgaacaagctaagatcgaaagaacagcgaccgtacgatcctttttcctgaggtgggttagcaactctgaataaaataaaaacaaagtaa

SEQ ID NO: 103514 - DNA, 1482 bp, Zea Mays
acggtacggtgcatggttccttccaaatccgattgactttgaccagctgccgatgttgacgcctcctacgaatggctgcccccaccggcccacgtgtgcccggccgcagagcaactgggtcgctacaaaatgcaccagccccgccgccccgctctgatgcatctatcgccgatcacatcccagtcatccgtcacaagctagatgccgcgctctgaccgtatgaccaggcttgtccccctgcagctgctcgtggtggtcgtcggagcagcagccatcaccgtcgcaacggcatcggcggcgcacgtcgactccttcagctacccgaccttcgacgccaccacgacgcaggacctcgtggcggcaacaaacacctccatcctgacgtcggcctccctcctcttcggccacgacgccgacttcaacttcaaccgcaccgagggcttcatcctgctctcgcgcaccgtcgacgtctggcgcgccggccccggcggcgggccggcgcgcgaggcctccttcaacaccagcttcgcgctgagcggcgccgcgcccgtcgcgtacgtcgtactccgcgacagctacccgccgctgcacggcacgggcggcctccgcggcttcgccaactacagcgcgtcggacgccgaggatggcgccaccccccgcaacgcctccagcggactcgcgtccgtcgaggtaggccccgtgcggtcgtacggcccggacgacccggccgttggcctcaacgtcaccgtcactcccaccggcggcacggcgcctggtggtggtggtggcggtggcggcgcgcgcgccgtgtggatcgagtacgacgccgccaagcacaggctgtccgtgtacgtcgccgccgcgggggagccgaggccggccgccgctctcctcgacgcgcgcctcgggctcgctggacgtcgcaccaccgagacagccatggtcggcttcttcgctagcgccatccaagacgttctcgtcggcgtacgtgactggaacctgacggtggacaggctcgacacttctgagggtggcgggaggaaggagggtgccgcgtgctgggtcttcgtactgctggcggtgcttgggtccgtggcagccacggcctgaatgccatcatcgtcgtggcggtgttctctactccagtcaagaaaggcggggtcggcagcacatggggcacggcctctcatttactgccacctatacagctagccgccatcgtcgtcgtggcggtgtgctgtgctctactttgttcaggaaaggcggtgtcgtcggcagcgcatggaggatacaggatatatgtaaccagtaatatctcatttaatttgttgccacgtatgtacacgcttattaacaaccctgatttaatagaacttactacgaaggatgggttgtttataagtcattcaactttcatgttgatttaagcatacgaagtttgactaaaaataataatatttatgataacgaataaatactaaa

SEQ ID NO: 103515 - DNA, 573 bp, Zea Mays
cacacagaaaaccctagccgccgccatcgaagcggcctcccaggtaagcaggagtgcccatcccgccgccgccatgaagcgcaatccctgcatcacgagctcccgccggaagtgccgcaaggcgcacttcacgcggccccgtcctccgtccgctgcgttctcatgtccgccgggctgtcgacggagctccatcccgatccgcaaggacgacgaggtgcaggtcgtgcgcggcacctacaagggccgtgaggggaaggtggtgcaggtgtaccgtcgccgctgggtcatccacgtcgagcggatcacacgcgagaaggtgaacgactctgtgcctggatgagcgatcatccaagagatcgactaggctcttcacggtcatctgatggttgtcgtaccgccttttcctcatctctttagtttttgctaccaatgattatgtgatagaggttttatgttatttgaaaactgctctgttcctggatgagagttttggaacatagtgtgaacctgtgtgtctgtgatctgagctttgaagatctgattatgtggttaatgtctccttgtagtatcttc

SEQ ID NO: 103516 - DNA, 185 bp, Zea Mays
gtccttgtgttatagcatatgaacttgatacgtggcattcaggaaaatggtgatatctggtatttaacctttattttggtactcagtttggagagcaacgatccatttgttttattatgtcatttatttttgcatcttgtaaaggaatttgagtaaaatataccggctgtctctaaatttatgac

SEQ ID NO: 103517 - DNA, 1693 bp, Zea Mays
acacacactgcccctgctgtgtgcctaggccctagccctagcccctagggtagggttgtgttgtgtatatatccaacagtgaaatggaagctacaagccagaggtctagctaaacgctagttagctagctagcagcaagccaaccaacctgtccatgcaccatgccgtccaaggaattctgggcaggaattggatcagttctggccttcatactcgccctcttctccatggccctgaaccacgaaaacatcaccctgtggatgaacaaggtcaaagccttcttgagcccatacatccaaatcaccatccctgagtacggtgccgagcatcttgaacgcagcgacttcttcgttgcgatcgaggcctacctctccctgtactgtgccgctgacgtgcgcaagctgaaggccgagctcggcagccacaggaagatacccctgttctacgtcgacgacggacagcagatcatcgacaccttcggcggcggcggccgcggtggccgcggccgcacggccacggtctggtggcacgcgtacaaggagacgccaaagggcagcgtcagcgtcgtctgccagcccggtgaagaggagcgccgcttctaccgagtttccttccatcgcaggttccgcaaaactgtcctggacgagtatctgccccacgtcatcgaacggggccgcgacgtcatcgccaagaaccggcagcgccgcctcttcaccaacaacccaaacaacggctggagccacgtggcgttccagcacccggccaccttcgacacgctcgccatggacccgacgctgaagcgggccatcctcgaggacctcgacgccttcaggaagaggaaggagtattacgccagggtcggcaagccatggaagcgtgggtacctgctgttcgggcccccgggcaccggcaagtccaccatgatctccgccatggccaactacatggactacgacgtctacgacctggagctcacggcggtcaagagcaacaacgacctgcggaggctcttcaccaagacggcagggaagtccatcatcgtcatcgaggacatcgactgctccgtcgacctcaccggcaagcgcaggggcaagaagcagcagcaggcacggagcagtgacggagccgagcctgagctgtccccaacgatggaggaagccgccggcgccgccgagagtgcagacggcagccagcagctgacgctctccggcgtgctcaacttcatcgacggcctgtggtcggcgtgcggcggcgagcgcatcatcgtcttcaccaccaaccacaaggacaagctggacccggcgctcatccggcgaggcaggatggacatgcacatcgagatgtcctactgtacctacgaggccttcaaggtgctggcaaacaactacctcgagatcgacgaccaccagctgttcgagcgcttcggcaaggtacagcagctactggaggtgaccaaaatgtctccggcggacgtcgcggagcacctaatgcgcacgccggatgatgctagcgcgtgtttggagggtctcatgctggctctcaaggagaaagcggatgcagccaacaggtagatggacaaatccatggacaaggaggagacagtcgtcaaataataatccatagacatgcatgcttataatttgtctgtttagagctacaacagtacctcaaactcgtgtttaaaattgaaact

SEQ ID NO: 103518 - DNA, 696 bp, Zea Mays
gttccccacttccgcttacacatgcctcgcctcctcgcaggcccttcaacccctctgccgcccatctacgcccttgcctcctcctcacgcgaacccactcgcctccagcctatggccaacgagcaagctgcccccgccgcctcctacgctggagacgaccgaggagcctccgccctcgcctcctccttcgtcgccgccgccggaggacttccggcagaagggtaaggtgttcgtggggaacctgctgctgtgggcgaggaagcctgacatcgcagaattcttctgccagttctagccgctggagaaggtggagctggtgcggggccacgaccattccgagagcaacatccgtaggccgctggtgtcgccatgctggggaacgacgtcgatctgctgcacgctggtgcggcggtgctgccgtcctcggcgactcaccctggaggcctggaccgtcggctgtccagccgagccgcagcggtgcgggtgcaaggcacgacagctgtgaggctgaggcatcgccgacgaggacaacaacgtgtcgagctccgaacggtgcccgtgctgccctcccgcctgtcttctcctgtttacactgcagcagttgaagatagctaatcgacaatgcaaggtcaaggcctctaccggttgtaacggattggtaattagcatgtatctgaaacctcgtttgcaaccaaa

SEQ ID NO: 103519 - DNA, 701 bp, Zea Mays
gttccccacttccgcttacacatgcctcgcctcctcgcaggcccttcaacccctctgccgcccatctacgcccttgcctcctcctcacgcgaacccactcgcctccagcctatggccaacgagcaagctgcccccgccgcctcctacgctggagacgaccgaggagcctccgccctcgcctcctccttcgtcgccgccgccggaggacttccggcagaaggttctagccgctggagaaggtggagctggtgcggggccacgaccattccgagagcaacatccgtaggccgctggtgtcgccatgctggggaacgacgtcgatctgctgcacgctggtgcggcggtgctgccgtcctcggcgactcaccctggaggcctggaccgtcggctgtccagccgagccgcagcggtgcgggtgcaaggcacgacagctgtgaggctgaggcatcgccgacgaggacaacaacgtgtcgagctccgaacggtgcccgtgctgccctcccgcctgtcttctcctgtttacactgcagcagttgaagatagctaatcgacaatgcaaggtcaaggcctctaccggttgtaacggattggtaattagcatgtatctgaaacctcgtttgcaaccaaagttcactgctattttagtttgtcagcaatatgggattgttttggatacaaactatatagctctagataaaata

SEQ ID NO: 103520 - DNA, 1075 bp, Zea Mays
atggtggacggtccagaaaaaatcaagggaggggttagagttgacgctggaacggacgcttctcctccctcgctttccggtaccgagcgtgcatcggcagagctgactgtgactggtgaccggattagagaaggaagcctagcactagcagaaatagtaggcagtagcagggttgaccggaggggcagtggtgacccaacaacctccctcatcccctccccttctttcttattgccaccactccacgtctccaccaaacaaggcaacaagggagaagtagatctgcatctgcgagaggaggcagcgggggtggtgatgatggagagccagccgctgcaggccccgacggccacggctccgccccccggatctgcggagccagccggagctccgccggccgtcacccccggcaaggagttcacgcgcacctgcaagggcctcgtcgtcgtgctcatcggaggatacgtgctgctccagctcctcccttcgtcactcaactacctcgccatcatcccatccaagacaatcccctatgtatggaccgttttcactgctggttacatagagcaagtcctcccaggggccattggcagttctcttggtcttctcttttgtggaaaggacattgaaccagcatggggccgcaaggaattcttgaagttcattattttgatcaactccatctgtggcattcttgcattttgctttgctattggactctactacgtcactggaaaggagagcttccttgtcacaccactttctggtttccacggttgccttgctggctttcttgtggccttgaagcagctcttaccaaaccttgagcttcctatgtgctttttctggaaaataaaggcaaagtggatgccattctttgttgatgtttctcaagtatcatggccttcatcgtgcctgattccattaacttcctgccaactttggtgtccgggatgtacgttagctggctttacctgaggtacttccaaaggaacccactgactggacttaagggtgatcccagtgatgacttctccttccccagtttattcccagctgccatgagttactttta

SEQ ID NO: 103521 - DNA, 572 bp, Zea Mays
atattttttgctgggcgctcgctttaatcgggacagtagttcttagagacttgagtgaggcatctagaggcaaattcaagtccaaaggagcgtggtgagagggttcttgaggaaagattggcggccgacaatgctggtgacacagaggcctcgcctcgtggccatggccatggcaccgcggaagactaagaactttctcgcgacccatcagcgcctcttataggagccatggccgcccatggctttgctccctccagcgtttatagctctgcacttttgtcttctggagatggaactattcagttcacagcgaaccaataatatgatgttcttagtttctcttttattttatttttcgcttctttgtccgcgaagatttattggttaaattgtgtactagtagtcaattgttataatacagtgaaaaggagaggagagggtggtggcatttgcagccgattatttgttactggtcaaaattctgtactagtcatatactctactcatatatagaaacaagaatggctttgtcagtattaggtgttcagataataatatttttccttttagtg

SEQ ID NO: 103522 - DNA, 516 bp, Zea Mays
cagttcaaatcactaggttagatactgttgcttttgcgcaaattattgcttgaagacatggtttcccttttttgctgtaagcagcctgtattattgcagattactttggtggatgagatgtttgaataggcttggtaaccctggtggatcatcactcgaagctgttcgttactgagaaagtgcagacaataactaatttacttttgatattggcctattccgagtggctcgcatggtaatgaattgagggggcaaaaattgaaaggatgaatgtcatgaaatgtatttacaacgcctcctttgtcatgcgttgtgtcttgctatatatatatatatatatatatatatatatgccggcttgcaggttcattcagtcaaagtccaggactactcttttagttttctgaattcagagtttcagacatctgctagttcttccaggttccggtcagctgtgtatatcatatattaggtggttgcaggtaaaaatggtggagggtggctttgtacaatcca

SEQ ID NO: 103523 - DNA, 711 bp, Zea Mays
cttctgggcggcttctggccgacagaagcagaagctggagccaaacggccgcgcagggttgtagcccacgcgacgctcctccgccgccgcgaacccatcgcaccggcagctctccagctctccaccagcgccggcagctctccagctctccaccagcgccgctccgatttcgcccccttcacgcccctcgtctcctcctcccgctgtccagatgcgaacggcaccgcggccgccgccgccgtcgcttgccccagctgcggagacgcgttcccgtccgaggtcgccgtctccgagcacctcgacggctgcctcgcgtcggcagggggcgcccgcgcgtgcgcttccgcgtacctcgccgccgacctggccccgcccgcggcctccgtggaggtggtcaaacgcctgctgggcaacctgctgcgggagcccgagaacgacaagttcagatatttctttacttcttcagatgattgctggtcatacgtgaaacgaggaaagcagactttcccttcaggcatcaaagcccttgcagattatgtgcatggaaaaggtctgaaacttggtatatactctgatgctggaaacatgacttctgaaacaatggaaatactgagcaacaaagaagtaattcaagtaaaccaagatcctcttggagttcaaggaagaaaaattttaggacaagagcttatgtgtttcatgatgtacctttag

SEQ ID NO: 103524 - DNA, 750 bp, Zea Mays
atgccgctgctggcgaggagcacgaccgcggggcctcggcggcgcgccttcgtcctcgctctcctcctgctgcccccgctgtttcttattctgctccaccgcacctcatcgccctcgcttcggcccctccccgcgccccgcaagccctcttcccggtcccagtcctgcgactactccgccggcgagtgggtgcgcgaccccctcgcgggctcctcgctccgctacgacaacacctgcaaggagatcttcaagggatggaactgcatcgccaatggcaagcccaacgcccgcgacctgctcagctggcggtggaggcccgtcgggcccgggtgcgagctcccccgcctcgacccgcgccggttcctggagcacctcagggacaccagtatcggatttgtgggtgattcgttgaaccgcaacatgtttgcctcattagtatgcatgcttaggggagtaagtggtgaggttcgcaaatggcgtcctgcagaggcagaccgtggcttcaccttcctgcgctataacctcactgtggcataccacaggacaaatctcttggtacattatggtaggtggtcagcaaatccaaatggaggtactctagaatctcttgggtataagcatggttacagagttgatgtggatattcctgaccaaacatgggtagaggcatgtagcttccatgatgttcttattttcaacactgggcattggtacgtgaacgccactattcatgtgcttccttgccattaa

SEQ ID NO: 103525 - DNA, 1198 bp, Zea Mays
atgggtccaccgcctcctcttcccgaagtcgacgagttgtaccgcaacgaggcaagtcctccgcctcccatccacgacgacgctgtgggggtgatgtccttgggctcgagcgtgttcaaggtgctcgatcaaatggccgagagcacgagagccaacggtctggtggtgaacacgttcgaggagatggaaagcgactcgacgacgcttctcgcggaggcgacagacaaaaaggtgatcgccgtcaggtccatctcgctctgccgctcaccaagtctcgaccctcagtccatgtcgtgtgacgcgaggcaatgcatggcatggatggacgccaaggctcctaagtctgtggtgtacgtgagcttcggcagtgctaggcgcatgccacccattcagctcggcatggcgtttgcctcatgccccgcgcttgtgctctggctcatcaaggacgctgactccctgcccgacaacgtcaaggattggctacgcgagaacaccgatgcacacgacatcgcaggaagcaagtgtctggtggtgcgcggttgggcgctagaggtggccatcctggcccatccagtcagtggcagcttcatggcgctctatggatggggctccactctggaggttgttgcagccggtctgcccatggctacctggccctttttcattgagcaatttatcgacgagcagctcatcgtggacgtgcttggtattggattatccgtcggtgtgatgaagccaactgaaaatgttttgactgccagtaacacgggtgttgttgttgtgatgatatatgctcctgctttttggtcctgcctgacaagcttcacacttggaatctatggtctgatagttggggttatatgttggccatttctgatgaaacaagctagtctatcttttgtctcaagacaagatggctggtgattatcctttccttgctgctactccaatgggacaagccaaaccttcggggtctttacaaacccaagtgcattcagtgtggcttctatgctatgtacatgcttgtccaagcaggtggtctgactggctcccgtcggccgagttttggtataatagctcgttccattctgctatcagtcgatctccttttgatgccttatatggttatgcacctcgccatttcggtattacttcatgtgatggtccctctgctgacctaaatgcattcttgcaagac

SEQ ID NO: 103526 - DNA, 995 bp, Zea Mays
ctgctcaggaatagagaaatataatgtgggccagatcagcagcacgcagctaactgatgtgatattcaaaaatttcttccatggcaagctcacctacgtgtgtcagaccaaaggggaagaagccatggctcccatcgtatctccaactggaggagccgtccttgtcagaaagctcgcaaatttgagccccacggaagtgtttgtcggggacgttgtcttgttaaaagacccagagaaatctggcaattttgttattcgacgactggctgccctggaaggctatgagatggtctctaatgatgagaaggatgagccgtttgtgctcgagaaagaccaatgctgggtcctggcagacaacctagtccttaagccaaaggaagctagagatagccgcttgtttggacctgtcccaatgactgacatccttggcagagtgatatactctttaagaaccgctgttgatcacggtctagtcgagaacagcggcatggccacgaaactggatggtccagtactggcagtggagcttgatgtggaagagttggcgaagaacaataaggcgtagacacttgatgttttcgacatgctgcgctataactcaccttaacaatggatgttttttttttgtttatgatctgctgctgcttcaagtagaagtgcattggaatgttttttcacggtttgcctgtggagcagtcaataatggtcttgacagataacccagaggccgctggaccgtgttcactcagaattctcagcaggatacatcgtgtgactgtaatggttgtttttagggtttcttattcatgaagttgccgtgaatcttgtatctgcttgtgttcatggagccacggtccacgggtaagctgctgctgctgcgtcttgtagcagataaaccgtcaagattgtttaggcctgaaagggatcaaaacgttatgctgatatattgatctgaagtggacataggtaaaaaatgtctgcataaattttcgtcc

SEQ ID NO: 103527 - DNA, 2812 bp, Zea Mays
agtacttggctagtcgcacagagcactccatcagctgctgagacctgagagagaggtgtccgacccgggattcccttgccatgccattcccatgtgattgatgctccgacctcccatctgcgtgcgtacgagtattattagcagcatcagtgcgtagcaattaagagcgagcgagatcagcgctacccgttgcaggtcgccacctccctcccttcttccacctcggctccgcttcttgggtcttgcttgctcggcctgaccaaccaagaacgaggagaagggatggggatggggtggcggagggcgctgtgcacgtccgtccagcgggacgacgaccccgaccgcgacgccagtaccaagaagcgccggccgcagtacgacgcgccgagcccgcgcggcaccgccgccggtttcttctccgccgtcaagagcgcggccgccggtggcggtgcggctagcggcagtggcagcaacccgtccacgccggccctccgctgccgcaccaggccgctgcagcagccggctgactccgcccccgtgacgccgccctccgcgccggctcccgccaggaaccaccgggtgccgctgatgcaggcgctgtcggcgccggtctcgcctagatccccctccagattcgcgctgctcaaggcgtcgctcctcccgtccaagtcccggtgcggcgtgtgctcgcgtggcgtcaagagcggcggcagctcggcggtgttcacggccgagtgctcccacgccttccacttcccctgcatcgcagcccacgcgcgctcctcctccgccaacggcgttctgtcctgccccgtctgcgcctcgccgtggcgccaggcgcccttcctcgcctccctccgcctccactgctccttccacgacgacaagcaccgaggaggaggcgacggccgcaagacgccgccgcccgccaagctatacgacgacgacgagccgctgctggcgcccaaggccgcggccaacggtggcggcttcaacccgatcccggaggccgacgaggacgacgaggaggagcagggcgccgccgagttcaggggcttcttcccatgccccaggagtaggaccacctcgggcctggccatcaccgtggcgcccgaggccgcgctcgtgtcgtcgggccgccgccacggcaagtacgtggtggccgtcaaggtcaaggcgcccgggctgcgctcgtcggcggcggccccgcggcgcgcgccaatcgacctggtcaccgtgctggacgtcagccagggcatgatgggcgagaagctgcagatgctgaagcgagggatgcgcctcgtcgtggcctccctcggccccgccgaccgcctctccatcgtcgcgttctccggcgccgccaagcgcctgctgccgctgcgcaggatgaccaggacggggcagcggtccgcgcggcagatcgtcgaccgtcttgtcgtctgcgcggctgccgcaaccacggccacggcaacgcaggggcagcagagtgcgtgcatgggcgacgcgctgcgcaaggccaccaaggtgcttgaggaccggcgggaccgcaacccggtggccaccgtcatgctgctctccgacacccagcagcagcagcagcagtcggcagcgccggaaaactcgtcaaggaagcagtttgggcggccagcggtggccccagcaacgcgcttcacccatgtggagatccccatcggccccggtgacccgcctcctcttgtgtccgagtgcgaggaggagcctcccgtggagcacgcgttcgccaagtgccttggcgggctggtgagcgtggtaatgcaagaggtgcatctggagctggcgttcccgacaggggagatcacggcggtgtactcgtgcgggcccgggcagcaggccgtggcaatctccggtggtgcgggggtgagcgtgcggctgggcgagatgtacgcggaggaggagcgcgagctgctggtagaggtgcgggcaccgctgggcagccacccgcactcgttgtcggtgcggtgcacgtaccgcgacccggcgtcgcaagagacggtgcgcggcgcggtgcagcctctgctgctgcccgcgctccatggcgagcgggcgctgtcgtcgtctcggcggctgcacgacctgttcgtggcgacacgcgccgtggcggagtcgcggcggctggcggagctgcaggacctggggacggcgatccacctgctgtcgtcggcgcgggcgctggtgctgcagtcgccagtgacgccgcagcagcatgagctggtgggcagcctggacacggagctgagcgacatgcggtggcgtcgtggcaacagccagcatcagcatgaggaggtagtgacgccgacgtcgaggagcggcaggaggaggggagacggggacacgacggtgaccgtggggaccccgcgcgggtcagccggggcaggggaggcgctgacgccgacgtcggcgtggcgcgcggcggagcagctggccaaggtggccatcatgcgcaagtctatgaaccgggtcagcgacctgcatggcttcgagaacgcgcgcttctgaagctctcgacttcgagaacgcgcgcttctgaagctagccgtcgtcgacctcgtgtctgtctgtaattgagtcgtgttctattttggccttcttctttttttcccgttttctttcgccagtgaaacgagatgagtacccaaagaggaggaagaagatagcccccgccccgtgccgcgaacggcggctagccggagctgttgttgttgttatatgtggattatgaattatgaggacgattaatgaacccggataggatgaattggtttgcgcatttaca

SEQ ID NO: 103528 - DNA, 3081 bp, Zea Mays
gctatctccatctcctccctagactgccatgcctagatcaccaagcagcattgagcagagatcctctctttcatggatcggattctctcattctgtatttcatgcatctcttgccattcgttatccgtccaaaaagaaaacaaaaccgtactgctactacaacgccttttctagggttcagaacctctgtagcagtattgtatttgtactacactttttggtagcagctgccgcacagaaggatgcaaatccccctgcttttcttttctcttctttcgtaggacgaggaggagaaggtggagcctagagcgcaaaaagatggatccaatcagatcacagcacagcagcttttgcctgtccaaatggagattttgatctcagtgctccaaatgaatgatcctactgctgcttagcgtccaaaaagcccaatcttttactcgtgctcttttcttcctttctttggaaaacactccatcttgttttgtttgttgatcattctcctgtctttgcagaatgttttgtttctcagctgctgatgttttttctctctcttttctttacgtgcagtcccggtgcggcgtgtgctcgcgtggcgtcaagagcggcggcagctcggcggtgttcacggccgagtgctcccacgccttccacttcccctgcatcgcagcccacgcgcgctcctcctccgccaacggcgttctgtcctgccccgtctgcgcctcgccgtggcgccaggcgcccttcctcgcctccctccgcctccactgctccttccacgacgacaagcaccgaggaggaggcgacggccgcaagacgccgccgcccgccaagctatacgacgacgacgagccgctgctggcgcccaaggccgcggccaacggtggcggcttcaacccgatcccggaggccgacgaggacgacgaggaggagcagggcgccgccgagttcaggggcttcttcccatgccccaggagtaggaccacctcgggcctggccatcaccgtggcgcccgaggccgcgctcgtgtcgtcgggccgccgccacggcaagtacgtggtggccgtcaaggtcaaggcgcccgggctgcgctcgtcggcggcggccccgcggcgcgcgccaatcgacctggtcaccgtgctggacgtcagccagggcatgatgggcgagaagctgcagatgctgaagcgagggatgcgcctcgtcgtggcctccctcggccccgccgaccgcctctccatcgtcgcgttctccggcgccgccaagcgcctgctgccgctgcgcaggatgaccaggacggggcagcggtccgcgcggcagatcgtcgaccgtcttgtcgtctgcgcggctgccgcaaccacggccacggcaacgcaggggcagcagagtgcgtgcatgggcgacgcgctgcgcaaggccaccaaggtgcttgaggaccggcgggaccgcaacccggtggccaccgtcatgctgctctccgacacccagcagcagcagcagcagtcggcagcgccggaaaactcgtcaaggaagcagtttgggcggccagcggtggccccagcaacgcgcttcacccatgtggagatccccatcggccccggtgacccgcctcctcttgtgtccgagtgcgaggaggagcctcccgtggagcacgcgttcgccaagtgccttggcgggctggtgagcgtggtaatgcaagaggtgcatctggagctggcgttcccgacaggggagatcacggcggtgtactcgtgcgggcccgggcagcaggccgtggcaatctccggtggtgcgggggtgagcgtgcggctgggcgagatgtacgcggaggaggagcgcgagctgctggtagaggtgcgggcaccgctgggcagccacccgcactcgttgtcggtgcggtgcacgtaccgcgacccggcgtcgcaagagacggtgcgcggcgcggtgcagcctctgctgctgcccgcgctccatggcgagcgggcgctgtcgtcgtctcggcggctgcacgacctgttcgtggcgacacgcgccgtggcggagtcgcggcggctggcggagctgcaggacctggggacggcgatccacctgctgtcgtcggcgcgggcgctggtgctgcagtcgccagtgacgccgcagcagcatgagctggtgggcagcctggacacggagctgagcgacatgcggtggcgtcgtggcaacagccagcatcagcatgaggaggtagtgacgccgacgtcgaggagcggcaggaggaggggagacggggacacgacggtgaccgtggggaccccgcgcgggtcagccggggcaggggaggcgctgacgccgacgtcggcgtggcgcgcggcggagcagctggccaaggtggccatcatgcgcaagtctatgaaccgggtcagcgacctgcatggcttcgagaacgcgcgcttctgaagctctcgacttcgagaacgcgcgcttctgaagctagccgtcgtcgacctcgtgtctgtctgtaattgagtcgtgttctattttggccttcttctttttttcccgttttctttcgccagtgaaacgagatgagtacccaaagaggaggaagaagatagcccccgccccgtgccgcgaacggcggctagccggagctgttgttgttgttatatgtggattatgaattatgaggacgattaatgaacccggataggatgaattggtttgcgcatttacatgttgcagcatcacttggctgaatcaatgacaagggacagtgcatgattcattcatcacttgttttggtcctctgattcttccgattccgatcgctagctgtaaaaagctctagctgagctgatcggggcctgggcagggcagctgtctccgtcatgcttcatcacatcacatcatagatgtagtaacaggaaactaaggaaaggttgattctcttcatgctttcttcttcagggattgacagagctgctcctccggtcgctgttactgcacgagcacatcacctaaaagaaaaaaatgctccttttccactgctcttccttttttttccttttctatctctctccaaacaatgccttttgtttttttcta

SEQ ID NO: 103529 - DNA, 672 bp, Zea Mays
atggacaaggcggaggaccaggcggcggaggacgtggtgactgctggttcagacacgtcggccgccatggtagagtggatgctggcggagctgatgaaccaccaggagacgctgcgcaaggtggtggaagagatcgacgcggtggtcggcggcgacaggatcgccagcgaggcggacttgccgcggctgccgtacctgatggctgcgtacaaggagacgctgcgtctgcacccagcggcgcccatcgcgcaccgacagtcgtcggaggagatggtggtgcgcggcttcacggtgccgccgcagacggcggtgttcatcaacgtgtgggccatcgggcgcgacccggcgtactgggaggaacccctagcgttccggccggagcgattcatgcccggcggcgccgccgagagcctggaaccccgcgggcagcacttccagtacatgccattcggcagcggccgccggggatgccccggcatgggcctggcgctgcagtccgtgccggccgtgctggcggcgctcgtgcagtgcttccactgggccaccgtcgacggcgacgggggggtgaacaagatcgacatgtcggagtcggacgggctggtgtgcgctcgcaagaagccgcttctgctccgccccacacctcgcctgacccccttcccggccgtcgtctag

SEQ ID NO: 103530 - DNA, 988 bp, Zea Mays
tacatgtaaaagtaatatgctgaaatatagtaacaatacatgtaaaagtaatatgctgaaatatattaacagtacatgtaaaagtaatatgctgaaatatagtaacaatgtcctcaaatggttcttcacttgttctccagtgagcttcatcttgaaatagtcatttagagccttagcacacatgttaaggtgaactttcttgaagcctgttgatgtcctgatcccttcagccacaaggcttgctaggttactgagcatgtaagcggacattgcagaagtccacacaacatggccactaccatcagcttgttccacaaagtgctcaccagctccttcactctccattttctgcaatatggttatgtccagacatatacatcccatgaagaattttgacataaatgattgatgtccatgaatacattaaataagtccatacattaatgtgcacatagcaagaagtaatctcacacaatatatgaatacattaattaagtccatatattaatgtccataaataaaaattacagcaagaaaaacaataacaaattaggaagcatagtggttttgacgatcttcccacatctgatttgctatttcctgcctcaaattaaccatgaatgcatgttcactagcttggccacttgatgttgtagcatgattatgaattggccaattagattcttcaatgatcagctcatcgcctccatcttgtatgacccaattgtgaataatgcagcaggctacaacaatatctacttgagtagaaaatggaaagaatggtgtggcatcatcaagtattttaaatcttctcttcagtgaaccaaatgcacgctctacggtgacacgaagagacgagtgcctaaggttgaacaacttcttctcattttgtaccagattatttccccatccattcaagtgataccggacagcacgaaaagggggcaaaaatccaggtttggctccatatccagcgtccactagatag

SEQ ID NO: 103531 - DNA, 951 bp, Zea Mays
atgaccgtccaagaagcgagagtggagaaaaacaatcttagcatgaccaagaagggtgcacagcgatcggtggatttacccgataaaatctccggcggaggggtgcgcgacgaccggtggagcggtggcggcgaccagcggaggggtggcgtccgaccggcgaccctgatgagacgagggaatggattctgctatcagagggatcctgcaagtgtgaaatctatatattctggacaaatggggcaaaatatgttacagccacaagtgctctgcctgtgctccattatcctcacgttattttttacccttttgcaaccgaccgctgcacagatcactgcaccatgggaagttgatgccctcaaggctattaggggcagcttgatagatccacacggaaatcttagcagctggaaccgaggagatccatgcatgggaaattggtcccatgttatctgttacaatgcaacaggcagtgatggatacttccatgtaaaagaattacagctcctaagtttgaatctatctggaattttggctcctgagcttggtcagctttctcaaatgaaaattatggattttatgtggaattcgattggcgggaccatacctaaggaggtcggaaatatcacttctctggagttaatgctcctgaatggaaaccaattgaatggctctttaccagaggagattggcttccttcctaatctgaatcggattcagattgatcagaaccatatatctggacttatacctaaatcatttgctaacctgaataaaaccaagcactttcacatgaacaacaactcattgagcggtcaaatcccacctgagttatccagattaccttcacttgttcacctattattggataacaataacttgtcaggctacattcctccagaactatcaaagttgccaaatgtgctcatcatgtatgtagagtttttttaa

SEQ ID NO: 103532 - DNA, 2323 bp, Zea Mays
gagtttaaggaactgcagcttggaaggacctgttcctgatgtcagtgggataccccaacttggctacttggatgttagctggaatcaattgaggggtccaataccatccattcaattttcgagcaacataactacaattgatctttcccacaataatcttaatggttccattccaggaattttctctggccttccttatctccaaagactgtcacttgacgacaacaatttgactggttctgttccatctaatatctggcaagatattgatctaagaggaaataaaagtcttgtactggatttccagaacaatgctctcaacaatctgtcaactcctctttcgccccctcccaatgttaccatcctattacatggaaacccagtatgcattgggcaaaaccaactgaatatttctcagtattgtcagtcaggaacatatgttgcacgtggaggttcagcagataacagtacagtttgtccaccatgctctagcgactttccttttgaaagaataccgatgtcaccaataccatgctcatgtgtcgttccagtttatgtgggttaccggcttaagagtcctgggttctcaaatttcattccatacgaatcccagttccagcagtacttaacatctgggctttcactgtcatcgtaccaattagaagtttctacttttatgtgggaagaaggcccaaggctgaagatggacctgaaaatatttccaaataacactccctttttcactgtaagtgaggtgttcaggcttaatggtatgttcacagcttggcagattgcagactctgatatatttggcccatatgaacttatcagcttcaaccaagggtggtacaacacaataataccacagggtacaaagtctggtctgagtacaggtgccattgttggggtggtcatggcggcatttgttgcagctgccattctttcatccctcgttactatcatcatattgcggagacgctcaagacagtcttcttcaaataaacgcaccgcgaaaagaatttcaatgaaaattgctggtgtaaaagacttcacttttgatgaattgtcacattgtacacatgactttaatgattcaacactaattggccaaggagggtatggcaaggtatacagaggtgtgttggctgatggaatagtagtagcaataaagcgagcacagcaagggtctcttcaaggttctaaggaattcttcacagagatagagttgctatcgaggctgcatcaccgtaatctagtctctttgctcggttattgtgatgaagatgatgaacagatgctggtttacgagtatatgcccaatggaaatctgcgtgatcatctttcagctagagctaaggtgcctctagatttccccatgaggctacggatcgcgctgggatcgtcacgtggtatcctgtatttgcacacggaagcagatcctccaatataccatcgtgacatcaaagccagcaatattctactggactcgaagtttgtcgcaaaggttgctgatttcggtctctcacgccttgctccgctgccagaaacagaggggagtgcccctggtcatgtctccacagtcgtaaaaggcaccccgggttatcttgacccagagtattttctcacccataagctcacggacaagagcgacgtgtacagcctgggcgttgtgttcttggagctgctgactgggatgcagccaatctctcatggaaggaatattgtcagagaggttttggcagccaatcagtcagggatgatattctcggtggtggataaccggatgggctcgtaccctgctgagtgcgtggagaagtttgctgcgctggcgctgcggtgttgccaggacgagacggactcgaggccatccatggtggaggtggttcgggagctggacatgatatggcgcatgacgccggggacggagaacattgcatcgtcagagtctggcgtcatggggatgggctccaacagcaccagcacacccacagcatcggggtctcggatggatgatcactacatttcgtccatggaggtctccggtagcaacctgctcagtggcgttatgcccagcatcaatccgcgctgacctgctagtatatgttgctgttctagcggtgtgtattatagtttggactcaccacgacgaggatgtaggctacttgtgagcaaccaaacatgtattcattctcttatcgggttcaattttattgttgtcacacttagactgtgaaagtttcattccttagacggtctctagcaacgttctctaaatttcatccattaaaaaatatatataattgcactctaaaagattacgtca

SEQ ID NO: 103533 - DNA, 1677 bp, Zea Mays
ctctccctctacagccgttccttgggagttccctcaccggcgcctcatcctctctatccctccccacgcagaagtcgtcccctgcccctcccatggagcaccagtcgcctagccgagctctcggcgccggaccccctccccacaccagccatcttccacagccgcccccagccatctccctggtggccaacctcaccactctcgccctggctgcactcgtcggcgtcacttgccacggcaccctccatggccgagctcctcccctatggctcgtcttccccacgacgccctccctccattccttttcctccatggccgacacccccatctccactagccagcgccccctccctcatcctcttcctcaagctgagctcgccctagctccaacttcaaccatggacgacgacctccccttcctgctgcacgccggcatcctccccatgccagctgcacgcgcgccgtgaccactcctctccctacagtgccgctcgccctggctctaacctctcccatggacgccacaacccatactcccaaggacatggagcaacaataaccaagaaaccccttcgtgtcgcgcccacgacgtgttcgacggaatatcgcagcggactacacccgatctgtgcagccctgtcgcgaccttgtcgaatcctgttgaggacccgattctccttgtgttcattcctcgccagtattaatacccaaaatcaagttattagatgctaatgttatctatatatgtgtgcataatgtgcgagatgtgaggaattccatatttgtgtggcgaggcaagccgtacgacaagtgccagatgtttgatgaaatgattgaatcggagagtgtcaccgtttgtgtggattatcaagtcaggcaaataacggtcacttggtcgtggaagggcttcttattgcagtcatagtgttccagctctccaggaagagctacaaaccaccaaagaagccactcactgaaaagtgccgctggaccacttacgattgttgatggtaaagaagttgtgaactttgcatcaacaaactacctcggtttaattggcaacgaaaagattattgattcttgcatcagttcattggagaaatatggtgttggttcttgtggtccacgtggtttttatggaacaattgatgtccatcttgactatgagtcaaagatagctaaatttttggggactccagactccattctttattcatatgggatttctacaatattcagtgtgatacctgccttctgtaagaaaggagatatcatagtcgctgatgagggtgttcactgggcagtgcaaaatggtctccatctatcaagaagcactgtggtgtacttcaagcacaatgatatggcttcacttgcaagcactttggaaaaacttactcgtggaaataaacgtgctgaaaagattagatgctacattgttgtagaatccatttactagaattttggccaaattgcccccttggatgagattgtcaggttgaaggagaaatatcgattccgtgttattctggaggagtcattcttttggggtgcttggcaagtctgggcatggccttgctgaacattatgaagttcctctcccaaacgaggcctaactatttggtgaaatgcttgggacgaagtggctagcaagaatggagtcatggaacatcggcagga

SEQ ID NO: 103534 - DNA, 1574 bp, Zea Mays
atcgatggagtacccgcattggcatagaagacgggtgagagtcccgggctcctgtgtcttgtccagttcagggttccggcaggcagagtagccccacccccacgagcggccgccgccggcgagacaggggagcatggcgacttcctcctccttcaccgccgtcttcttcagcagcgccttcgccgcctgcttcgcagaggtgtgcaccattcctttggacacagccaaagtgcggctccagctgcaaaggaaggcgccactaccgctgccaccggcggctgcagcagccacagctgctgctgctggaggcacgctagccacaatcatgtgcatcgccagggaggaaggggttgccgcgctctggaagggcgtcatccccggcctccaccgtcagttcctctatggcggcctccgcatcagcttgtatgagcctgtgaaggctttcttcgtcggaggtgctgttgtgggtgatgtcagtttactaagcaagattcttgctgcgcttaccacaggtgtgatagcaattgttgtggcaaatccaactgatcttgttaaagttaggttgcaagctgatggaaaggctaacactgtcaagaggagttattctggagcccttaatgcatatgctacaataatcagacaggaaggtattggagctttgtggactggccttggtccaaatgtcgcacgcaatgccataattaacgctgccgagttggccagctatgatcagttcaaacagatgtttctaaaacttcctgggtttactgataacgtttttacccatcttttagctggacttggtgctgggttttttgctgtttgcattggctctccggtggatgtggtgaaatcaagaatgatgggtgattcaatgtacaaaagtactcttgattgttttgccaagacactaaagaatgatggaccttgtgctttctacaagggattcattgcaaacttttgtcggattgggtcatggaatgtgataatgtttttaactctggagcaggttagaagattctttctatgaagagatgcctgcactgcaagtagggattgtgtgggacaagggtatgttgatatatatgggcggcatatatacgtaattgcatggttatttgaagctacaggttctcatggcgtcaaccaacagaaagcagccatactgccacgatgttgtaatcttgtatcgcagattgatcatacagaccgctgtgttggtatattatagagagctggattggaggagattgagagagattaggagagattttgactgatttaaacccactcaattccttccaatccatttggattgagattaaaaaaagaaacccttatgaagtttacacattcagatgcatatatgcttacaaactgaagaatgatgcacccatcctgccatccatatgctgatgaaatttgagtacgtacattcagaggagcaagttagcaaaatatagtattatgtaataggagtattctagatcagaaaatctgaatctggggaatgatatccgagcttttttacgtcacaataattgaaaagatgtgtaatagttcatttatctcaa

SEQ ID NO: 103535 - DNA, 124 bp, Zea Mays
ttatttttctgtaccgctgttgtcttctacaatttggcctggtcccttgctccttcatccgtgtaaaaatctaaaattgctgacatatggattttttaaaagaaattattgaggctaaaccaaa

SEQ ID NO: 103536 - DNA, 550 bp, Zea Mays
gtactcattcggtgatctataagttgggtactactagggtctaaactatataactgcactcttgtttcttatgatgaaggcagaggagggtgcattttgcatgcttgttgtactccttgagaatgttcttgtcagtgattgctatactgacactctttctagacgtcatgtcgagcagagggtgttcaaagatctcctgactaagaaatgtccaatgattgctgctcatcttgaagcaatgaggtttgatgtttcacttgttgctatagaatggtttttgtgcctcttctcaaagagcctaacttcatagacaacacttcgggtatgggatattttattcaatgaaggggacaatgttttgttctgtgttgctctcacagttttcaagatgcgagaagatgatctactacacacccaacatatcggtgatgtgattgatattttgcaaacaaccacacgtcatctatatggcccagatgaattcctgacggtaatctttttcaatgctatttcatagttctatccttttgttgatataaaaaatgatgac

SEQ ID NO: 103537 - DNA, 1775 bp, Zea Mays
ggatttttctgcgctcagcgtcttcctctgccgcacgtcggcaatagttctcctccctccagctcgccggcgttatcctctgcgccgctttggcttacaaaaatcctggctgccggtgtttatctcctcacggcgccgccctgggactcttcaaataccctgccgtgctctctctcttcaatgttcctctcgttccctgacgagctgccatggcgtccacgtctgtcgcggtatcctggctcctcgcccaggacggcactcggccctgcccctaccccaacttcctgcacgccatggagatttcttcaagctcgctccaacgccgctccttttccccaaccgcgccaggcggtctgtctccctgtgcgctcgatttagttcggtttcttccctggacgcgcgctctgcagcttgccggagcaccctgcgtcgcgcccgggtgctttgcttcttgctcgccgagccctccccagctcgtggatctccctcgccggcgtcctctgctcctcctggttgctgaggcctctcctatggccgcgcgccgtgttggtctccggctcgcccctgctcatcttcccttggccgcgggcccttgccatgctcgccgagctccctctgctcttctctgctcgccgagattctccctggtgtcgtgctcctccccctcaccctgctcgctcgtagccgtggcagctgagcggttcttcccccagcacatcctctaccctggtcggcgttcctctctctcctcatctccatggccggagctcccatgtgccgtgcgccctggttcttgcccccacgcgcgcctgcttccctgctcggattcagtcctgcgcgcagccgcttttcatctccctgctcagctcgctgcgccaaactgcccagcgccgcgcgcctggctcggccgtctctagctcgccttgctccctgctgctcgcccggtcgagctccctgatcgccgcgccgtgaattttcctgcgcgcgcgtgtctccttgcgcacgcccagcaccctggatttccggatctcgcgcgcccctggctcctctgttggtcgcgcggttgtttcttgcttcctgcgcgcgcgagctcgccatccattttgctcgcctctgcttccacccagaattcccatggccagagctttcccctagcccggatctcacccagtcgcccagctcggctctgtccatactccagctcgccccctctgtttgttctcgctactgggtcgggtctgctcggccgctgagtgtccgacccgctcttctgcacgcagttcgccccaactcctgtctgtagtggtcgccagtcgtcgaccctgctcggattccatctcgccagctcgctccagactcgatctcgtcgtcgttccgcgcgtcatcaagaatcccatgaatcgggtgaagacaaagctagcagcgcgatattccccaagcgctcgacaattgcctggatcgaaaaatcactaccgatctcgtggattcgagtcagctattgaaacggtaagctgataaattatccaaaatagttcgatcgttgcataaattgatgtgctagttcgaggcgcattaaggtgctcgataaattgcgtaagtcacgaacctctcgccgacttcacagttcttgcgattgtcgagccagattgagctatggcgaattatttcgctattttagtcacttagctgaattagtggaccgagtagaattttggtaggcatgtgtgatgttaaaatattttaatcacttataaagatgtagtataatttataaa

SEQ ID NO: 103538 - DNA, 174 bp, Zea Mays
atgaaacatgatttaaaacccttagtcattgatacatataaaaatgcactcttgaattaatggctaataataataggcattaccaagggtactccgaccatgaaattgccacttccaattcagcgccattttgtccaacaagtcgttccgtgtgctggccgtcaatcgcaggat

SEQ ID NO: 103539 - DNA, 3658 bp, Zea Mays
tgtaagtatgattaatggaacccaagattgaagctaggaaaaaaaacaaggaactagagtacaaagaatgatttattagagacaaaaatctaaatttcttctaatatttatactatattaaagcaccagtttcaacggtcgtcccgcgtcaatatttttcaaaaaaatccctatatttatttagaatcaacccgcactcctataatctcttctctactactataataaaagagtttatgtaaaaaaaagttgaaattatgtataagtgagtgtttgaaccttggttgttgtctccacatttacaccaacctaatcaatagaaaacatatattttgtgctttattaaaacaaaatttattctatgtcatacatatatataaaccgtagcaatgcacggacatacgactatcatgatgtaatctctattactcaccatttgtcacggtttcacaattgtctcttttgcaaaaaaagtttctatacttctttctgtacccgtagtccaattacaactatttttgttctctatctctactactgtaatggaagagttttgtgtgtcgtataatttttgtgcatccttagccaacaccgcctccctcccccggcctgtcccgcacggtgccgttatcccctgcccgcgatcgtcgcccctccacccgcccgccctctccgcacggtgtcattatccccgcctcgctcgcgtatatacccataaccatgcttcattgtatctgtgcgtattgcgacggaggcggatgagcaggcggagcaacggaggcctctattccccgattggatctgtgtgcctccgacctgttgttgctctcacggcgagacgcagatccaaatgcaggtccgtcccatcgaatcggtcatcttccttcctttgttccccaattggatccacagggggtagaggaaccccgccggtgtagtggcccgagctgctacaagccggctatgcaccagacatcccgccgcggctcttggtgctggcggcttcacctgcgctcatggtcgacgcgccgtccccgcccccgccatggtgcccgagctccaggccgaggcgcccgtgccgaccactaaccccttgtctagctccctcctcacgaccccaaagtcgtccaagtccgccttcgacatccccgagggcgtgcagtggcgcaacaacgagttcctatccgcataaagcgtggaaaggtcgagcacatgcacttcttcaaggacggcagcctgctccagctcatggtcgtcaacggtcgtcgcgcggaaaggtgttttgtgaaatattttttctcgaatgactataaaatattacgagacactgtttatggtgtattcaagttttgtttttcttgtattctgcttgagatgatgaatacataaattgtccctgttactcttaagaatgaacatctaactgtcccaaatcccaatgccaaaaaaccataaattatcctaacaggataatgttcaggtagtcgatggcttggcatattaagttttatgatctgaaggatgtcttcatctgaagggccttgcctagaatgcctgtctagtgatcaatcagacactgtttatggtgtattcaagttttgtttttcttgtattctgcttgagatgatgaatacataagttgtccatggtactcttaagaatgaacatctaactgtcccaacgccaaaaaccataaattatcccgatgggataatttgcaggtagtcaatggcttggtatattaagttttaagatctgaaggatgtcttcgtctgaagggccttgcctagaatgcatgtctggtgatcaatcagagtgtcaggttgtctaagactgggaatttagagaagtaaagtagtgcttattctgaaagaaaggtttcatgactcggaatcatcttcaagaaaaatctcttatttacatggtgttatctacttgcacaagccatgttgttgggtcaaattactactttatgaataattcctcttattctatgaggatataattcctagaagggccatcatcatctctgtcatagataatcctgtgaagggagcatctggtcaggctttgcaaaatcttaatctaatgatgggactgcatgaaaatattgggctgcaataccagcccacgttcccctaatcttttgtgtcattatctatgattacaattaatttaggagtatggaaaccaatttcttgttactgtcaacagacggcaataagcccctcattagaattcaatcaaatcaaagttgacagttagtatagcttggtatgtattgttttggctttattaaaatattaagagaataatgataatgacaatttagcagtacaatggtagtattatgtgggtagcttggttccactaaaatcataagcctatacacatcttgttcctgcaatgttgtttgctattttaatcacgaaatcaatattgagtttgaatgcagttctgaagcagctatccttggcatcactggatataggtatggtgccttttttattgtgttcaagtcaaagtttagcccattacagttgtactttgagaggattggaatgtctcttagtataattctcaagtctcttagtatgattctcaagttttatcttatagctgcatggatccatagcattgctataaaaagttaattctctgatagttgttgttaaaccaaactatattgggtttgttgggtgttttgacagtctatatatgcttcgtgtcctccaatcgctggacctttgtctcactatattgtcttaataggtcgcacaaacagaagcaagtactcatatgctcctaaatctggtgtgaggtacgacgggttttacagaattaagaagtgttggaggcagtttggtgttcaggtaacttagctctcctcctgtatacagattgcagatgtagctatactttcatattatgcagctacttgtcacctacaaatgaagctaagtgtaagagggaagagcggaacaaacaacaacataaaaggtgaactaagatgaccaatcatttagttgaaaagctggttgttagttatttgtttgttggacgtgaataaccattcttgtgttgctactgcttactttgataatatattttttttgttttttttctatgcttccaactcatactatctctccttgtttatcctatccaggtaaaggctgatgtttttaagaaagttgctttaaactctatattgaatctgaaggtagcgttagatctgcccttacttttctttgctgtggtgtttagcaaccagtacttggaaacataaggagggtgaacattttcttgctgtcttgaggaggcttgtgagatttcttgatggttggattgaaacagaaaacgttgagaatgaaatgccaatttcctttgttgtctcaatccattcctaggctgggatcgaccaaaaaatggtgaggttttgttatgaccggccacactacctaatgatgacattagagataactgatatagatgagttcatgcacatatagaccatatgtgactttcacactgtaagacccaaatctggtagaaagaaaaatgataataataataaaataaataaacaaatatagttaatatagtactttgggaattagggaatgagaaaagaaatttgtaataaagtcaattattg

SEQ ID NO: 103540 - DNA, 147 bp, Zea Mays
atggtgcccgagctccaggccgaggcgcccgtgccgaccactaaccccttgtctagctccctcctcacgaccccaaagtcgtccaagtccgccttcgacatccccgagggcgtgcagtggcgcaacaacgagttcctatccgcataa

SEQ ID NO: 103541 - DNA, 614 bp, Zea Mays
acaagccatgttgttgggtcaaattactactttatgaataattcctcttattctatgaggatataattcctagaagggccatcatcatctctgtcatagataatcctgtgaagggagcatctggtcaggctttgcaaaatcttaatctaatgatgggactgcatgaaaatattgggctgcaataccagcccacgttcccctaatcttttgtgtcattatctatgattacaattaatttaggagtatggaaaccaatttcttgttactgtcaacagacggcaataagcccctcattagaattcaatcaaatcaaagttgacagttagtatagcttggtatgtattgttttggctttattaaaatattaagagaataatgataatgacaatttagcagtacaatggtagtattatgtgggtagcttggttccactaaaatcataagcctatacacatcttgttcctgcaatgttgtttgctattttaatcacgaaatcaatattgagtttgaatgcagttctgaagcagctatccttggcatcactggatataggtatggtgccttttttattgtgttcaagtcaaagtttagcccattacagttgtactttgaga

SEQ ID NO: 103542 - DNA, 282 bp, Zea Mays
gccatcatgggccgactaccctcgctcgcggcccaattctatctgatcactcatgcatggcccgcctggctctcccgtgttgcgtgcgctttgagtcaccggccgagtgggcccgcgtcgccagcctccatgttcgcgcgcttgctccgtctcactaatgtgtggggtccggctgtcataaccatccccttgctccgagttcacctcaactgaatccgctgattccgcgtgggcacataacaatcaacgcctggaatccggagccgttgctgcgcccagatc

SEQ ID NO: 103543 - DNA, 529 bp, Zea Mays
acacacactgattggaacttatacatggggcttttctattataatagagtggtattataagagaatgtcttatattcatgagcctattatttagatacctagactattgtttgtgatcatgatgaaattattaccactcttcttctttactgtgctactaatgaactcgtttgttctccagctttgttgtcatgatgcttcactcgcaataagacctgtttttgatcatttcaaaacttttgtgatcacttctggaactctcaacccaatagatcattaccctcgtctcttgaattttaatcctgtcataagcagaaggttcacaatgtccttaacaagagattgcatttgccccatggtcttgactcgaggaagtgatcatctacatgtgagtacaaagtttgatatgaatagtgatcctggtgttgtgaggaattatgaccaccttttgctggaaatggcttctgctattcaagatggcatgattttgtcccctctctattcctatatggatgtcattgtggacagc

SEQ ID NO: 103544 - DNA, 11592 bp, Zea Mays
ttcctgtgcgcgcggctcttcctccctgcgcgcgccctgcacgcggctgctcctccctgtgtgcgccctgcacgcggctgctgctcgtcgcacgccaatgctgctcgcggctgctcctcgcctgctcgcggctgctgctcgccgctcgcggttgctgctcgctgagcgcgcggctgctgctcgctgggcgcacggctggccggctgctccccttccctgggcgcccctcactggtagagtggtatgttagagtatatgtgctatgtgtttaggcccatgtggcccatgtacaacatttcaacatggtatcagctagggtttctttccttccctcctctcctctgccctccagcgccgccaggcacgccgccgccgccgccggcctccgctcgcgctagggcccgcgccgccgcggtcgtgcgccgcctcgccgggacgcccgcgcgccgtgcgccgctcgccaggacccgcccgccgccccgccaggcgcccgcggccgtgtgctgccccgccacgcgcgcgtccggggccccgcgccagggacccgccccgcctgaccagctgtggccagggccgccaccgcccacctccgtgtcttcgggtgtgcttgctacccgaacaccgctgccactgctcctcacaagctcgcaccccgttccaccctctgtgtgtttctcgggtactccccggaccacaagggctaccgctgccttgacctctcctctcgccgggtcctcatctctcgccatgtggtgtttgatgagtccgcatttccctactccaccaccacaccaccctcctccgaccctgaccttgacctcttcactctctttccgactgacgcggtggtcgagccacctattcttcctccctctacaggtactcgctcaccgcctgtcgattctactcccggcccggtgccttgcccgggtccggtggtgtcgcctccggtggtgtcgcctctctgcggagccccgtctccgatcgcccccgggccgagcaggggtggtgggactgcaccgcctacggggacgtcggtaccaaaccctccggctcgcttcgcgcagccggtgcgggtctaccagcgccgcctgccgccaccggggttcgcccctccaccgtcgccgtcgccaccgtccccaccggtgccttctcctccggtggcaccgccggtggcccagtccccgccagggacacctacacctccgccgcggccacccgcggcacgtgtcgagacgccggtgtaccacccaccgctccttcaccgcgacccgcgtcacgtccacccgatggtgacgcggcacgcggctggtaccctgccgccccgagtcctggcggccacgaccggagactcgcaggtttctccggtaccctcctccgtccgcaccgccctgctggacccccactggcgtcgggcgatggaggaggagtacgaggcgctcgtcgccaaccagacgtgggatctggtgcctcgtccgccctgcaccaacgtcgtcaccggcaagtggatctggacacacaagcggcgggccgatggtaccctggagcggtacaaggctcgctgggtccttcggggcttcactcagcgccccggagtcgactatgatgagaccttcagcccggttgtgaagccggccaccgttcgcacggtgctctcgctggcccttgctcgctcttggccagttcaccagctcgacgtcaagaacgccttcctgcacggcgccctcaccgagaccgtctactgctgtcagccggcggggttcgtggactcctctcgccctgacatggtctgccggctcaacaggtccctctatggcctcaagcaggccccccgggcgtggcactccagactggctacgttcctggtgacactgggcttcgtggaggccagtcagacacgtctctgttcgtccaccaccatggagcagagactgcctacttgctcctctacgtggatgacattgtcctcaccgcctccagtcagtcacttcttcgccgcctcgtcgacgcgctccaacgggagtttccggtcaaggatctgggcgtgcttcaccatttcctgggggtcactgctgagcctcggccctcaggactcctacttcaccagcgccagtacactcttgacattctggagcgggccaagatgattgactgcaagccctgctctaccccagtcgacacgcaggcgaagctctctggggccacaggtgacccagtcgaggaccccaccgggtacaggagccttgccggtgcccttcagtacctcaccttcactaggtcggacatctcctacgccgtgcagcaggtctgtctccatatgcacgaccctcgagagcctcacctcgcggctctcaaacgcctccttcgctacctccggggcaccgtcgactacggctgcttctccaccgatctacctcctccgagctggtcgtctacaccgacgctgactgggtcgggtgcccggacaatcggcgctccacctccagctacgccgtattcttaggcggcaacctggtgtcctggtcgtcgaagcgccagccggtcgtctcccgctcgagtgccgaggcggagtaccgtgttgtggccaacggcgtggcggaggctgcgtggctccggcagctcctcgccgagctccacagtcccctctccaggagcacgttggtctactgcgacaacgtcagcgccgtctacctctccaccaacccggtgcagcaccagcggaccaagcatgtagagatcgatctacacttcgtccacgattatgtcgccgctggtgtcgttcgggtcctccacgtcccgaccacctcccagtttgctgatatcttcaccaagggccttctgtcctcgaccttcgccgagtttcgctccagcctcaacatcagtagtggctagttgcggctgtggggggatcatatggtgtgctgagtgtggttacgtcttcctttttgagtccagtctgtgacctccgctgcgtcggaagttcagactgcggggggtgttagagtatatgtgctatgtgtttaggcccatgtggcccatgtacaacatttcaacatggtagactggtaggtcctcccctgcttcctcctcccctgctttctctcaggtgtcaacacccaaaaatgatgttcctcctcccctgctttccctggttttacactttcaggtttttgtcaagtgtgaactgtcaagaagtcgaactcaagactgcagcgagtagcgacaacataatgtcttctcgaaatgaagctccatcttctgtggctgcatccaaggtgcagcctagttctggtacaacagccaaaaaaagacaatcaaccttgcaatttaaggcaagtagtaaagcacagccaaagccagccaagtccgtagttgagatgttgcggagaacaccagaggaggtggtggatgagagactttcagactcttatcagcccacaatcttggctagtgcaaaaagtaaaggaggacaaaacactatgtggacatgcagtgggctttgttcttctatgagtgtggtgtacctttcaatgccgcagcagctaggcagttttagattgcaattgaggccacatcacagtttggttcagggtataagcctccaacaccttaccaactaggcgagccattgctacaagaggctgtgaagtcaacaaatacaatgagggaggaacatgagcgtgcatggaaacaatatggttgcacactcatgtctgatggatagtctgataggaggggacgccatctcattaatttcttagtgaacagcccagagggcacttactttttagagttcgttgatgcatcaagtgaagtacatgatgcatacatgcttgctgatttgcttgagaaaaaagttgatgagattaggagagacaaggttgtacaagttgttactgataatggtgccaattacaaagctgcaggcaagcttctaatggagaggattcctgcattattttggagtccatgtgctgcacattgcttggacctaatgttggaggacataggaaacttgaaggaattcaagaaaccaattgcacgtgcaaggcgtgtgacaactttcatataccgacatgggagaattcttagagagaaaactggtggggatgatcttgtgagggctgctgccactcgttttgctacttcctttctcacattgaagagcttgtacaagcacaaggatgctttgaaggctttatttgcaagcacagcttggactgataacagattgtcaaagactagtgctggattggatgtgtataacattgtcttctccacacagttttggaattcagtagaagattgccttagagcttcagggccactacttattgtacttagggtggtagatggagatgaaaggccagctatgccagaggtccaagcattgatgaaatgtgcaaaggaaaagatcaatcaaagctttgctgtccaaagcaagaagactttactcaagaaaatcataactataattgaacggcgttgggagaaacaaatggatcacccattgtatggggctgcaatgtatttgaacccaggaaagttgcatcctctcataagaaatgatgatgatgctactgttggtcagctaagaggttgctttcttgatgtgcttgcaagaatggtagatgatgaggaaactagagacaagatcaattctcaagcaatggattacgagtttcttaaaggagcagctttttcaaataagatggccaaagataacctacaaactatgaccccacttgagtggtggcgttcgtatggtggtcgtgctattgagttacagagatttgctagacgtttggtgagtctttgtgcgtcttcatcaggttgtgaacgcaattggagtacctttgaatttatccatacaaagaaaagaaactgattgttgcataagaggttgaattctattgtcttcatttcctacaacagaaagatgaaagctaggttccaaaaactacgccagaagaaggggaaaaactttgatccagtggttcatgaggacttcaactgggacaatgagtgggctgattctttgcatgtagtccctgaaggtgggcgtgggtgtgagtgtgaccttacatgggaccttgtggataatgtcattggagtatcacaagcacttcgtggccgaaacttaccaagaagggcccataatgtgtattcaagaagaaattatgttgctgcacaaaatatgtcagaggctgaagaggaagatgatgatgaagaagatgttccacatgatgatgcagaaatcacagattgtgaagatgaatctaatggtggcaatgatggtgaagaaggggaggcacccaatatcccaggagagtttgatgatgatttttaagcgacgggagagtggctatttgttgtagatacctttgtgggccggcagtatgccaggcgccacaaaggagtcagttagccctcctattttagtggagagattagctctatttgtttagaagataagaagagataaagagggagtcggatagccctcctattttagtggagagattagctctgtttgttagaggtggttgagattaaagtggcacctaagtctataaaaggagctgctgtagtttgtattagggctcatcaaagaaagttttacctggccggtggagcttccttggtcatcctggcgcaccttgcgccagctgacggaatcagctccatctctggccgatccccatatccactaagatcccttccccagtcccaagccttgctgcgatcaccgctgcgcagtcctaggcgcccacgacatatcaatttggtatcagattcctccgacgcatcgaccaacatgtccggcgttgatcacgatcctgcgaagacctcctccgactcagccaagttggatcagatattggcgcagctctccaccatcaactcaagactcgatctgcatggacagcggatcacgcttttggagaagcgcccaatcgacgagcagctgccggaatcttcagaaaccggcccacgtaccgcagcgcctgtcggggtcatgcatagcacaggatctgctcctcgtgaccgcgtcgacgatggtggctatcgaagacccaatgtctcctttccccactacgatggtgagtctgaccccctgtcgtggatcaataaatgtgagacttacttcaggggcatgaggactccacccgatgagaaggtgtggcaggcatcactccatttggacggtgtggcagcagaatggttctacgctctggagcgggacacgggcggcgtcctcacttggtcccgcttcgttgagttcacccatatgcgatttggaccacctctacggaccaacggtatggctgatctcaaggaccttcggcgcaccggcaccgttgaagactatcaacgtcagtttctgtccattctctgtcgctgcgaggatatgacacagctccagcaagctcagatgtttaccgcaggcttgggtgaaccgcttcggactgatgttgaactgctgactccaactacattgcagcgggccatgcacctggcacgcgtctatgaacgtcgtatggatctgtcctcgaccccatcaaggacaccatatgctacatcaaaaccaacggcatctacaactgcaccaaaaccctcgtcatcggctaccagcagaccacgtttgcgcaggctctcaccggaggaggttgccgccaaacgggccagcggtgaatgctaccactgctctgaaaaatatacagtcgatcacaagtgtgctgctcgcggagtttttctgttggaactggatggagaagataccgggacaacggatacactggcagaggagctggggcatatcacttcatgctctcactgggattgacatcgccgacacactgaaactgaaagtctctatcaatggtgtggctctcattgctcttgtggattcaggatccacccatacattcatccgtgatgctattgtgccaagactgggactgcatgtgactccaacagcaggactgcctgtcaaggttgcaaatggagagaaggtgttgagtgggggtgtctgttctcaaaccccactcactgtcggcgaagagaattttaccacaacctgctacactcttcccctggatggctttgatgtggtgcttggggtagaatggctgcgttctttgggtcccttcatctgcaactttgaaaagttgacgctgtctttttggcgtcacggacacatggtgcgttggacaggcattggcggctctccaccccgctgtaatgctctggacatggcacacaaactgctggataccctgctgctatcctttgaagacctctttgtcgagccccagggacttcctccacctcgccgccatgatcatcgcatccggcttctgccagggacagtaccagtggcggtacgaccataccgctaccctcagttgctcaaagatgagattgaacgacagtgtgaccagatgctatcccaaggtatcatccgagagtgtacctcaacgttctcatcaccagtgctgcttgtgaagaaatcagacaacacatggcgcttctgcattgactaccgtgagctcaacacgaagacggtcaaggacaaatttcctatcccagtagtggatgaactcctggatgagcttcggggagcccggttcttcaccaagcttgacttacgtagcggctaccatcaggtgcgcatgcacccagaggacatcaataagacggccttccgcacgcaccatggtcactacgagttcttagtcatgccttttggcttgactaatgcaccgtcgacatttcaggcgcttatgaatgatgtactcaagccgttcatccgtaagtttgtactggtattctttgatgacatattaatctatagctcatcctgggctgagcatcttcaacacatgcggcaagtattccagctgttacaagagcagaagttggccctcaagcgcaccaagtgttcctttggcgagacacaggtgggttacttaggccacatcatctcggataagggagttgcaatggaccctgccaagattgaagcagtggagtcatggccaccaccgcgctccatccgggcgctcagaggatttttgggactgactgggtattatcggaaattcatcgctggttatggcactgtagcagcccccttgacagcactgttaaaacgagaggcattcagatggacagaagaagcagaggaggcttttaatctactcaaacaggccttaatgtccgcaccattactgcagatgcccgacttcggccgcagtttcatcattgattgtgatgcgtcagggtctggttttggcgccgtgttacaccagggagatggagctattgctttcttcagcagggcagtcgcacctcaacatcagaagttgccggcatatgaacgggaactgattgggttggtgaaagcagtccggcactggaggccttatatctgggggcgccagtttctagtccgcaccgatcactacagtcttaaatatttattagatcagcgactgaccacaattccccaacatacatgggtgagcaagttattcggatatgattttatggtggagtacaagcctggcaaactcaatggcgcagctgatgctctctcacgtcgtgtcgagtcaagcatggcactcaacaccatctctacaccttcttttgagctgtttgacagtttgcgagccgaggctgcaacggacccacaaatccaggatgtgcgccagcagcttgctgctggtactgtttcaccaggttggacagaattggatgggttgctccttttcaaaggaaaagtctatgtgccagatgcctctactctttggccgatactattatccagtgcccatgacacaggacatgaaggaatccaaaagacaattcacaggtttcggtcgtcattctataatcctcatgcattacagagggttaaggaattcatcaaaggttgttcagtctgccagcgcaataaaactgaacatctccatcccggtggtctcctgcaacctctatcagtaccttcggaagtatggagtgatatttctatggacttcattgaggggtttccaaaggtgggcggcaagtcagtgattctcacagttgttgaccgtttctccaagtttgcacactttattgctctcggacacccttacacagcagcatcggtagcaaaagccttcttcgataacattgtccgtctccatgggttgccatgctccattgtcagtgatagagatacagtatttactagcacattctggtcagaattgttccagctagcaggagttaagctgcacatgagttcagctttccacccacaatctgatggacaatcagaagtggtaaatcgaattatcaccatgtatcttcggtgcctagcaggggatagaccaagagagtggcttaaatggcttccatgggccgaattctgctacaacacttccttccagactgctcttcgatgctctccatttaaggtggtatatggccgagaacctcctgctcttctgccctatcatccaggaacatcacaggtggccgctgttgacaaacaactgcagacacgcgacgaattcttggcggatattcgtgatcgattgattcagtcacaggtgacaatgaaaagctaccaggacaggcatcgacgggaagtggagttccatgagggcgattgggtatggctgcgcttacagcagcgcacaacagttggtgtcacttctgctacacccaacaaacttggcccaaagttctttggaccatatcaagtgctatcaagggtgggcactgtctcctacaagttgcagcttcctcccagggccagaatacatgatgtgttccacgtttctctactcaagaaattcataggggaagctccaacccaagttataccgctgcccgagctcctcaacggcagagtcatccctacaccagaaaaagtcctccgtgcaaggctgaatcgtggggtgtgggaagttctgatcaagtggacaggccgagcagagacggatacttcttgggagcagctggaagacttcaagcttagatatccagccatgacgctcgaggacgagctcttcgtcggcgaggggggaaatgttgtagatacctttgtgggccggcagtatgccaggcgccacaaaggagtcagttagccctcctattttagtggagagattagctctatttgtttagaagataagaagagataaagagggagtcggatagccctcctattttagtggagagattagctctgtttgttagaggtggttgagattaaagtggcacctaagtctataaaaggagctgctgtagtttgtattagggctcatcaaagaaagttttacctggccggtggagcttccttggtcatcctggcgcaccttgcgccagctgacggaatcagctccatctctggccgatccccatatccactaagatcccttccccagtcccaagccttgctgcgatcaccgctgcgcagtcctaggcgcccacgacatatcactattgctagattgcattagcatatttgctgcattactaactgcagctagttactattaattatgccattacaaactatctatgtagctatttcagatttggtattgtgttgttttaaattttgtgacttgctattgttcctttagaaactactttgtggctatttcagatccactattgtgctattgtaaatttgtgatgatttctagtttatgagctgtaacagttgtttggttgcttggtatttggctactaaggcgtcgcctaggcgcccgcctaagtcgcctaggcgttcaggcggtggctgggcgcctagttctgcctagccgccttttaaaccatgatatgaaccctacaattcagataaaatataaatatggcaacaaggaatgtgtctaattgtgtccaacattttatattactggtaacattgtataactttgtgtaaacaccaatcattccatcattttcagtgatcagctacctatgacgttcataataatatatgtgttattcattttcgtgtaatcattgtgctctaacattttatcgactaggttgtgtaccgtggaaacgcacggttattgtactagtagatctttatgcaactgatttttgtggcttgtaccgccgtttcaggtatcatcggcaatcactgtggtgccgagaactacaatagctcgattattgacgggaaccgcttgattttccgataaattatagccaaaaaataaaaataaagcaacaaacagagctcgaattatcgctaccgttacccatatgatgtgtgataattgagcgactgttgaaaattttcgccaaatttcagaacggtggattgcaccataccatagtccctactccctaagcactatgctacctcgttgtttcctcttctattccacctactcaaggaacagagtactctgttcttttaaaaacagaagtttcatggtttttatttctattcattgattgaccgtttgctgaaatcattaaaaaattcgaaacatatgctattgttggtgtttgcgacatagtagtgcttaaagtagatctattaagatagtactaagaagaaaggagagattaaag

SEQ ID NO: 103545 - DNA, 2114 bp, Zea Mays
tctcgaaatgaagctccatcttctgtggctgcatccaaggtgcagcctagttctggtacaacagccaaaaaaagacaatcaaccttgcaatttaaggcaagtagtaaagcacagccaaagccagccaagtccgtagttgagatgttgcggagaacaccagaggaggtggtggatgagagactttcagactcttatcagcccacaatcttggctagtgcaaaaagtaaaggaggacaaaacactatgtggacatgcagtgggctttgttcttctatgagtgtggtgtacctttcaatgccgcagcagctaggcagttttagattgcaattgaggccacatcacagtttggttcagggtataagcctccaacaccttaccaactaggcgagccattgctacaagaggctgtgaagtcaacaaatacaatgagggaggaacatgagcgtgcatggaaacaatatggttgcacactcatgtctgatggatagtctgataggaggggacgccatctcattaatttcttagtgaacagcccagagggcacttactttttagagttcgttgatgcatcaagtgaagtacatgatgcatacatgcttgctgatttgcttgagaaaaaagttgatgagattaggagagacaaggttgtacaagttgttactgataatggtgccaattacaaagctgcaggcaagcttctaatggagaggattcctgcattattttggagtccatgtgctgcacattgcttggacctaatgttggaggacataggaaacttgaaggaattcaagaaaccaattgcacgtgcaaggcgtgtgacaactttcatataccgacatgggagaattcttagagagaaaactggtggggatgatcttgtgagggctgctgccactcgttttgctacttcctttctcacattgaagagcttgtacaagcacaaggatgctttgaaggctttatttgcaagcacagcttggactgataacagattgtcaaagactagtgctggattggatgtgtataacattgtcttctccacacagttttggaattcagtagaagattgccttagagcttcagggccactacttattgtacttagggtggtagatggagatgaaaggccagctatgccagaggtccaagcattgatgaaatgtgcaaaggaaaagatcaatcaaagctttgctgtccaaagcaagaagactttactcaagaaaatcataactataattgaacggcgttgggagaaacaaatggatcacccattgtatggggctgcaatgtatttgaacccaggaaagttgcatcctctcataagaaatgatgatgatgctactgttggtcagctaagaggttgctttcttgatgtgcttgcaagaatggtagatgatgaggaaactagagacaagatcaattctcaagcaatggattacgagtttcttaaaggagcagctttttcaaataagatggccaaagataacctacaaactatgaccccacttgagtggtggcgttcgtatggtggtcgtgctattgagttacagagatttgctagacgtttggtgagtctttgtgcgtcttcatcaggttgtgaacgcaattggagtacctttgaatttatccatacaaagaaaagaaactgattgttgcataagaggttgaattctattgtcttcatttcctacaacagaaagatgaaagctaggttccaaaaactacgccagaagaaggggaaaaactttgatccagtggttcatgaggacttcaactgggacaatgagtgggctgattctttgcatgtagtccctgaaggtgggcgtgggtgtgagtgtgaccttacatgggaccttgtggataatgtcattggagtatcacaagcacttcgtggccgaaacttaccaagaagggcccataatgtgtattcaagaagaaattatgttgctgcacaaaatatgtcagaggctgaagaggaagatgatgatgaagaagatgttccacatgatgatgcagaaatcacagattgtgaagatgaatctaatggtggcaatgatggtgaagaaggggaggcacccaatatcccaggagagtttgatgatgatttttaa

SEQ ID NO: 103546 - DNA, 492 bp, Zea Mays
aaccgtagtcgagccacgcctggacctccacgagcatggaggcgggctgcagcagtggcacggcaacctcaacgtagaacgcagcctccacctcctcccttggtgtgtccggttgcagtccatcgacaccatcgtcctcgacccggccgcctctgccctcgcccaggccgcactcgctcgcgcctaggttgcctacgcccaggcagcccgcggtagaagcggaggggaggggctgacccacgcatgcttgagcttggccaggcgagtgtcatgggaatcaaaacgggcattgatggcggcgagttgctcgaggatgaggtccatcttggcggagtaggtcacaagatcgtcatgcgcgccggccatggtggcgatgcgcgcgtagtggcttcggtaccaaattgttgtgaactgcgatgcactcgcaagatagttccggtactcagccctcccgtaggaggccctaggagtaaactagatctatatcttctt

SEQ ID NO: 103547 - DNA, 794 bp, Zea Mays
gcggcctctcatttctccctgcgtgcccctggccgattctcggctccctagctcacctctagtcttctccgtcctcctctctatgcgcgcacagggttggcgtgcgtcactgcccctgtctcagctccactgtgcttcgacggctgccatggatgtccggccgctgctttgaccggcgtcctcctcgtcgaccgtcattcttctccaaaccaggatccacaccagagccaccccagccgtttgccactgccgtgatgcttcctctgctcagagctcccagccatggcgcctggccggatcttcctgcagctcgccgtcgaactccctagcgcgccgcggtcgccctctcccactgtcgtcttcttcctctgctcgcgtcgcacgcagctccagctcacctgcgcgtgcgtcctcgccgcgccgagcgccgtgaagtttctctacccagccgtgctttttcctcctctgctcggtgctcctgcttcagttcgccctgcgcgcagccggcgtttcttcatgacgcgttgttgagctccattttgagcgggcggacggtccggctctgaggccggacggtccgtggtccggacagtccgcgcctgtgggccggacggtccgcgcatgcgcagagcagtttagggttctgagttttgtgctatgtttgttgggtagatttgcgaaattagctcggaatccagtcgtgtaaagggtccagcccccctcctctataaaaagagaggtctacggccgatttgtaagaatcaatcgaatcaatacaacttctattcgcattt

SEQ ID NO: 103548 - DNA, 1335 bp, Zea Mays
catcccgtgccttgttatagcagaatatggctaaacgagtgaacaataatatacttcattcgatgctttgttaattgttatagcagtatgcaatacatatagatatagcatactcataattggagtagcaaaccatcttattgtttagagtgagaaaactatagacagcagaacattttatctacaagatgacaatgtgctccttatttgtgcttttttagttgaaatctgatgctactaaaagctaactaatttctcagcagacaacttgccttctgttgcactattttctgagcacataattgactgtctctgcctttctgtttctaggtccttaatgctttgttcaacctttgcaaaattaataaaagaagacaggaacaagcagccgaaaatggaatcatccctcacttgatgaaatttgtcatgtcagactcacctttgcggcagtatgccctgcctttgctgtgtgatatggctcatgcttctcgcaactctagagagcagttgagggttcatggaggactagatgtgtacttaaatctgctggaggatgatgcatgggcatgcacggcattagattctattgctgtttgtttggctcacgataatgatcacagaaaagtggaacaagcactgttgaaaaaagaggccattcagaaattagtgaagttcttccaagattgcccagaacagtattttggccatatattggacgctttcttgaagataatcacgaaatcttctaggctaaatacagcaatggctaccaatggtttaacaacattgctcattgcaagacttgaccatcgagaagctattgcccgcttgactctgctgaaactcataaaggttgtctatgagcaccatcctcgaccaaaacagctcatagtagagaatgacctccctcagaagctacagaacctcattgaagagcgcagggatggacaacggggcggccaacaagtgttggtcaaacaaatggccacctcattgctgaaagcgctgcacatcaatacagtattgtgatattggtggatcatatgttttcctctcaagttgtatatgcttgccctagaggagaaggtgccttttccttttgctctgctgtggtggtttctcatgagcaccagactcatctgttgtacctgatccctcttttttcgggagaaaggttttttaggtgcaggatgaaatggacgttctgtccttcagtgttgtttatatttagagtgttagtgaggacattgtaaattaagacatataattaataaacaaaacccatgttgagatatttgtttcatgtgttagtaaattttgcaagatatttcttct

SEQ ID NO: 103549 - DNA, 371 bp, Zea Mays
ttataattaatataatataaataagtaccattcaatatatcataaataggctttgtcaaacaacgcatacataagtgtactctaaatctaaactaaaatacaactgtttgcactaatgttaagcctaactttatatgaattcaagtctccacacttttgtggccactaaatttgaatggtcaagtcttgcaatgagcaatgttgttaaaccattggtagctagccattgctgaaatatgccttatactcttacgttattatcttcaagaaagcgtccaatatatggccaaaaaactgttctgggcaatcttggaagaacttcactaaattctgaatggcctctttttttcaacagtgtttgttccactttt

SEQ ID NO: 103550 - DNA, 232 bp, Zea Mays
cacgcgccagtcgtctcctctactgggtcgtgcgtcaccggccgccatggatgcctcctcgtcgtgctcttgttcatggcggacacctggacctatctcccatggcgccgctccctgtttcctgctggccgccgctgcccttctatggtgctcgcccgatcccaagctgagcttgtctccatggccgccggtcagcccctgctccctgttcgcctcagccgcgaccttgccg

SEQ ID NO: 103551 - DNA, 366 bp, Zea Mays
atggcggcgacctgggcgagcgcagcagggagccggccagggcgagcaacaggagcgagggagctgggcgccgagcaggaacgcaccatgggagattgcaagccggccagtagaacaccggaagagaggaggagggagcttcgcgagcagcttgcaggggaggccgacgcagggagaagcaaccggcgagcagagagcttcacgcgccagggctggacacaggagaacgcgcgcacaggggcgagctcggccatgggcgcggcgagctggagcaggcgagatctgagctggacgcagcgaacagagagggagcgagctgaggggcactgggagcaggaactaggcgtatggaaggagcaggggtga

SEQ ID NO: 103552 - DNA, 1766 bp, Zea Mays
atgattattttgtttccacgagcattctagctagggttcagacgaatttctaggaggaggtcgcgcgacaccgtccatccacggcgaaagcaggctcgccccacaacagctttgttccattgcatcctccccaactcatgttgtgctgtgcctggtggtcaggaaagaggctcctccctttccctctccacctcgccgtgcttctccagtccacctcccccctcgtcgttgcttcttccctccccttccctcgtcgtcgcgctatcccgccggtgcgcgggcgtggggccaagcgccgccgaaaggtagcagcagaggagaagacggacacggacgcaatagcgtccacccccgtaggcaccccccgcccaaagactggtggcaggcctcctacaggcagatgctaggacaccagccggcttagcctttcggtgactctaaacaccacgacacattcagagccatgtgactccctaccaaagaatatcctggcaaaaggtgcttctcgctgaccatcgaaacacagagcttcatgtctgtccagtccaaggtggttgcgcttggtgcactgatcttccttgtctcgtatggctcttgcactaggattgtcaactttaatgcctcccacatcaccaccgacccctactgggtggctgccagggccacttggtacggtgcgccaaccggcgctggcccctatgacaacggtggtgcttgtgggttcaagaatgtgaacctacctcctttctcggccatgacatcgtgcggcaaccagcccctgttcaaggatggcaagggctgtggctcgtgctaccagatacgttgtgtcaaccacccggcatgctctggcaacccggagactgtgatgatcaccgacatgaattactacccagtcgccaagtaccactttgatctcagtggcacggcgtttggtggcatggcacagcccggccgcgacaatgagctccgccacgccggcatcatcgacatccagtttaggagggtgccctgcatctaccccgggcagacagtgaccttccacatcgagcacggctcaaaccccaactacttagcagtgctcgtcgagttcgaagatggcgatggcgatgtggtccaggtggacataatggaggccaactctgggtggtggatgccgatgcgggagtcgtggggatccatctggaggatggactccaagcgccggctgcaggggcccttctcgctgcgcatcactaacgagtcaggcgagacattggtggcttaccaggtcatcccggcaaactgggcgcccaacagctactaccgctccaacatccagtacgaggcttttggctctgctgctggacaggctactggctctgctgttggactggtcattagctctgctgctcgactgcacacgttaattaccaggatcattggcttgatctgtttggtattattgtatcatttgcaagggattgaggtgccttagttttaattagcacttgacatgttgggtgtcctacgctgtaggtggtgttgtgtgtttgctggaggcgtcgtcggtccagagtttcatcttttcgaaaaagttttgaaaccaaataattttcctatgaatttcgttgattcctgcgtgacaggtagctgatgtagctctgtgggagatgtacacatgtatttggtgctagatagctgggctgtcctgtcttgttctggctgttgtaaggggctcactgctttcaactgttctataaatcttactagtcggttgcccgtgcgtt

SEQ ID NO: 103553 - DNA, 1758 bp, Zea Mays
atgattattttgtttccacgagcattctagctagggttcagacgaatttctaggaggaggtcgcgcgacaccgtccatccacggcgaaagcaggctcgccccacaacagctttgttccattgcatcctccccaactcatgttgtgctgtgcctggtggtcaggaaagaggctcctccctttccctctccacctcgccgtgcttctccagtccacctcccccctcgtcgttgcttcttccctccccttccctcgtcgtcgcgctatcccgccggtgcgcgggcgtggggccaagcgccgccgaaaggtagcagcagaggagaagacggacacggacgcaatagcgtccacccccgtaggcaccccccgcccaaagactggtggcaggcctcctacaggcagatgctagagccatgtgactccctaccaaagaatatcctggcaaaaggtgcttctcgctgaccatcgaaacacagagcttcatgtctgtccagtccaaggtggttgcgcttggtgcactgatcttccttgtctcgtatggctcttgcactaggattgtcaactttaatgcctcccacatcaccaccgacccctactgggtggctgccagggccacttggtacggtgcgccaaccggcgctggcccctatgacaacggtggtgcttgtgggttcaagaatgtgaacctacctcctttctcggccatgacatcgtgcggcaaccagcccctgttcaaggatggcaagggctgtggctcgtgctaccagatacgttgtgtcaaccacccggcatgctctggcaacccggagactgtgatgatcaccgacatgaattactacccagtcgccaagtaccactttgatctcagtggcacggcgtttggtggcatggcacagcccggccgcgacaatgagctccgccacgccggcatcatcgacatccagtttaggagggtgccctgcatctaccccgggcagacagtgaccttccacatcgagcacggctcaaaccccaactacttagcagtgctcgtcgagttcgaagatggcgatggcgatgtggtccaggtggacataatggaggccaactctgggtggtggatgccgatgcgggagtcgtggggatccatctggaggatggactccaagcgccggctgcaggggcccttctcgctgcgcatcactaacgagtcaggcgagacattggtggcttaccaggtcatcccggcaaactgggcgcccaacagctactaccgctccaacatccagtacgaggcttttggctctgctgctggacaggctactggctctgctgttggactggtcattagctctgctgctcgactgcacacgttaattaccaggatcattggcttgatctgtttggtattattgtatcatttgcaagggattgaggtgccttagttttaattagcacttgacatgttgggtgtcctacgctgtaggtggtgttgtgtgtttgctggaggcgtcgtcggtccagagtttcatcttttcgaaaaagttttgaaaccaaataattttcctatgaatttcgttgattcctgcgtgacaggtagctgatgtagctctgtgggagatgtacacatgtatttggtgctagatagctgggctgtcctgtcttgttctggctgttgtaaggggctcactgctttcaactgttctataaatcttactagtcggttgcccgtgcgttacgacgcttacaataatacccacgtaaactatccaccaaaaaga

SEQ ID NO: 103554 - DNA, 1760 bp, Zea Mays
gacgaatttctaggaggaggtcgcgcgacaccgtccatccacggcgaaagcaggctcgccccacaacagctttgttccattgcatcctccccaactcatgttgtgctgtgcctggtggtcaggaaagaggctcctccctttccctctccacctcgccgtgcttctccagtccacctcccccctcgtcgttgcttcttccctccccttccctcgtcgtcgcgctatcccgccggtgcgcgggcgtggggccaagcgccgccgaaaggtagcagcagaggagaagacggacacggacgcaatagcgtccacccccgtaggcaccccccgcccaaagactggtggcaggcctcctacaggcagatgctagttttatttccaaccatatgattgacattgaaaaggacaccagccggcttagcctttcggtgactctaaacaccacgacacattcagagccatgtgactccctaccaaagaatatcctggcaaaaggtgcttctcgctgaccatcgaaacacagagcttcatgtctgtccagtccaaggtggttgcgcttggtgcactgatcttccttgtctcgtatggctcttgcactaggattgtcaactttaatgcctcccacatcaccaccgacccctactgggtggctgccagggccacttggtacggtgcgccaaccggcgctggcccctatgacaacggtggtgcttgtgggttcaagaatgtgaacctacctcctttctcggccatgacatcgtgcggcaaccagcccctgttcaaggatggcaagggctgtggctcgtgctaccagatacgttgtgtcaaccacccggcatgctctggcaacccggagactgtgatgatcaccgacatgaattactacccagtcgccaagtaccactttgatctcagtggcacggcgtttggtggcatggcacagcccggccgcgacaatgagctccgccacgccggcatcatcgacatccagtttaggagggtgccctgcatctaccccgggcagacagtgaccttccacatcgagcacggctcaaaccccaactacttagcagtgctcgtcgagttcgaagatggcgatggcgatgtggtccaggtggacataatggaggccaactctgggtggtggatgccgatgcgggagtcgtggggatccatctggaggatggactccaagcgccggctgcaggggcccttctcgctgcgcatcactaacgagtcaggcgagacattggtggcttaccaggtcatcccggcaaactgggcgcccaacagctactaccgctccaacatccagtacgaggcttttggctctgctgctggacaggctactggctctgctgttggactggtcattagctctgctgctcgactgcacacgttaattaccaggatcattggcttgatctgtttggtattattgtatcatttgcaagggattgaggtgccttagttttaattagcacttgacatgttgggtgtcctacgctgtaggtggtgttgtgtgtttgctggaggcgtcgtcggtccagagtttcatcttttcgaaaaagttttgaaaccaaataattttcctatgaatttcgttgattcctgcgtgacaggtagctgatgtagctctgtgggagatgtacacatgtatttggtgctagatagctgggctgtcctgtcttgttctggctgttgtaaggggctcactgctttcaactgttctataaatcttactagtcggttgcccgtgcgtt

SEQ ID NO: 103555 - DNA, 818 bp, Zea Mays
gtttttctcctccatttgcctctgcctgtcagtggtgatggttgtgcgtttggattagtcatgattagtgtggtggtaatgctcaagttggggcactgtcactggccggattgagtgtcattttttggttttatgtcacaatagctaacattacagttttaggtgtgattgaccactaggtctttatctctgctctgagtactaagctggcaggatcgaaaagttcaatttttcatttggtggtctgaaactaaagctccttcaccttcagccctgtgttttcactatgggaatggtcttccttagtccatatgaatattacctgtggcctacggatatgaacatgataattattttatagctttgtgattgatattgccatgctattcagcctcctagcagcaccggtaccaacctttctattttcacagtacattggcttcgtttctttttgttgcaaataatttcttagaaaagtttgactctctaaaacctaggttgttgagtagatacataacatcacataagttgtacggaaagggtagtagtgatgctctttatgagaatctttgaggaagagagatgaccccctaacacatcaaatccaaacttatttttgaactattatttataagataatctcatttgtcccagttttaccgagcaaaacttcaaacaagtacttaaaagggactttcctgtttatagatgccattttgataactgatgctgtctcaatattactgtgtccttctggtgcttcaccattagttttatttccaaccatatgattgacattgaaaaggacaccagccggc

SEQ ID NO: 103556 - DNA, 480 bp, Zea Mays
atgagcacgagggtgaagatcgcaagtcatcgacacggtgctgtgaccaagggtgatggcgaggcggagatcgaggatgagcacatgaagggaaatgatgatgctgtcgctcacagcacgaaggcgaatgacaacgacatgggtagtgctggatgtggtcgaatccgttcagagcttcacttcggcgaccaccagatcgatattgagactcgacggcagcgcaacaccaccacgggatgggggcaaactggctatgatggcctaggtcgggtgcggaggctgacagcagggaacttcatgatgggcagcgaggctcgacggcgaacgagggagatagcgcggactggggaaggactcggcaagcagcaggcgtgggcgagcggagcaggcaagacaccaggcgttgcgggcgagcaggaaaaggactcggtgtgggagttcgacgcgtcgtggcgagcaaaggggcactgccgcgcataa

SEQ ID NO: 103557 - DNA, 390 bp, Zea Mays
atggactccaagcgccggctgcaggggcccttctcgctgcgcatcactaacgagtccggcgagacactagtggcttaccaggtcatccccgcaaactgggcgcccaacagctactaccgctccaacatccagtacgaggcttttggctctgctactggacaggctactggctctgctgttggactactcattagctctgctactcgactgcacacgttaattaccaggatcattggcttgatctgtttggtattgttgtatcatttgcaagggattgaggtagttgatgtagctctgtgggaaatgtacacttgtatttggtgctggatagctgggctgtcctgtcttgttctagctgttgtaggggctcacagctttgaactgttctag

SEQ ID NO: 103558 - DNA, 1477 bp, Zea Mays
ggccttccagcacacgctagcggactctcggatgagagggggctgttcgccgattgggtagggggcaaatttgcggcgcgcgttggccagcgcgttggccagcccactgcgggatctgggcatccggcgacggcggcccgagcgacgcctctactgaagggaagccagggagggaggagcgacacagcgtctggcaaaagggcaatccggcggttggctggctcgccggcgcggcttcccctccgtagatcctaaaccctaaacgccatcgccaaagccttcgtcagccagtcctccaaggcacaggaaagttgagggaagcacgggtggtatttggagttttgtgcagataagaccaccacgcatccaatccatccctgtcttctcttcccacttcccagtccccaatcgcgttctcttccttggcgacatggcggccgccaccggctacagcgacgccccaaccgacgagcaactgctggcgtacgctgagctgcccaaacatggccgcgacatggcggaggtgttcgccgtgcgcatccccgccaccgtcggaggaaacctgccgccccgtggcagcatcgttttctacggcggccactgctgcagcgatttcatttacagctggagtccactggaagaggaagaagacacctcgaagcaaatctgcgacagccagggtaacctcgtgctaactgggccatcattggccacctcggcatacagtccaattgctttcttcctctacctccatgatggcagcccgcaagccggagaagccaccgaggacgacgaggacatcgggaggatactctgcgactgcatcggcgacgacttctccaactacaacagggccatagtcgagactgtccaaacgggctatggccccgctgaagtgatctatgccgtcctgagcaacggcgtccaaggccgggtcgccgtcaaacttgctcgcccgccggtgtccaaagctggagaagaagacgccaccaccattcttgggaggatcgttgctcgcagcaagctgttcgacgtcggctgcgtgctcttctacaaagagggtgacaatggagtgaacgtgcgaccgggggggctgattcagttggcgagggaagcgctcgccgtgccgctgcacatgccgctgacgattgagcttgacctgcatcgctgttccggcgatgaaattgttggaggggtccttgagttcaatcctgcgaccaacggccagcacacggaacgacttgttggagaaaatggcgctgaattggaagtggcaatttcatggtcgcagtacccttggtaatgcctattattattagcctataattcaagagtgcatttttatatgtatcaatgactaagtgttttaaatcatgtttcatacaagacagttgcactagagcaagataacatttcgtggtgggaacgccaaataaataaaaatagagggagtatcactttgggtttttctaatata

SEQ ID NO: 103559 - DNA, 1856 bp, Zea Mays
ggccttccagcacacgctagcggactctcggatgagagggggctgttcgccgattgggtagggggcaaatttgcggcgcgcgttggccagcgcgttggccagcccactgcgggatctgggcatccggcgacggcggcccgagcgacgcctctactgaagggaagccagggagggaggagcgacacagcgtctggcaaaagggcaatccggcggttggctggctcgccggcgcggcttcccctccgtagatcctaaaccctaaacgccatcgccaaagccttcgtcagccagtcctccaaggcacaggaaagttgagggaagcacgggtggtatttggagttttgtgcagataagaccaccacgcatccaatccatccctgtcttctcttcccacttcccagtccccaatcgcgttctcttccttggcgacatggcggccgccaccggctacagcgacgccccaaccgacgagcaactgctggcgtacgctgagctgcccaaacatggccgcgacatggcggaggtgttcgccgtgcgcatccccgccaccgtcggaggaaacctgccgccccgtggcagcatcgttttctacggcggccactgctgcagcgatttcatttacagctggagtccactggaagaggaagaagacacctcgaagcaaatctgcgacagccagggtaacctcgtgctaactgggccatcattggccacctcggcatacagtccaattgctttcttcctctacctccatgatggcagcccgcaagccggagaagccaccgaggacgacgaggacatcgggaggatactctgcgactgcatcggcgacgacttctccaactacaacagggccatagtcgagactgtccaaacgggctatggccccgctgaagtgatctatgccgtcctgagcaacggcgtccaaggccgggtcgccgtcaaacttgctcgcccgccggtgtccaaagctggagaagaagacgccaccaccattcttgggaggatcgttgctcgcagcaagctgttcgacgtcggctgcgtgctcttctacaaagagggtgacaatggagtgaacgtgcgaccgggggggctgattcagttggcgagggaagcgctcgccgtgccgctgcacatgccgctgacgattgagcttgacctgcatcgctgttccggcgatgaaattgttggaggggtccttgagttcaatcctgcgaccaacggccagcacacggaacgacttgttggagaaaatggcgctgaattggaagtggcaatttcatggtcgcagtacccttgagctacatgtctgtccagtccaaggtggttgcgcttggtgcactgatcttcttccttgtctcgtatggctcttgcactggaggatggactccaagcgccggctgcaggggcccttctcgctgcgcatcactaacgagtccggcgagacactggtggcttaccaggtcatcccggcaaactgggcgcccaacagctactaccgctccaacatccagtacgaggcttttggctctgctgctggacaggctactggctctgctgttggactggtcattagctctgctgctcgactgcacacgttaattaccaggatcattggcttgatctgtttggtattgttgtatcatttgcaagggattgaggtgccttagttttaattagcacttgacatgttgggtgtcctacgctgtgtgtctgctggaggcgtcgtcgatccagagtttcatcttttcgaaaaagttttgaacccaaataattttcctatgaatttcgttgattcctgcgtgacaggtagttgatgtagctctgtgggaaatgtacacttgtatttggtgctg

SEQ ID NO: 103560 - DNA, 861 bp, Zea Mays
gtgagaaactaggagtgcacatcagtagccggcggtaggaatgtaaatttttaaattcgcaagtaactagtagtttgtaatgaagttttctttatacctatttgtggatttgaagatgtttgtaacacaagcttttgtgcttgtactgtaagttgacaatttacatttgagatattaaaaaaaatccacttattgaaacaccctagcttcaaatccttcagtcttgcacacagagctacatgtctgtccagtccaaggtggttgcgcttggtgcactgatcttcttccttgtctcgtatggctcttgcactggaggatggactccaagcgccggctgcaggggcccttctcgctgcgcatcactaacgagtccggcgagacactggtggcttaccaggtcatcccggcaaactgggcgcccaacagctactaccgctccaacatccagtacgaggcttttggctctgctgctggacaggctactggctctgctgttggactggtcattagctctgctgctcgactgcacacgttaattaccaggatcattggcttgatctgtttggtattgttgtatcatttgcaagggattgaggtgccttagttttaattagcacttgacatgttgggtgtcctacgctgtgtgtctgctggaggcgtcgtcgatccagagtttcatcttttcgaaaaagttttgaacccaaataattttcctatgaatttcgttgattcctgcgtgacaggtagttgatgtagctctgtgggaaatgtacacttgtatttggtgctggatagctgggctgtcctgtcttgttctggctgttgtaggggctcacaactttcaactgttctagaaatctt

SEQ ID NO: 103561 - DNA, 356 bp, Zea Mays
ggtagtgatgaaccaggggacccggactcgggatgacaagggttcgtggcaatatggtcggggctggcgaatgcggtgctcgccggatgctccaacggggagtctcatcaggcttcatcatcgttgttcatgggctggttgcagccgctgccatccaccatggctggcactctactctccgtcgtctgactgtcaaatcaccctgccgcataactcacggtatggaattcgccccacatatagttctccctatctttctctacgtgtaccacttgtttagcatgatcgagcgtcatgattctgcactccgccactgtaatacccaaaaatgtataaagtgatattatattggatct

SEQ ID NO: 103562 - DNA, 387 bp, Zea Mays
atggccgcgacgccctggctcctgctctcctcgtcgcgcgtgcctgggcgctgccccaggtggccgtctgtcctcccgtctcctggacgccgcgtcctcccggccatggagttcgccggtagccaccccgtcgtgctcgtctatggtgctcgcttcggccgcgaacgctgtcgagcctgtcgttttctctgtccagtgctcgcgcgactttctgctcgaaagcgcaccctctcggctcgcttggccttaatccccatcgcgtcgtcgacctcgccagttatcattgttcgttgtcacgtcgtgtgtgtagctctatatacgtcaccctcctgtatcatcgtcgagcccgtcgaacctcgttcttccctgctcgaccttgtcgaaccc

SEQ ID NO: 103563 - DNA, 243 bp, Zea Mays
gccaagcccgtggatgcgtccatggccgtggccgtgcgtcgcgtggtggccggccaaccgccggtcgccgtctgcagcggcgaggcaatccagcacctctggcaggtggaggaggctagtcacgaccgtgtcgaacagctccgtcatggctctctctctcactcactccctcgatctaactgtgttcgcgtggcgagatctgtgtcgtcttcccttgctctggctctgcgatgtggcgaggcg

SEQ ID NO: 103564 - DNA, 601 bp, Zea Mays
atgtccctgctcggatctctgccttcctccatggccgcgtccaccactttcagctgccgctgtttttcctctggtgctcgcccctgcgttggtcatggcgcctggttgccgagtccctgcttcctgcgccctggtgcccagccccacgcggcctccctgctcggaccgcgttcttggctccagctcggctctgtcttgtgccggcgtcctctactccatctttttccccagcgcgccctagtattcgctcgctgctgcgcgcgctctcccctgtctgctcgtcgtggacgcgggccgctgcccatgccgagctcccttcagttctccggcgtcgcgcgctctccgtggtcgatgctcctagccctccgctcgccgagctctgtgcacgtgcgccccatcccgcctgcgctcggaccgtgccctcgctgcctgtgctcgccaaccgcggctgtcctgctccctgctgcgctcgcccaggtcgccgccgtcgagtccctatgcgtgcaaccatgtccctctgctcgccgtgctagccatctacgtcgtcgtcggaattgtctccccgaccatcgtgacattgttatttcctgctgcgccgtga

SEQ ID NO: 103565 - DNA, 158 bp, Zea Mays
ctcccttacctaactttcccttgccccaaaagaagctcgattatgccatagtacactcagtctatgtcaacactcacctaatagctaaaacctgatgtacccttgttttctatgccacacctgctaatggcatgaaaattttaggtgtataatatata

SEQ ID NO: 103566 - DNA, 288 bp, Zea Mays
gctcttgccacgcgtcacacgtggattatgcggccgaccgttggcccggccgactgttggctcaccggacagtccggtgcactaccggacagtccggtgatttatagtcgtacgccgttaattgcttcccgagagcagtcagttgacagacaccggcctggcgcaccggacactgtccggtgcacccagactgagctgtctttggctaaactcaaccatctcttttccaacttgatttctcatgtttccagcacttagacacaatacattagtctctaaaataatgta

SEQ ID NO: 103567 - DNA, 930 bp, Zea Mays
gacaagaaaacaaggggctatgttccttggaatgatgagatggataaggtactccttgatacatttgtggactattacaataaaagtgatagatgtcagaatgggtggaagtctcatgtatacacagttgctgtgaagaatgtttgtgagaagtgtaatgtcaccattacaaaggaaaatattagctctcgcagcaagaactttgataagcactacaatatcattaatggtttgttgtccactagtggttttggatgggattgggagaagaacaagctcaaagttgatagtgacactgtatgggatgagtacgttgagaggaataaggaagcaaaaggatatagacataaggttgtgaagttttgggttctacttagcctagtgtacaataaagaccaagcaaatggagagggtgctaaaacagcagttgaaagttcaaaggaaatggcaaaagagaatgataccggagacaaggatgctccatattctgtatcttcctcgagtagtttaaaaagacaaagatcagatgattcatttaactctatatggtgtgataagtttgacatgcttacatctgcattgaaagatgacggtccaaagctaccctcttccgccgaagttctcgccgcattacaagaggttgagggacttgatgaagacacataacttgagctttatgacatcctcacctctaatgcacgcaagtttgagtcgatgatggcactcccaatggaaaggaggaagaggtggcttatgatgcagctaaggaagtgaaacaacttatatatgaacttagatctctgtgttgaactgattatgtgacttgtctttgtgaaacttttgtgtgcgaacttgatggctatgtgaaattgttgtgtgcgaacttgatggctttatgaaactgctatgtgaagatttgatgtctttgta

SEQ ID NO: 103568 - DNA, 1722 bp, Zea Mays
gtccattgccctgccctgccctgccctgcccagacactggtcaagcgacgcaagggaaggatgtggttagctagcagcctgaaattctccgcccatcaactcagtcagcaggaagcaacccgcctagcgccctcgatccaaggacctcagagattcggccgtcgccactccggggccaagaaatgctcctcctgctcttcttctctgtcctcgccgccgttgccgccttcctcctcttcaagttcgccaccgtcgtcgatggggacttgacgctcgtatcccgcggtccgccgctgcgggagagggtcgacggcaaggtcgtgtggattactggagctagccgcgggattggggaggttcttgcaatgcacttcgcaaatttaggagcaaagctgatactatctgcacgtaacaaggacgcgcttgcgagagtgaaaaaaaacatcctcagcaagaatccagatagcagagttgaaatgttacccatggatttatcagctggtgaagaatctctgaaagaagtcgtacatgtggcagaatcatttttttctaatgcaggcgttgactatatggtccataatgcagccttcgaacgtcctgtaaatatcacccttattttgagttaatgttttaactcccttacccttcaaacatcatgttgttttattgttagtagtttttgatgatagatctgctagacatcactcctttttaatcatattctgaatcagatgatccctaaatgcatcaatttttaatcaaattgcagaaacggagggctctagaagaaagtgaggaaggtcttaagataggctacattgaatgtcaatgtcttcggaactattactttaactcgccttctagcaccttacatgcttgatagagagatgggccattttgttgtggtatgtataaactttcaacaggaacttttggtcatcacagtttcattttgtctattagtgtggctaactcatatacagatgagtagtgctgctggaaaggttcctgctcctggtcaggccatttactctgcctccaaacatgctcttaatggttactttgcttctctgcgatctgagttgtgtacaaaaggcattaaggtcactgttatctgccctggaccgattgaaacactacaatcttctgctgcagcttcttcatcgcaaacacattctgctgagaaacgtgagaaacgtgtttcggtggaacggtgtgttgaactgacaattgttgctgctactcatggactgaaagaagcatggatatcatatcagcctgtgctgactgttatgtacttggtgcaatacatgccaacaattggttattggctaatggacaaggttggtgcaaaacggctggatgcggccgcaaagaaagggaacacgtatagttggagtctcattttcagcagcaagaagtcagcatgaccaaattgctcgtagctgctatcaccatctttctcgattcatatggtcacgtgacttatattgttgtacgcaaaaaggtcggcctgaaaaggatcagatcatgtatagaaacaatatagtttagtgaaaaattggacccgtcactatgaccaataattatgattcagttgtgttagatttattgtgtggcgtaatgatgtactgtgtgtaatatatctttgtaataagcatatacccattttactctattattaatacagctttctaccctgtctagggctaaagttttcat

SEQ ID NO: 103569 - DNA, 1946 bp, Zea Mays
gtccattgccctgccctgccctgccctgcccagacactggtcaagcgacgcaagggaaggatgtggttagctagcagcctgaaattctccgcccatcaactcagtcagcaggaagcaacccgcctagcgccctcgatccaaggacctcagagattcggccgtcgccactccggggccaagaaatgctcctcctgctcttcttctctgtcctcgccgccgttgccgccttcctcctcttcaagttcgccaccgtcgtcgatggtgttaccccaatttcattcttcaatccaaccatgccttcgttcctctctctttccgttcttctcttcgcccctgttgggttgggaagattggactgaccccttgttctttgatggctgtaggggacttgacgctcgtatcccgcggtccgccgctgcgggagagggtcgacggcaaggtcgtgtggattactggagctagccgcgggattggggaggttcttgcaatgcacttcgcaaatttaggagcaaagctgatactatctgcacgtaacaaggacgcgcttgcgagagtgaaaaaaaacatcctcagtaagtttgcaagatatctgtggcgttgctaaatttttttcccttagtggggaagtcggaatctgaagacctgaaccaagtttgatttacttttcaaaggcaagaatccagatagcagagttgaaatgttacccatggatttatcagctggtgaagaatctctgaaagaagtcgtacatgtggcagaatcatttttttctaatgcaggcgttgactatatggtccataatgcagccttcgaacgtcctgtaaatatcacccttattttgagttaatgttttaactcccttacccttcaaacatcatgttgttttattgttagtagtttttgatgatagatctgctagacatcactcctttttaatcatattctgaatcagatgatccctaaatgcatcaatttttaatcaaattgcagaaacggagggctctagaagaaagtgaggaaggtcttaagataggctacattgaatgtcaatgtcttcggaactattactttaactcgccttctagcaccttacatgcttgatagagagatgggccattttgttgtggtatgtataaactttcaacaggaacttttggtcatcacagtttcattttgtctattagtgtggctaactcatatacagatgagtagtgctgctggaaaggttcctgctcctggtcaggccatttactctgcctccaaacatgctcttaatggttactttgcttctctgcgatctgagttgtgtacaaaaggcattaaggtcactgttatctgccctggaccgattgaaacactacaatcttctgctgcagcttcttcatcgcaaacacattctgctgagcagaaacgtgagaaacgtgtttcggtggaacggtgtgttgaactgacaattgttgctgctactcatggactgaaagaagcatggatatcatatcagcctgtgctgactgttatgtacttggtgcaatacatgccaacaattggttattggctaatggacaaggttggtgcaaaacggctggatgcggccgcaaagaaagggaacacgtatagttggagtctcattttcagcagcaagaagtcagcatgaccaaattgctcgtagctgctatcaccatctttctcgattcatatggtcacgtgacttatattgttgtacgcaaaaaggtcggcctgaaaaggatcagatcatgtatagaaacaatatagtttagtgaaaaattggacccgtcactatgaccaataattatgattcagttgtgttagatttattgtgtggcgtaatgatgtactgtgtgtaatatatctttgtaataagcatatacccattttactctattattaatacagctttctaccctgtctagggctaaagttttcat

SEQ ID NO: 103570 - DNA, 1715 bp, Zea Mays
gtccattgccctgccctgccctgccctgcccagacactggtcaagcgacgcaagggaaggatgtggttagctagcagcctgaaattctccgcccatcaactcagtcagcaggaagcaacccgcctagcgccctcgatccaaggacctcagagattcggccgtcgccactccggggccaagaaatgctcctcctgctcttcttctctgtcctcgccgccgttgccgccttcctcctcttcaagttcgccaccgtcgtcgatggggacttgacgctcgtatcccgcggtccgccgctgcgggagagggtcgacggcaaggtcgtgtggattactggagctagccgcgggattggtgaggtgataaatttcctgactgcagtgttattttttagcgagccttatgcctttgttagttcattgaggaatggggaggttcttgcaatgcacttcgcaaatttaggagcaaagctgatactatctgcacgtaacaaggacgcgcttgcgagagtgaaaaaaaacatcctcagcaagaatccagatagcagagttgaaatgttacccatggatttatcagctggtgaagaatctctgaaagaagtcgtacatgtggcagaatcatttttttctaatgcaggcgttgactatatggtccataatgcagccttcgaacgtcctgtaaatatcacccttattttgagttaatgttttaactcccttacccttcaaacatcatgttgttttattgttagtagtttttgatgatagatctgctagacatcactcctttttaatcatattctgaatcagatgatccctaaatgcatcaatttttaatcaaattgcagaaacggagggctctagaagaaagtgaggaaggtcttaaggctacattgaatgtcaatgtcttcggaactattactttaactcgccttctagcaccttacatgcttgatagagagatgggccattttgttgtgatgagtagtgctgctggaaaggttcctgctcctggtcaggccatttactctgcctccaaacatgctcttaatggttactttgcttctctgcgatctgagttgtgtacaaaaggcattaaggtcactgttatctgccctggaccgattgaaacactacaatcttctgctgcagcttcttcatcgcaaacacattctgctgagaaacgtgagaaacgtgtttcggtggaacggtgtgttgaactgacaattgttgctgctactcatggactgaaagaagcatggatatcatatcagcctgtgctgactgttatgtacttggtgcaatacatgccaacaattggttattggctaatggacaaggttggtgcaaaacggctggatgcggccgcaaagaaagggaacacgtatagttggagtctcattttcagcagcaagaagtcagcatgaccaaattgctcgtagctgctatcaccatctttctcgattcatatggtcacgtgacttatattgttgtacgcaaaaaggtcggcctgaaaaggatcagatcatgtatagaaacaatatagtttagtgaaaaattggacccgtcactatgaccaataattatgattcagttgtgttagatttattgtgtggcgtaatgatgtactgtgtgtaatatatctttgtaataagcatatacccattttactctattattaatacagctttctaccctgtctagggctaaagttttcat

SEQ ID NO: 103571 - DNA, 1739 bp, Zea Mays
gtccattgccctgccctgccctgccctgcccagacactggtcaagcgacgcaagggaaggatgtggttagctagcagcctgaaattctccgcccatcaactcagtcagcaggaagcaacccgcctagcgccctcgatccaaggacctcagagattcggccgtcgccactccggggccaagaaatgctcctcctgctcttcttctctgtcctcgccgccgttgccgccttcctcctcttcaagttcgccaccgtcgtcgatggggacttgacgctcgtatcccgcggtccgccgctgcgggagagggtcgacggcaaggtcgtgtggattactggagctagccgcgggattggggaggttcttgcaatgcacttcgcaaatttaggagcaaagctgatactatctgcacgtaacaaggacgcgcttgcgagagtgaaaaaaaacatcctcagtaagtttgcaagatatctgtggcgttgctaaatttttttcccttagtggggaagtcggaatctgaagacctgaaccaagtttgatttacttttcaaaggcaagaatccagatagcagagttgaaatgttacccatggatttatcagctggtgaagaatctctgaaagaagtcgtacatgtggcagaatcatttttttctaatgcaggcgttgactatatggtccataatgcagccttcgaacgtcctgtaaatatcacccttattttgagttaatgttttaactcccttacccttcaaacatcatgttgttttattgttagtagtttttgatgatagatctgctagacatcactcctttttaatcatattctgaatcagatgatccctaaatgcatcaatttttaatcaaattgcagaaacggagggctctagaagaaagtgaggaaggtcttaaggctacattgaatgtcaatgtcttcggaactattactttaactcgccttctagcaccttacatgcttgatagagagatgggccattttgttgtgatgagtagtgctgctggaaaggttcctgctcctggtcaggccatttactctgcctccaaacatgctcttaatggttactttgcttctctgcgatctgagttgtgtacaaaaggcattaaggtcactgttatctgccctggaccgattgaaacactacaatcttctgctgcagcttcttcatcgcaaacacattctgctgagaaacgtgagaaacgtgtttcggtggaacggtgtgttgaactgacaattgttgctgctactcatggactgaaagaagcatggatatcatatcagcctgtgctgactgttatgtacttggtgcaatacatgccaacaattggttattggctaatggacaaggttggtgcaaaacggctggatgcggccgcaaagaaagggaacacgtatagttggagtctcattttcagcagcaagaagtcagcatgaccaaattgctcgtagctgctatcaccatctttctcgattcatatggtcacgtgacttatattgttgtacgcaaaaaggtcggcctgaaaaggatcagatcatgtatagaaacaatatagtttagtgaaaaattggacccgtcactatgaccaataattatgattcagttgtgttagatttattgtgtggcgtaatgatgtactgtgtgtaatatatctttgtaataagcatatacccattttactctattattaatacagctttctaccctgtctagggctaaagttttcat

SEQ ID NO: 103572 - DNA, 1470 bp, Zea Mays
gtccattgccctgccctgccctgccctgcccagacactggtcaagcgacgcaagggaaggatgtggttagctagcagcctgaaattctccgcccatcaactcagtcagcaggaagcaacccgcctagcgccctcgatccaaggacctcagagattcggccgtcgccactccggggccaagaaatgctcctcctgctcttcttctctgtcctcgccgccgttgccgccttcctcctcttcaagttcgccaccgtcgtcgatggggacttgacgctcgtatcccgcggtccgccgctgcgggagagggtcgacggcaaggtcgtgtggattactggagctagccgcgggattggggaggttcttgcaatgcacttcgcaaatttaggagcaaagctgatactatctgcacgtaacaaggacgcgcttgcgagagtgaaaaaaaacatcctcagcaagaatccagatagcagagttgaaatgttacccatggatttatcagctggtgaagaatctctgaaagaagtcgtacatgtggcagaatcatttttttctaatgcaggcgttgactatatggtccataatgcagccttcgaacgtcctaaacggagggctctagaagaaagtgaggaaggtcttaaggctacattgaatgtcaatgtcttcggaactattactttaactcgccttctagcaccttacatgcttgatagagagatgggccattttgttgtgatgagtagtgctgctggaaaggttcctgctcctggtcaggccatttactctgcctccaaacatgctcttaatggttactttgcttctctgcgatctgagttgtgtacaaaaggcattaaggtcactgttatctgccctggaccgattgaaacactacaatcttctgctgcagcttcttcatcgcaaacacattctgctgagaaacgtgagaaacgtgtttcggtggaacggtgtgttgaactgacaattgttgctgctactcatggactgaaagaagcatggatatcatatcagcctgtgctgactgttatgtacttggtgcaatacatgccaacaattggttattggctaatggacaaggttggtgcaaaacggctggatgcggccgcaaagaaagggaacacgtatagttggagtctcattttcagcagcaagaagtcagcatgaccaaattgctcgtagctgctatcaccatctttctcgattcatatggtcacgtgacttatattgttgtacgcaaaaaggtcggcctgaaaaggatcagatcatgtatagaaacaatatagtttagtgaaaaattggacccgtcactatgaccaataattatgattcagttgtgttagatttattgtgtggcgtaatgatgtactgtgtgtaatatatctttgtaataagcatatacccattttactctattattaatacagctttctaccctgtctagggctaaagttttcat

SEQ ID NO: 103573 - DNA, 1473 bp, Zea Mays
gtccattgccctgccctgccctgccctgcccagacactggtcaagcgacgcaagggaaggatgtggttagctagcagcctgaaattctccgcccatcaactcagtcagcaggaagcaacccgcctagcgccctcgatccaaggacctcagagattcggccgtcgccactccggggccaagaaatgctcctcctgctcttcttctctgtcctcgccgccgttgccgccttcctcctcttcaagttcgccaccgtcgtcgatggggacttgacgctcgtatcccgcggtccgccgctgcgggagagggtcgacggcaaggtcgtgtggattactggagctagccgcgggattggggaggttcttgcaatgcacttcgcaaatttaggagcaaagctgatactatctgcacgtaacaaggacgcgcttgcgagagtgaaaaaaaacatcctcagcaagaatccagatagcagagttgaaatgttacccatggatttatcagctggtgaagaatctctgaaagaagtcgtacatgtggcagaatcatttttttctaatgcaggcgttgactatatggtccataatgcagccttcgaacgtcctaaacggagggctctagaagaaagtgaggaaggtcttaaggctacattgaatgtcaatgtcttcggaactattactttaactcgccttctagcaccttacatgcttgatagagagatgggccattttgttgtgatgagtagtgctgctggaaaggttcctgctcctggtcaggccatttactctgcctccaaacatgctcttaatggttactttgcttctctgcgatctgagttgtgtacaaaaggcattaaggtcactgttatctgccctggaccgattgaaacactacaatcttctgctgcagcttcttcatcgcaaacacattctgctgagcagaaacgtgagaaacgtgtttcggtggaacggtgtgttgaactgacaattgttgctgctactcatggactgaaagaagcatggatatcatatcagcctgtgctgactgttatgtacttggtgcaatacatgccaacaattggttattggctaatggacaaggttggtgcaaaacggctggatgcggccgcaaagaaagggaacacgtatagttggagtctcattttcagcagcaagaagtcagcatgaccaaattgctcgtagctgctatcaccatctttctcgattcatatggtcacgtgacttatattgttgtacgcaaaaaggtcggcctgaaaaggatcagatcatgtatagaaacaatatagtttagtgaaaaattggacccgtcactatgaccaataattatgattcagttgtgttagatttattgtgtggcgtaatgatgtactgtgtgtaatatatctttgtaataagcatatacccattttactctattattaatacagctttctaccctgtctagggctaaagttttcat

SEQ ID NO: 103574 - DNA, 918 bp, Zea Mays
ggcaaatggattatataatctaggcagattatataattggctagagatcaactgattaaggcgctgcaaggttaaataaattcaccatagcataaaggcggttctttaaccatcagacaaaacatggtaatacaatgacaaataacacaagcaaaaaaaattaaacaagagcttcctagcttgcagagccctatacccaccaggcgtcgttagccagcatttcttccaccgttcagaatccgagtttggtgcgacgccagtgcctgcgcttggcctgttgaaggctgcgcagcccgcccaggcccctcaataattcaccagcggaggaaagcaaatctcaatatactactgccactagcaaatctcaatatcgaaacacaagcagagcacatggagcacgacacaacacatggagctatgacggcgagcacaagcagagcaaggcactgaactcaatcatcctcctcagcggaggaaagcagagcacgacacagcaaagcaaagtcgcagagggatagatccgagcacaagcaggccccgatggcgacgacggcgacgaaccgacgggtgatccacaaggagtacgtgaagggataccctcgcgaggagcacatggagctgctccggggcgccgaggtgcccctccgcccgacgggcgccgagctggccgggtcagtcctcgtcaggaacctctacctctcctacaaccccctacatgcggcccaagatgtcgcgctcgctgcgggctacgagcggccgtggtgctacgacccctacatgcgacccctacatcacgggctacgagcggccgcaaagggagacgaacctcgtcgtcgtcgatgccgtcgtcggccagaacagtcccgctgccgtcgccgccaccgttgtgctcgaggcacgagcagtgcgagaggctga

SEQ ID NO: 103575 - DNA, 968 bp, Zea Mays
atgctctgctttggcctcgcgagctcgctgcgggacgccctagccgctgctcgccccgaccacatctccctggccgagcgctcccctgttgaagccccttgccgatgccttgccctcctccctccccacggtcttcttccccatggcgtcgggatccctccttccgacggctgtgctcctcaagcgtgctctactcgagctctgccggatctgcaacttccctgcgcgcgaccgcggcacatggtcctgtgctgcccatggcctcaactctccagctccctccatggccgagcaggcgctcccagcagcagcgatgcttgtttcctctccctagccactacgccatcatgctcccgctgcccctgcctttttttcctaagagccgagctccattcctggccgtgcccaggaagtcctgtccgtgggttggggccaaggctttccctggttggcctcgccgtgagcagcacccccgatatctgcgcgcgctgccggctcgctgttttgggaagcccagtggacaacacgacgtcgacgctcaccgggtgtttgctgtttttgcgcagccccatccgcgacgtcgttcacccccgaaggcaagccgctcaacgctcgtcgacgttcggagctatgcacaaatcagaatcgccatcgttcttacaaacgccgattgagtttgtttatggtgagccgatgcatgttgctcttgatcgactcgattgataaattgaatggatgtgtaaaatgtttcgattatgcgcattggtatggattgaagttgtggcgaaagaaaaagaagtagaaaagaactcggatgtttttatatttcgataggaatatatgcgatgggattgtttgatgcaaatactaagtttaaataaataaataaataaataaataaatgcggatcatgttttagggaatacatcggtagatgtttatgtgaagagtgtattggttttatgcat

SEQ ID NO: 103576 - DNA, 665 bp, Zea Mays
tttttaaacacacgcactgacctgcgcgcacgcacacactgaggcgagggagagagagagagagtgagtgagtgagtaatgggcggttcatcaggccttgtggactggagaggacggccggtgaacaccaagaagcatggaggagtgagagcttcaattttcattcatgcgctggtgctgctcagcaacgtagccaacattgccagtatactgaatcttgtaagctatctgcgcgaggagatgcacatggatgtcgcgagggcgacgacgatggccagcaatttctttgccgcgctgcaaatgttctccatcccagcagccttccttgctgactcctacatcaagcgtttctacactgtcctcatctttggcccaattgaaatactggggataaacttgaaggaaccgctgcatttgggagagctttgaatttcctcttggtgaccaaaaagtcagtgagcactgcaggttgatgcagctggtgttctactactccatggcggcctgtcactggtgactttatttaggtgtcaagtgtcagtagttggtgacctgtcgctcgcctttattgacttttatttggcaataggtatccgaccactagaactccgatccattatgtaggtcgagcacctcactaaaaaccgaaggatttattcgtttca

SEQ ID NO: 103577 - DNA, 950 bp, Zea Mays
cttcggaagccgaaggcccccaacagcggtagcgtccaaaatgactatcccactattgacccgacctcgttcgacgtggtgctctgcggcacgggcctcccggagtctgtcctcgccgccgcctgcaccgccgctgggaagacggtcctccacgtcgatcccagcccgttctacggctccctctaatcttccatccagctctcctcccacgcctccttcttatcccctgaggccaccccgcccacctcgactgtggcagcggttgcctccgattcgcatatcgtcgtcgatctccaccgacagatcgtgtactccgaggtcgagacctcgggtgcggtgccagagccggcgaggcggttcaccgttgacctggtggggcctcgggtgctgtactgcgccgatgaggcagtggacctcctcttgcggttagggggcagccaccatgtggagttcaagagcgtggaggggggcagcctcctctactgggaaggctgcctctacgcggtgctagactcgaggcagaccataaccacactgaagctcaaggagaagaacatcctcttcaggttcttcaagcttgtgcaggcgcacattgctgccgccttagcttctggtgatgagaccggacagggggatgcatctgctaggatacctgaggaggacctagatcttccctttgttgaattcctcaagaaacagggggcttcctcccaagatgagagcggttgtgctgtatgcgattgccatggcggactacaatcaagatggtgctgacccttgtgagaaattgattacaacgagggagggaatcgagaccattgatttgtactcctcgtccaatgggaggttcgctaatgcagaaggcgctttcatttatcctatgtatgggcatggtgagctgcctcaagctttctgtcgttgtgctgcggttaagggtgtcatctctatct

SEQ ID NO: 103578 - DNA, 1504 bp, Zea Mays
gatccaggcatctaagcagaccacacaaaattaacaacacaaacaggatcgatcgagcaacgtacaatggcagctctggccccatccattgtagttcccacagacgccgagctgctgcaggcacaggccgatctatggcgaaacagcctgtgctacctcaaatccatggctctcaagtgcgctactgagctcggcatacccactgccatctacagcctaggcggtgctgcctcgcttcccgacctgatcgcctcactgtccctcccccaggctaagctacctttccttggccgcctcatgcggctgctgtcgtcctcgggcgtcttcgccgtggttgagtccccagaggctgtctactccctcacaccactgtcatacctcctggtggacggcatcgctgccgataacaatcacatggaccatgcacctttcctactcactgtgacgtcagcacactacattgacctggcaatagacctagctgactggttcaagaaggaagccaagacacctcctttcgatcacaagcacgcagcatcgctgttcgaggagagtatggagcgcaaggctcccgggttccacaagatgtcaatactaggtttgttggtccatgacaactttgcaaccagcattgccgtgcgggagtaccaggacgtattccagggggtgaagtcagtgactgactgctgttaccatggggatggcacaacagggaaggccctcgccaaggccttcccactgatcaagatcacagtactggaccttccgcaggagattcgcaagataccggctgatggtgttgttaactatgttggaggtgacatgttcaaatccatcccacgtgctcaaatggtgttacttaagatggtgctgcaccactggagtgatgaggactgcgtgaagatccttgccaactgcaggaaggcaataccttcacgggaagagggagggaaggttgtcatcgcagatattattctcgacccagcctcaggaccagtcatgtttcaaactcaactcctaatggacgtctgcatgatgctgatgaaaggaggccggcaacgggacgtgaatgactggcgtgacctcatccagaaagcagggttcagtgactacaagctgctgaagaaatttggagctcgaggcgtcctggagatttatccctaaggcatctcctccatcgatcagcaccgactttatattgtggtttggtactgcgacgaaatctacattacaaaaataaagggatcggagtgcgccatagttattttctgaatgatggttccatggaacgacagagtgtaaagccagctgtgacaagcttggttgctcaacgatctgtttaactttcgtttggagaagtatctaggcacatcatgagatgttacatatatcgtacgtattctattaatatatatgtacccaccatccaggtgtaggatatatgtattaccttgtaattggtattgtattatcggccacgtacaaaagtgaacctctccatatt

SEQ ID NO: 103579 - DNA, 124 bp, Zea Mays
ctttgttgtttatttccttgtttttgataaccagatccgattccccaaagcattccaatcaataaggctgacaacgtgccaacaaaacaagcagggaggaaaaaaagacgtggggcgtatgaac

SEQ ID NO: 103580 - DNA, 462 bp, Zea Mays
atgcaggccatgcaggaggagttggccattctgagacaagctattcctgttgcccctgctggtgcttctcagtgtgccggaggtggaggagtgctcgggggcgctgtccctgcgggtgctgctccagggggaggctcaaatttggtggagaggcatggaggcagctcactcctcctcaccaggagtcctgacctgggacactttcatcagtctttcaagcaagagaagaagtccgtcacagagtatgaagtgggctttaacaaaatggtctgctttgttcctcatgtggcttacaatgagttggagaaggcgagccagttccatcagggtctgaaacctttctatcaagcatgctctaggcgcctttctgttggtggattttcgtactacagtggagtaggccttgggtgtggggatgcaacatcagtacaccatggagtcttagaagtcttcgggtgttga

SEQ ID NO: 103581 - DNA, 617 bp, Zea Mays
gggcatcgccggcgagcagagagggacgctgagcagggagcagagcacgccatggcagggagaactcgagggaaggtaaccggcaatgcgcaggagctccacggctggaggttgaagacgacctggcggccggcggcccggcgcgcgcaggaagaagctccacgtagcgcagagcagaacgaggagcaggggctagggcgcggcatgggagcagtcgcgccatgggagcaggccgactatgcgtcgcgagtagaggggtgggagtggagggaggagagaggagcggctgggcaagcagccatgggagcaggggagctctggccggcgctggagaccacaactgggcgagcgctgggagcttcgatggcggtgacttggacgagcgccagggagaaacaccgggcgcgcgcgcagggagacgggcagagggagcttgggcgcgcggcgagagggatgggagggactcgccaccaaaaattgggcacgagcaggagctgtcaccggcgagagaggatgcaggggcgctcgccagggagctctgcgagagagagatgggcactggagagagagcgcggcaagggaggaagaagagagagcagacgtgcgtgtaaacagag

SEQ ID NO: 103582 - DNA, 328 bp, Zea Mays
ccgaagtaagagcctgactaaggcttccttgctcagtgagtaagcaagtcgtaagacccgtgcgtcccccctagtaagacaaaaatagaagagatgataaaaaagataaagaaggaaaagagcatttttcttttcttcatatcgattctactaaatctcatagttactctaaactttgaagctcagctctgctcccaaaagagaaaggagactgagataggggttgtccttggtttttccaaggaaaggaaattcttttgagaacctgatcatagaggagccatatgaagctaaggtttttggaatagtggtgggctggtaatgtaat

SEQ ID NO: 103583 - DNA, 669 bp, Zea Mays
ttgcaccatgatgaggacatcacttctatatatacaatgaatggaccgataacacgttctcgtgcacgacaactaaatctccgggtacgttctaccctagtcaattgtgtttcagagcttacgcttggggccatggatgttttgatgattaggtaccttggagaggaccagcaaggacttgggaaaggccaaggtgttgaggaggagcagcaagggcgtccacaacaggaaggagatcaagtccgagtcggctgcgactctatctcgggttccaggactagtctgcactaaaatggacgcccaagatgcatccggactccgattgcgacggactggatatggttggaaagataacgagattatctaaccaacccaactggttccaccctaaaattcatccggagtcaacaggaatcgtcgaaacaagtcagtgttcagattctgttttggtgctgcgacacagtctgttgggccgttgggccgtgtatcgcgtcggagcccattaggggcgagtccagggctacgcacgccctaatactctatttattcagcagctgccaccacatttaggtttgggtttttcttagatcaattctgtcatcgaacagtgtcgccgtcatcggcttgtgagaccccctcccgtaatcaatacaattttggttgtgtttc

SEQ ID NO: 103584 - DNA, 109 bp, Zea Mays
gaactaaaatttatttagtgctctaccattttgtgaagaagcatttggatcataatgctttaccacccgtttatacgtgggaagatgtggatgcgcgcaattttgtacg

SEQ ID NO: 103585 - DNA, 615 bp, Zea Mays
ccaatcctttcacccaaatcatacataagatagatgttcaatatgtctagggacccattggtcgtcggcaatgttgtgggagatattgtggatcccttcatcacaacggcgtcactgagagtgttctacaacaataaggagatgacaaatggttctgatcttaagccatctcaagtgatgaatgaaccaagggtccacgtcggtgggcgtgacatgaggactctttacacacttgtcatggtggacccagatgcaccaagccccagtaaccctacaaaaagagagaaccttcactggttggtgacagacattccagagacaactgatgccagtttcgggaacgaaatagttccgtacgagagcccacgtccaatcgccggaatccatcgcttcgcattcgtcctgttcaggcagtcagtgaggcagaccacctatgcgccgggatggagatcaaacttcaacactagagacttcgcagccatctacggccttggctcccctgtcgctgcagtgtacttcaactgccagagagagaacggatgtggtggaagaaggtacataaggtgatatatcaaccaagctatgtgtgcttctctctctcaagggagagaagca

SEQ ID NO: 103586 - DNA, 259 bp, Zea Mays
agcaacaacacgctcgccattctctaatcaacctcgtcgtcgttttcaacaccgtcgagacactcctctgctcaacgcgtgtctcctgcttgtcggaatgtgtgactggcctcctcgaccttgcagtgggctggttcacgtcggccaccgtgtatccaacttccgcagtaacgttgttgttctctccttgagctcgttgccgactctactacccggtgaaacctcgttgttcttgtcttattcacttacccgaggttag

SEQ ID NO: 103587 - DNA, 1556 bp, Zea Mays
gcagcatcaatggcaagcccccggtgctggtcggtcgtctgtcccaagccccggcaggtcgcgagcgagagcgtccacggcgcgcagctcgctctacagcggttgagcaggcgctgtgagacctgcgacgttgaggccagcacgccatgcagctgccgaaaggaagccgttgcccgggacactgaggaggatagtagcgggccgaacagctcctttgcacactccgtcatcaacatggttgggatgctcatagggctggggcagctttccactccatatgccttggagaacggcggctgggcctctgtattcctcctcatcggcctcggcgtgatgtgcgcctacacagcccacatcatcggtaggtgcctcgacgaggactctgctggttccaaaacgtaccaggatatcggcaagcgggcgttcggcgtcaagggccgcgtcatcgcctcaaccttcacatacctcgagatcttcttggccctcgtctcctacaccatctccctcagcgacaacctgccgctcgtcttcgctggcgttcacctccatcttccgtggctccacctcagcgcgacgcagctgctaacaatcatcgccgtgctgctggcgctgcccagcctttggctcagggacctctcgtccatttccttcctttccttcgctggcatcatcatgtcgctgctcatcttcggcagcgtcgtctgcgccgccgcgttcggcagggtgagcctgggcaagcacatccccgtgctccagctggagaagatcccggcggtgtccggcctgtacatgttcagctacgcagggcacatcgtgttcccaaacatctacgccgccatgaaggacacctccagcttcaccaaggtctccgttacgagcttcgccgtggtcacggctctctacgtagctcttgcgttcgtcggctcgagcctcttcggcgcggcggtgaactctcagatcacgctcagcatgccgccgcatctcgtggtcaccaaggtagcgctgtgggctaccgtgctcacccccgttaccaagtacgcgcttgagttcgcgccgtttgccatccagctccagcaccacctcccagagggaatgggacctcgcgcgcgcatgttcgtccgaggtggagtcgggtcggcggcgctccttgtaatcctggcgctggccctctgcgtgccgtacttccagtacgtgctcagcctcacaggctcgctagtgagcgtggcgatcagcgtcatcttcccctgtgcgttctacctcaagatctactggggtagagtgcccatgtccaccgtcactatcaacgtggtgttgattctgaccggcgtagttctcgcggtggtgggcaccatctcgtcggccatgtcgcttgtgcagagtatccagagaggccatgctgcgtaagagtatcaagatgccacctacaccgtaccattagaattccatcaatgtaacacattacactcttgttctatatataattattgcatcaaatattgtaacactccaaaaatattgttttggagttctaataaaataatacaaagatttgaacc

SEQ ID NO: 103588 - DNA, 2390 bp, Zea Mays
cctacaaatccatagtgacactattattatctcaccttcctacttgagttacctggcagctcgggcagcgcaggggaaccaattgcagagagcaagcatatccaacgcaattaaatgagtgtgctaaactcgctggggatcctactcctgctcacggcgccggcgtttgcggcggcactgtcggcggatgggctttcgttactggccttcaagtcggcggtgaccgacgatccgtccatggctctctcgtcgtggtccgacgctgatgcggacccgtgccgctggctgggcgtcacctgcgtcaacagctcgtccagcgacggactgcgcgtcgtaggggtggccgtcgccggcaagaacctgtccggctacatccccgccgagcttgggtcgctcgcgtttctacgccggctcaacctccacgggaaccgcctgtcaggaaccgtccccgcggcgctcgccaacgccaccgccctgcactccctctttctctacgataaccgactcacggggccgttcccggccgcgctgtgtgggataccgaagctgcagaacctggacctgtcgcagaacgccttgacgggcgcgctgccgctggagcttggacgctgcaagcagctggagagattgcttctcgccgagaatgcgttatccggcaacataccggcggctgtctggcaggacatggtgggcctgcagatgctggacctatcgtccaacaacctcaccggagccataccagcagaactcggcaagctcgccgcgctcgccggcacgcttaacctctcccacaaccacctctccggcggggtgcccctcgagctcggtcggctcccggccaccgtcacgctcgacctccgcttcaacaacctctccggcgagattccgcagtccggctccctcgccagccagggccccaccgcgttcctcaacaacccggggatctgcggcttcccgctgcaggtcccctgccgcgtcgctccaccgtcgtcgtcgtcgttgcccccaccgcctccgtcgtcctctgccactaccaacggcggcgcgggcggtgcacggctgccgatcaagaccagcctcatcgtgctaatctcggtggccgacgcggtggccgtcgcgttggtcggtgtcatcgtggtctgcgtgtactggaaggtctgcgaccggcgccgcgccgcgaaagacaaaggcgacgacagcgagtacgaggaagggtgcggcctgttcccttgcccgtgctgcatgcgcgccgacgcgtgcggcgactcgtcctcggaatgctccgaggtcgacggcaagtgcaacggtggcggagggaccggggagggcggctatctggtggcgatcgacaaggggttcaggatggaactggacgagctgctgaggtcgtcggcgtacgtgctgggcaagggcggtaaggggatcgtgtacaaggtggtggtgggcaacggcacgacgcccgtggctgtgcgccggctcggcggtggcaccgcggcgcccgagcgataccgggagttcgccgcggaggcgggcgccatcgggcgcgtgcgccaccccaacatcgtgaggctgcgcgcctactactggtccgccgacgagaagctcgttatcacggatttcgtcaacaacggcaacctcgcgacggcgttgcgcggccggtccggtcagccaagcctatcatggaccctacggctgcggatcgccaagggtgcggcacgcgggctagcgcaccttcacgagtgcagcccacgccggtttgtccatggcgaggtcaagccctccaacatcctgctggatgccgactacaacgcgctcgtcgccgacttcggcctcgcccgcctcctcaccatcgtcggttgcaccgacgtctactctgtggcaggctccggcggcatcatgggcagcgggctcccgtatgccagacctgccgctctaacggacagatcctgcagtgcgtatcgcgcccctgaggcacgcgcgccggggggtgcacagccgccgagccagaagtccgacgtgtactcgttcggcgtcctgttgctcgagctactcacggggaagccgccggagcatgcctcgccgtccgcgtcgtcctcgtccatgccgggtcacaatgggcaacgggagctagagcaacaggctccggagctcgtgaggtgggtgcggcaggggttcgaaggctcgcggccgctgtcggagttggctgatgccgccctcctgcgggacgctgccgcacggaaggaagttgttgcggcattccatctctcgctaaggtgcgtcgaggcggacccggagcgccgaccgcggatgaaggccgtgtcagatagcctggacaagattggggcttgacttgtcaccgtcgacccaaaaatggttatgatgtggagttg

SEQ ID NO: 103589 - DNA, 2046 bp, Zea Mays
tgattgaagatccctcagtcattaccggccgggtgaagcttcacctagagctattgtcatcgtccgagacaaggggtatcctggatgctagtaagacaacctccaagactattaagagagcacctgtccacaaggaacctagcttggtgtcagtttggtaaccctggggtttgcacctctggggccaagcactgagctagccaggtcccagagccctgcaaactgggggcattatgcaagtgcttccaggcttcgcacaagacaccctcagaacgagttatggcatttatggttatcttaatggcaataacgcataagcctgtagcactgacattagatatgattctcttgtttgcttttcatgtttgtccatatgttcaatttgtttgcatcgccaacaggttggactagctgagatgaaggttgctattgagagaacaggtggccttgttgtcttatctgaaagttttggacattcagtattcaaggattctttcaaacgcatttttgagggaggtgaacagtctctaggcctttcattcaatggtacaattgaaataaactattcgaaagatattaaagtccaaggtattattggaccatgcacatctttggagaagaaaggagccgtgtgtgctgacacaattgttggtcaaggaaatacaacagcatggaaaatgtgtgggctcgatagaaatacttctctgacagtattttttgatgtctcaccgagtgaacggtcgagccaaccaggacaccaaaatccccatttgtatatacaatttgtaacaagttaccaacacccagaaggtcaaatgagggtaagagttactacgatatgcaggaaatgggtagacggttccactaataccgaggaattagttgaaggttttgaccaggaaactgcggctgttgtgttggcaagatacatctcttttaaaatggagatggaggaagagttcgatgcaacacggtggcttgatagatctctcatacgtctttgctcaagatttggggattatcggaaggatgacccctcttcatttagtttgcattcaaatttctcattgttccctcagttcatgtttaatctgcggcgttcacaatttgttcaggttttcaataacagtccagatgagacagcttatttcaggatgttactcaatcgcgagagtatcactaactcggttgccatgatccagccttccttgatatcattttcctttgattcacctccatctccggtgtttctagatgtggcatcattagcggcagatcgtatactgctacttgatgcgtactttagtgttgtcattttccatggcatgacaattgctcagtggagaaacatgggttatcagaaccaacctgagcatgagcaatttgcacaactattacaagcaccacacgaggatgcgcagatgataataaaaggtcgatttccagttccaagactagttgtctgtgaccaacatggctcacaggcaaggtttttgttggctaagctgaatccatcggccacatataactcagctcatgatgttgctccaggttccgacatcattttcaccgatgatgttagcttcctggtcttctgtgagcacctacaaaggctggctgttcagtcttaaggacctgtatgcaatagttgtacaccctattggatagttgctgataattcattaggctcttaggttggacttgttagaaaatctcccttttttgttcctctttgcccacagttttctgaggccagactatttttcgggaaacagtcctaaaggaaggtgtaaattgccccggaggtctggtatctgcatactatttatgttgacatcgcccagcttttcttgtggaaagtcatttgggcagcttaggcaattatcctttcaggcacgtgagtttgtaaatgtgacatcgtggacacttgacatgctcttcgacatttgattttacagctaacttaaacataaaaaatagcgcaactgtaaattttttgtattatttcttaggcaccatgactaatttttttctgaaaaaaataaa

SEQ ID NO: 103590 - DNA, 288 bp, Zea Mays
atggcgcccacaggcaggtacgccccaggcaacacattgtacgacggccggaacctgcgccccacacagccaagggcagtgaaagctgaacgcacacgaaccgtgtacgagaaaggtttgtcctaccggttaagatggagcgtcggcacagcggggccgtctccaccgccgcccgcgttggcggaggtggtggggaagccgaaggccctggcaacctcggccgggctgagggtacaccgggccctaccacacatggaagcctgcagcgggccctgcggcggcagttga

SEQ ID NO: 103591 - DNA, 187 bp, Zea Mays
gttgtggtccactccgaatccttcgtacttgtcccccttttcatttaggacaaggttgttcagctgaagcatatatttctgctgcgttaagacgtttaggcggacctttggtgaccacagtgttctttataaagtttttcttatcgctcctaaagagggtgtttcctgggcaaccagcgtcgatgac

SEQ ID NO: 103592 - DNA, 2596 bp, Zea Mays
ctctcctgtaaccaaagcgccttcttcccggactctccccagcatctcgctccatgacaaatcccaccgcgggtagatcacagcacgccatgccgcttcacgcgcgcgtgcgcgcagctagttagctagcgaacaaacccagcagaaacagacgccgccgccgacaacaagcgatctagaagagcacaggaaggagcaaggtgttgctgaggaaggcgacaatggccgcggagcaggttcagctgtgcatctccgccgacagcggcggcggcgaaagcaagcgtgacgccatgccggtggcggtggccgtgtccctgtgcctcctccacgacgcgttaggcgtcgcgctgttcctcgcctcccacccgctccacaccgtctacctcctcttcttcgcgcgcggcctcctcaccctggcggccttcttctgtccgctcctcgtctccacgtcgctcctcctcgctgtgttcgtcaccgtcgggccgtacgtcggcggcgccgactggtccggggtcaagtccctcggtaggacctgcggcattgccgtcgcagcactctgcgccgagctccggcccgacggtgctccagcggggcttgtcgcgcagctgtgctccttcgtccttggtcccaccgacgctgcctcccttctccgcgtcgaggagatcatgggtgttacagcttcttgctttgtgtctgaggaggagcagagcttgttgttaattggtgagcctgcatttgcgctcccagtaatagattacatttctgacagaagcatcttggattttgagagttttggtgatttgaaggacaaaattgacgaaaaagttgtgatttccgaggatatgaaaggctctgatcctttggctgagcagtgttgctcccccagagatacattatttgtgcaaaaaatggaagcagaaggagagagcggcattcaggggcaggacttaattttgtcagccattgatgaggtcagcgatggtgttgaggagaagagattggagtgtgacccagtgtcagtagagatgaagaaatttgagccagtgcaattattggagaccaggaattgtcaggcaatgcaaacaatggagatcaagaaattggagccatcggaactaatggaagaagccaagaaaccggagatcaagaaatttgagccactgcatgcaattgagatcaagaaatccgtgcagatcaagaaatttgagcctgtggtactgccggaaatcaaggaatgtgagacagtgcaggcagtacagaccaagcaattgccgtccacgctggagatcaaaaagtctgagccagttgaatcagtggagatcaagaaaaatgagccggtgaaaccacgttctttgattgctcagcgcatcaagctatgggaagcacaagtatctggcaatgtcaagccaattgttggggataaggaggaaaactcagaggaattcagtttgagaaataactcaaacaaggacgcaaagaaatgcgtgcggtttgaggctgcagatccttgtgtcgcacaacagcaagaacaagaagttaaggatgtcaaagagtatgtgcacttcgagactgaaacagaagccgaagaatgcagcgcagaggctgaacaagagcagctgctggagcaaggctgcaacgatgtgcaacctgagccagatttgcacgagctagagaacgagattgcgcaacctgaacaagaacctgaaggagtccaggtgtacaacgacaatgacgtggcacaatctccagccatgtggaatgacgagagggagagcccactcaagtcgacatcgatcgcaagcagagtgcactcgcggacctcgtcggggaacctcgccagcgaggggtcgtcgccgtcgcggaaggacaaggagtggaagaggacgctggcctgcaagctctacgaggagcgcatgcagctcaggctgtgccgcgaccgtgccgtggtggggggcagcgacaacatggacatgctctgggaggcctacgaggtgggcggcggcgggagcaagggcagaggcgggaagcgcagcggcagcggcagcagcagcatggtgaaaggaagcaccggcaaggtagaagatgccgctgaggaaggcgaggaagatggcgacgaggaagacggggacggggacgaaagttcagtgaggcatctttgctgcctgcaggccctcaagttctccaccaggaagatgaacttcggaggtggcaagcctagcctgtccaagatctccaaggtcctaaagaggatgaccgcgttgtcgaggatgggatcgcggcgcaaacagtctgaatgaaggtcagctggtgtgatcaatggatggatcctttttcttgaatgtagaaccgctgtactgtcaccgtacttgttatgctgttttttttcgattgtatttcttttttttttctagtctgtatatatatgtgatgtatacccaatggtttcagtgaggttgggggtaattacagggctgccacttggcctgcagaatgtaataaaccttgatctggtgtgtgtaattttcgtgctttcagtcaatgctatgtctccatgaacaatttactgaaatgcgctaggtttcagtgaagacaagtg

SEQ ID NO: 103593 - DNA, 684 bp, Zea Mays
aagccgagagcacaacgaactcgttataggccactcaccggtcgattggacgatgcagcccactgcccacagagatgggtggcgccacggtggagcatgaacgacgatgagcaatcacgccgtccctgaacttcggcaaggcacccatgacgcgcggtgttccccagagaagatgctccccagccgtcttccatctagccgggcaaatcggaagccgttgcagcacgtcgagcacctgtccgtgcttttgcttgccccagtgccaatggtccgacgacggatttgagggcagccgtaacacctgagcgccgcgcagagcgtgggccggtactgcaggagcgacgcgccataaggtggggcgagtacagaggtggcgttcactgtttttctctactcatcgatggcttaggggaggtcggatcaatggtggccggatagttcaacggcaggcactagcagggacgccggcgtacgatgaagaagcccaggctctgtagagtgctcgccatgggggtgatcgctggggagatggcatggctttatagccgcagggtgagctgacgtccgagaatcacggtagacctcatctaccgaacggaccaggtgagcgcccaggcggctaaagcggggttcagtttcacagccgagcggaccccgcaaagacgctaattcagttacgcgcgg

SEQ ID NO: 103594 - DNA, 498 bp, Zea Mays
atgagtcatggctacaactacaatgcaggacaagagtatatactactaacaatactagtattatgcaatgatggaatcttccacttggtccctaaattaacgaatctctcaccacgaatcccttgcatcggcaaccaacttaaaaagcgaaacaatcaaaaccatggatccagcagcagttcgccacaccttggcatccttggcggcaaggctaggctagaggtggcaattgaggcagttgcaggtgcgcggggtgaaggagcagacgccgaatggacggttggggatgttgcagttgatggcgtagcagcacggcgccgggatgcacatcccgtgcgggcccccgcagcaggtgcacaccgcgcacacctggaaccgccccaccagccgccgcccgtgccagtgctcgatgccgccgtccaagaacgtcttcctcagccgcggcgtccatgccgccgtctccgacacattgccgccgccgccgtcggtaccagccta

SEQ ID NO: 103595 - DNA, 324 bp, Zea Mays
atgacagctaggttccaaagattgcgtgagagaaatattggtaaccctttaattttagaggatttccaatgggacaatgagtgggtggacaatcaaaaagaaatacttagagaaggggatgatcttgcatgggctcatgtggatgatgcaatcggtgcttctagttcacttcaaggtcgcaacttcccaaaaagagcccgatatgagtctgtttattcaaggcgttggcaagctgctgctacacaggagcagagagttatagaagaggaagggcaaggcaatgaacaagatgatgaagagtacatgcctaatgatgacgaataa

SEQ ID NO: 103596 - DNA, 1613 bp, Zea Mays
agtagtcatcgacgtcgtcccgaccttcttttcaatcccgtctcggattcgttccgtctcagctaccgcgaccacgacgccgacgcgagagggcagggaacacagccactcgccgacgagaccccggcgcgcgcgagagaaagagaagagaggaggatcttttgttcgtgaaaaatattggaggcggagggaaggtgaaggagggggatcggagatgaacgtgttccggctggcgggggacatgacccacctcctcagcgtggtagtgctgctcctcaagatccataccatcaagtcctgcgcaggcatatctctgaagacacaggagctgtatgcacttgtttttgcagcacggtacctggacctgtttgttcattttgtgtctctgtataacactgtcatgaagctggtcttcttggcaagttctttctcgatagtttggtacatgaagcggcataagattgtgcggaggacatatgacaaggatcatgacacctttcgccattacgttttagtgttgccttgtcttcttctggctctcctcattaatgagaagtttacttttagagaggtgatgtgggcattctccatttatttggaagctgtcgcgatatttccacaacttgtgttgctacagcggacaaggaatattgacaacctgactggccaatatgtcttcttcttggggtaagagatctatatatggcagtatctaaaaatgcataaaaaacgaaaacaaatgtaattttcttagaaacaatgcattgaacaaaagttttgtatgaacaatatttgatcggcattgcctatatagtgaaatagacaacatggatgaattttcttattccgccttctgatattcgatgtatcatgctaggatcagtcttatccttttggacagagccttaatttgtctctagtttatatacgctattactaaagctgattcacttggttacgatgcagtgcctaccgtgtgctttatatccttaactggatttaccgatacttcactgagccccattttgtccactggataagtatgaattccttgtgccatccatttttattccttgaatgtgattcggagccgcacattatttcattaaagatgtttgcactccccattatggtaggtgtaaccgttattcatgcagccattttctttgtgtttttcttaacccaggttggatggcaggaatagtgcaaactctgttgtatgctgacttcttcttttattacataatgagctggaagaacaatgtgaagctagagctgccagcttaaggttgctgctcctgtccccaagatatagtagggtaatatatcagataggcaggccccatacacagcatgatcattgctatcgccaactgggttatgaaaaaagcattttagttgcgtggcttgtatcgccttgtatctctctgctattgttggaagaacaggaaagtcaggctcaccatgtaactttttacaataagctgcgtaagatcagcactagaaggttgtgaattgtgatcgtccttagggaattttgtgctgatgtaaccctttcggcaagtgattctcatacaatataatctcagactataattggtaattgtttgata

SEQ ID NO: 103597 - DNA, 1188 bp, Zea Mays
agtagtcatcgacgtcgtcccgaccttcttttcaatcccgtctcggattcgttccgtctcagctaccgcgaccacgacgccgacgcgagagggcagggaacacagccactcgccgacgagaccccggcgcgcgcgagagaaagagaagagaggaggatcttttgttcgtgaaaaatattggaggcggagggaaggtgaaggagggggatcggagatgaacgtgttccggctggcgggggacatgacccacctcctcagcgtggtagtgctgctcctcaagatccataccatcaagtcctgcgcaggcatatctctgaagacacaggagctgtatgcacttgtttttgcagcacggtacctggacctgtttgttcattttgtgtctctgtataacactgtcatgaagctggtcttcttggcaagttctttctcgatagtttggtacatgaagcggcataagattgtgcggaggacatatgacaaggatcatgacacctttcgccattacgttttagtgttgccttgtcttcttctggctctcctcattaatgagaagtttacttttagagaggtgatgtgggcattctccatttatttggaagctgtcgcgatatttccacaacttgtgttgctacagcggacaaggaatattgacaacctgactggccaatatgtcttcttcttgggtgcctaccgtgtgctttatatccttaactggatttaccgatacttcactgagccccattttgtccactggataagttggatggcaggaatagtgcaaactctgttgtatgctgacttcttcttttattacataatgagctggaagaacaatgtgaagctagagctgccagcttaaggttgctgctcctgtccccaagatatagtagggtaatatatcagataggcaggccccatacacagcatgatcattgctatcgccaactgggttatgaaaaaagcattttagttgcgtggcttgtatcgccttgtatctctctgctattgttggaagaacaggaaagtcaggctcaccatgtaactttttacaataagctgcgtaagatcagcactagaaggttgtgaattgtgatcgtccttagggaattttgtgctgatgtaaccctttcggcaagtgattctcatacaatataatctcagactataattggtaattgtttgata

SEQ ID NO: 103598 - DNA, 728 bp, Zea Mays
tttttcaaggaaccaggagcaagcccctcctgattagtatataataatcttgtgggaatttcacgtctgaaattgtgcagttctgatcgcttttgtcattttccggagcaggtgatgtgggcattctccatttatttggaagctgtcgcgatatttccacaacttgtgttgctacagcggacaaggaatattgacaacctgactggccaatatgtcttcttcttgggtgcctaccgtgtgctttatatccttaactggatttaccgatacttcactgagccccattttgtccactggataagttggatggcaggaatagtgcaaactctgttgtatgctgacttcttcttttattacataatgagctggaagaacaatgtgaagctagagctgccagcttaaggttgctgctcctgtccccaagatatagtagggtaatatatcagataggcaggccccatacacagcatgatcattgctatcgccaactgggttatgaaaaaagcattttagttgcgtggcttgtatcgccttgtatctctctgctattgttggaagaacaggaaagtcaggctcaccatgtaactttttacaataagctgcgtaagatcagcactagaaggttgtgaattgtgatcgtccttagggaattttgtgctgatgtaaccctttcggcaagtgattctcatacaatataatctcagactataattggtaattgtttgata

SEQ ID NO: 103599 - DNA, 543 bp, Zea Mays
atggtcgttgctcccagggcgcccgtggtcctacccaacgtcgtcattgtctctcccagcgtcgcgagcaccagcgccgccgctagtctcttctacaacatcgtgggcttggccatctccggtgtgctcccaggcgcggccaccaatgcctttgccggtctcttctccaacaccgcgaggctagccctctctgacgtgctcccaggcgcacccagcgtccttcccttcatcggcgctgctccctgcgtctcccctctcccggccagcggtggtggcaccccagctgcacctgcctccctcaccggaggcactcctcccaccgccggcctggctggacccgcgctaccttgctccaccgacatcacggccccccatccacgacagtgtggcacccacatgcagcagcggcacaacaccctcttctccggcgacgcaattgcaggcatccccttccccagcaaagaagcgtcatgtggcatcgtttctcccttggcttctgtagttcaccctgcgtgcatggcctcggctctactccacgtgtga

SEQ ID NO: 103600 - DNA, 1963 bp, Zea Mays
atgaagactaggtttcaaataaggcgtgagaagaaagggaaaagttttgaccctttggtcattgaagagtttatttgggacaatgagtgggctgactcatcacatgtacaccctcaaggtactcgtgggtgtgagtgtgtccaggatggtcttacatgggaggttattgatgaagctcttggtgcatcaagctcactccgaggccgcaatcttccaaggaatgctagcagaggcttggtgattgggacaattgaagagagcatatatcaagatgacatgatgtttgtgaaatgcttctgtaggaatgacagcagaaagcagtcctacacctacagcactacagtagttcttgatcaccggagttggtcagaggtcagagatgagtcgctggagttgatcatgacggactggcgcctctgtcggttcttgatcaggactcagaagttggtcgggggaagggggggatgggttcgacaggaggagcagccggccaggaaggaggacgggagaagatcagaagacagagtgacagacgagacagagagatgaatactgaaaactgaaaaaaaggaaagtaaattcggttttggaaactggaaacaacgcgccaatcaacaattaaatggttttggaaactggaagcgacgcgccaatcaacaattaatgtggtccctacatggaaacgaggaggcacccaaaaattaggtcccagatgcgcaccctttccatttccaggttccaagtcgcaacagacaagaactggacgactaatcgcgattaagggacgattagaccacctaatcgggtcggtgaccctaatcggctacgtgtgaccgaccagaccgattaatcgcgattaatcgcggtaaatcgaacgatttgaaaaccctggccacgcttcgccttaccgccttaataaccatggcaaaatgacatgtccacaaccaaggccactagcaggggaggtaagctcgtgccgccgcagaggagggcaggaggcgatgacaggaccacagtggctgacaggagcaaggcacagaggcgggggggcatgaggtggaggacacctggacagttttagagctttagatcaagtgtttttccaagcgtgggatgggcttgaattccataaagcactaaaacgtggcctttttgcagcccaaagcgcttaaaacgagctctttatgtttttttgtgaaacgatgcagctctttacgccctcagtagcgctttagcactttaccgcttaaaaggcgcttaagcgactttttaataacattggtggtttgtttcttgttgatggaaagatgtcacggcttctcgcatatggaacacaaataagtgaaccatgtttgtgtaaggataaatcgctcagcctcttaacttgaattcataacatggtagcattgactttcttccatgtattagtttccagattttactttaaagtcaatgcaaagcatctggagattgaacaacaccatattgtctcagttcaatttaagaccaaaagctacttttttgtgctactttcttcatatttatagtcatttgaagaagtgttcttggcaaatatggatgcaaactgtaaagaatatttaataaaattgactaggattgatgttttatttaatgtgttcaggaaagtgaatatatcagtgtacagtaatatagtatatgaactagaaccaccttgaaagacagttatccatattccattattccatatggaacagcaaggaatcataagaaggtagacaggtcatcgtaaaatacaatgattaagctatgcagaaactatcaaaacaaaaagccactgcgcaaagaggtgcagaggcatttgaaagtgatagatccagataaggttattattttggtgatcgtattccacagtatatagttcaaaagaatgtgacttaccaaccatgcaacttttcccaaacttgctgaggaagcagtatgt

SEQ ID NO: 103601 - DNA, 363 bp, Zea Mays
atggggaggctcggggcagctatctggcgacgaccagaggacgacgggcggcagctcgcgagcaaggagaagggggcgcggggagaggcaagccgactgggatctggaaccatggatgttgaggaagatttttatagagggagaagagagggcactgtggagcgagaaggccggtggcggctattaatggcgctagcccgtggtggtggggacagagaaacggtggctgttttcggcgcgtggaggcggagaggtgaagggggcaaggcgtcgagtggccggggaagcaaggcggcgtggccacacgcgtgcaggcgctggaagaggaagaggtcgtggggcctggggcctgcgcgtcagtga

SEQ ID NO: 103602 - DNA, 592 bp, Zea Mays
ttggctctgcatggtcggaaattcacttggtctaatcgccaagatacgcctactctcgtcaaacttgacagaatgttttgctcatcagattgggagcagctttttcctaatagtcttctgcaaagtgctagcacaggttcggatcattgccctttgcttcttgggctccaggttttgacgcatggccgcagcagatttcattttgaatcccattggacaaaattgcctgattttattacgacaatggaggctgcttggaattctgttccttcctccccttgcccttttgaaaccctttccaagaagtttagagccaccgtcaggcgtctccaaaggtggtctcaaaaaagggtgggtcatatctcctctcagcttgggatggcgcgggaaattatgcacaagctgcagtctgctcaagataacagacccttgtctgtgctagaaaattggttgttgaagcagcttgattgtcacattgtggccctttcaaccttgcaacgttctatggctcggagccgctctaggatcaccttgttggttgagggggatgttaatactgccttcttccacctccacgctaaataccgcaagg

SEQ ID NO: 103603 - DNA, 86 bp, Zea Mays
gcaagaattttattggtaacttgttatccgacaatggtttgataaagtcaaggcatgaggacaaggaggaaactctaagtgatttt

SEQ ID NO: 103604 - DNA, 705 bp, Zea Mays
atggcagcgctgtcgtgcgcgtgtagccgcatggcaggcccgagctgccgctgcccgcttgctggtgcctcctccggcatcgtggtggacacgatggcagcactggcgtgtgcgtgcggccgcgtgtttaagggttataggtcgcacaccatggcgcctatattgaatttactgcttatacaaataagaagaggtatcatggcaataattctgaaggtgtacaaagtgcggctgtcacctggtctgccgtctgcctatacccaattgcctatacaccgccttcttttgaggctatccgcaccgatgaactgtaaagaatactctaccgatataagggtgatttactttgactgccttaatactgcatacatactggagcgtgaagagagacgcaagagactaaagagagagcagcaggatgatgggtcaaggctacattcccagcagattaggaatgattatgctcctcaacccaaaagacatagtcgcattaaagaggcacctcagggctggctggactgccctgcatttggggaaccaatagataaaatcataccatctaaagttcctcttgacgaaacattcaatgagtcagtgcctcctgggaagcggtactcctcaaagcaactagttaacaaacaaagaaaagctggccgcgaagttgtcggtggtgtcgaggattgggaggcagcatccagtggatga

SEQ ID NO: 103605 - DNA, 2044 bp, Zea Mays
tttcaggcaatgatgttccttgatcgacaaaaacaatcaaagaatcctaaatatattctggttcactgtacccatggtcataatcgtacaggtttcatgattattcattaccttatgcgcacacacgtctcttgtgttgctgaggcgattagtatatttgctcaaaggcggccacctggcatatacaagagggactatattgaagcattgtattcattttaccatgaggttcctgacaatatgatgatagcatgccctccaacaccagaatggaagagaccagatgatctcgatttaaatggcgaagctaagcaggatgacgatgatgacaatggtgatcctggaccactgcataatgaatcagaggataaagtcatcaccaatgacgatgtgttaggggatgaagtgccatatgaccagcaagaagctttgcgtgtcctatgttatcggttgcttgaaatgcctcttggaagggggcatgcacactttcctggatcacatccagtttctcttaacagtgaaaatctgcaactacttagacagcgatactactatgctacatggaaagctgacggaacacgttatatgatgcttataatgagacatggttgtttcttgattgatcggaattttagctttagaagggttcagatgcgctttccccataggagcctccaaggtctgcaagatatgaccttgattgatggagagatgattatagacacagtaccagattcaggcttgaagagacggtacttggcatatgatcttatggcgcttggctcagtgtccaaaactaggttgccattttctgaaaggtggaaaatgctggaagatgaaataatacagccgcgtaataatgagaaaggccttgagcgtggtgctaagagcaatccgttgtacaaatatgacatggaactattttcggtatcggattctagtatttctgaattgtaatgttcaactcatgagctctacaaagttaatccttttttgtttattatatgacattaccaggttaggagaaaggctttttgggtgctattaacagtaaaaaaggttcttaaggtgtttattccatcgctatgccatgatgctgatggccttatatttcagggctgggatgatccatatgtaactcgtactcatgaaggtcttctaaagtggaaataccctgagatgaattctgttgactttctgtttgagcttacaaatgataatcgtcagctggttttcctatatgagagaggaaaaaagaaacttatggatggtgctcggatatcatttactgatgatgtagatccatcttctgtcgctgggaggattgtcgagtgctcttggaacaaggaagaacagtgttgggcatgtatgcgtattagatctgataaatcaactccaaacgacatcaacacataccggaaggtgatgaggagtatcacagataacattaccgaggagaagcttctcgaagagactgatgagataacgctcctgccgatgtatgccgataggatgaatgttcgtgttcatacaaagatggcacaacacaggcgaagattgccaccacagtgctagtctcgttgctagagtgctgggtcgctctcctagccagcggctggcttctgtagctgtgtaattagtagaggtttcagtagcccccccccccccccccccctatgatgatggccagccaactaattctttgcacttcatttgtgtcttgtcccctgccctcacacctacctgtataggcttccctgtaaattgtgtgctctatgttcctccatattctcccctatggttttatttttcatgggtgtagaatagcgtttaacaaggcgggtggtgttctatgtaggcgttgccatctctcggtgctgcctcgtgctagaataatgtagggtgtactggcgataccatgtggttgcgatatatggcttggttttagtgttttggtttgtgcgcacctgatccgatcctttgtccaacgaagattttttccccttatttttgggtaaaaaaggacgtcaatgttaccactcta

SEQ ID NO: 103606 - DNA, 584 bp, Zea Mays
ttgatacacaatgacaattttataggtagtttcagtgacctacaaaaacatagttgcatacacagtaacaattttggtcgataaacatttaggtctcgagagaataacaaaaacatatgttaaagatccttaatgaacaataatctttttggcaagaaacataaactagcagcagtgaaaagagtctgtgatcaagctcgaagctagcaacagttgaaggggacatctagatagcatcagaagcctaccgaatgacgtataaatctccatggaagtgaaaagtaaagcaccatgtgagaaaaacaacacattgaactatcgagcaaaaggagaaatggccaaaagcaaataaatgagtgcatgttgctttcttgctgaatgtaatcccacatacacatggaaacaaataaaccctacactacaattctcctctctgcattcttgctactgtgccagcatacattacagtagtaaaatagcaaaaaagaggatatattgtttactaacccatttccactggcaggaagagtgttgttgctagctgggtccaaacacaactggataaactgaaatagcaaaacatc

SEQ ID NO: 103607 - DNA, 324 bp, Zea Mays
atggagggccggaaccacagcaacgagccggctgccctgctggcgcgtcgcgcgggcgacaaggccgccccgacgaccgactactcgatcaccatcgttgctggaagcaagcaggccgccggagctcacgtacgcgctcgtcaaggcgcggtggctgcggccgtggcgggccagctgccgcgcgggtcctgcaaggtggaggcgactgtgcagggtcctaggcacggaggcaacggcagcgggggagcgggcgtactcctgatgcgtcgcaacgggccgtcgcgtgtgctgccgtattcagtcgcacgtgccgtcgttgtgtga

SEQ ID NO: 103608 - DNA, 524 bp, Zea Mays
gcagtcagtacaggctcgcgatctgcggattgcagaagacgagcacctccacgagctgggccctgccctcgtcgccgaacaggctctccttcccgtccggccgcctcgcgtacgacaggccaagccgcgagcgagcgctgcggaggtcgccgacgccggcgctggagtcgggtccagtgaacacgcccatcacggcggtgagcggcgggccgatgagcaggccgtcggcgccgaactgtggcccgccgcgggagtagtcgaacagcgccgcgccgctcccgcccaccttgggcagcaccacgggcggcgccgagacctccgtagattccgcccagtagaagaggaacgcgtccagcgtgtcgtagtagtcgtccgtgcttcggtacccctccgggctgaacccgccgaaacggaagccaccgtcggtgtagccaacgacgacgcaggggcccttgaagtcgcaccgccggtggaagtccgtagcactgaagccgtccacggtggccttgtagcagcacctgagc

SEQ ID NO: 103609 - DNA, 267 bp, Zea Mays
atgctcgctgggtgtcgtctgttgtaccccagcactcgtgcttgcccctggcttgcgttagcgctcgcgcgcctgctcgttgtcactgcggcacacttgctcttcgtccatcgagcttcgtgcgtactcgcgtttgccatcgagctgttgaactcgtcctcccttgctcgtgacttcgtcgtcgccagggccctcactggattcgtgtcctcgccagctcgctccagactcaatctcgtcgttgttccgtgcgtcatcaagaaatcc

SEQ ID NO: 103610 - DNA, 829 bp, Zea Mays
atattttgccctcccctcccgtgccacggcctcgccccttcgtaccgcacccataagctaggttttagccgcagctttctcctttttcgccgcggcggccgcaagctccaaccttctccccgaagaagccccaagcaagcgacactcttgtcctctccgcgccagatcgttgtttatgagctcgaaggagaagcccactcttggaggcacgcggattaagacccgcaagcggaacattgcagctcctttggaccctgcatcattctctgatgcaattgtccagatttatctggataatggtggagatctggttaggccttctgtgggtgtaccatttgcatttcatatgttatttctgtcattgagatgtatgcatttagatttatgaaatatccttgatgtgatatatagttagattcctattaagctggataaatcaattatgctttgcatggggtatgtccagctgtgcatgcaggatttggagttttaagaataaaagaaagtggtttaagcatatatgcttaatcaaaaagaataaaattgttgaaccaaatacctttaatttgcccatgtcctccagctccaagaatttggagctagtaatgagcggctccaaaaaatcttggatctggagctgtgcaaacagctcctagcacatgtgttgtatgatagtaatagctatcaggatccaaactgaccgagaactgtttgatatttttcttttacttgtttcattgatgcagttttatgccattctcaattttttgttaccaggaactcgtcgccaaaagtattgagtcttccgacctcaacttctcacgttacg

SEQ ID NO: 103611 - DNA, 1750 bp, Zea Mays
atattttgccctcccctcccgtgccacggcctcgccccttcgtaccgcacccataagctaggttttagccgcagctttctcctttttcgccgcggcggccgcaagctccaaccttctccccgaagaagccccaagcaagcgacactcttgtcctctccgcgccagatcgttgtttatgagctcgaaggagaagcccactcttggaggcacgcggattaagacccgcaagcggaacattgcagctcctttggaccctgcatcattctctgatgcaattgtccagatttatctggataatggtggagatctggaactcgtcgccaaaagtattgagtcttccgacctcaacttctcacgttacggtgacaccttttttgaggtggtttttgttggaggacgcactcagcctggcactgtaaaacctgaagaaggagaccgccacccttattctatgttagattgtgtggcacagcgtgaaacaattttgcctttcgtactctatatccagaaaacattgcgcaggaggcctttcttaataaaaaatcttgaaaatgttatgcgcaaattcctccaatccttggagttctttgaggaaaatgagaggaagaaactcgccatattcacagcccttgcattttctcaaaagctgtcagggcttcctccggagacagtgttccagccattgctcaaggataatctggttgccaaagggatagtactttcattcataactgagtttttcaaggagtacctgaaggaaaacaccttggatgatttgattgcgcttttgaagaaaggaaaaatggaggacaatctgttggacttttttccatcagctaagagatcctctgaggctttatctgagcatttcatcaaagaaggtctgactagccttgttgagtacaatgaaaagaagatgtttgaagttaaacttaaagagataaagtcaacactgaccactatgatcaatgatgaggctgcaatacctgaagtgattgagactgtcaaacagcaagttaaggatgctaaatttcctgatctagaggtcattcgcatgttgtgggatgtgctcatggaggctgttcagtggtctgggaagaaccagcaacagaattctaatgcagcacttcggcaggtgaaagcatgggctgagcttttgaatgctttttgcacgagtggcagactcgaactggaacttatatacaaagtacagacacagtgctatgaggatgctaagctgatgaagctgtttcctgaaatcataagaacactgtatgaccaagatgtcctagctgaagatactgtcctgctttggttccgtaaaggttcaaaccagaagggcaggcaatctttcgtgaaagctctggagccgtttgtcaaatggctcgaggaggctgaggaggaagaataagtttttgatttggagaacggccgaatgctggcctaagtgttactttatatttctgaagttagaagtttgtggaggaattattgctgctgcctcttactgccgagaactttatgttatgatgtttagccacatggatcccggctgcagagtgctataatatgttgctgttaaaactttgtgtcgagcatttgttgaaacttttgttatcattactgaaaggatttataatgggacgtcagtttactgtcggtattgtacaattactggattattcataagctgcagaatgctacaaatgtcatttctggcaaatggaatattgaaatgttacgaatgtaa

SEQ ID NO: 103612 - DNA, 1762 bp, Zea Mays
atattttgccctcccctcccgtgccacggcctcgccccttcgtaccgcacccataagctaggttttagccgcagctttctcctttttcgccgcggcggccgcaagctccaaccttctccccgaagaagccccaagcaagcgacactcttgtcctctccgcgccagatcgttgtttatgagctcgaaggagaagcccactcttggaggcacgcggattaagacccgcaagcggaacattgcagctcctttggaccctgcatcattctctgatgcaattgtccagatttatctggataatggtggagatctggttaggccttctgaactcgtcgccaaaagtattgagtcttccgacctcaacttctcacgttacggtgacaccttttttgaggtggtttttgttggaggacgcactcagcctggcactgtaaaacctgaagaaggagaccgccacccttattctatgttagattgtgtggcacagcgtgaaacaattttgcctttcgtactctatatccagaaaacattgcgcaggaggcctttcttaataaaaaatcttgaaaatgttatgcgcaaattcctccaatccttggagttctttgaggaaaatgagaggaagaaactcgccatattcacagcccttgcattttctcaaaagctgtcagggcttcctccggagacagtgttccagccattgctcaaggataatctggttgccaaagggatagtactttcattcataactgagtttttcaaggagtacctgaaggaaaacaccttggatgatttgattgcgcttttgaagaaaggaaaaatggaggacaatctgttggacttttttccatcagctaagagatcctctgaggctttatctgagcatttcatcaaagaaggtctgactagccttgttgagtacaatgaaaagaagatgtttgaagttaaacttaaagagataaagtcaacactgaccactatgatcaatgatgaggctgcaatacctgaagtgattgagactgtcaaacagcaagttaaggatgctaaatttcctgatctagaggtcattcgcatgttgtgggatgtgctcatggaggctgttcagtggtctgggaagaaccagcaacagaattctaatgcagcacttcggcaggtgaaagcatgggctgagcttttgaatgctttttgcacgagtggcagactcgaactggaacttatatacaaagtacagacacagtgctatgaggatgctaagctgatgaagctgtttcctgaaatcataagaacactgtatgaccaagatgtcctagctgaagatactgtcctgctttggttccgtaaaggttcaaaccagaagggcaggcaatctttcgtgaaagctctggagccgtttgtcaaatggctcgaggaggctgaggaggaagaataagtttttgatttggagaacggccgaatgctggcctaagtgttactttatatttctgaagttagaagtttgtggaggaattattgctgctgcctcttactgccgagaactttatgttatgatgtttagccacatggatcccggctgcagagtgctataatatgttgctgttaaaactttgtgtcgagcatttgttgaaacttttgttatcattactgaaaggatttataatgggacgtcagtttactgtcggtattgtacaattactggattattcataagctgcagaatgctacaaatgtcatttctggcaaatggaatattgaaatgttacgaatgtaa

SEQ ID NO: 103613 - DNA, 110 bp, Zea Mays
ttttgtttttggtgactgtaaaaattatgtgagcttgttagttgattctctgcctggcgtgagtttgggaatggtttgtatgaatcctgcctatgtttgcatattgtttg

SEQ ID NO: 103614 - DNA, 341 bp, Zea Mays
gtttggttcggcttttttaggtgtttggccgatcggattattagatatcagagcactaacttataatgtagttaacactttatgatatatgaaaaatactttaacttaatttaatgcattacagtacaacacgttcttcagttgatacaattctaatatgaaacatttttacttacataattattcaaaaacgccatacaaaaaccaaattattacgtaatttcacaaataacgatgcatgcaacctcgtaattatcaatgatcctctactatatgtcaattatcacgctaatgatgtttacaaaacaaaacaaagaaattatgaatatgaataaataaac

SEQ ID NO: 103615 - DNA, 115 bp, Zea Mays
atttaataaacaatattatttaaatcattctctctcgtctcctcgtccattcgaccccgtttctccgtcacctctccctcgtcgcatcgtcgccccttccctcgcgccatcgtag

SEQ ID NO: 103616 - DNA, 783 bp, Zea Mays
atttttctcttctgctcagcgccccggcatccaatcccccctcccgttggccgtgctctctccggtatcccaccatggatatgccaaatgacacttgctcttcaccaaaactccacacaagactgaggctatgggaatttgcggactgttatgtttttgaaccagttggtcttaatgatcttttactgtcagtcaaccggatcaatggatcaatgaatctagtggaggaattgccacagcatggcccctctataaatccaaaagttcaaatagtgtttggtgtaataggagtgctaaaacttgcagttgggacatatattctggtgatcactgaccgtgattgtgctggatcctacttgggacatgcagttttcaaagtgagaggtctgagagctctgccgtgtaataattccctttctgcttctgctgaacagaaaaaagtgggcatagaattttcagaactcttggatgctgcagagaggactttgggcctgtacttctcctacgattccaacttaacagtaacttcacagaggctacatgaactaggtgatgaattcaaatcacttccactttggagacaggcagaaccaaggtttctatggaatggctacttgttggagcctctgattgagaataaattgcaccagtacttgttaccagttattcaaggaagttttcagaatattcacgctgaagttaggtcagaaaaggtaaatgtgactctgattgcacgaaggtgcagatggaggataggtactaggatgtggagacgaggcgctg

SEQ ID NO: 103617 - DNA, 522 bp, Zea Mays
atggctgctacgacgcctagggccacaggggaaggggcaggcgtgctgttgtgggtgggagatgcacactcgcgcctcggccaggggcgactgcggtggctaggtccgcacttgactcaacgagactgtggtggaggttgtgtctgggccagccacggctatggggttttcagtgttattgttgaagaaggcgaggatggcgccatcggggtggagagggcctacacggctacgcctaagggagccacatttgtgcattttgatttccatcgaatatgtggtcatattcactttgagcgcctttctcaactctatgatcaaattgaggattatctcaagaagcacaagtttcttgtcattgctttgtttgcatggtcttacctaaagttggtttataggtacttcctgttgaccgataaagacgagaaaattgcgcagcaaactggcactgtcagaacaaattgtgttgattgtttagatcgtactaatgtaactcaggatggttgtgcattatttcattaa

SEQ ID NO: 103618 - DNA, 498 bp, Zea Mays
atgggcttcttgcagcgtgtgtatgttttgccgacaaaattgttcacaacagtagcagaggccaaggtgtatatgccgacaaaattgttcacaacagtagcagaggccaagagcatgattgggagaaaacttctggaaagtcagctccaagaaataggggtttttgttgctaatgatactgtcagtgactttccagattttgatgcaaattacaaaattctgtgggccaatcatggagatgcaataagcactcaatactctggaactcctgctttgaaaggagactttgttcgatatggcaagagaactactcagggaattttaaatgatttatggaatgcacttgctagatactacctgaacaactttgcagatggtactaaacaggacggcttgcctctgtgcttccttcttgtcgtgatatctatcgactccactacctcctcctccaccatcggcgccatgtgccatctccttgctgggttgactgttgtcgct

SEQ ID NO: 103619 - DNA, 240 bp, Zea Mays
tccttccgcattgctttcgcgttggttgtgggagctcttatgttcttgattattgcacttaaacaagcacgaaatgatgctcggcacttggtgctctcatttatgtgggctggtatttgcattggcataacacaatatgtgagaaccaatggtcgtgtgttctgcaatcgaccccgtttctaccagtcacgccattgatcgctgcacaaggatgcttacacgtcatgtgtgtttgtcagg

SEQ ID NO: 103620 - DNA, 691 bp, Zea Mays
attttccatttcccccatagccgccaccagccccttctcttactccccacaccatcctcctctcctcccatccatggagcagcagccctccctccatggtgcccaccctctccaatggtggtgctcgcccctccctcccttctccattgctgcagctccacttcgtggtggttgtccctgtccctgcagcagcccttcctctgctctccatggacgccagccatggcagcccctatgctcctgcgtgatggccggaggtggaggtagaagaagactccatgaggctatgacaggtgggtccaaggaccgagaggtgacgatcgtgcaagtgatgtggtgccaaccacaatatgcagttggtggacgacctgaagaatgatggatttatcgagtagatactcgctaagcaagtacccccagcaaacactatctaagtgttaaattaaaggtactccttaggatgattggttgatggtgtgacttggccttcatccccgccaccgggatagatggtcgagtaggttactgcttccgcaggagaggaccaggaggagtagtgtggccaggcttcgccatgttactcggttttctccgttagttatttccactgcattaaaatttatgattattatttctgaaactctgataatgtaatcactatttgtacttaataaatttgtggtattatgct

SEQ ID NO: 103621 - DNA, 224 bp, Zea Mays
atggagcagcagccctccctccatggcgcccaccctctccaatggtggtgctcgcccctccctcccttcttctccattggtgcagctccccttcgtggtggctgtccctgtccctgcgcatcccctcctctgctctccatggacgccagccatggcagcccctatgctgctgcgtgatggctggaggtggaggtagaagaagactccatgaggctatgacaggt

SEQ ID NO: 103622 - DNA, 227 bp, Zea Mays
gcgacagaacgcacggactcttccggtttctttgccaaccgatgcccaaccctgggtatataaccggggccgcgtcttatgtgctggtagggggagcttgccgcgagaacgaagcatgagaccatggcgagattgggagaaagagaatcggatgtcgccgccgcagtcaaatcccagctcatcatgatcggggtcgcctgcacgacagtaagtggtgagagccctcc

SEQ ID NO: 103623 - DNA, 873 bp, Zea Mays
accgcacacatatacacaagcacaagcacaagcacaagcactctagcaatggcttctgaggttgtccgccctagcgacgccgagctactgcaggcacaagccgacatatggcggctcagcctctcctacctcacgcccctgtcactgaagtgcgccgtggtgcttggcatccctagggcgatctaccgccatggtggggctgcctcagccgctgagctgatcacggcgctgtctctcccctccgctaagctaccgttcctccgccgcctgctgcggctcctagccgcgtcgggcgtgttcaccgtcgacaggcagagcacggaggaggagaggtaccgcatcagccccgtctcctacctcctggtggaaggcatccctcacgaggaccacatgaaccacacctctttcgtgctcacctgcacctcgtcgcgctacatcgagccggcaatagggctggccgagtggttcaggaaggacacggccacgtcaccgttcgaggagctgcacggggcgactctgttccacgagagcatgggcagcctcgacgcagatttccacgacatggcgagcgacgccttggacacccacgacaacttcggcgtcgagatggcgctgcgggagttcagggacttgttcgaggggatccagtccatgacctactgctgcggtaactttggtgatgacaagggtgccagggccattgccaaggccttcccacacataaaatgcactgtgctggcccctcccaagatcattgccgccaaaccggctgatggagtgaagataaactatgtcgaaggtgacatgttcagtttcattccacctgctcaaactgtcgtgctaaagcttgtgctgcacactaccggaatcaga

SEQ ID NO: 103624 - DNA, 931 bp, Zea Mays
ccgagtgccgcgcatctggcactcggcaaaggatgatttaccgagtgtcttatccagacactcggcaaagtatatttttatttttttgattttgtctcccaaactttttgtgttatgttcctacactatgtagacctacatgtatcatttgtggacaattataacatagttttcaatcgttagtagatttagttcgttttttgaaattcttcggaaaattcaaatttgaactgcaggtcactcgaaacttggaaagccgtgcatgcaaaaatgatattcatgttacttatcataagttacgaccgatttcagaagcgtaccggaaacttcgagcaacatgctcactaaacatggccgtgaacttggcatccacatgtttaaaaattgtataaaacacaaacaaagtcagaaaatcatgaaacttgtccccgtgtcatgatatcatatgtataggctatgataaaaattttagagtatttggagaaagttgtgagacactatctgtagaaaccttctagattcacattgaaactctatgatttcatgtgtagtcctcttaggtttctacacatagtgtctcacaactttctccaaacattctaaaatttttatcacagcctgtacatatgatatcatgacacgtggacaagtttcatgattttctgactttgtttgtgttttatacaatttttaaacatgtggatgccaagttcacggccatgtttagtgagcatgttgctcgaagtttccggtccgctcctggaatcggtcgtaacttatgctaagtaacatgaatatcatttttgcatgcacggttttccaagtttcgagtgacctgcagttcaaatctaaattttccgaagaaattcaaataaacgaactaaatctactaacgattgaatactctgttaaaattgtccacaaatgatac

SEQ ID NO: 103625 - DNA, 517 bp, Zea Mays
aacacacggcaaagaagctgattccggtagtggcaccacctgaccgatgaggagtgcgtcaagcttctggctcaatgccggaaggcgattccttcacggaaggatggcgggaaagttataatcggtgacattatgattgaccactctgggcctatgctggaaactcagctcctgatggacatcggcatgatgaccatgacaaaaggacgacagcacgacgaaaaagaatggcgtcagctcttcaccaaagcagggttcagcgaatacaagattctcaaggaatttggaactcgtgttgccttcgaagtctatccgtgagatatatatttacatacatatgtatgcatatgggttgcgggctttggcatgacgatgtcataaataaatgaagagggtgggtgtgcttacagagtattcatggatggccatgcatctgagcgcatgcataatgtaattggatgctttcttaatattatcgttgggttgtatgtactttgtacctgctatgttgttttaa

SEQ ID NO: 103626 - DNA, 273 bp, Zea Mays
ggaaatttggatccataccattaaaagatcaccactttggatccataccattactatctcacttacatgtgggtccacatgagtcaatgacatgtggggtccatggtatatatctaaagtttggatcttttaatggtatagatccaattgttcctatttattataattattattatcattattttatttatcttcctttcaccatttaatttgaaaagcattaaatgattatcatagttatctttctcaactcttttcaaatccatgtttgat

SEQ ID NO: 103627 - DNA, 1567 bp, Zea Mays
actcggcaaagagatagatttcggtagtgatagtagtaagcaagtatacattaggttactcgatattacacaaaataacaaagcaggtacaaagtacatacaagccaacgccaacactagatggcgatatattattttacagcttcttccaaatatagaagatccacgagagccttaagaaagcatccaacgtcatgtgctcagatccatggccatccatgaataccgcaagcacacccaccctctttatttatgacatcatcacgccaagccacgcaaggcacccacacacatacatatatgtatgtaaatatatatgtatagtccaggtgcaatctcacggatagacttcgaaggcaacacgagctccaaattccttcaggatcttgtattcgctgaaccctgctttggtgaagagctcgctccattctttttcatctctctgccgtccttttgtcatggtcatcatgccgatgtccatcaggaggtgagtttccagcataggcccagagtggtcaatcataatatcaccgattataactttcccgccatccttccgtgaaggaatcgccttccggcattgagccaggagcttgacgcactcctcatcggtcaggtggtgcagcacaagctaattatatgcaatgattaattcgtgactgatgagtcgaccatgaagttaattaatttgagcagggttattacattacctttagcacgacagtttgagcaggtggaatgaaactgaacatgtcaccttcgacatagtttatcatcgctccatcggccggtttggtggcaatgatcttgggaggggccagcacagtgcattttatgtgtgggaaggctttgacaatggccctggcacccttgtcatcaccgaagttaccgcagcagtaggtcatggactggatcccctcgaacaagtccctgaactcccgcatagctatctcgatgccgaagttgtcgtgggcgtccaaggcctcgctcgccatgtcgtggaaatctgcgtcgaggctccccatgctctcgtggaacagagtcgccccgtgcagctcctcgaacggtgacgtgaccacgtccctcttgaaccactccgccagccctatccccgcctcgatgtagcgcgtcgaggtgcaggtgagcaccagagcggtgtggttcatgtggtcctcgtgagggatgccgtccaccaggaggtaggacacggggctgatgcggtaccgctcctcctccgagctctgcttgtcgacggtgaacacgcccgacgcggcgaggagccgcagcaggcggcggaggaacggcagcttagtggaggggagagacagcgccgtgaccagctcagcggctgaggcagccccgccatggcggtagatcgccgtagggatgccaagctccacggcgcacctcagtgacaggggcgtgaggtaggagaggctgagccgccatatgtcggcttgtgcctttagtagctcggcgtcgctagggcggacaacctcagaagccattgctagagtgcgcttgtgcttgtgtatgcgcggacggtccgcggcaaggggccgaacgg

SEQ ID NO: 103628 - DNA, 1179 bp, Zea Mays
agctccgcctcctctcctcttcccgtcaagtgtacctgctgagctcatccatggccgccgtcgattctccatggacggtctcacgtgccctccccatgtcagctcgctcggtctccagcgcccggccccagctcggatctcatccttcagccatggatgtcggcgccgcgcccagctcctcatcatgccgctccctgggagtcgtctagccgcgcccctgttcttttggttggtgctcgcgtccagccatggacatcggcgagctcaccctgggttccaccggcactgaccctgctcttctctccctcatctctgcgactcggcgcctcctctgctcctccacctacagctcgccccatctccctggtgtcgagctcgtcctccaccttgcccatggcgcccgccctccccaggtccgcgctctagatctcccagtcgagctcccttcgtcgcgcccttccttgctcctgctctggtcgccgtcgccgagtccgaccccaagccgtcgaagcagcagccatggctttcagtgctcgttttggccacctcctctgcctccgatccgcggcgccgtcgtgggctcgccccagccctatagtcgccagtcgtcgtcgccctgcccctctgcacgccagcgtcctcttcctcagctcaccccgtcagccgtcgcggtgctcgtttgggacccacctctcgccggtcgcgcacaccttgacgtcatcggcaagcagtccgtggctaattcctttcctgtgcccatgacttggatcttctcttgcttgcagtcgtcgaggaagaccccaccagtccccgcgccatcctttgcctccttgtcgtgcgccatcaggcatcagccgtgcctcttcggctctctctggctgcccggtcgtcagttcttgtgccgtcgaggagccatcagcattgtcatcggtccaacaacgttgtcacgtcttgcgttcgcgctggaagatgaaagggaaaagctagagcaacactcatcaaatatcggtggtatgcgtgagccgtaggatttagcttaggtgagatatttcgctattcctgctaattaatttgattgatgagttgatttgatggtgattgatgatttccatgttttccatatagatgcactgtgtaatgcctcgtttcatacagagatgggattatgttcttgtttgc

SEQ ID NO: 103629 - DNA, 1011 bp, Zea Mays
atgaaactttctctgtgcttgggatattcggaggcgagcgcatgtaaatttataggagttcggctggcgatttctgccccaaggccgacgccagagatctcggtggcttctgttgaggcgcggtggccccagagtggtgaagaccacccaggtgagcaggcccaaccggtcagagcgtatgacaacaaggggaggggaaggaacgcggaggttgcgacgacccggatggcaaggaccgcgacaacgagtccgtgtctaggagatcgcgaatccagccaaacgtcaggcaatcttatatgtggtagagctgttcaggccaacgatgtcgctgtacatgtcgggcaaccagctgacgtgagcgacgagcaaggctgggagttcctggaccatcttaccaattgcggcagcctacaggtcctcgcccttgatgacaacaagcttggtggccagttgccaggctccattgcccaactcctgagggagattcaagcactgaacatagggaaaacccgcatctccgggtctattccaccggccatcggcgacctcatcgggctcacaacgttgggcctcgaatccaacctcctcaacggcaccatctcagcagggattgggaacatgaagaacctcacgaagttggcgttgcaggggaaccggttgacgaggccaatcccatcctccatcaacgacctcacccagctactggagcttgatctgagtagtaacgctgagtgggttcatcctcgacactctagccaacctgacatctccagcctcaccaaccttgctcagctagcgctatccgggaacaaattctccggtcagctaccagaagagctagagcagtgctagagcctagagtttcttgatatggatttcaattccttccatggaagcatccctccgtcgctgagcaagctcaagggtctcaggagactcggcctggcgagcaactggttgtccgggagcatcccactggagctcggccacatgtctggcctgcaggagctg

SEQ ID NO: 103630 - DNA, 542 bp, Zea Mays
ccttccccaggttggaagggacacgagcggatccgagcgaagcgaccgcgcgtccgcgccctccgtcgccaccaccatccgctccgccgccactccatcgtcgtccacattgctgccatccgctctgccgctgctccatcgtcgtccttccccgaagcagtcgtgagcgagacgtgaggcgacggtgccctccaccactgccaccgtctcggatttgtcgtccttcaccgccatctctgcctcagtttgctgtcctccactaccgtcttccgcggcactatagtggaggcaacacatgaaaccaacatggagaagaaaaatgaaatggcattccacataaagcttgtgaaaaagagttaaactcgtaatttattctagtgcagaagttcctaaccaagagatttgtattccatttctatattatattgtctatctatatgtgtgaataaaggtgaccttatatgatgtgatgatgtatgaattagcttcgatggatattatatggtattcaaattaaactttacatgaattatatgtggtgc

SEQ ID NO: 103631 - DNA, 687 bp, Zea Mays
ctccttgctagcactcttctcaggtctcagcaagctactagctcatccacatgctgaacctggcaccatttgagacgccgcctcttggaaggcaggaaacatcagctaataatcctaccgtcgccgccgtcaggggaaacgaagaaagctccagcaacacttgcttgcatggacatctggacctcagcctcggcatctccttgtctcatggcggctgcgcctgcgcctgcgacgcatccagctgtggaggaaacaagcaggagagctacggtggtcgagagggcagcagccgtgacgacaaggcggccgtcggtcgctgcatgaccagcggcaccaccaccactgcaagtgtaggacacgacgcccatgccggtgatttgacagcaggaggaggtggctggacagcaccgttcgtgctgagcccgaccgccgccttcttcatgcatccatggagcctcgccgcacggcagcagaaggctgctgccgagcaagaccggacgcctccgcctcctactacctacatgtcgagcgacggcgaccgtgcggtcacatcgccgtcggccgtcggctggccgccagtgcacacatcccggcgcaacatcatcgtcaccgccatgcacgtgagcaggactgctgctggcgccaccgccgtcgcggcacacgacggacccgacgacagcacgacga

SEQ ID NO: 103632 - DNA, 2762 bp, Zea Mays
cctgacgccgccacacccgctcacacttgtgccgcggctgccttaccatgtccccccgcctaccgctccccctccatctccccacacgctgccgcgcattcccatgccgccgccgcgccggctccacctcgacgccaccttcctcttcctgcccgtcttcctgttcgcgacatggcggcccgtggcggcggcggcgctctccaccttcgccatggccaaggcggacaccactaccatagtgtgcgcgctgctgccgtccgcggcgtccccgctgctggtcgacctcaactgcacggccgccggcggcgaccacgcgcgccaggtgacgtacccgtcctcgcaccccttcgccgcgctggccggaggggagaacttcctctgtgccgtgaggccctccggcgagcgcgcgggcgacatcgacatgcgctggtgggacctgtccggcgacggcagcagcagctccaagcgggtctacatgggcccgccgctccgggcgctgtcctcgggagagtaccgcgtctgcggggtgctcagcagcggggagctccactgctggcgttggcgcggcctcaacatctccagggacctccgcttcgccgccgccgccgtgggggacggcttcgtgtgcgggatcctcaaagggacgccggcgtccatccgttgcttcgggaacgacacggcggctgcggccgtcgccggcgcgccggcagacgggagcttcgacgtcgtggccgcgtgcggccaccgcgcgtgcgcgctgtccacgacgggggtgctcgcgtgctggggccacgacccgccgacggtcgcccccgacgacgcggccaccgggtacgcggcgctggcattgggggaggccggcgtctgcggcctgcgcaccaattccaccatccgctgcttcggcgacggcgtggcagtgccgccggccggactcgcgcgcgcccagttcctcgacttcaacgccaccaaccgcctcgtctttggccgcgtcttgccgggcccctgcctgcccatgtcctcgtgccaatgcggcgtcttgccgggctccgccaacctctgcgacgacggccgctgcgtctgcgtcgactgcgcgttcgagctcaacgtcgccaggcccaacgcgtcgctcgtccccgtgaagggcggcaggggcaggaagaccatgtggattgccatcgcggcggggaccaccgctttcttcgtcttcttcgtggcattgcagttcgcgctggtcctgcggtgtcgccggcgccggcgccgccgcaggaacgaacaggatacctccggtggtgcgcaacagtcgctgatgccgccgagggtcgggtccagcaggagcagggggcctggcagcgtggtggtggagaacttcatgctagacatgctccacgcctcgacggacgggttctccgacgacagccggatcgggaccggcagcttcgggtccgtgtaccgtggcaccctccccgacgggcgcgaggttgcgatcaagcgcgccgaggactcggcaaaggcatcaagctcggtggcgcggcaccgcgaccgcgagacggcgttcgactcggagctgaccgcgctggcgcgcgccaaccacaagaacatcgtgtgcctgctgggctgctgcgccgactccggcgagcgcgtgctggtgtacgagttcatggcgaacggcacgttgcacgatcagctccacagccgcagccccctggcggcggtcgtgtcgtcgtggcgcggccgtctgaccatcgccctgggcgcagcgcggggcatcgagtacatgcacgtgtacgccgtgccgcccatcatccaccgcgacgtcaagtccgcaaacatcctgctcgacgacgcgtggacggccaagatcgccgacttcgggctgtcctccgtcctggaccccggcgccggcacgccgcaggagccgctctacacggggggcacgcgctacgccgagagcgtgacgcccaagaacgtggttgagttcgcggtgccgcacatcctggccgacgacgtcgcgcgcgtgctcgacccgcgcctgcccgcgcccacgcccggcgaggctgaggcgctggcctacgtgggctacctcgccgccgactgcgtgggacccgtgggctgcgaacgcccgtccatgaccgaggtcgtggtcgccctggagcgcgccctcgtagcctgcggggcggcggcgccgctgtcccgcgcaagcaccggccgccggtccgtcctctcccgctccggcaccgaccagttcgacctcaccgacacggactagccgccgcgccgtcccgaactctaagctgctgacgagaagtagccatttgcattgcggcatcggccacttccgtggaccatggtggctgccaactgcaagccgccgcacgcgccgaatcgcctgtccctgggccatggttttcccgttgaaaaaggtgatgaagcaagagagagcgaggcggtcgacgccgacatctcggatgccgctgctgccgcgttatcaacggctagattaccttcgattgacttgcgaacaacccacacagggacagggcaccggatcaacagatggcccggcgaaacggttgacgagagaccagtagcacgacggaaaagatcattctttctttctttctttgctccccactttctccttccttgctgtattcgttgtatacttgtctttttcctcgttgggtggtttctccatattctttgaccaatgtgcatagatagatgagtaacaaaatttgagaagaaaagaatcacgatttaca

SEQ ID NO: 103633 - DNA, 240 bp, Zea Mays
atggccttggccatcaagatagccacaacaagggtggactgggccacagcaacctcagaagaggacacgataggcgacggagatatgaagcgggtgctctgggctttgaaggggtacgagcagaggccagtagttgcgccgaggctagccaatccactagcaagaacccaatggagatctccggtggcagtcgagctgggcgcggctgtgagaagtgaggcccgacagcaaggaggttag

SEQ ID NO: 103634 - DNA, 1732 bp, Zea Mays
ctgatggtaaaatagagaaatccataattgagagtgacaaaatagcaaatagcccattggcgacgatggacgacggttgatggatgatcgaaccgctagtcaccgtatccgttcggcttgaaatttccgatttctgccagatccaatcgcggctaccatcatggcagaagcggccggcggcggacccctgctccccgaggaactcattatctgggagatcctaacccgtctgccggcgaagcccctcctccgatgccgcgctgtctgcctctcctggtgccgccgactcacctccgacgccaaattcctcctcgcccaccaccgtcgccagccctcgctcccgctcctcactgaaggggacaggagcaccgaggagaggaggatcgacgccctggactaccgcaccggcgagcggcgccccatcgcgcggacaacaggccggaccgccgccaacggggacgacctgaacgtgctggcttcctgcgaaggcctcctcatcctcctcgccaacggcggcctccagatctgcaacccggcgacccgccagcgcgcgccactcactcttctccacggcgcctattgcatctccgcgctttatcctcacatcccgtccaggtcgtaccgtgtgctctgctgcttcgagagagccgaggacggccacgccgtgtaccacgtgcacaccgtcgggtcgcgcgagctcaggtgcgtcggagaacctcccgcgccgtgggcgtccggggatatggtaatggcgatgccgatgatggtgtaccttcacccgcacgtcgtggcagacagcaggatctactggcagccggtaaagctgcccgtcggcaacggcaaggtcaacaacatgctcgtgttcgacacaatgaccgagtccttccagcaactgctgtcgcccgtggagggcccctttcttgaactgtttcagatgaacagcggcgcccttggattgtaccactgccgcagcggcaaggttgatctttgggtgttacaggatcacgggagctggtcctggtcgatgaaccaccggatcaaattggacgtgatgtttttctccctgctgccggtgctggacccggaaggagatgtgctagtgctttctaaaagaggggaaacaggcatcctgtggcaacatctgcatcacatttctggtgtcaatggcagtttgctggccctgtatcaatggagcgcttatctgaagcttagcaggcataggctcaaagaaagtctagtccaccatgacttcttctcgatggaaggtaatgagggtggtgtggatgaaaaaccattgttcgatggcttgtcaactgtggcattgcttcgtgatgataattctgagccacattgagaaacaaaggtattactcaagctgtttcatctcatcaggatggagtcactcctgcctagtaataacagcactgcagattagtaataacctgaaactatacctcgagtctgatttttcccttttcacatgagtcataaacactgttatgactggtattttattttcccttttcacgtgagtcatgaacactgttattactggtattttattttccattttcacatgagtcatgaacactgttatgagtggtatgtatgtgcgctggaaaacgggctatggcggtgttggtctcaaattagttgccatttggttcacgaaatgtaacgtaaatggtaacgacaatataacaattttaaggaaggcaaacattttgcctag

SEQ ID NO: 103635 - DNA, 1248 bp, Zea Mays
ctgggagatcctaacccgtctgccggcgaagcccctcctccgatgccgcgctgtctgcctctcctggtgccgccgactcacctccgacgccaaattcctcctcgcccaccaccgtcgccagccctcgctcccgctcctcactgaaggggacaggagcaccgaggagaggaggatcgacgccctggactaccgcaccggcgagcggcgccccatcgcgcggacaacaggccggaccgccgccaacggggacgacctgaacgtgctggcttcctgcgaaggcctcctcatcctcctcgccaacggcggcctccagatctgcaacccggcgacccgccagcgcgcgccactcactcttctccacggcgcctattgcatctccgcgctttatcctcacatcccgtccaggtcgtaccgtgtgctctgctgcttcgagagagccgaggacggccacgccgtgtaccacgtgcacaccgtcgggtcgcgcgagctcaggtgcgtcggagaacctcccgcgccgtgggcgtccggggatatggtaatggcgatgccgatgatggtgtaccttcacccgctcgcccgtggagggcccctttcttgaactgtttcagatgaacagcggcgcccttggattgtaccactgccgcagcggcaaggttgatctttgggtgttacaggatcacgggagctggtcctggtcgatgaaccaccggatcaaattggacgtgatgtttttctccctgctgccggtgctggacccggaaggagatgtgctagtgctttctaaaagaggggaaacaggcatcctgtggcaacatctgcatcacatttctggtgtcaatggcagtttgctggccctgtatcaatggagcgcttatctgaagcttagcaggcataggctcaaagaaagtctagtccaccatgacttcttctcgatggaaggtaatgagggtggtgtggatgaaaaaccattgttcgatggcttgtcaactgtggcattgcttcgtgatgataattctgagccacattgagaaacaaaggtattactcaagctgtttcatctcatcaggatggagtcactcctgcctagtaataacagcactgcagattagtaataacctgaaactatacctcgagtctgatttttcccttttcacatgagtcataaacactgttatgactggtattttattttcccttttcacgtgagtcatgaacactgttattactggtattttattttccattttc

SEQ ID NO: 103636 - DNA, 96 bp, Zea Mays
atacatatatacaatttatattcaatattaaaaacacttgagcatgatgttctactggttagatggcttcacccagtgtctctcgcagcttcttcc

SEQ ID NO: 103637 - DNA, 584 bp, Zea Mays
atggaggcggcgcggcagcagcaggaggagtgctcgtgcggcggggccgaggccgctgaccagttcgagcggctccacgacgcggtgctgctcgacgtcctcaatcgcatcgacgacgtcaaggcgctaggccgctgcgctctcgtcaaaactcagcttgttaccagggtttgatttgaggattgtatggaaagcagagtatgtgcttcctgagatttatggggctgttggcacaggagaaccagtcttcagtatgaactatggaaagttgcatgcatcgatagatcgggtcgaggctatcgttactcagtcagatcggtattgatctcccagtgcggaaaggcaagggagtttcttgatcaataacaaacacgttgagtagatcccagggttacaagaaggattctgaagctccgtgcctgatgtacagcaaataccagagttcaggaccacactttgagcagctgtttgagttctcccaacctttttgactttgagcggcttctgctgcttctgaaagcgtaactataaataatgtttatcctgcttgtgtacgaaacaccatagtatcagtaattcagtat

SEQ ID NO: 103638 - DNA, 111 bp, Zea Mays
cttgtaatatttataattcttttatgttgtcaaacttgagttttggaaatataaagtatgtttgtaaagtcttccgctctatctccaaagtgtgtgtgtatcgaatgtgat

SEQ ID NO: 103639 - DNA, 3759 bp, Zea Mays
tcagtggaaaagggggcactccgtactctatctaattcagggagatttgcatgagctgatccaaaacagaggatggccctgttcgatcggaaccagaggcagaggtcgtcgttctgctccacggcgaccttcgtcgtgttcgtcgcgctctgcctcctcggcatgtggatgatatcctcccccgagaacgtcccgtcggccatttccttgtcctcggagaaggtcgtcaagtccgacgtcaaagaggaggacagctccattgacgccaccaataccgtcaagcaggacagtgccaacgtcgtctcagaggcgaccacggacggtggcgctgccacggagagcgccgaggatgtcgacctcccgggcaagcccggtggcggtggagcatcagaaggcgatggcgggaaggcgtcgtccaaggaccagtcgtttgacgacgagaacggcagaaccgagagcggggagctcgtcaaaccaggggccggagagacggacgccgtcgcggggcaggagcaggacaagggcactggcgaggacccggtgctggagaacgacgcgaaggtcgatgccgccggcaaggagcagacgccgatcgacaccaaggatgcctccgggctggatcagagcgtcgagcagacagtcacggacacgaaggcgagcgcatcagagcaggcggcggcgactggcctcgacaaggtgagcagcgccgaggcaggcggtggcacgcccaagaaactgacgttcgatgacgagaacggcaagatggacggagtcgacctcgtgaaggatgacggcaacaagactcgcatctcggaggagagtgccaaggtcgaaggcgccgcgttgacggtgaagccatcggccaaagcggcgacagcgactgccaccgacgctgagaaacaggaggaggcgtcggcggttgctactgacgctgagaaacaggaggaggcgtcggcggtcgccactgacgccagcaccactgcatccaccacgacttccgaggacgagaggaaacaggacggtgtcgagcagcagctgcctgcaacggaggcgcagcctaacgtccaggcagagctactcacagagcgcgcggcacagaacggatcgttcacgacgcaggcggcggagtccaccgaggagaagaagaaccgcgccgagaagaaagggaagaaaggaaagaagaaggcggccggcgtggcggcggtggcatggaaactgtgcaactcgagcgccggcgccgactacatcccgtgcctggacaacgtggcggccatcaagaagctcaagacggacaagcactacgagcaccgggagcggcactgccccgaggtggcaccgacgtgcctggtcccggcgccgccggagtaccgagagccgatccggtggccgcacagccgcgacaagatctggtactacaacgtgccgcacacgaagctggcggagtacaagggccaccagaactgggtgaaggtctcgggcgagtacctgacgttcccgggcggcggcacgcagttcaagcacggcgcgctgcactacatcgagttgatccagaactcgttcccggatgtggcgtgggggaggcaaagccgcgtagtgctggacgtcggctgcggcgtggccagcttcggcgggtacctgttcgaccgcgacacgcttaccatgtccctggcgcccaaggacgagcacgaggcgcaggtgcagttcgcgctggagcgcggcatcccggccatctccgccgtgatgggcacccagcgcctcccgttccccgccaacgtcttcgacgtcgtgcactgcgcgcgctgccgcgtgccgtggcacatcgacggcggcatgctcctcctcgagctcaaccgcctgctccgcccgggcggcttcttcgtctggtcggccacgccggtgtaccagaagctcccggaggacgtggagatctgggacggtcagctctcactcgtttttccccttgcaaggcaaccaagatcgatgggtcgtgtcgtgagttggtcacaacaacgttggtctctcgtgggtcttgcagaaatggtgaagctgaccaaggcgatgtgctgggagttggtggcgaagaccagggacaccgtcgacctggtcggactcgtcatcttccagaagccgatagacaacgtctgctatgataggaggccggagaaggagccggcactgtgcgagccctccgacgatcccaacgctgcatggaacataaagttccgggcgtgtatgcaccgtgttcccgaggaccagtcagtgcgtggcgcccggtggccggtgctctggccggcgaggctgcggaaggcgccatactggctggaccgcagccaggtgggtgtgtacggcaagccggctccggacgacttcgcggcggacctccagcactggaagaaggtggtccggagctcgtacctcgccggcatgggcatcgactggaagaccatccggaacgtcatggacatgagggccgtctacggagggttcgcggcggcactgcgggacatgaaggtgtgggtgatgaacgtggtgaccatcgactcgccggacacgctgccggtgatctacgagcgcgggctgttcgggatctaccatgactggtgcgagtccttcagcacctacccgaggtcctacgacctcctccatgccgaccacctgttctccaagctcaagcccaggtgcaaggtgttgccggtgatcgtggaggtggaccggatcctgaggccgaacggcaagctcatcgtgcgggacgacaaggagacggtggacgagatccagggcgtggtgaggtctttgcagtgggaggtcaggatgaccgtgtccaagaacaagcaggcaatgctgtgtgcgaggaagacgacgtggcggcccacggaaatcgagaccagatgacctaaccgtgtagttgtttcaaaacacgtaagtacagaacagatcgatctacacacttggtgctgcagtattgcaataactaagtgagctagtccttatatgacaaaaaaaagacaaaggaaaacctgagcgatatgtagatgattggaaacattttgtaggtattgtgtgttatattgtttttgggggtcttgcttgtacctggcacttcaaatcgagtacatagatatgtaatttgtgcagttatcgaataaatcgtagcaaatgccctatatatctattaaaaaaatcagaattattcatcggtagcaaaaaaggttaccaagacgtggagggccaatcagtgtcagtgttcataaaagggtttagaatttgatcaacagtcaatatagggcccgtttgagactttttatatgaagagcttttatgagaatctgaattcctagataatctatctgttaggtgaatctggatatcgtggagcttgcgtgcagaggaagacgaaaggggtctgcacacagtttgttgtttaggatacgacatattgctctcatgtggtgactcggcggattttgtactcacgttaatttggttgatttttgtagaagctattctcacacaaatggattaagaaacgaatcgtttgatggctagaatctagccaggagccaaaaaaacagggccataatagcatatattgcaatgtattatgtattcatattcgaccatgatagaattgaagaaaagttgtagatgactggaaacattttgtaggagttgtgttatattgtttttagagggtttcgatggatatatattttctagtggtcttgcttgcacctggcacttaaaatcgagtacgtagat

SEQ ID NO: 103640 - DNA, 2850 bp, Zea Mays
atggccctgttcgatcggaaccagaggcagaggtcgtcgttctgctccacggcgaccttcgtcgtgttcgtcgcgctctgcctcctcggcatgtggatgatatcctcccccgagaacgtcccgtcggccatttccttgtcctcggagaaggtcgtcaagtccgacgtcaaagaggaggacagctccattgacgccaccaataccgtcaagcaggacagtgccaacgtcgtctcagaggcgaccacggacggtggcgctgccacggagagcgccgaggatgtcgacctcccgggcaagcccggtggcggtggagcatcagaaggcgatggcgggaaggcgtcgtccaaggaccagtcgtttgacgacgagaacggcagaaccgagagcggggagctcgtcaaaccaggggccggagagacggacgccgtcgcggggcaggagcaggacaagggcactggcgaggacccggtgctggagaacgacgcgaaggtcgatgccgccggcaaggagcagacgccgatcgacaccaaggatgcctccgggctggatcagagcgtcgagcagacagtcacggacacgaaggcgagcgcatcagagcaggcggcggcgactggcctcgacaaggtgagcagcgccgaggcaggcggtggcacgcccaagaaactgacgttcgatgacgagaacggcaagatggacggagtcgacctcgtgaaggatgacggcaacaagactcgcatctcggaggagagtgccaaggtcgaaggcgccgcgttgacggtgaagccatcggccaaagcggcgacagcgactgccaccgacgctgagaaacaggaggaggcgtcggcggttgctactgacgctgagaaacaggaggaggcgtcggcggtcgccactgacgccagcaccactgcatccaccacgacttccgaggacgagaggaaacaggacggtgtcgagcagcagctgcctgcaacggaggcgcagcctaacgtccaggcagagctactcacagagcgcgcggcacagaacggatcgttcacgacgcaggcggcggagtccaccgaggagaagaagaaccgcgccgagaagaaagggaagaaaggaaagaagaaggcggccggcgtggcggcggtggcatggaaactgtgcaactcgagcgccggcgccgactacatcccgtgcctggacaacgtggcggccatcaagaagctcaagacggacaagcactacgagcaccgggagcggcactgccccgaggtggcaccgacgtgcctggtcccggcgccgccggagtaccgagagccgatccggtggccgcacagccgcgacaagatctggtactacaacgtgccgcacacgaagctggcggagtacaagggccaccagaactgggtgaaggtctcgggcgagtacctgacgttcccgggcggcggcacgcagttcaagcacggcgcgctgcactacatcgagttgatccagaactcgttcccggatgtggcgtgggggaggcaaagccgcgtagtgctggacgtcggctgcggcgtggccagcttcggcgggtacctgttcgaccgcgacacgcttaccatgtccctggcgcccaaggacgagcacgaggcgcaggtgcagttcgcgctggagcgcggcatcccggccatctccgccgtgatgggcacccagcgcctcccgttccccgccaacgtcttcgacgtcgtgcactgcgcgcgctgccgcgtgccgtggcacatcgacggcggcatgctcctcctcgagctcaaccgcctgctccgcccgggcggcttcttcgtctggtcggccacgccggtgtaccagaagctcccggaggacgtggagatctgggacggtcagctctcactcgtttttccccttgcaaggcaaccaagatcgatgggtcgtgtcgtgagttggtcacaacaacgttggtctctcgtgggtcttgcagaaatggtgaagctgaccaaggcgatgtgctgggagttggtggcgaagaccagggacaccgtcgacctggtcggactcgtcatcttccagaagccgatagacaacgtctgctatgataggaggccggagaaggagccggcactgtgcgagccctccgacgatcccaacgctgcatggaacataaagttccgggcgtgtatgcaccgtgttcccgaggaccagtcagtgcgtggcgcccggtggccggtgctctggccggcgaggctgcggaaggcgccatactggctggaccgcagccaggtgggtgtgtacggcaagccggctccggacgacttcgcggcggacctccagcactggaagaaggtggtccggagctcgtacctcgccggcatgggcatcgactggaagaccatccggaacgtcatggacatgagggccgtctacggagggttcgcggcggcactgcgggacatgaaggtgtgggtgatgaacgtggtgaccatcgactcgccggacacgctgccggtgatctacgagcgcgggctgttcgggatctaccatgactggtgcgagtccttcagcacctacccgaggtcctacgacctcctccatgccgaccacctgttctccaagctcaagcccaggtgcaaggtgttgccggtgatcgtggaggtggaccggatcctgaggccgaacggcaagctcatcgtgcgggacgacaaggagacggtggacgagatccagggcgtggtgaggtctttgcagtgggaggtcaggatgaccgtgtccaagaacaagcaggcaatgctgtgtgcgaggaagacgacgtggcggcccacggaaatcgagaccagatgacctaaccgtgtagttgtttcaaaacacgta

SEQ ID NO: 103641 - DNA, 219 bp, Zea Mays
atgcccctcgaccccaccactcccacccctgtccccctcgacctcgctgtcgggtccctgttcccgctgtcgctcgtggcccgttccaccagcacacagtcatcaccctgggccacggccactgactaccagcccctcttcgctgctgacccccgcgtggtggcttctatccggtcactgccctctacgctagtcctgtcaacccccttctcttcctga

SEQ ID NO: 103642 - DNA, 368 bp, Zea Mays
gttataaaatgttccccactcgatataaaagttccttttcagacagtctttagcaaggaagaaccaaagattaggagcaatatgttatctaaaggtttcatgtcatttgcgtctggatggaactctgttgatgttgactctgaagttagctagttacctgattacgctaataaagcacatgttcacatacttggctgtgaacttgacactataagtggctcattcctttcaaattgtgctagaatgcgctacttagaagcattactagacagaggagtctaagatggcttagtaaagattaaaaatggcttgttgaagccttgcagcatgggaagctaacctctacatataaaggtcggcaacgagcc

SEQ ID NO: 103643 - DNA, 104 bp, Zea Mays
ctttgctatattattcctcgatgactcctgggatgtgtcttacgacattttctaaactttttccattctttgacatggagaacaactttgtctcttacatttaa

SEQ ID NO: 103644 - DNA, 159 bp, Zea Mays
atggacgcggcagcgctggacccggagctgttgcagctggtggagcttgccccgggcgcgcttcgtgagaactccattgctgatgtgttgtattcgcagtggctcgtgctacctgagacgaccaagctgggccatttatggcctattggcctaaactga

SEQ ID NO: 103645 - DNA, 858 bp, Zea Mays
gaaactcatcacaactcaagcacctatatagtagtacctcataatggcaggcaaaaacctaataccattggggctcattatcctcatgaccatgggattagccaatgctgttagggtggttagatactctagtgccgatggtactggcacaggacagggagaaggtggtggatatgtgaatggcgggggatcagggtctgggtctggcaccggatcaggtgatagtggtccttatggtgcacatgcaagtgctagtgggggtggtggagggggtggaactagccagtacggtgggtctggatatggttctgggtcagggtcagggtcaggatctagtacatatagtcaaggagggtattctggttatggagaatcttctagtgctggtggcatcggtgggggtggaggtggaggacaagctgcaggcgcatggaattccaatgctcaaggatccggtagtggaactggttctggctctagctatgctaacaggtattggtacggatcaagtgaagcaggtgcaagtgctaatggcaatggtggtggcacaggaaatagtcaaaacggtggaagtggtggtggctcaggtgctggatctgggtttggcaatgcctacccctaatttctatatctaagtcaacctatagttggagcccaacagtatttgtcatttcaagttgtggtattagttagtttgtttgtacctctattacacttttgctagaactaaataaataaagggcccaactattctagtaatggcagcagtttagtgtgaggttcagcttgtaagaatttgttgtaaacatgtcagtctatgaatgaaataataacttccctttagcaactactataata

SEQ ID NO: 103646 - DNA, 642 bp, Zea Mays
gcatgaatgcatgatgcatccgtcgaagtatccattgtgaacacttgataattgacaggcagaccacacttattaatgcaactcccttacgtacaattcggtaacccacatgtcaatgcaacaatataatgcattacacagccgtgtaacacaagcacggtttgcatctatttggcagcacatggcagtgtatatactgtgccatccatcgaacacgaacaaaacgcttgtactgggcccagttagaaggcccatctaacgcttctccctcgggaagcccaggagggcaaggatgagcgcgatgaagctgccgttgatgagccccctcaggatcttctgcttctccgtcgtgtagggcgggtacctggcgttcgcctcgccgccaaagccgcggaccaggacccccttcttgtggctgaagcagtcgaacccgaacttgccgtggtagcaccccatcccgctgtcgccgacgccgccgaagggcatgtacgggttggcgagctgggacgggagccaagttagaagaagatttggattttgcatccagttggtttttactacgacttacatgtagcacggtgtcgttcacaagcatccctcctgcaggcacgtccgccacaaactcctcctgcagcttcttgt

SEQ ID NO: 103647 - DNA, 1955 bp, Zea Mays
ccgccactaccctgctccctcccccaagccgccgccactccttctccctccccctttctctctcttctctctctaccgcccacctctctccacctcctctccccaagccgcgccaccaggagtgcagcagccgctagaagctgccatccgcccgccaggagttcagtcaatctcctgtctcctgagagccgccgcccgccgagtcccgctcgccgctcggtcgctcccgtgaggcgctcgatctcctcagcgccgcgcccacccagccacggtggagccacccttcgtcccgtcgtccggcggccggccctcaatccctcacgccctagcttctctgccatttccggtcagcccctcacgccctagctttcctatcaggcgctcggtcgctccctttgccacgcgctcctagcttctctggtcggctcttcctccgccatttccggttggatcctcctatggtatgtgcatcataatccgtcacttttactgtgtatgcaatctcgatctgcctagttcggataagaagaacctatccgaagagcgcccgttaatgtctactagtggccaacgcgcgcctacgcgcggtgtttttacccttttctttcaaaaatatatgagaattgagtctctcgcaaggaagcatcaggccaatgggatttagtggccaaaacacgatactacctgtagaggcagagaagacccaaaattaaggtgctgctaatgatacgatgaatttagagaaaatgaaaaatgcaacgaaagcccctccaaaaaaattctaccattttcttttgattggccgagactgatgtgcatttgcctaaaagtctcacaaattcattcctcattcttcatgccgacattttaattgggaggacgttttgaattttggcgaatgggacttctccatccttgaaatccacccacacgccacaaaaccaaaacagaagtaagcaaaataaaaatttcgaagctagcatgccaaaaaagacgacgaagaaggacctgaatgatgccgtaggggtcaggccacgaacgatggttgcccgcgctccattgtggcaagcttctgttgctggcttggcgggtcgctggagcacgacctggagctcctcctcgacgatgtactccgtgatgcgggtacgtgcggtcgacgactgctgtagcgtcggagactccgagttggagcggctgctgctaatgctgccgagctccacacgaaagaagtgcttgagcggccagtggggcaacgcgatggaggcacgacacagcgggcatgatggctcgctgctcagcgcccgcggggaggagctaggatgctcgggtcggcgggcggcggcgcctcgacctaagcgagcgcggggccatgggcaggtctggtcaccattcagaacagggggctcggaggcgaaggcgagaggagagaagcgtatttgtttttttaaccctaccagccggtcgtctaaaaccaaaagtgctagccgcttcaagaaagtgcgaggggtaggaagcatagaaattaccagctaaacatgtgcgacggcggtgaagcgtccaaagtagatcgaacggctcctataaaaaggacgacgtggccacgctcattgggcgtcttgatgcagagctttaatatatagaaatatcaacgagtcgccgataaaaaaccaagcatgaatgtgcagtgcagtgctcgacaaacggcaccagcgccgctgggtactgtcaccgcttcggtcgccggagcccggagatgtaaatgcgctggagttttcatgctgtcgctggaggaattgaggaagaaagtttggtaaccgtatactgctctaagaagttttgccagttttgatcatagccaagcttttgattcatcataatctgatcctgtaaccaatttctctccctatgtctagagcagcctcgtggccaatgcaattgatgccctggaactgccg

SEQ ID NO: 103648 - DNA, 951 bp, Zea Mays
ccgccactaccctgctccctcccccaagccgccgccactccttctccctccccctttctctctcttctctctctaccgcccacctctctccacctcctctccccaagccgcgccaccaggagtgcagcagccgctagaagctgccatccgcccgccaggagttcagtcaatctcctgtctcctgagagccgccgcccgccgagtcccgctcgccgctcggtcgctcccgtgaggcgctcgatctcctcagcgccgcgcccacccagccacggtggagccacccttcgtcccgtcgtccggcggccggccctcaatccctcacgccctagcttctctgccatttccggtcagcccctcacgccctagctttcctatcaggcgctcggtcgctccctttgccacgcgctcctagcttctctggtcggctcttcctccgccatttccggttggatcctcctatggatgctaaggtaataatgcttggactggtacccagcatcgttcgtacttggaagaatacggactgtacagctggactagactggtcctccatccgatgcagttgaagacccaagatttgaacgacactattgtcacaccgaaagtgtgttcgatgaaatgcctccaacatccggaggtttctatttgtgaaagtttgcaggctaagacaaatgatagctattcaaggagctagaggctgctcaacataaagcatcaacagcaacctctggaacagctgaaaatgctctactggaagctaagtcagtgactgatcttaaatctaaagatttggagaagaagaaaagtgagctttgttcactgatacaagaagttggagtgcttttgtgaaggcttttgcgaatcacttgaagtgttagtacttttgtgaatgattttgtaaagtgtttgcaaatatgtgcaaaacataataacatgtgtaggttttgtgaa

SEQ ID NO: 103649 - DNA, 1182 bp, Zea Mays
ccgccactaccctgctccctcccccaagccgccgccactccttctccctccccctttctctctcttctctctctaccgcccacctctctccacctcctctccccaagccgcgccaccaggagtgcagcagccgctagaagctgccatccgcccgccaggagttcagtcaatctcctgtctcctgagagccgccgcccgccgagtcccgctcgccgctcggtcgctcccgtgaggcgctcgatctcctcagcgccgcgcccacccagccacggtggagccacccttcgtcccgtcgtccggcggccggccctcaatccctcacgccctagcttctctgccatttccggtcagcccctcacgccctagctttcctatcaggcgctcggtcgctccctttgccacgcgctcctagcttctctggtcggctcttcctccgccatttccggttggatcctcctatgtgcagtgctcgacaaacggcaccagcgccgctgggtactgtcaccgcttcggtcgccggagcccggagatgtaaatgcgctggagttttcatgctgtcgctggaggaattgaggaagaaagtttgcctcgtggccaatgcaattgatgccctggaactgccgaagggatctgcaattgctattgacatgcctatggatgttacctaatttcaggatgctaaggtaataatgcttggactggtacccagcatcgttcgtacttggaagaatacggactgtacagctggactagactggtcctccatccgatgcagttgaagacccaagatttgaacgacactattgtcacaccgaaagtgtgttcgatgaaatgcctccaacatccggaggtttctatttgtgaaagtttgcaggctaagacaaatgatagctattcaaggagctagaggctgctcaacataaagcatcaacagcaacctctggaacagctgaaaatgctctactggaagctaagtcagtgactgatcttaaatctaaagatttggagaagaagaaaagtgagctttgttcactgatacaagaagttggagtgcttttgtgaaggcttttgcgaatcacttgaagtgttagtacttttgtgaatgattttgtaaagtgtttgcaaatatgtgcaaaacataataacatgtgtaggttttgtgaatgattttgttgtggtgct

SEQ ID NO: 103650 - DNA, 1426 bp, Zea Mays
ggaagtgttgtgtcagattattatatacccatttctagaaataaccaattgctcatattgcttacttagacaaataagcaatcttgaatctggaattttacagtgtacctgaactatcaactcccttcaacaaacttttttgtatggaacaggagcagcagcaccccccccccccccccgcctagtgaaaatattatgaacagaaaaagaacatcaaacagcaaagaaagaaaccaaaaagttcaacaaacattgcttatcatcaccagcaattattatccttattcctcctaatcagaaatcagctttaacgacctgtttggttgattgtctggtacttctctcaaaatatttatttgatttagctttaggagctatcttgtttccctatgcagggtcttcatttaaacttcctcaggattttatcagtatatattttacttttgcagtttaaacaatggaatgtagcatttatcggttccagctttcaatcttgcaaaatagaagcactgacagcgtgcttgttgcatgcattacctgtaataatgctccatttgtgttctttatttgtttagccactctaatcgacactgcccgtttatttacataggaacgtcaatcatatggatgcttcttcagtggaattatcatgtgaatccccatagtgcccaagctgtgaagcagtcatgattgatgcttgggctgttagctttatgtggtccagggggaggaaggataccttagaaactgtcagaaaagctcatttcatacttcatttttcatcatgttattttgttgcatgagacatttgtccaactgcgtagggaatgaaaattcaaattatttctgccactgattgggggatgtaattccaaacgttgtaaaaggcgactgtatctagtgattatttatggctgatgggaagagctggttgtggtatagtgtcagcagcgtatgatcggttggttcatcaaatctgtccttcgttgattagtttttttgttttgttttgcagatgcagttgaagacccaagatttgaacgacactattgtcacaccgaaagtgtgttcgatgaaatgcctccaacatccggaggtttctatttgtgaaagtttgcaggctaagacaaatgatagctattcaaggagctagaggctgctcaacataaagcatcaacagcaacctctggaacagctgaaaatgctctactggaagctaagtcagtgactgatcttaaatctaaagatttggagaagaagaaaagtgagctttgttcactgatacaagaagttggagtgcttttgtgaaggcttttgcgaatcacttgaagtgttagtacttttgtgaatgattttgtaaagtgtttgcaaatatgtgcaaaacataataacatgtgtaggttttgtgaatgattttgttgtggtg

SEQ ID NO: 103651 - DNA, 369 bp, Zea Mays
aattggtataatcatatactaattcatagattggtacctctaataagctttggtacaataggatttggttcagcttcttactttgttttttaaataaaaagaaacaagcaacaaattatagtgaagaggctcctgtccctgtcgcttggtggatcacccccacggaaccaccctagccaaagacaggtatgcgcatgatgttattcttggtagcctataatcatctttgcctcaaagtgcttctataggtaaatgaatgtagtgcaagtttttatttttattttctgctccaactgttttctatgctacttccttagtgttagttcaccatgcataagtcatctgcagaaagtgtgcttcttcctaacc

SEQ ID NO: 103652 - DNA, 112 bp, Zea Mays
gtttactctctactctttcatgtattttgtattatatacggagtatatcatttatatggcttggttttgggttttggaattttatgggggattgagtatagtgcttgctggg

SEQ ID NO: 103653 - DNA, 330 bp, Zea Mays
atgggtctctggtggcgaactacagctggcgaactacagctccgcgctgcgtggctctggttctggtctcagggagttacttgggagggatattcttctgagtactggaataaggtccagaacatctgcactagaacacctaaaaagaagtcctacaaagatttgctggttacagtaacaaggaaccaccattttgatgcaaaggacaggaaggaaacgaaaaagcaggagccagggctgttcaacaacatgaccgagtcgctgaggcgaggaagagaaaccagcaagcctgatgctgctccagctatggaagtaggtgtcgtgccatga

SEQ ID NO: 103654 - DNA, 1992 bp, Zea Mays
atggagctaccgatgcagtcagtctccagcttgctgctcgccggtccttcgcctagctcgccggaagccgcggagacgacgccgccaccgatgcagccgctacaatgtcaacatgagcgattggtgggcaacatgtgcccttctctctatctcgccgtctacagagggcggatagcggacgtcacggcgctgcttctggaacaacccgccgttgcaatagattgtcaagccactaccacgccgggtattaagggcactgctattatgcacggacagtgcgacatacttgagttgacagcggagaggaacaccgctctacatgtggctgcggagcaagggcaccacgagctgatccgggagctctacttcaggttctcagaccagggcctcctcaatcgcctgaactcggcgctggacacgccgctgcattccgcggcgagggcagggcacgtcagggcagtcgctgttctcttcgagctggcgagggatcgtggcgtgaacattctgggatgcaaaaatgaggcaggggacacggccctgcacctggcggcgaggcacgggcacggtgcagcggtggaggtcctgatctcggcggcggcagaaccggcggccgagctgaacaacgccggcgtgtcgcctctgtacctggcagtaatcagcggctcggtgcaagcagtcagagcgattaccacgtgcaaggacgcatcatcgctggggccaggcgcacagaatgctctgcacgctgccgtcttccagagctcagaaatggttcacctgctattggaatggaggccagctctggccgaccaagtcgacagcggcggcagcagcccgctccatttcgcttcgtccgacggcgaccgcacaatcgtgaaggcgatcctgcgtgcctcaccaccaagcacagtttacaagaaggactcggacggcctgtcggcccttcacgtcgcggcgcggatgggacatcgccgcgtcgtgaaggacatgctacggagctatcccgacgccgccgagctccgcgacggtaacggcggtaccttcgtccacgcagcagccagggagaggcgctcctcggtggtgtcgctcgctatcagcaactccatgctgcgcggcgtcctggacgcgcaggacagggacgggaacacgccgctccacctcgcggtggcggtgggatcgaccggcgacgtggaggccctgctacgggagggcaaggtgcgtgccgacgttctgaacaacgacggtcacacggcgttggatctcgccgccagatcgaacgccggtttcttcgccacgatcaacctggtggtggcgttagtcgccttcggggcacggctccggccgcagaggcaggaccgcctggagcagtggggcggccgcgacatggtgcggaaggggatacagaacacgtccgacagcctcgcggtggtggccggcctcattgtcgctgcagcgttcgccgccgggttcaacttgcccggtgggtacggagacgacggcaaggcgaacctcaagcacgagattgtcttcaagaccttcctgttcttgaacaccggggccgtggcgacgtccatgctggcggtggcgctgctcgtctatgggaaggcgtcttcgcactccgacggctcgtggaagaccttcgcggcggcgctgcacctgctgtgggtgtcgctcgtctgcatgatgctggcctttcaggcggctctgttttccgtggcgacaacaagggcactaacttacgggttcctagttgtatacatgtgcatctttatcttgcaggtgcgtatcgcgaagtggctggggcctgacacgaggttgcgcacgatttggaggtttcactggaaagggaggcatgtcgacatcaaacggcagtatccgttcgccaacgctttcgtagtcaatgtatatctgtttacagctctaagtttgctagtgcctattggttttgaagtcatgtttctattaggtgggagatccatcgatacttcctcttag

SEQ ID NO: 103655 - DNA, 1577 bp, Zea Mays
aaaacactgtcctgtctggtcaggtctcgaaccggcccgagagcgcaatgcaccagcaatggaggcgagcggcagtcggggtccggagggggagcccggtccccaagcgccgcagaggcgtcggcgtggctactggcttcgggtttacggcgcagtcgctgaacgacgacatcctccggtccgtcttctcccggctggacgaccacttcgacctcgcccgctgctccgccgtctgcggctcatggataattgaaacagctcatctcatgagggatatgtattacaaaaggaacccaccagcaagaggttcaagctctaatatttcagtaaaaagttactttgagatgcttgccatggatgagcatgcatctgctttctctagaggacctgctgaagcttttcagtggattgggcacccaatgagggctaccttgtgccgtatgaagagtggtttaattttaactggagttggagataagattctctgcctttggtctgctgaaagctgcaaattcatgaatgagtacaatgtgccaaattctaaaacattagtcgactttgattttgatgaaaataagattgtaggtttgaccagctcccagatttgcatatggagacgcagtgaaccaagaagcatatttcaatctggtggagcctcattcaatcatgggttatgcatgagttttgctgatccggaggttgtaattggttgtgaggatggtcgagcctttgtatatgatatgtacagcaggagttgctcacgtatttatcggcttcactcctctcctgtgacatgtttgatgataacggatgaccagctgattgttggtggatcaacttttggaaatgtagctattgcagatcaaacctcagggcagaagttaggtgttctaaaatcagatcatggaccattggcaataagatccttatcttcctgcacaaattcacacatgatatttgctggttcgtcagctggttatgcacattgctgggacttaaggactttgaggcctctctgggaaaaaagagtcagcccaaatgtcatctacagcacacgtcatttgcccggtgacacggcaacgctggcagttggaggcattgacggcgtgctccgcgttatatgccaaaggactggtgacatcattcgcagtcttgtcgttgacgcagatctcccagcagaagccacatctagatcccggcagcaaatagagaagaaacgtgttcgaaggattgaccctgatgcacagttggacggtatcccgaggcgtttgcgccctcagattaccagcctatcggttgggatgaagaagattgtgaccacgcatggtgaaaactacattagggtttggaagtttcgcatgaaaagttcgtaaaaagggcgagatgatggtaatctagttatctggtgtaacctgtactgtagtctactgaataagatggcgtggtaccgtggtgtgtcacctgcgcttgtaataatagcctgaaacatagttcatttgtacacttgtagtcctctttaggatactattagcaattaaaaaaatgtttgtgctcggttcttttttttttacaataga

SEQ ID NO: 103656 - DNA, 1583 bp, Zea Mays
aaaacactgtcctgtctggtcaggtctcgaaccggcccgagagcgcaatgcaccagcaatggaggcgagcggcagtcggggtccggagggggagcccggtccccaagcgccgcagaggcgtcggcgtggctactggcttcgggtttacggcgcagtcgctgaacgacgacatcctccggtccgtcttctcccggctggacgaccacttcgacctcgcccgctgctccgccgtctgcggctcatggaataggataattgaaacagctcatctcatgagggatatgtattacaaaaggaacccaccagcaagaggttcaagctctaatatttcagtaaaaagttactttgagatgcttgccatggatgagcatgcatctgctttctctagaggacctgctgaagcttttcagtggattgggcacccaatgagggctaccttgtgccgtatgaagagtggtttaattttaactggagttggagataagattctctgcctttggtctgctgaaagctgcaaattcatgaatgagtacaatgtgccaaattctaaaacattagtcgactttgattttgatgaaaataagattgtaggtttgaccagctcccagatttgcatatggagacgcagtgaaccaagaagcatatttcaatctggtggagcctcattcaatcatgggttatgcatgagttttgctgatccggaggttgtaattggttgtgaggatggtcgagcctttgtatatgatatgtacagcaggagttgctcacgtatttatcggcttcactcctctcctgtgacatgtttgatgataacggatgaccagctgattgttggtggatcaacttttggaaatgtagctattgcagatcaaacctcagggcagaagttaggtgttctaaaatcagatcatggaccattggcaataagatccttatcttcctgcacaaattcacacatgatatttgctggttcgtcagctggttatgcacattgctgggacttaaggactttgaggcctctctgggaaaaaagagtcagcccaaatgtcatctacagcacacgtcatttgcccggtgacacggcaacgctggcagttggaggcattgacggcgtgctccgcgttatatgccaaaggactggtgacatcattcgcagtcttgtcgttgacgcagatctcccagcagaagccacatctagatcccggcagcaaatagagaagaaacgtgttcgaaggattgaccctgatgcacagttggacggtatcccgaggcgtttgcgccctcagattaccagcctatcggttgggatgaagaagattgtgaccacgcatggtgaaaactacattagggtttggaagtttcgcatgaaaagttcgtaaaaagggcgagatgatggtaatctagttatctggtgtaacctgtactgtagtctactgaataagatggcgtggtaccgtggtgtgtcacctgcgcttgtaataatagcctgaaacatagttcatttgtacacttgtagtcctctttaggatactattagcaattaaaaaaatgtttgtgctcggttcttttttttttacaataga

SEQ ID NO: 103657 - DNA, 87 bp, Zea Mays
gccttgttaagttacctggtacacgtgcatagccatctgaggccgttaatggcaaggattggtgcatgtggtcctgccattacgttc

SEQ ID NO: 103658 - DNA, 1533 bp, Zea Mays
atgaatgcccctacattgaggtatcatgatgacaaagtagggactcacaacaatctccaaaattttgagattgagggcaagactgtcggagcatccaccaaatatcatcccgagcgcgaagaaaagttggatgctttgctctatatgtatgaaaatatggatgatatgactccatatttcaataatcgtgacttaatacgctattgtgtatttgttgtaacagagaattccaatcgcgacttaatgagaaattgtcctcgaggcagtatgaaaatgcccttcgaggaagacatgggaagcccaatttcattaattggttccgagctcaatatgtctaaaaaggtgaagcagttcactaagggacttgcgaagagagcatcctttgttatgagaaaggaggacatactgtttaagggcattagttccagctcgagtaggcgtagagctttgttggagcatgttccagagttgaagggtcagacaatcggcgttcagaggaatgaggatgagtctgaagatgaggtagaaacagaggagggagagaggtgggagatgttgaagatgagccatagtggatggcgtgaatggcctgaggatccaagtggatggccaagagatggagggtctggagttggtggagctagtgggtcaagggaaggaaaagctagtggttttggaagcgagggagttggagggccttcatgggtccagaagccacagagaactagttgggttccccctcctaaagaaccagttgatagggttgagataataccaactggagatggggcttgggtggatagtagtttcactagcacagcattcgattccatggatagccatcatgatgctgcttggcgtgcgttatgccgttactgggcttcgactgaattcaaggaaaagtctgtgcgacacagttccaatcgtggaactgagtcgtatcacatgtttggatgtgatgattactttcgtttggcaaaacgaatggaagctaacactggtgcaatgcctagtgatgttcaaatataccttagggggcacaggggaccagatcctgcaaatccatatgtgttgtgcagcaaaaaggcaatagatcgtgtggtgagggttcatcatggaggttcgtcaaggtctgcttctcgtagctcccgttgctccactcaatatctagcagaagtggagcaactacgagaagaacttaggcgacatcaggattacttgaagcaacaagctgtgcaacatgaatattatgctacacagattcaacaacaacaaacactcatacaacaactagctcaagcccaagggatacatgtcctggtgcccccaccactaccaccacctcccgttcattatccttggtcttcacctccacctacacctacatctccacctaccgaacatcagaccctgccagctaccttgccgacgcatgaacgagaagacgggttagactttgtcgaaatcctcttcgctagtggaggtatcgaccatcactcgtcattataccccgatggtgatcggcgatcgtga

SEQ ID NO: 103659 - DNA, 97 bp, Zea Mays
ctggggttttctcaaaacaaactcaaagagaactcaactcggaccatgatcaagaactgcactatgagggcgtatgcagtgatccaatgagtctatc

SEQ ID NO: 103660 - DNA, 638 bp, Zea Mays
atttcttccaaattgtcaaagcaagatttttgttgttgttgttgtaaagctttacaagttaatggtcatagtatatttctttggactaagccaaacaaccttattttcaggatataagaacagagcttcagtcagtgcaaaaatttagtgttgctcggaaacaagaaaataggggaagaaaccgctatactgatgtgttgccatttgatcaaagcagggtacagttagagtcttcaacaggcaatgattacatcaatgccagccatatagagattgctggcagaaatctaacgaagttcatttctactcaaggaccacttgccaatacaattgaggatttttggcagatggtatatgagaaccactgtcctgtgattgttatgctcaccaaatttgatggtcttaagtgtgatgagtatctaccattgagcaagggacaggctgtttttggaaaatttaccattaagatcacaaagttcaggaaagatggtcagttattgttgcgtggtgtggagattcgacaggatgaggtgaatatatataaggttgtttacatgctttctgttctaggtaaagtgtatgataagcaggttctccatggagtctactattctgtactttacattatactattatag

SEQ ID NO: 103661 - DNA, 455 bp, Zea Mays
aggagcaatacaaatgttgccaccatgcaatcagagatgaactggaagatcttgtatcgagttcaaaaattgagccgctttcgaggaacgggtaacgctagcagtgatgttctactgacctatctgacagcgtgatacctctttacttgctccattcttcaagcttcggcgatagccgttatgaacatcatgacttctgaaatgttgcgttttatctggagttttaaagcctttacaacattcttcaaccttctatgatctaacattcattgtggtgtatgcatgaaattagaatttagattgatgatatattattgattgtgcccgcccccacacccccacagattgtatttttggttaatggtgtatgcatgaaatatgatgcacaggaaagatttgatattggtgtgttgttgttcgtgcacgtgcgcgcacacaatcgtttccaggaaaga

SEQ ID NO: 103662 - DNA, 915 bp, Zea Mays
ccacgcagacctcgctcgcaagaacaacagacagagctcagagtaacaatagtcaagaaaagctccagctcgaccacacctgcgcatatagccatggccgccgccggcagctacgcagccctgtcctcctgcctcctggcgctcgccctgctggccgccaccgcgtcggcgcaggagaaggagacgcacctgcgcgtgttctggcacgacgtggtgaccgggggcccgaacgtgtccacgatagtccaggtggccgaggccccctcgtccaacgcctccgccacgggcttcggcaccgtcatcgtcatcgacgacccgctcaccgagggccccaacctgacgacctccaggctggtcggccgcgcgcagggcatgtacgtgagcgccggcagggactcgctgtcgctgatgatggccatgaactttgtcttcgtcgacggcgcctacaacggcagcagcctcgccatcctgggcgccaaccccgccgagcggaccgtccgggagatgcccgtggtcggcggcaccggcgtgttccgcttcgccagagggtattgccaggcgcgcacgcagtggatcgacaacaggaccggcgacgccatcgtcgagtacaacctccacgtccgccacgactgagatgcatgcatggacgatggtcgacgcagctgcgtgcagccacacgatttttacgatcgagttatgattataagcgcgacgaacggaagtgagaaaatcatatgcaaaatttattattacttcacttgtaattgtagttgtgccttcattttttttttgtcgtccatcatcactattctaactcttttcttgtaacacttgatcgtcctcttttgcaccaaacttttgccactcgcgcctttctcgcttattataatttcagttgcagctaggtatttaaac

SEQ ID NO: 103663 - DNA, 609 bp, Zea Mays
cagacacgtaaacaacccattgaatcctacagtagcaatgcaaacaaagagatgcctgaatcgtatatcctataataacactcttgctaggtttcacactcatcttctgttaatagaagaagcgtgtggtgcagccgtgcagggatctggaagcaagtaaagtacaaaagagaaatacgaagcagatctgatccgaatttggtgacgccgtggtgcaggatggcgacagaagggggatcctagctagaggcggaggccgccaaggcgaggttgtccgggcgtcatcggtccacacccggtcgtccgtgttggttcacacgcagtgcaagcggctaggagcagcgccagaagtggcaaggcggatagatcaaacatcaagcagtgcccccgcgtggatttgtggggagaaggtgtcagcagtagcacgcaggtggggaagggagcggtcgagcaaagggtgggtgtcaccagcagcaacacaaggttgctggtgatgatgtcccgcggaaggcgatcggtggaggggccgcggcgatggagatcgcatgcagcgccgccatctgtgcgagacgagaggaagaacgagccgggatactcgcccaacgacga

SEQ ID NO: 103664 - DNA, 104 bp, Zea Mays
ttttttttcaaggggtatttagcccattggtttccaaacagtggcaaggaattacacctaagttaggaaaattgtcacacccggttttagaaggcaaaccgaat

SEQ ID NO: 103665 - DNA, 207 bp, Zea Mays
atgtcgcgcagcacgcgcaagcagctggccgagaggagcagagagggcgccgaggaagcaaggacggccagccctgccgtcactggcgagctccaaggacaggggaggcgcgaccatggctgggagaagaggcggccgatgccatggagacgagctggagctagaactgggcgcggacgtggctctggtgatgacgctgggcgttga

SEQ ID NO: 103666 - DNA, 243 bp, Zea Mays
atggctgggagaagaggcggccgacgccatggagacgagctggagctagaagaactgggcgcggacgtggctctggtgatgacgttgggcgttgagcgctgcggggagacctgggcgagctccatggcagccaccaccagcgagaaaagcggtagcagagggattcactgggaggagctcatggccggagtggatcgggagaaagcttatgagccgagcgtggcctggggtccggcggcatga

SEQ ID NO: 103667 - DNA, 989 bp, Zea Mays
ccactgccccgccaccgtatcagatgccagtgctcctgccaccgaaccgctgctctttaccaaccactcccaccaccctctcaccgttgtccgttacatatccagcggccacccgttcctcttcctcgtccgcctccacgaccaccatccatcgccatggctggccccaccaccacgctcctcctcctgctgctgtgctccgctgggctcgcgtccggcgccacggcggctgacgacagcgggttcactaccttcaaggtatacttccacgacatcgtggcggggacgagcccgacggccatccgcatcgcgcagggggcggcgtccaacacctcgtccaccagcttcggcgcgatggtggccatcgacgacccgctgacgacgggccccacgcgcgccgcgggcaccgaggtgggccgcgcccagggcacctacacgttcgcggaccagcagacgttcggcctcctcatggtgatggacttcgtgttcacggccggggagcacaagggcagcacgctctccatcctcggccgcaacgaggtgctcagcgacgtccgcgagatgagcatcgtcggcggcagcggaaagttccgcatggcgcgtgggtacgtccaggcgcacaccatcgactccggcttcaaatccggcgagaccgtcgtccagtacaccgtcaacgtcagggcctagctacccgctcgatctaccttgcttgctcctccggcccatggccgactgcccgcccggcttcttgtgcgtcgatccatctccggatgctttgtacacaccttgtcgttcttcgatgttactacatgacatgtatttagtagactgcgatttcagacatcgagtctatcttcatttgctattgagcgggatctggatctgcagacccgaatctagttctacgcgaatctgcagaggtacggcgggtcgatcgaaatgtgcgaagaacacgtcagagcctaattctagtagtaaaaaaacaagaa

SEQ ID NO: 103668 - DNA, 1464 bp, Zea Mays
gaccagtttttcgatggccaacgcacgatagaagaggagaaggtctggctggcctcatatcacatgacaggggtcgcccgaacctggtatggacagctccagcgtgatgcaccgccattatcatggtctcatttcaaacagctctgccagcaaaggtttggaccgccacttcgcaacaatccattgggtgaactggcacgactaccctttcgcacgacagtggatgattatcaggaaagattttgggatctgctagcccaaacagcacctctctcccaggagcagcaggtgcaactattcactgcaggactaccggatcggatcaagatcgatgtggagcttatggcgccacgagaccttaatcaagcgctgagcttagcgcgagcatatgaaaggagatcccaggccctagacatccatccagtagcaacacccagcaaggctctgcgacagccccatcgcccatcagtacctgtcccggcactatagccacaaattccaacagcagttagtacagcgccgcaacgaccattcaagaagctgacaccggctgagatggccaagcgtcgacgtcaggggctctgttacaattgtgacgagcagtatgtcagaggacaccgatgccctcggctgttctatctagaggtcactgattttgaggagggggaagccatggagaccgatcttgaggaaccagaaccagtgatatcactgcatgctttgactggtattcaatctgagggcacaatgcagctagaggtatctatcagaggacatgctctcacagcactactggacacgggttctactcacaactttatcaacttaggcactgcaagcactcttaaactggagtacaatcccagccaaggtctccatgctacggtggcaaatggtgacaaggtctcccgctgcaggttcccaaacagcattagcatgactatcggcctcgaggacttcctaatggacgcatatgccattccactggactccttcgatattatcctcggagtccagtttttgcgcaccctggggccaaccctttgggatctggaagacttgtgtcttgccttctggagacgaggcaagcggattctatggaaaggcatgggctcctcacgagatgacattcacatgcacccggcagttcgaacagtcaatgcagcaagtgaagattcaaaacctatgatggaccgcttgctacaacagttccaggaagtgtttaccacacctagtggccttcccccagctagaaggtgtgatcacaagatccatcttctgccaggaacagtaccagtagcagttcggccatataggtacccacagcttcaaaaagatgagcttgaggcacagtgcatgaccatgttagagcaaggcattatcagatatagcacctcagctttttcagcacctgtccttctagtaaagaaaccagataattcatggcgtttctgcgttgactac

SEQ ID NO: 103669 - DNA, 1594 bp, Zea Mays
ctactaccactcactagtcgccacaatttggtgtggccttccttccccagcaaaggcaaacccccatcccggtgtagcaatatagcaaacgtgtcccggttgtctgccgccgttgcacagcactgggactgggatgaccggtgtccaagagccgctcagttccgttccgtgctccgcgggtgggcccgccgctccactcgccgcgccctcccgacctcccgccacgtgcccccctcgccgtgacgtgggtggtggacctcaccaccacccgccgcgcgcctggccgcctccatatataccgcgccccgcctctcgccttccgcctcatcactctgctagctgccccggtctcctcctcacactccctctatcgccaggcaacagcagcgcatgccagcagcagcgctcccgattcggcgccacctcgatccccagtccccgtccacaccacccaatcctgctgtgttcttgctgcagccgttggtctcctgctttgttcgggtgctagctgccacgcgcgatgcctcctaacgcccaagacgtgcacgggagcagcggcgggctcgccatgacagccccggcggcgtccaagatggactgcttcttaaccgccgtctgcacgccgctcaacctccagttcatcgacgtgtcgtaccgtgtgaagcagacggagcggtcctcgaaggcggcgccgggcgggcggatatcgcactccggttccggcgccgcggcgccggaggagcggacgatcctgaaggggatcaccggcgaggcgcggcccggggaggtgctggcggtgctgggcccgtcggggagcggcaagtcgacgctgctgtccatactggggggccgcctggcggggcaccacggcgggacggtgctggcgggcgggcggcccccgtgccgcgccgtgcagcggcgcacggggttcgtggcgcaggacgacgtgctgcacccgcacctgacggtgcgcgagacgctggcgttctgcgccatgctgcggctgccgcggtcggcgcccgccgccgccaaggccgcggcggccgaggccgtgatcggcgagctgggcctgggcgcgtgcgccgacaccatcgtcgggaacgccttcgtgcgcggcgtgtccgggggcgagcgcaagcgcgtcagcatcgggcacgagctgctggtgaacccgagcctgctggtcctcgacgagcccacgtcggggctggactccaccgccgcggcgcgcctcgtggcgacgctgtcggcgctggcgcggaaggggcgctccgtcgtcctgtccgtgcaccagccgtcctcccgcgtctaccgcatgttcgactccgtgctgctgctcgccgagggcagctgcctctacttcggcgccgggcgtgacgccatggactacttcgcgtccgtcggcttcgcgccgggattccacgtcaacccggccgacttcatgctcgacctcgcaaatggtgagtcatcgtattatgtacgtgtgcctacgccacaggctactgcagctttgccttgcatgcgtgtctctctcttctagctgtttcagtttcgatctattcatcgtcttaactaatcagaagaattttaaaga

SEQ ID NO: 103670 - DNA, 1697 bp, Zea Mays
gcacatcagaccaaagctagcacgatggcatggcaatactcgatgagaaattgttatactgggccccgcctccaagagaatttttctcaaaatttattttgaacaggtttcgcccaggcagactacaatgccgtcacaacacaacagcaaggcggcagcagcgtgaagcagtcgctcatctcgtcctacaacaaggtgctggccccgagggtgaaggcctccgtcgtggccgcggagccgccaccgccgccgcacgtgcagagcggcggcgaggcggcggagagctgcagcacgagctggtgcaaccagttcacggtgctgctccggcgcagcctcaaggagcggcggcacgaggcgttcgcgtcgctgcgcgtgttccagatcatggcgccggcgctggtggcgggcgccatgtggtggcgctcgtcgccgctggcggtgcaggaccgcctgggcctgctcttcttcgcctccatcttctggggcgtcttcgcctccttcaacgccgtgttcgcgttcccgcaggagcgcccggtgctggcccgcgagcgcgcctcggggatgtacgcgctctcgtcctacttcctggcccgcaccgcgggggacctgcccatggagctcgccctgcccaccgccttcaccgtcgtcgtctacctcatggcggcgctcaacccgtcccccgtcgcgttcgcgctcacgctcgccgtcgtcctggcctacgtcctcgtcgccggcggcctcggcctcgccgtcggcgcactcatgatggacgccaagcgcgcgtccacgctggtcaccgtcatcatgctcgcatacctcctcaccggcggcttctacgtgcacagcgtgccgcggttcatggtctggaccaagtacacctccttcacctactactgctaccgcctgctcatcgccgtgcagtacagcggacacctcaagcgcctgctcccaccggaggccgtccacggcgaggttggccccggggcctgcgtcgccgcgctcgtcgccatgttcttcggctaccgcctgctggcgtacgtcgcgctgcgccgcgtcaggaaatgatccatctgatgatctcaacgcgccgtcggcagtcgctgtagctagctagggaagtgtccattaactattgcatgcgtgcgccttggcccagccggtaaggccaccaaaattctcaattcgtggagagcatactgaattgctccggcttccattccatcagagtgcgaaagctgaaagccattgttcgttctaccatgtgtccaagttctaacttctaggcaagtttctgtgtcacaatgctatcagcgcactgctctgattgggccgagcaaaggtctttgggctggactacaggccaaatatcgaccatggataaacaagggaagcaatataaaaagaggagaacagtagctgagagggcatcgaggaacatctggacgacgaaccgggaaactggcggcgagatcacgctcgaggctagattactccttctcctcatgtatctagagaactaattcctcttctatattcgagttggtggtaaactatattgggtctgttacattctggtgccgcatattttttttttcaatgtccctggatccatagaaccatgtcccaaccaaaattcatgcaaggtacttgtcacatacgaatcaaattggctactggctaaaccatgtgttccaaac

SEQ ID NO: 103671 - DNA, 1520 bp, Zea Mays
attggtcttctcatcagttctatatctatgaatgatggtacgtgctgctacctagtcgctccgtccaacggccggcagctcactcagcagcgtcagcagccatggcggtgtcacaactccatctcgtggtgatggtgatcctagtatcagcagtagcatctgctcccgcagtagcagcgcagtacctgggcgtcaactacggcacactgggcgacaacctcccgccgccgcaccgcgggatggagctggcccgctcggcgggggccgtctctgtccgcttctacgacgccaacgcgaccctcctggcggcggccgcggcgtccggcctcgacttcgtgccgagcttccccaacgagctcatcccgtctctcgccggctcccagcgcgccgccgacgcattggtggccgccacgctgctcccgttccgcggcaacccacgcctccgctacctcttcgtcggcaacgagttcctctccaacccgaccgccaagcccaactgggcgctgatcgtccccgccatgaccaacgccgccagggcgctgcgccgccacggcctcgcgcacgtgaaggtgagcaccacgctcagcatgaacgacctcggcaacaccgtgctcccgccgtcggccggcgcgttccggccggagatcgccgaggccgtgatgggcccgatgctggccttcctgcagcgcacaggctcctgcctgttcctggacgcctacacctacttcacctggtcggcgaaccacaccatcttcccgctgccctacgcgctgctggagccgtcgccggggttcgcgtaccacgaccccggcacggggctctcgtacgccaacctcctggaccagatgctggacacggcggcggccgccatgtgccgcctgggctactgcggcgtgggtctggcgctggccgagaccgggtggcccacggcgggcgacctggaccagttcggcgccaacgtgcggaatgcggccacgtacaaccgcaacctggcgcggcgcctggcgtccggggccggcacgccgcggcggcccggggtgccggtgccggcgatggtgttcgcgctgttcaacgaggacctcaagtgggggcccgacacggagcggcactggggcctgttctaccccaacggcagcgcggtgtacgaggtggacctcacggggcgccgcccgctggcgtcgtacccgccgctgccgccggcgacgaacgaccagccgtaccggggccccctgtggtgcgtggtgaggacggcgggcattaacgagacggcggtgagggagcaggtggcggcggtgtgcgacgacgacgaggccgaggatgcgctgtgcgaccccgtgcggcccggcggcgcgtgcttcctgcccaacacggtcgccgcgcacgccagctacgtcttcagcgcgcactggaacaggttcagcgaggactacggagcctgctactttgacggctggggcatggagaccaccatcgatcccagccatggatcatgcaaatttccaagcatccatctcaaataa

SEQ ID NO: 103672 - DNA, 767 bp, Zea Mays
gggcaaagtcatccatcctttagttgccaatttaaaggaatagtagaagtaataccgatttgatggcccaaaacaagcagatcattgttgtggtggctctcctttttcttgtggtggcaacatcatcatcagtgtgggttgcagaaggagccgatgacttaaaagttgcttgcgttaaggagtgcacccaaaattttaacactcccgagggaaagaagatctgtgaaacgatgtgtgccaaccctaaaggaaggcctatcgatagagttagagctgattgatcaatgctcatctttatttgtagctagctatcatgcatgcaatgatggccttcttgattattattatttcattcctcatgttgtttgttcttgcatgttttttccaccactaatattgtcctaattgatgcatacatgttgtcactcaaagcattttctatgctttacttattggttaaataaatacaaaggcttccttttacctatgagctatgtttagttcatcgtacatgtatttcattggaagaggtgatgtggagtcaacaagatcctatatggtgggtaacacatgtcagttcaagtgatgagttacccaacaagttttatgagtactagacgagtgctatccctagtcaaccgtccttgggaagtacagagatccgaaagaaaagatatacaatagtttctgctatactttgtagtatatgtaagtcttgttgtaactattttatttacataagaaagcattgtatttgatttcctcca

SEQ ID NO: 103673 - DNA, 1407 bp, Zea Mays
gacgaaccctccctttcgtttcccccaagacaacacaaacccccactcgcgcgactcgcacaaggaacagaacttcagaacccagcgaatccagcctggcccatgccatgtcgcagcccgacgccgacgccatcctcatccccatcgccgcggcgatggatccctccccagccccagccccagccccggctccggctccggtcccggcccctacggtggtcgagtggcccgagggcggcgcactgacgcgggactgggtggcggggctggcgtccacgctggactggtgctcgcggcacctccccgcggaccgcctcccggcggtgctcccgcccgcgctggtccagcgcctggtcctggccgccgccgccatcctgcaccgcgagcccaacctcgtccgcgtcgacccgcgccccggccaggccgtcgtcgtcgtcggggacgtccacgggcagctccacgacgtcatcttcctgctccgcgacgccgggttcccgtccgaggaccgcatcttcgtcttcaacggcgattacgtcgaccgcggcgcctggggcctcgagaccttcctcctgctcctcgcctggaaggtgctactcccaaactgtgtgttccttctccggggaaaccacgaatccaagtactgcacgtcaagtatatggtttcgagaaggaggtaatgactaaatacaaagatcagggccctcaaatttaccggaagtttttaagatgttttgaggaccttcctctggcgacaataatagcaggatgtgtgtacactgcacacggcggtatcttccgtggaacaattgtagtgccatcaaagaaatcaaaaaagggaaagaagggtcacaaatacaaggcgaattttactgttgatctgacttccatgaaacttggatccttggatgagttattgaaagcaaggagaactgttctcgaccctccttgggaaggctcaaatttgatccctggggatgtgctgtggtctgacccttccttgcagatgggtctttctccgaataaagaacgaggcataggtttgctttggggtcctgatatcactcagcagtttctgaggacaaatcatttgaagctaatcatcaggtcacatgaaggtccagacgcgagagacaagcgacacgatctcttaggaatggataaaggatatacgattgatcatgaagtagaatgtgggaaactaattactctcttcagtgctccggactacccacagtttcaggcttcagaggagcgatacaacaatcgtggagcatatattgtccttagtccacctgattttgctacccctgttttccatagcttcggagctgtaaagcctcgacctgcggtatttaatcgccatggacagcggcacgtcgagcctgtcatgacgactcgccatgtacct

SEQ ID NO: 103674 - DNA, 357 bp, Zea Mays
atggtacccagactcaagaagccgcttgacgagccaggaggcgatgaaaccagacgccccagtgacacagaccttacccttagcagtgttagccattctctcagactcgaggtggagagttggcttggtcatgcgcagattccaccacagcataggagcctcacagcttctgcattccactggattaaaccactcccgtcctacaaaagttcacagcttagaaaggcatgaattaccaaccttacatgcattgcaggaaccttcttccttcctactgagacgctgctttatcaaaaatttcttaaacatgtgtaatttcatcacttcaagttactggttagtggtcagttttgttcc

SEQ ID NO: 103675 - DNA, 206 bp, Zea Mays
agtgtttgtcgtaacaaccgagtaccaatctgtcatgcaactcattttagctatatggcgaagtgcagctagcacatgctggcataacatccaaacgttaagatcatttgttaccgttattaagccatttcccacattaataattcaatcacggttaataaatgagattaatctataccctctattcttaacaaagaaaaaaaaaa

SEQ ID NO: 103676 - DNA, 151 bp, Zea Mays
taaatactatgcaacgacatgaatgcaacaatcaaagcttctccaggattttattttactacgctaaaaacttatatatatatatatatatatatacatattatataataaaataattatccattatttagaaaaaggataagaaaagcaa

SEQ ID NO: 103677 - DNA, 1262 bp, Zea Mays
accccagtaccccaccccacccacaacggctggggcgtggcttcacttcacgttgagcatcctctctttccttttttccccaaactccaaaatccaatccaagcaactcctccccatgctcctcccgctcctcctcgccgccttcctccatggcttggcggaggcgcagggcggcctcccgtcgctgccgatcggggtgaactacggcgcgaacgcagacaacctaccctcgcccgccgccgtggcggcgttcctgaccaagagcacgaccatcgaccgcgtgaagctgttcgacgcgaacccggccttcctcgacgcgttcgccgccaacgcgccctccatcgccctcgccgtctccatccccaactccgccctcccgtccttcgccgacagatccacgggcctggacgcggcgcgcgggtgggtccgcgacaacctgtccccgcacgtgtccgcgggcgccaacatcaccctcctcatggcggggaacgaggtgctgggccccaccgtggtgcccgacctcgtcgtggcgctgctcccggccatgcgccgcctgtaccaggcgctgcagctggagggcctgcccaaggtccgcgtcaccacgccgcactacctcggcatcctggcgccctcggacgggatcccctccaacgcgagcttccgcccggggctggacgccaaggtgctggcgcccatgctcaggttccacaacgacaccggctcccccttcatggtgaacgcctacccctacttcagctacaacgccgccacgctggactacgcggtgttccgccccaacgccggcgtgtacgacccggcgacgcggctcaactacaccagcatgttcgacgcgcagatggacgccatccacacggcgatgaagaagctcgggtacggcggcgtgcagatcgcggtgggcgaggccgggtggcccaccaaggcggaggccgggcaggtcggcgtaggccccgaggaggccagggatttcaacgccggcatgatccgggtgtgcagcggcgggaagggcacgccgctgatgcctgggaggacgttcgagacgtacgtcttctcgctgttcgacgagaaccagaagcccgggccggtcgcggagcggaacttcggcatcttcaacacggatctcacacccaaatacgacctggggctgctccgccaaggaccggtcagtactactctggatccgctgcaattattggttcccaccagatttattgtcgaattgaatttcgtatcaaactatgctt

SEQ ID NO: 103678 - DNA, 1867 bp, Zea Mays
accccagtaccccaccccacccacaacggctggggcgtggcttcacttcacgttgagcatcctctctttccttttttccccaaactccaaaatccaatccaagcaactcctccccatgctcctcccgctcctcctcgccgccttcctccatggcttggcggaggcgcagggcggcctcccgtcgctgccgatcggggtgaactacggcgcgaacgcagacaacctaccctcgcccgccgccgtggcggcgttcctgaccaagagcacgaccatcgaccgcgtgaagctgttcgacgcgaacccggccttcctcgacgcgttcgccgccaacgcgccctccatcgccctcgccgtctccatccccaactccgccctcccgtccttcgccgacagatccacgggcctggacgcggcgcgcgggtgggtccgcgacaacctgtccccgcacgtgtccgcgggcgccaacatcaccctcctcatggcggggaacgaggtgctgggccccaccgtggtgcccgacctcgtcgtggcgctgctcccggccatgcgccgcctgtaccaggcgctgcagctggagggcctgcccaaggtccgcgtcaccacgccgcactacctcggcatcctggcgccctcggacgggatcccctccaacgcgagcttccgcccggggctggacgccaaggtgctggcgcccatgctcaggttccacaacgacaccggctcccccttcatggtgaacgcctacccctacttcagctacaacgccgccacgctggactacgcggtgttccgccccaacgccggcgtgtacgacccggcgacgcggctcaactacaccagcatgttcgacgcgcagatggacgccatccacacggcgatgaagaagctcgggtacggcggcgtgcagatcgcggtgggcgaggccgggtggcccaccaaggcggaggccgggcaggtcggcgtaggccccgaggaggccagggatttcaacgccggcatgatccgggtgtgcagcggcgggaagggcacgccgctgatgcctgggaggacgttcgagacgtacgtcttctcgctgttcgacgagaaccagaagcccgggccggtcgcggagcggaacttcggcatcttcaacacggatctcacacccaaatacgacctggggctgctccgccaaggaccgtctggatctccaaccccatctccggagccctcgccgtcggtcggcggaggcaagtggtgcgtggccaagtccggcgcgagcgcaaccgacctgcagaacaacattaactacgcctgtgcctacgtcgactgtaggccgatccagagcggcggcgcgtgcttggaccccaacaacatccactcacatgcctcgtacgtcatgaacgcgtactaccaggccaatggcatgcacgactatgactgcgacttcaagggcaccggcgtggtcacctccagtgaccccagttacgggagctgcaaatacaacgcctcctcctgacggcgcgcagcaagtccagctggcactactgcaccagcctccagtccacatcgtcctccagctccaggctccagccatggccacgctggggacgggaggaggtccgtactgccgccgggcttgcgccacatacttgtatactcatgtctcacacccatgcttcttgttgctctcaaccactactagcactactatttgtctagttccataattacaagtccctctcccctcatgttaacttgatcattgtccgtgtgtagtggactagtggtggtgaataaaatagcttccattccatgtagacaaacaaacaaattgtaacatctgttatccttgggttatttgatatatttatttttcatatagtac

SEQ ID NO: 103679 - DNA, 1928 bp, Zea Mays
accccagtaccccaccccacccacaacggctggggcgtggcttcacttcacgttgagcatcctctctttccttttttccccaaactccaaaatccaatccaagcaactcctccccatgctcctcccgctcctcctcgccgccttcctccatggcttggcggaggcgcagggcggcctcccgtcgctgccgatcggggtgaactacggcgcgaacgcagacaacctaccctcgcccgccgccgtggcggcgttcctgaccaagagcacgaccatcgaccgcgtgaagctgttcgacgcgaacccggccttcctcgacgcgttcgccgccaacgcgccctccatcgccctcgccgtctccatccccaactccgccctcccgtccttcgccgacagatccacgggcctggacgcggcgcgcgggtgggtccgcgacaacctgtccccgcacgtgtccgcgggcgccaacatcaccctcctcatggcggggaacgaggtgctgggccccaccgtggtgcccgacctcgtcgtggcgctgctcccggccatgcgccgcctgtaccaggcgctgcagctggagggcctgcccaaggtccgcgtcaccacgccgcactacctcggcatcctggcgccctcggacgggatcccctccaacgcgagcttccgcccggggctggacgccaaggtgctggcgcccatgctcaggttccacaacgacaccggctcccccttcatggtgaacgcctacccctacttcagctacaacgccgccacgctggactacgcggtgttccgccccaacgccggcgtgtacgacccggcgacgcggctcaactacaccagcatgttcgacgcgcagatggacgccatccacacggcgatgaagaagctcgggtacggcggcgtgcagatcgcggtgggcgaggccgggtggcccaccaaggcggaggccgggcaggtcggcgtaggccccgaggaggccagggatttcaacgccggcatgatccgggtgtgcagcggcgggaagggcacgccgctgatgcctgggaggacgttcgagacgtacgtcttctcgctgttcgacgagaaccagaagcccgggccggtcgcggagcggaacttcggcatcttcaacacggatctcacacccaaatacgacctggggctgctccgccaaggaccgcagtctggatctccaaccccatctccggagccctcgccgtcggtcggcggaggcaagtggtgcgtggccaagtccggcgcgagcgcaaccgacctgcagaacaacattaactacgcctgtgcctacgtcgactgtaggccgatccagagcggcggcgcgtgcttggaccccaacaacatccactcacatgcctcgtacgtcatgaacgcgtactaccaggccaatggcatgcacgactatgactgcgacttcaagggcaccggcgtggtcacctccagtgaccccagttacgggagctgcaaatacaacgcctcctcctgacggcgcgcagcaagtccagctggcactactgcaccagcctccagtccacatcgtcctccagctccaggctccagccatggccacgctggggacgggaggaggtccgtactgccgccgggcttgcgccacatacttgtatactcatgtctcacacccatgcttcttgttgctctcaaccactactagcactactatttgtctagttccataattacaagtccctctcccctcatgttaacttgatcattgtccgtgtgtagtggactagtggtggtgaataaaatagcttccattccatgtagacaaacaaacaaattgtaacatctgttatccttgggttatttgatatatttatttttcatatagtacacatgttcagtctcgatatttattcacaaaaaggttgacttttttttaaacaaatgca

SEQ ID NO: 103680 - DNA, 2490 bp, Zea Mays
atggcggatggggctattgtggtagccatttgccagtacggcggagagttcacttctggccccagtggtaatctgatatacagaggtggagaagcacatgccgttgatgttactcatgattcatcgctggagagcttcaaggatgagctgtccaaggtgttccatgttgatgtcactgacatgtcactcaagtactttcttcccaataatatgaaaacactcatcacaatatcatgtgaccgggatttgcaaaggatggttggttttactgcaaatgctgcgcatgtggatgtttttctgataagtagacaggagaacaggagtactataacacattctggagctacatctggctctgttgctagtggcgacaaaaggaaaagaccaacacccaaaaacaaggtaatcagaagcagcaaaccagctaccagtgctgcttgcaatgcacttcaagctatcacagataatgtgagacaaccaatttcagttattactgaaaatgaagacaacagggtttttcagttggaatttgggaatgacatcacatttaccaccacagctggaggtgcttccttcacatcagatattctcgatcagcaaaagcttgttcttgttgataatatccccaaggaagcagttagtttgtttgatgatgcattcaatccatatgttagttctgagatcatgcatgagccgcctcaggaacctaacaatcctattgtgttgtgggatgacattatcaaaggagttggtcaagaatttgataacgtgaaagatttccgtgctcagttgtgcaagtatgctattgggaaaggatttgtgtaccggttcataaaaaatgaaactactcgtgtcactgtaaaatgtggtgcagaaggaggctgcacctggcggttgcatgcatctgaatcatctcgtaacaagaaatttattatcaagagattgacagatgaacatacttgtggtggaggaagtggagagggtcagcgtcgagcaacacgacagtggttgactactatcattaaggagaagctgcatgataacccaaagttcaagccaaaggaacttgtaaaggaattatttgaagaatacggagttacactaacatattcacaggtctggcgaggcaaagaagtagcagagaaagagctgtatcatgctgtcagagagactcgcgatcagttaccttggtattgtcagaggctcgaggagacgaacccaggaagtataagtgtgctgtctccagtgttggatatgaaaacccgtcgtttttttgttgcattgcatgcttgtttgcatggctttataaatgggtgcaggcccctcttatttttggacaaggtcccactaaaagcaacgaatgagtacaagttgcttgtggccgctgctgttgatgcagatgatggtgtctttccgttggcatttaatgtggttgaagatgaaaattatgatagctggggttggttcttaatgcatctgaaaatagctctccaaactcacaactacccttgcaatggcatgacattcttgtccaacggacaaatgggtctggatgctgctgtttctcacgtgtttgaggatggcgaacatgccttctgtttgcatcatatcattgaggaattcaaaggagagctgaggaagggaccatggtcacaacaaattagggaggggatggttgaagatttcactcgtgcagcccaagcatgcagcatcgaggattttaatgcatccatcgagagcataaggaatatatccagtgaagctgctgactggatcatagcgagcaagccagagcattggtcagatgccattttccgaggcttccggtatgatcatttctccttgaacattgttgatgctttcgataactggataccagccaagaaggagagttccatagtgctgatggtagactcgctgagaattaagattaaggaagtaatagaatcaaggcttgaagcttgcaaggtgtggcaagggcctttaacacctaccatggaatacaaagtgcaggatgagatgctgaaggctggtaaaatgactgtgctgtgttcctccgatactgtatttgaagtgaggggcaacgcagttttcgtggttaatattggaaactgggaatgcacgtgccggcggtggcagctctccggcctcccctgcatgcatgccattgctgtgttcaacaggcttgggcgctgtttctatgactactgcccgaagttctttagaatagaaagctaccatctgacatactcgggaataatcttcccaatacctgacttggatagcgttgatttcagtgctggggcaaatctactcccactgcctcccaagcggcgcacgtcagataaaccgaggaggaagcggtctaaccccaacaagataagcactctcacacgactctgtagcagcgtcaaaggtctcaagtttaggatcttggtgaccactggtagaagccacggtacaaaccaccttgtcacattttatgtttga

SEQ ID NO: 103681 - DNA, 883 bp, Zea Mays
atgacgtggtggtgtagcgttgaaggagctcggcgtgatggcgaattggagttcgacggagacggaaccgattatcgaacagaaattgcgcagatcgacgacgcgagactcgatctggcgagcacgacgggtgaactcggttgggcgcggcgattggagcaggcggccactggggcagcgcccaggcacgcacgacgagaatccaagcagggccagtgcgcagcgaccatggaaaagatccgagctgggctacggaagctggagggcgagcaggaaaatccgggctggggcatcacggtctgctgcgcaaccatggagacaagcaaagggagcagggcgccgcagggaaggagctggggactaggcacatggctggaagaggctcggcgcgcagaggaagctccggcaccagggaggaagacgcgcatggcgctgggcgcggtccgagcagaggctagccagacacgcggagcgagcagggagcaagcccggcgcgcgacgcagaggaaaatcaagctgaggagcaccgagctggagctccgaacaggagcaaggagaagggaggggcgcgacgctgggcaggagcagggagggaactccggcgcagggagcagggcgcaggaggaacagaggccgagctcggtgagctgcgcgcagggaagttaggcgccgagctcgcgcgcaacgcagggaagagctcgagcgtgccatggcgagggagcaggagtgcgctggctggggaagaagctgggcacgagcaggcacctgggcgcgcggcatggaggggccgagcaaaacgcggcaagctgagaagtcgcggcgcaggaagtttggccggtgagagcgcgcgtcagggaggaacgagcagggaggagggagaaag

SEQ ID NO: 103682 - DNA, 1312 bp, Zea Mays
atgtatgtatctgcgcatttgccatttctggttacgctttcctctccggcctttccatcatcgccaccatttcgcacctcctccacaccggcaaacaacttcacgtcgcatgatctcgcgggagcgctcgaggatatgcaagtggcggccgctgcggcgtcaatgcgcggcaccgagacggttggcgcgaagtctgctgcgcggcggttgagccgcgtgctggtcgggcgccgccgccgggccgccgtgctgctcctcgcgctggcttacgcggctgcgatgctcatgctcaccattggcggcagcgaggggtctggatccagcggcgtggtggcgggtgtgctaaggcggggcgcgcaatcggcgccccccgggtcggtgtaccgcagccacctcgtgttcgaacggctgctcccggaaatgcgcgccttcgcctcccgcccgaacccgttagtgacatctcaatacaaaaagtttggaaagcaatgggaaccttgtatcagcaaggggttgatacactcagagctaccgccttcaaatggtttcctcatagttgaggcaaatggtggcttgaatcaacaacgcatttcaatttgtgatgctattgccgtggccaaaattcttaatgcaactcttgtgacaccagcatttcatttgaatagcgtttggcgtgattctagcaaatttggtgatatctttgacgaagatcacttcattgagtcacttagaaaatatgtaagggttgtaaaagatcttcctgaagatgtttttctgcgattcaaccataatatcagcataataccaaacatgagaaccaaagctttctcacccccaagttactacttacaacatgtgcttccaaagctgttggagctaggataatatggttgaccgaatgatcaagaggagttttttaagtggcgggaagacatggtagctttttcatgctgtaattatgatggtggctcgacggagaataatgcaatggaaaatgctcgcgaaaggagctggagagggaaattccaccgacctggtcgagtgataaatcctgaggctaaccgaaggaatgggagatgccctttgacacctttggaggttgcaatatttgttccttgcaatcttgctttttcctgaattgcttgagcccatgccatgtttgaggttctgctgtctactaatatacaattacatcacagacagagagcgcccggtcatattggcagatcatttctagattgtcttgtcttactccttgaatagaacaattatcctcacctaatttataagattggacttcatctctgataaaaaa

SEQ ID NO: 103683 - DNA, 1128 bp, Zea Mays
atgtatgtatctgcgcatttgccatttctggttacgctttcctctccggcctttccatcatcgccaccatttcgcacctcctccacaccggcaaacaacttcacgtcgcatgatctcgcgggagcgctcgaggatatgcaagtggcggccgctgcggcgtcaatgcgcggcaccgagacggttggcgcgaagtctgctgcgcggcggttgagccgcgtgctggtcgggcgccgccgccgggccgccgtgctgctcctcgcgctggcttacgcggctgcgatgctcatgctcaccattggcggcagcgaggggtctggatccagcggcgtggtggcgggtgtgctaaggcggggcgcgcaatcggcgccccccgggtcggtgtaccgcagccacctcgtgttcgaacggctgctcccggaaatgcgcgccttcgcctcccgcccgaacccgttagtgacatctcaatacaaaaagtttggaaagcaatgggaaccttgtatcagcaaggggttgatacactcagagctaccgccttcaaatggtttcctcatagttgaggcaaatggtggcttgaatcaacaacgcatttcaataatatggttgaccgaatgatcaagaggagttttttaagtggcgggaagtacgtctcggttcatcttcgctttgaagaggttttactaaagtttatcttgtgtggactaatattactacttttctcaagttgtgatgagttatatgtctaggacatggtagctttttcatgctgtaattatgatggtggctcgacggagaataatgcaatggaaaatgctcgcgaaaggagctggagagggaaattccaccgacctggtcgagtgataaatcctgaggctaaccgaaggaatgggagatgccctttgacacctttggaggttgcaatatttgttccttgcaatcttgctttttcctgaattgcttgagcccatgccatgtttgaggttctgctgtctactaatatacaattacatcacagacagagagcgcccggtcatattggcagatcatttctagattgtcttgtcttactccttgaatagaacaattatcctcacctaatttataagattggacttcatctctgataaaaaa

SEQ ID NO: 103684 - DNA, 5762 bp, Zea Mays
atgtatgtatctgcgcatttgccatttctggttacgctttcctctccggcctttccatcatcgccaccatttcgcacctcctccacaccggcaaacaacttcacgtcgcatgatctcgcgggagcgctcgaggatatgcaagtggcggccgctgcggcgtcaatgcgcggcaccgagacggttggcgcgaagtctgctgcgcggcggttgagccgcgtgctggtcgggcgccgccgccgggccgccgtgctgctcctcgcgctggcttacgcggctgcgatgctcatgctcaccattggcggcagcgaggggtctggatccagcggcgtggtggcgggtgtgctaaggcggggcgcgcaatcggcgccccccgggtcggtgtaccgcagccacctcgtgttcgaacggctgctcccggaaatgcgcgccttcgcctcccgcccgaacccgttagtgacatctcaatacaaaaagtttggaaagcaatgggaaccttgtatcagcaaggggttgatacactcagagctaccgccttcaaatggtttcctcatagttgaggcaaatggtggcttgaatcaacaacgcatttcaatttgtgatgctattgccgtggccaaaattcttaatgcaactcttgtgacaccagcatttcatttgaatagcgtttggcgtgattctagcaaatttggtgatatctttgacgaagatcacttcattgagtcacttagaaaatatgtaagggttgtaaaagatcttcctgaagatgtttttctgcgattcaaccataatatcagcataataccaaacatgagaaccaaagctttctcacccccaagttactacttacaacatgtgcttccaaagctgttggagctaggataatatggttgaccgaatgatcaagaggagttttttaagtggcgggaagacatggtagctttttcatgctgtaattatgatggtggctcgacggagaataatgcaatggaaaatgctcgcgaaaggagctggagagggaaattccaccgacctggtcgagtgataaatcctgaggctaaccgaaggaatgggagatgccctttgacacctttggaggttgcaatatttgttccttgcaatcttgctttttcctgaattgcttgagcccatgccatgtttgaggttctgctgtctactaatatacaattacatcacagacagagagcgcccggtcatattggcagatcatttctagattgtcttgtcttactccttgaatagaacaattatcctcacctaatttataagattggacttcatctctgataaaaaattaggggaactgtatttgcttcgttttataaggtatcatgtaacttatattttcttactagttcagtttatacaaggtcggaatgatgctgcgaggaatgggatttgacaacactacttccctttatgttgcatccggtaaaatatataacgctgaaaagtacatgactcctcttcgacggttgtttccatttctacaaacaaaacacgctctagttacacctgaggagcttgcacagttcaaggtacctttttccttgattattccagtcctcaaacaaattttagaaagtgtgcctcccttatcctgtttgtattgcatcaagaaatggaggccaggtatcaaaggataagttggccttcttacacactctgtagggacattcatcaagacttgcagcactggactatactatctgtcttcatagcgaagtgtttgtgatgacacaaggaagcaatttccctcactttctgatggggcacagacgttatatgtatggaggacatgcaaagacaataaaaccagataagcggaagctagttcaactctttgacaatccaaatatcaggtatattttcttttcttttttctcgaacaacacaggagagctgcacgtcatttcattaaggtagaagaaaggcaggagtgccaaaacaaatacaagaacacctgacgcacacccactgtacgtcacgcctcccatcctggaggcgctaaaacccaaacagaagagaaaaaagaaagacggccagggaaaggaacctcaacaggctcctaatcccccagactagacaccgtggccatgagctcttggatcttttttgctccagcgctgcaccagagactactttcatccctaacagccctgagaacttcctgaacattgggcctatgttgctcaaacaagcaagcattacgatgcttccacagttcccaagcgaccaaaatgataaaagaatttagacccttccgcatttccttaggagcagttgagattactgtccaccaccattttgaaaaacggaagcatctggcgccaaggcagtaaggcccaactgaagaaagatgcttgctcatacttgtctagcaaaaacacagctggccaagagatggtgaatgtcttcatcatcttgatcacagagcgggcacacatcagggtggggcaagcctctcttagcaaggcgatcaaccgtccaacaccggttatggaacaccagccaaatgaaaaacttacagcgaggaggtgcccagctcttccatattcttctccaaggtccaaatgtgatggtgccaatgaaataagcactatatgctgacttactcttgtgaatgccggattgtgttaatctccacacaaattggtccggcacatgttgctgcaaaaatagaccatctaccatgtgccaaacctttaggtactcgaatataacctggactgtgagcgctcctttgatgtcatccacccatctttggttttggagagcttgggctacctcttcctcttcctcttggctgtccgctttgagacagcactaaataagctgggtgtcacttcagatatggtatggccatccagccatctgtctgtccagaagagtgtttgctcaacgttcccaacaatgacgtccactgcaatgttgaagagggcctgagcattgcgagggacttgagttgggaggcctgcccaaaggctactaggaacagttttctcagccacaaccagcaaatccgcaacgctcagccaagcagatacagattatgaattccaagaccaccatattccagaggccgctgcaccctttcccaagagaccaaacagtgacctcctttagcttgttcctgaccctttcagagaaaactcctccttttgtcgatggcttttagaacccactttggtagatccatggcaatcaaaaggtaaataggagcagcagttaacactactcgaaccattaccaatctgcctgcacggttcattaaggaagctttccaccccggcaaaaattctgccaccttatcaattaatggcagcaagacctcctttgtgggtttgccaattagcccaagataagtacaaggaaaatccttgactgtacaggacttccgtgagacatatacaattattgcattcagaatattcatgaccaaaatgaatagcattggagacaaaggatctccctgtcttaaacccccgtctatgataaattgtctcccctggctcaccattcactagaacttgtgtagaggaagtagataacagcaaacataagagattaatccatcgctgtccaaacccaatatgcctaagaatttccaataaaaaggaccaggagaccgaatcaaaagctttagatatgtcaagtttaaggaggatgtgagcttctttcttcttattcttgtgcagagccttgaccgtttgttggacaaacataaaattatcatgaattctttgacctttcacaaaagcagtctggttggggctgatcaaaatcggtagaacaggggccaacctattggccattatttttgttactaatttagcaaagctatgcaccaagctgatatggcgaaaatctgtaacctgagaagcatcctgtttcttaggtaacaaggtaatgaaggccgaattcaggagacaaaatttgaagacatgacctcagataaatagcgtctaaagccatcaaaatatctcccttgatgatactctagcaagatttatagaagtggtcagtaaagccatctggccctggcgccttgtccattggcatgtcttttatagttgcccatagctccgcttccatgaaaggagcatctagttgagagagctcaatctgctgtatacccaattctgcaaggtcaacggtataaattggttcttcagctttccccagcaggttttcataaaagtctagcacaactgcttgcttgtcctcttgggaaactgctatctgatcaccaacattaagcttgggtatgaaattcttcttcctgaaccttgcttgctgatggaagaaggctgtattagcatcgccgtcttggagatagaggatacaggaccgcaagcgggcaatggttctttcaagggaggccaggccaaggcagtgtagtttaagcttcctccgcagccactcctgttcagagagatcccttgaatcacgctcaatttccagtcgatgtaagatttctttggccatttccatctgaactttgatgttgcccaccttcctctgaccccatttctgcagccctttactgagcctttgcaatttcagaaataggcgctcaactgcacaatttgaagacacaggagcttcctaattctgcttcaccgcatccaagaagcccggtattttggtccaaaaactttcaaaatggaaccgacgcttaccagcagtcttcactttgaggccaagtatgagggggtagtggtcagacactcctgctgtcatgctttgcagaattgactccggaaataaaccatcccaatcaacacagcaaaaggctctgtccagcctaaccaaagtacgggtctacgggactgccgctcattagaccaagtgtatttccttccaagcagggggatctccttgacctccatatcattcaagaagcgtctgaaacttgccatcatcgctgtatccaggtttgcattgtttttgtcagcagcctgatagatgagattaaagtcacctgctactagccaagggccactgtagatcgccctgatatccctgagttcctgcaggaaggacactttctcatcgtctccctgtggtccataaactccagtgaacttccggccttcttgctcagcaaattgaatttcgttcatcctcgtgaagtttcataaactgtcaatgaatgtggcttgaaattcgtccacatgtagccatttttgtgtccaagataacggtcatctgatgacccttatttcataaaggtttcgccaaacatgattgcctctgtgtttattctaatctaattacagtataccgaatcctttatgtgcatgctgacactgacatacattgaatcttctgtaactggttactttcttttagttctgaacacctgcaatgggcagaacacgaaagggtttatgatttttttttcgtaatcatcatctagttgtggagtatcaaagctaatcttgtacgtagatgggatcgattcaagcaccacatgcaggacatgcgtcggcacagtgagatgaaaggtttcgcattaaggaaaccacaggaatccatatacacccttcctatgcctgactgcatgtgtcagcaagctgaagcacgatcaagggacacggcaaggagctaggcatgttccacccttcttctaacttgtaagcaggcacattaagcaaaggaaaaataaatattggtttgagcgtagaagagaatatagagatttcaaattatatggcccttgatatgaatcccttcctcaa

SEQ ID NO: 103685 - DNA, 585 bp, Zea Mays
ggagaaggcgcaactattatcattcacagaacgaagacaatacaacttctcagattaacagagaactccaaaggtggtaggaaaggctcttctacagtaaaaatttgaggatcgtcgaccttttctctatttctgtcagtgttcctcccattttcagcaaaatcaacccgtaactgacgaccattgatctcgtaaccctgaaggttccgccgtgcacttagagcagtttcctcgtccttgtactcgcaaaagccataaccttttggcttgccagtctctttgtcaatcaccaacctgcaagatacgactgggccaacctcttcgcaaatctgcacgagctgctcctctgtcgcatcgtatggtatgttgccaacttggaaccaaagcctccgagcttccggatcacgccggtcagggaacgtaaccgagggtggcgaaggcgtaccgaagacgcagcgattctgagcgcccacgggagcagcggccatgctcagcggcggcacgggaggcgcccggccggctgcttggctgcttccgccgtgagatgccggtgggcgtggcccgtggatgtgtatgcctcgctcg

SEQ ID NO: 103686 - DNA, 1548 bp, Zea Mays
cagcctccgtatctcactctccatttcaaactccattctgtaaacagtattttgcatttatagtaatgcatttacaatacaaaacagtgtttgttttcaaactcaactctgtaaacagtacatttacaacgtagaacagtcagtgttttgcacgctgagatggcctctagtgtcccacaacaaaaaccaaatatttcctccgagcgaggaaaaaattacctgcagagaatccattggctgcccaccatcaggagtaacaagacttgcaccaaaaatgggtatactctagtctacaagtagaaagttatagaagaacaaaaaaatatcaaaccagtaagcttgtaatatttcatcttacagcaatgtctgtatatgtacaggagcaagttccgttattttcttttgccaacatcgatggcaacaatgacacttctgtaactaagacgtcgccgatgaagcaggaaaagaaaatgtctagcaaaaatgctagcaaagcctcttcaagccttccgtgccagcctccccaagttattccgctccatttaacctcatgttagtgactaaagatagatgaatagccatggccaagcaagcataacaaaaatgctagcaaagcctcttcaattatgtgaaaagaacaggtggtggttgcttgaagctggggctggaagcacctgctttatttgacgatgttaacatcttatccttagcagtggcattgcctacaacctgttcagaagaatccggctgctggttgctttcgctatggatgggtcgggcccaaatttttatcagcccctcgcggcatatagtgaggattgattcactagtgaattccaggccggataggggatctacatgtacccggtgtgcaacgagaggtgagagctttggcacatctcgcatccgtggagaaggctgtagaacaccggctggagggcacgcattatcccactgtgcagatgggcttccactactgaatgtcggtgagccaccagacggatggcgtagagggacagcaatctcttccaatgccagatcccagagaagcagttgggtatcctaagtgcaagcaaagtgaaaagatacaagagctgcaactcagcaagattggagtgggacagccaaaatacaatgaagctgtcacttcacatctaacacactatgttcgtcttcgctgatgcatgcactacaagttgtaagtcaagaacttagtatcttccatgcatatgggttatcgttacttttgtcagtatctcagaccgtgtccagcagctttttcatatgattatccaaaacactgttttacattgttttgcactgtagactgcactattcgctgagtagagtttgaatatgaagatgaggatggataagctgttggagatagtctcagcaaattctaacagatcgcagtgtactgcatgtcggcttgtgtaactcgtaggaccactaccatatcaagaaataaatatttaatactggtaaggtaacggcaagacaaatttgccaagcttattaagggggaaattgacaaacacttttagc

SEQ ID NO: 103687 - DNA, 1539 bp, Zea Mays
ggtccttctcagtctccctcgtctccctcagatctaagccaccgtcccttcccccagctccggcgatcaccggagtgcctccgccttggggcatgatggacctcctcatcgcgcagatcaccactgacctccgctcctcggacgcgctccggcagtcgtcggcgctgctgcaggccctgcagcagtgcgccgcggggcgggacgtctccgcgctcgcccgcaccgcggccaccgagatcctgtcggcgccctcctccgccgtctgcaagcgcctggcgctcgacctcctccgcgcgctcccgctgccgccggacctcctcgacccgctccttctctcctccctccgctccgatctctcctttccagaccccgacgtcgccgcctcctccatcgcctcgttcccatccctgccctcccaccttctcccctcgcttctctcctccgcccacgctgaaatcgctaatgcactctcctcgcccgctgagtcgctgcgcctcgcagctgtcacatctctgtcctcgctcctcccgcgcgatgacctaacgctcatgtgctccacaaacccctccctcatggcgcatgctaccacgtggtggggccgcctggccgagcttgcgctggactctgcagacgctgtttccgccggtgcgtttgaggctcttgcacggctgttccaggagctagaggggcgccgcatgagccggctagctggagacaagcttgttgatggagaaggtgcgcttgcagtgcgtgcccagtgggcggctgatgccattgatttcatttggtcaaggcgcaacatgctgattgcgcgctctatggtgatgcctgtggagagcttccgagttactgtgtaccctctagtgcatgcagcaaaaatggttgcttctggtgtggtaaacactctgcggcgagttgctaagccaggagacactacaattgctgatagcgtggagtcgagtgcggagaaattggtaggagtgtcagacatcgtctcacacttgctgccatttcttagttcacttgacccaccactggtgttcgaggttgggatcaatatgctggcgcttgcagatgtccctggaggcaagccagagtgggcatcagctgcaattattgcaatcctgacactatgggaccggcaagagttctcttcgatgagggagacaattgtaagggctgttgtaaccaatcttcatttgctggatcttggaatgcaggtctctctattcaaaagactgcttcagatggtgagaaacttgagagcagaatcagatcgaatgcatgctttggcatgtatttgtcggactgctctttgtgttgatctttttgcaaaggagagtgtccgaagaggtcagaagcctgttcctggaacagatgtgatatcgctctttgaagatgtgagggtgaaggaagatctaaacagcgtaacaagcaaaaacttgttcagagaagagctagtggcttccctagtcgaaagttgtttccagctatctcttccactaccagagttgaagaattctgggacagagagcagag

SEQ ID NO: 103688 - DNA, 1892 bp, Zea Mays
attcaacaccgattcatctgctactacatcaaataggatacaagatgtgcaggctgttctaatttgcgctcagcggttgggagcaagaaatgcaagagcaggccaacttctcactaaagaactggaagagtttagggcaagtacttcagctgattctatgaccaagcatcaatcacgttatgtgttgcaagtaataaaatacgtaacaaaccatcctgacaacaggtgggttggtgtaggtgatgctacaggggattatccatttagtcaccacaagcttaccgttcaattttcagaggcgtctgctgcccaagataggaaattggagggattagtccataaggccatccgggagctttggaggccgaatcccagtcaattaattctcctacaaacaaggggaattggtgctttgcataaagagcttccaaaagcgtgtgctttgactggcagcagtgatccgtgctacatcgaagcatatcatttggcagatccaactgatggcagaattaccctacatctaaagattttaaatttgactgagctggaactcaacagggtggacatccgtgttggcctgtctggagcactgtattatatggatggtttctctcgcactgttcgtcaccttcggaatcttgtttcccaggatccagtccaaagtagtgtgactgttggagtttcacattttgagagatgctcgctctgggttcaagttttgtattacccgttttatggaagtagtggatcaacagactatgaaggagattatgcagaagaggattcacagatgatgaggcagaagcgctcacatcggcctgaacttggggaaccggttgttttgcggtgccaaccatacaagtttcctctcgctgagctcctcctaccattagagtgttctccagttgagtatttccggctatggcctagcctaccagccatggtggagtgcactggcacatacacatatgaaggcagtggtttcaaggccaccgctgctcagcagtatgacagctctcccttcctcagtggattgaagtcgatttcttctaagcccttccatcaagtctgctcacatttcatccggacagtagctggattccagcaaagacatggtttggtggatttgtgggcatgatgatatttggggcaagtgaagtcagccggaatgttgatttgggtgatgagaccaccacaatgatctgcaaattcgtcatgcgcgcatccgatgaatccatcacgagagagatcaaatccgacctccagggctggctggatgatatcaccgacggcgctgtggaatacatgcctgaggatgaggtgaagagtgtggccgccgagcagctgaagatctccatggagaggattgccctgctcaaggcagccaggccaaaggtcccacccgcaaagaccgatcaagaggaggaagaggagcgaaagcagagcgaggaactagatgggtttggaaaccccaagggcccctcgacgctctccaagctcaccgcggaggaggctgagcaccgcgctctccaggctgccgtgcttcaggagtggcaccagctatgcaaagagagagccatgaaagcgcagtgaggtcgatttggaccgtgtggatcttacgcgcatgtataattttgtatttttccttcgtctcccattctttgcgtgtctatactgctggtttcactcactgtataccgtcgccgatttgttcattgtattctcaaatacttgtgcacgaaaaaacctgttttgtaacatactactgttagggcgtttttaagcttcggtgtgaagatcgattgtacaagagaatccaaatgtcattgttgccttcccagttttatgaaaatgcattctgtaattgaagaattctccccaaaatgccacga

SEQ ID NO: 103689 - DNA, 1905 bp, Zea Mays
attcaacaccgattcatctgctactacatcaaataggatacaagatgtgcaggctgttctaatttgcgctcagcggttgggagcaagaaatgcaagagcaggccaacttctcactaaagaactggaagagtttagggcaagtacttcagctgattctatgaccaagcatcaatcacgttatgtgttgcaagtaataaaatacgtaacaaaccatcctgacaacaggtgggttggtgtaggtgatgctacaggggattatccatttagtcaccacaagcttaccgttcaattttcagaggcgtctgctgcccaagataggaaattggagggattagtccataaggccatccgggagctttggaggccgaatcccagtcaattaattctcctacaaacaaggggaattggtgctttgcataaagagcttccaaaagcgtgtgctttgactggcagcagtgatccgtgctacatcgaagcatatcatttggcagatccaactgatggcagaattaccctacatctaaagattttaaatttgactgagctggaactcaacagggtggacatccgtgttggcctgtctggagcactgtattatatggatggtttctctcgcactgttcgtcaccttcggaatcttgtttcccaggatccagtccaaagtagtgtgactgttggagtttcacattttgagagatgctcgctctgggttcaagttttgtattacccgttttatggaagtagtggatcaacagactatgaaggagattatgcagaagaggattcacagatgatgaggcagaagcgctcacatcggcctgaacttggggaaccggttgttttgcggtgccaaccatacaagtttcctctcgctgagctcctcctaccattagagtgttctccagttgagtatttccggctatggcctagcctaccagccatggtggagtgcactggcacatacacatatgaaggcagtggtttcaaggccaccgctgctcagcagtatgacagctctcccttcctcagtggattgaagtcgatttcttctaagcccttccatcaagtctgctcacatttcatccggacagtagctggattccagttatgttatgcagcaaagacatggtttggtggatttgtgggcatgatgatatttggggcaagtgaagtcagccggaatgttgatttgggtgatgagaccaccacaatgatctgcaaattcgtcatgcgcgcatccgatgaatccatcacgagagagatcaaatccgacctccagggctggctggatgatatcaccgacggcgctgtggaatacatgcctgaggatgaggtgaagagtgtggccgccgagcagctgaagatctccatggagaggattgccctgctcaaggcagccaggccaaaggtcccacccgcaaagaccgatcaagaggaggaagaggagcgaaagcagagcgaggaactagatgggtttggaaaccccaagggcccctcgacgctctccaagctcaccgcggaggaggctgagcaccgcgctctccaggctgccgtgcttcaggagtggcaccagctatgcaaagagagagccatgaaagcgcagtgaggtcgatttggaccgtgtggatcttacgcgcatgtataattttgtatttttccttcgtctcccattctttgcgtgtctatactgctggtttcactcactgtataccgtcgccgatttgttcattgtattctcaaatacttgtgcacgaaaaaacctgttttgtaacatactactgttagggcgtttttaagcttcggtgtgaagatcgattgtacaagagaatccaaatgtcattgttgccttcccagttttatgaaaatgcattctgtaattgaagaattctccccaaaatgccacga

SEQ ID NO: 103690 - DNA, 2801 bp, Zea Mays
ctttcttctccctcgttcccgagtccgaatctgggtccagcggagacaaagaggagctggccgcgtcgtatcgactcctgccgccgaaaggccgagcccgagcccgtgtcccggtgcccgttcccgcaaccctaatcccctaccaccgtcggctctcgccggcgaagaagagggagccgcgcggcgtcgccagggagcacgcgccccctcccttcccggctccctccgcgccgtggggaggcgcgtccacccggatccgccctcaccgcgaggcagaggggaggagagggagccaggtccggcgcacccgctgtcgtccgcgccgaagagcgttaagagtctccccacaggcttggctgagggaaacttgtgctctgcgcatcttggacactacttcaccatttaccaagtcttgagttattgctccggtgccagacaaaaaaccaaactctctggccgaacacagtgatggcgcaagcctgtaagaagaggagaggagtttatataagcagtgaatcaggagactctgatacagattctgatgttgagggaagcaaacactctcaaaagtctggggtgacatcaatttctacatgcgagcaccagtcatcttataacctcaaggctgcaagtatgaaaagtagcaggatgataaggctgtgtggaaatatcgtaaggaagctcatcgatcacaaatgtggctggcttttcaaagaacctgttgatccagatctatatgggattccagactactttgatgttatccgcagtccaatggatttgggcactattaagaataaactcacaaaaaagaaatatgtaagcattgaggagtttgcagcagatgtgaggctaacattttcaaatgctatgaagtataatcctccaggcaatgatgtgcatatttttgctaaagaattgaatgaaatgtttgattcagaatgggaatcagtagaaaggaaatttagaggccgaaaccttggtcaagaccagcagacaatgaaggccataaaagttcgagctatgatggattcaaagtctacagttgctagagggccggttgcatgctcaaaccctaaaactttggttgctagaggtccagtagcttgctcaaattcgattgcaaagaagacactgacagatgcattatcctccaaagtaaaaatcaaattttccgtgcgcagctctgcgcatacctcttccaaagatatactcgttcaagcagctggtagcaaagaggggtccttaaatcactctgtccctactggcaacaaagaggcatcttcaaattgtactattcctatcgctaaggaggctaaaatatcaagggcacgagaaattgagcgctgctctggttcaattggaaaacaatcatggtcttgcaatgacacttctacttcacctctcgcttcctctgtgcaaggtgaggaaagttaccttcatgatgaacctttgtcaccaagcagggctcttcgtgcagcaatgctcaggagtcgttttgctgggactatagtgaaggctcaacagaaggcacttctagatcatgggaagaatatagaccctgtgaaattgcaattggaaaaggagaggctggaaaagaggcagcaagaagagaaagcaaggatcgaggcccaggtgaaggctgctgaagcagctgcacaacaaaagtttgaggaagaaatgaggatgaagagaaagcaggaaagggaggcagcacgcctggcactacgcatgatgaagaagactgttgatattgacaacagtgacttcctaaaggagctggagaacttcagcaaaacatggcaggcaaatccacctggcaaattaatcgtggattttatcagtggggacttgccaccggggttagggagtccgctggagaggctcggcctcttcatgaaggaagatttcgaggatgaggtagaacaggaaatggaggacagagtgtcaccctcaatggatgttgacatcaggaaagatttccaggaagacttaggacatgaaatgcaggacagtgcatcacccgtgactgtcattggcacaaagaatgacgtacagggagtggcaggacatgaaatggaggacagcggatcaccagccacagtcattgacacgaagaaagaagagacagaacatgagatggtggacagcgtatcacctttgatggatgttgacacggaggaaggggagatcagctgctgacggtagctacacctctcttcacccgcataatttattgaggcagacatccttgcttggttgttagattaggcaatttcataagcagagtgatgcagaaacattagttttatctgctttcatcgtagaaccatgtggtgtggagaacatgtctcagacgaaatgacgagtggttttggatttgctgcggattttaattttcgtggtcttgtcagtctggcaagagtatgatgactctgtatgttgaatttgacctcccccgctggatgacatgtataaaaggatgagaaaaaaaggatagtttggagctagtgtatgttgttggagtttatggtggagccagatttggtgagcgtgtcgtggacgtaaatgtaggtatagctatatacttgaaatattgataagagtgtttggttcaaaggatcaattcattccagttaaacatcatgagcttgttaatgggtgtttggttcgagagttcgttaatgggtgtttggtttgaagaataagctagtctactatttttttatttggttgttgaatgtaattttttgacctgtcatctcatttcttacaagtgaatgattatttctaagtctatg

SEQ ID NO: 103691 - DNA, 97 bp, Zea Mays
cttgttgtgaacttgagccgtgatgacgcaaagctggcatgtgctgaatatttaaaaataataccttggagtcggccgctcggactactaacaaatc

SEQ ID NO: 103692 - DNA, 1303 bp, Zea Mays
tttatggcaactaattcttagttatatgcagcatcacacatatcaacaattttttgtgtcctgaccaggaacaatagatatcataccaaggagaaaaagtatgataaaacaacttgaatcgttaagtagaggactaagaattactgaagggggcaagaggtcggagccacccattcaagctgctaagtttgcatcagaggtgggaatcacattgaggcagcacattccaatatttcaccactagaaggagtacaagaggaaagagaatgaacctacaataaaaaactatattggaaaagttactgctcaattcaccatggacaatgatagcaaggcagtggaagatgcttgtctagatatgctaaaggttggacaacgccaaatgaggtatagactaaaacaaaagtatttcaatgggatacctgctaatcaagtgaagactacatcgccaatttcaagcatgtctgatgaggactggagaaagttggtggagaagtggtctaccccaaaacacaaggatagttgtatgaagaataaacttaatcgtgaaaaagtatagtatcaacaatgcacaggatcccaatcatatattgcaaaagcttatttactgaaacaagagaaatataaggatgctgaaccgagtgcaatagatcttttcaaggacatgcattgcagcaagaagaaaggtttttctgaaaatgtaaagaatgcaattgttgacatggaagcaatggtgataacaccagttgaggatggacaacaatagaagtctcctatggaagttgtttctgaagtgctagggggctccagcttatttctacagaatgctggtctgcaagataactccaagaaaagatccacaacaactgtttctgcaaaggttcaagaacttcagaatcaattggagtctaagaggctagaaaaagatggacttcgggaagaagtagaaaccttaaaggctcaggcacaggcctcaaaggagaccatggacaatatgaagagatcgatggaagaaaataatagtctcctccatcaactgttgagcttcaatcaaagccaagcgcccccatcttaaggctgctatagtatcatgttatattagttctagattcaggttttataaatttggaatatgtttaaactttcatactttgagttgaagttataggatttcctttgtattttaagttacatgatctacaatcatatgatttgaagttataaaagtatctcttgtatgaattgtgtgaatgttgaactaaatagttcaatgttttggttattagcatgtgatttcataata

SEQ ID NO: 103693 - DNA, 1871 bp, Zea Mays
gcccaaaattttcgtaggctgtccaccgcaccaccaccctgcgcgccgagcgcaccccgatccagatccacccatcctccctccggtctccggcgggcgccctcctccacgtcctcacgcgcctccggacgccagtgcgcgcgcagtgagcatcaacatcaacccgcctcttctctcgtcggaccggcgcgcgccaggtggcggcggaggcggcaggcatgaagcgggtgtcgtcgcacgtctcgctcgcctccgaggcggagatcaacctcgacctgtcgcgcctcgtcatcgacaagcccaggttcacgctggagcggaagcgctccttcgacgagcagtcgtggagcgagctctcccaccgccagaacgacggcttcgacagcgtgcttcagtcgccggcattcccgtccggcggcttcgactcgcccttctccgtcggcacgcacttcggcggcccgcacccgctcgtcaacgaggcctgggaggcgctcaggaaatcggtcgtctacttccgggaacagcccgtcggcaccattgctgccgtcgatcatgcgtcggaggaagtgctcaactatgatcaggtttttgtgagggatttcgttccgagcgcattggcttttctaatgaacaatgagactgacatagtgaagaattttctcttgaaaactcttcaccttcagagctctgagaaaatggtagaccgattcaagcttggagcaggagcgatgccagcaagtttcaaggtggaccgtaataaaaacagaaacactgaaaccttagtcgctgattttggtgagagtgcaatcggtagggtggcaccggttgactctggattttggtggatcattctccttcgggcatatacaaagtacaccggagatgttagtttgtcagaatcacctgaatgccagaagtgcatgaggttgatactgaatctctgcttatctgaaggatttgatacttttccaactctgctctgcacagatggctgctcaatgattgatcgtcgaatgggtatatatggttatcccattgagattcaagccctattctatatggcattaagatgtgctctccaaatgctcaagccagagggcgaagggaaggatttcatagagaagatagggcaacgactacatgcactaacctaccacatgaggaattacttctggctagattttcaccagctgaataacatatacagatacaaaacagaagagtattcccacactgctgtgaacaagttcaatgtaattccagattccattcctgattgggtgtttgatttcatgccatgtcgaggaggctactttcttggcaacgtcagccctgctatgatggatttccggtggtttgcccttggcaattgcattgccattgtatcatctctagccaccccagaacagtcagttgctataatggatctgatcgaggaaaagtgggatgagctagttggtgagatgcctctgaagatatgctatcctgctctcgagaatcatgagtggagaattattactggatgtgaccccaaaaacacccggtggagttaccacaatggaggatcttggccagttcttctgtggctgctgacagcagcctgcataaagactggtcggccacaaatggcaaaacgtgccattgagctcgcagagtcaaggctgctcaaggacggctggcccgagtattacgatggcaagctaggaagattcgttggcaagcaggccaggaagttccagacctggtccattgccggttacctcgtcgcccgcatgatgctggaggacccatcgacactgatgatgatctccatggaggaggaccgccctgtgaagccgaccatgcggcggtcagcatcatggaatgcctga

SEQ ID NO: 103694 - DNA, 2433 bp, Zea Mays
gcccaaaattttcgtaggctgtccaccgcaccaccaccctgcgcgccgagcgcaccccgatccagatccacccatcctccctccggtctccggcgggcgccctcctccacgtcctcacgcgcctccggacgccagtgcgcgcgcagtgagcatcaacatcaacccgcctcttctctcgtcggtaaggacgacggacggacagacggacagacctgctgctcttcattttcattctatttcggtttcggaggcggaacggcatgaatctgctgtattgttcgttggccactaccacgaaccgtccctgaactccagaaatccctcctccgtaggaccggcgcgcgccaggtggcggcggaggcggcaggcatgaagcgggtgtcgtcgcacgtctcgctcgcctccgaggcggagatcaacctcgacctgtcgcgcctcgtcatcgacaagcccaggttcacgctggagcggaagcgctccttcgacgagcagtcgtggagcgagctctcccaccgccagaacgacggcttcgacagcgtgcttcagtcgccggcattcccgtccggcggcttcgactcgcccttctccgtcggcacgcacttcggcggcccgcacccgctcgtcaacgaggcctgggaggcgctcaggaaatcggtcgtctacttccgggaacagcccgtcggcaccattgctgccgtcgatcatgcgtcggaggaagtgctcaactatgatcaggtttttgtgagggatttcgttccgagcgcattggcttttctaatgaacaatgagactgacatagtgaagaattttctcttgaaaactcttcaccttcagagctctgagaaaatggtagaccgattcaagcttggagcaggagcgatgccagcaagtttcaaggtggaccgtaataaaaacagaaacactgaaaccttagtcgctgattttggtgagagtgcaatcggtagggtggcaccggttgactctggattttggtggatcattctccttcgggcatatacaaagtacaccggagatgttagtttgtcagaatcacctgaatgccagaagtgcatgaggttgatactgaatctctgcttatctgaaggatttgatacttttccaactctgctctgcacagatggctgctcaatgattgatcgtcgaatgggtatatatggttatcccattgagattcaagccctattctatatggcattaagatgtgctctccaaatgctcaagccagagggcgaagggaaggatttcatagagaagatagggcaacgactacatgcactaacctaccacatgaggaattacttctggctagattttcaccagctgaataacatatacagatacaaaacagaagagtattcccacactgctgtgaacaagttcaatgtaattccagattccattcctgattgggtgtttgatttcatgccatgtcgaggaggctactttcttggcaacgtcagccctgctatgatggatttccggtggtttgcccttggcaattgcattgccattgtatcatctctagccaccccagaacagtcagttgctataatggatctgatcgaggaaaagtgggatgagctagttggtgagatgcctctgaagatatgctatcctgctctcgagaatcatgagtggagaattattactggatgtgaccccaaaaacacccggtggagttaccacaatggaggatcttggccagttcttctgtggctgctgacagcagcctgcataaagactggtcggccacaaatggcaaaacgtgccattgagctcgcagagtcaaggctgctcaaggacggctggcccgagtattacgatggcaagctaggaagattcgttggcaagcaggccaggaagttccagacctggtccattgccggttacctcgtcgcccgcatgatgctggaggacccatcgacactgatgatgatctccatggaggaggaccgccctgtgaagccgaccatgcggcggtcagcatcatggaatgcctgaatgcgtggatagttgtttctgaaccaaggaaattcagaatcagctgttatacggatttgtgatttgtttggaccacaagagtgcagcctgcagcgttggtgtgatttgttgggaccacaaagttcaacattgattatagttggactctgtcaattaggacagagtttgtataccatagaggatcataggagttgcacaagattttgccatgcccttttggtttgtttcagaacaatactcaggatactgttcagttgaaaccttgattttggaataacaaatcactgtttatgcatacatttctcttcggctttaaaggtatctcagataattctggaatgccactttcttttttttaaagaaataacaaatcactgtttacacgcagcagaacatgtggattggtactat

SEQ ID NO: 103695 - DNA, 757 bp, Zea Mays
cagggacagtgcttcactgcttattgacttcttcaggagttgagatttagctcaattacaaagtttatttaatcattgtgatgtacctagttgcaactaaagccaaactcagaactaaagcacagcataaaaaaattgtgttcacactatttttatgtgcagttcttctgtggctgctgacagcagcctgcataaagactggtcggccacaaatggcaaaacgtgccattgagctcgcagagtcaaggctgctcaaggacggctggcccgagtattacgatggcaagctaggaagattcgttggcaagcaggccaggaagttccagacctggtccattgccggttacctcgtcgcccgcatgatgctggaggacccatcgacactgatgatgatctccatggaggaggaccgccctgtgaagccgaccatgcggcggtcagcatcatggaatgcctgaatgcgtggatagttgtttctgaaccaaggaaattcagaatcagctgttatacggatttgtgatttgtttggaccacaagagtgcagcctgcagcgttggtgtgatttgttgggaccacaaagttcaacattgattatagttggactctgtcaattaggacagagtttgtataccatagaggatcataggagttgcacaagattttgccatgcccttttggtttgtttcagaacaatactcaggatactgttcagttgaaaccttgattttggaataacaaatcactgtttatgcataca

SEQ ID NO: 103696 - DNA, 486 bp, Zea Mays
cagcgatttaattagcagtagtaacggtaagaatcaatgggcactaaatatccatccaccaaagaaccatatatatatacatcgaattcacgcaccatgtgcatataccaaaaacaaaaagaaagaagagtccaagcacaagcactactactatcatcatcatctatggcttcatcatcctgctcccccgtcttcaagatccttatcgtcgtcgctctcgtcgctgctgccctttcgtcctacggagcggcggagtacatctgcatccagccgtgctgggagctgccgcactgcgacgcctggtgcagggacgccaagttcgccaagggcggcgactgcgtcgacttcggcagcggcctcacctgctgctgccgtcggtagctagggtagctgcgcgcatgcacagatgcaggtgccagagtgccagtggagaatggagcgtcggtctctctctcgtctcgatcgtgtaagataaatatatggcag

SEQ ID NO: 103697 - DNA, 3283 bp, Zea Mays
ccttttcttgctctcctttgtagagccaggtgctgataacgtgttccgtcccccagatccgatccccctccccttccctccctcgaggaggccaggccagatccacgggcctcgcagatctggcggccatggagaaggcgtgcacattgctagtgtacttcgataagggctcgccgtccatggcgaacgagatcaaggcggagctcgagtccggcgacggacccgccaaggccgacgccatgcgccgcgccatcttgctcctcctcaacggcgagtccctaccgcacctcttcatcaccgtcgtccgctacgtgcagtcctgcgacgaccacgctgtccagaagctgctcctcctctacctcgagaccgtcgacaagcgcaacgctgccacgggaaagatcctcccggagatgatcctcatctgccaaaatctccgcaacaacctgcagagccctaacgagtacatccgcggcgtcacgctgcggttcctctgccggctcaccgagcccgagctgctcgagccgctcgtcccctccatcctcgccaacctcgagcaccgacaccacttcgtgcgccgccacgcgctctccgctatctcggccatctacagcctccagcagggggaccagctcatccccgacgcgccggagctcgtcgagcgcgcgcttgcctccgaacaggaccccgccgcgcgcaggaacgcgttcctcatgctcttggctgctgggcaggaccgcgccgtgggctacctcttcaacaacgccgaccgcgtcgcggagtggcccgatctgctgcagatggccgccgtcgacctcatccgcaaggtctgccgctccaagggccgtgccgacaagggcaggtatatcagggtcatcatctccctcctctcagcgtccagcgcggctgtcgtgtacgagggcgcgggggcgctcgtgtccctctcctctgcgcccacggctgtgcgggccgccgccaatacatactgccagctgctatcctcgcagagcgacaacaatgtgaagctcatcgtcctggaccgcctgcacgagctatgctcctctcacagggaggtgatggtggatatggtcatggatgtgctgcgcgcgctcgctagccccaatgtggatgtcaggagaaaggttctggatttagtcctggatctactcaccctgagaaatgttgaggaggtggtgctctacctcaagaaggaggtggttaagacacaggctgctgaggtgaagggtgatgaataccgccagatgctagtgcaggccatccataactgtgccaagaagtacccagaggtggctgcattggttgtacaccttctcatggacttccttggggatcctaatgttgctgcagcactcgatgttgttctatttgtgcgcgagattatagagactaatcccaagcttcgtgtgtccatgatccagaggctgatcgacatattctatcagatccgggcatctcatgtctgctcttgttctctctggatccttggagagtattccctctctctgcctgaggttgagagtgccatttctaccatcaagcaatgccttggggatcttccattctacactgtctctgaggaacgtgagacaactgattcatctaagccatctcagccagtggtgagctctgtcaccgtgtcttcgaggaggcctgctgttctagcagatggaacttatgccacacagagtgctgccactgagattgctgtttcagctcctgcttcagctcttgggtccttggcttccacccagaatctcagatctctcattctgtctggtgatttcttcttggctgctgttgttgcctgtagcctgaccaagcttgtgttaaggctggaggagattcagccagcaaaggttgaagtaaacaaggttagtactgaagccctgttgatcatggtgtccatcttgcagttgggacagtcatcttatctcccacaccctattgacaatgactcatatgatcggattgttctctgtgtgaggcttctttgcaatactggtgatgatgttaggaaggtctggttacagtcttgccgccagagctttgtcaacatgcttgctgagaagcaatttagggagactgaggagatgaaggccaaggcacagataacttatgcccaaccagacgatcttattgatttctatcacctaaagagcaggaagggaatgagtcagcttgagctggaagatgcagttcaagatgatttgaaggctgcaaccggccaatttactaaggatgcagatgatactgacaagctaaaccgtattcttcagttgacaggattcagtgatcctgtgtatgccgaagcatttgtaactgttcatcattatgatattgtacttgatgttacagtcgtaaaccgaacgaaagaaacactccaaaacttatgcttggaattagcaacaatgggtgacctaaaacttgttgaccgtcctcaaaactatacattggctcctgagtcaagcaagcaaattcgagccaatatcaaggtctcatcaacggagactggagtcatatttggtaacatagtttatgaaacatcgaacgtgatggaacgatctgtggttgtcctaaatgacattcacattgatattatggattacatctcacctgctacatgtgctgatgttgcattccggaacatgtgggcagaatttgagtgggaaaataaggtggcggtgaatactgtgatccaggatgagaaggaattcttgaatcatattattaagtccacaaacatgaagtgtctaacaccaccatctgcgctcgatggagaatgtgggttccttgctgcaaatctctatgccaagagtgtgtttggcgaggacgctctggtgaatatcagtgttgagaagcaggccgatggcaagttgactggctacatcaggataagaagcaagacccaaggaattgcgctcagcttaggagacaagatcaccctaaaacagaagggaggcaacagctagctcagctacgagtcgttgatcactgtggtctgtggcaggcacatatcacccccgttaactcacctgaacacaaaatttgctagttagccaccaattttcagggttgcctcacctgacaatttgctggttgcccaccaatttttaggatagccaattattttggatgcgctgttgataatagaaaataaggatagggcactagtctaagttgtagtatttttgggtcatttcatgtgccctacacctttttgacaaaatattataaaatagaacactattaaagctgttttttatga

SEQ ID NO: 103698 - DNA, 678 bp, Zea Mays
ctcgtctcgtcaagcgcacctattcagcccatcaatgtatctacttgctcgttggtcgcactcgtctcgtcaagcggctctgttgtccatttgttcatgttgtcgctgttcggacctgtcattataactcggtcgcgcggcaagttaacaacctccttcgctaagctgctgctcgcggatggaccggaaatcacttcggcgatctctgcaaaaccatccactcccctttgtcgaacttcggccttatcacctcggcgcgcaacaactatcgtagcgtggggattcagctgcgtcgctttttcggaacgcagatcgcttggtggtgaaggcagtgaagtactaggttggtgctcgccaaatgttcgatggaacgtctaatctgataatcgtcgctgattgtggggattttcgaagttatttgattacggtacgtgaattaaccacgtgatgcgaagaatcagaactgagtcgaccacaagatggtgctgatgaacggaactgaagatagacagacgtaacaagtattagaacaaaagatggtcgtcaagtgatcgacgtctaacaaacactaacgtagtgttattccaggcaagccccggtgcatgcaacccctttccttgtatttttaaatgatttttacacacttaaatcgtgttgggcaatggtgggatcttactg

SEQ ID NO: 103699 - DNA, 3496 bp, Zea Mays
ccgttcttctccaaggcttcaaactcgcagagattcgcagtctgcactacgtctccttgacctcagcagcggccacacagccacgcgcaccgagagaagagagattccccacggcatggcggcggcggacggggacgccttgatcgcggcgtttgcggtgtccaagggcggcatcgtgctcaagcacattttcctcaacgcaccaccgccggaggcgatgtgcgggtccggcggaagagaagtggagagtgatgaggaggacccgccggtgatggtgggtcggcaccccgactgccacgtgctcgtcgaccaccccagcgtcagccgcttccacctcgagctacggtgccgacgtcgacagagtctcatcaccgtcaccgacctccactccgtgcacgggacatgggtttcggggcgacggatcccacccaacacgccagtggatctcgctaccggtgacacgctgcggctcggggcctctaagagggagtataagctgctctggctgtcgcttcgtgaggcatttgagatggacgatctgatgtatatgccatcgctgcctgaggaggacaaagaggagccatatgttaaggaaccaagcagcaagttattgcctgggcacagggattcagtgaacatggagacccatcaggatacaagtgaacaaattgtgtctgaagacattgcatttccagccaaagtggccccctcagcacctccattgtctgagttccttcaacctttttttgtggaagagcattcactttcccaatttcatgagaaaagaaacggagtgacagaggaaaagttggtcgacaagaatcaaatttcagaatcttttggttcgttgatcatacaggaaatgccaggcacactgacaaatgctggaaaatcaatccagtcaggcgagcaggaggatgcctcaaacaaagtgtccaagaggtccaagttgaagtcagtcaaatcacttcgtgttgacacaggcaggagcagcgagagaagcagcactctgagccatagctttcagaagggagaccaaaatgatattgttgtatgttctcagagctgtgggacagaatgtgcggtatgtatagctttatttggtatttctgaaattgaaaaggctgaagaaaaggaagagttgattgctgaagataacgttgacatgaatcccccggccagcatgatcatggagggaaatatgaacgagagaaaacctgataattatatcccacaagatccaattggtgcaaagctgcagaagaaactaggcttattagattctgctctccctttgcatttcaaagatgatgtgttcgccgacaaggaaattccacaatggaatgttgctagtgttcatacagaatctgagcttctttcagaatatcttataataccagaagtgaagcacgatgacttgaaccatcttaacttggaggaaggtctctcaaaaagcgagaatataaacccaaataagattactgagggccctgggaactgtcagctcgaagggaccattcgtgggaatctatttgacaatttggatactgatggaattgaagaaggtgaagagatctgcccactggacaaggatgaaatcacccccaatggatcaggtaacataataatggagaggagcaatatagttttaaagcctaccatttcccaacagttgatggattctatttcccctctcaatttagatcatggcgacttttctgaaaatgagaactccatgctgaacactggagatcagatgaaattaaatgaacctgtctctgagaatcttaacccattaattccaactgatgaaaaatatctgaagagccaaacggaggagtgtatgcccatttcatatctggaattcaaagatgatatccttctggatagggaaaactcagtgctggctccgagaaagtacgaggctatgtcccctgtgaggcaggaaaatctgttctcagacaaagagaacgtgactcctgcctctaaggtgaagaccgttgttaggggagttcttggtacaaggatggataattcagtgtcagcagcaaatgcttcaaataagaataaagttcttgggtcaagggtcgataattcagtgtcaacagagaatagctcaaataagaagcaatgtgaattatcatcgaagtccaaaaaagtccacacagtagattttgatgttttctattcggataaggagaacttgactcctatatcttcaggaggcatgaaagcaaggaagtgttttcccaaggacctctcagtcgacttagaccaagatcaggaagcattctgctcagacaaggagaacttgacaccactatcttctgcagctcggaaaacaagggacatgtctggaaaccttacacgagttgaaagtgcggtcacaaagaaaagggttgttggtaggctccccttccagactcttgtgtcaaattctcctttgagacctgctagctcgcatgattgtacctgtgctgttgctagaccagctggcgttgctgctggtgacttggcgatcaagttagaagataaattgaacgatctctcatgtaatggccacgaatcaggtagtgctggagaaggcatgaaaacctggaccatggtggctaatacagacagtcttcttgatgacgagtctaggaaggctattatgctgctaaaaggcttaaaaggaactcgcctgttcataccaaggattgtgatcagggagttggattccatgaagcagcgggagggcctgttcagacggtcaacgaaggcgacctccatcctgcaatggatcgaggagtgcatggcaagggagagctggtggatccacgtccagagctcggccgacatgttcccggtagcaccaaccccgcccgcgaccccttcagcgcagcgcatcgacgaggagatcgagatcagctccggctccttcaacccgatgatggcgttgttcggccctcgaagctccgccgcgctcgcggatatgatatctcccagacccgaggaccgcgtcctcgactgcgccctcctcgtcagtagggtccggagcaacgagaaggtcgtggtgctgtcaaacagcgtcacgctcaagatcaaagccatggcagaggttagtacggtaaccacccaaacccaaccctgcctgcttgctgtgtgcgttcgaactgaacctggttgtgttgcgttgcccgcggcgcagggcctgccatgcgagggagccaaggagttccgcgagtccctcgtggacccgtcctccaggcggttcatgtgggcggccagcgccccacgggggtcggcctggtcctgcctggacgcgtccgcgctggcggagaactactacaacagccgccaccacgctatgaagcggagggttctggtggcggcgaggccctccgagtccgaggccgccaagggcctgaagctgatcctgcgtcacaattccctgtacgcgcaggccacggacgccgtcaacaagacgccgctggtatcgctggccgcggtgtga

SEQ ID NO: 103700 - DNA, 3513 bp, Zea Mays
cgcagagattcgcagtctgcactacgtctccttgacctcagcagcggccacacagccacgcgcaccgagagaagagagattccccacggcatggcggcggcggacggggacgccttgatcgcggcgtttgcggtgtccaagggcggcatcgtgctcaagcacattttcctcaacgcaccaccgccggaggcgatgtgcgggtccggcggaagagaagtggagagtgatgaggaggacccgccggtgatggtgggtcggcaccccgactgccacgtgctcgtcgaccaccccagcgtcagccgcttccacctcgagctacggtgccgacgtcgacagagtctcatcaccgtcaccgacctccactccgtgcacgggacatgggtttcggggcgacggatcccacccaacacgccagtggatctcgctaccggtgacacgctgcggctcggggcctctaagagggagtataagctgctctggctgtcgcttcgtgaggcatttgagatggacgatctgatgtatatgccatcgctgcctgaggaggacaaagaggagccatatgttaaggaaccaagcagcaagttattgcctgggcacagggattcagtgaacatggagacccatcaggatacaagtgaacaaattgtgtctgaagacattgcatttccagccaaagtggccccctcagcacctccattgtctgagttccttcaacctttttttgtggaagagcattcactttcccaatttcatgagaaaagaaacggagtgacagaggaaaagttggtcgacaagaatcaaatttcagaatcttttggttcgttgatcatacaggaaatgccaggcacactgacaaatgctggaaaatcaatccagtcaggcgagcaggaggatgcctcaaacaaagtgtccaagaggtccaagttgaagtcagtcaaatcacttcgtgttgacacaggcaggagcagcgagagaagcagcactctgagccatagctttcagaagggagaccaaaatgatattgttgtatgttctcagagctgtgggacagaatgtgcggtatgtatagctttatttggtatttctgaaattgaaaaggctgaagaaaaggaagagttgattgctgaagataacgttgacatgaatcccccggccagcatgatcatggagggaaatatgaacgagagaaaacctgataattatatcccacaagatccaattggtgcaaagctgcagaagaaactaggcttattagattctgctctccctttgcatttcaaagatgatgtgttcgccgacaaggaaattccacaatggaatgttgctagtgttcatacagaatctgagcttctttcagaatatcttataataccagaagtgaagcacgatgacttgaaccatcttaacttggaggaaggtctctcaaaaagcgagaatataaacccaaataagattactgagggccctgggaactgtcagctcgaagggaccattcgtgggaatctatttgacaatttggatactgatggaattgaagaaggtgaagagatctgcccactggacaaggatgaaatcacccccaatggatcaggtaacataataatggagaggagcaatatagttttaaagcctaccatttcccaacagttgatggattctatttcccctctcaatttagatcatggcgacttttctgaaaatgagaactccatgctgaacactggagatcagatgaaattaaatgaacctgtctctgagaatcttaacccattaattccaactgatgaaaaatatctgaagagccaaacggaggagtgtatgcccatttcatatctggaattcaaagatgatatccttctggatagggaaaactcagtgctggctccgagaaagtacgaggctatgtcccctgtgaggcaggaaaatctgttctcagacaaagagaacgtgactcctgcctctaaggtgaagaccgttgttaggggagttcttggtacaaggatggataattcagtgtcagcagcaaatgcttcaaataagaataaagttcttgggtcaagggtcgataattcagtgtcaacagagaatagctcaaataagaagcaatgtgaattatcatcgaagtccaaaaaagtccacacagtagattttgatgttttctattcggataaggagaacttgactcctatatcttcaggaggcatgaaagcaaggaagtgttttcccaaggacctctcagtcgacttagaccaagatcaggaagcattctgctcagacaaggagaacttgacaccactatcttctgcagctcggaaaacaagggacatgtctggaaaccttacacgagttgaaagtgcggtcacaaagaaaagggttgttggtaggctccccttccagactcttgtgtcaaattctcctttgagacctgctagctcgcatgattgtacctgtgctgttgctagaccagctggcgttgctgctggtgacttggcgatcaagttagaagataaattgaacgatctctcatgtaatggccacgaatcaggtagtgctggagaaggcatgaaaacctggaccatggtggctaatacagacagtcttcttgatgacgagtctaggaaggctattatgctgctaaaaggcttaaaaggaactcgcctgttcataccaaggattgtgatcagggagttggattccatgaagcagcgggagggcctgttcagacggtcaacgaaggcgacctccatcctgcaatggatcgaggagtgcatggcaagggagagctggtggatccacgtccagagctcggccgacatgttcccggtagcaccaaccccgcccgcgaccccttcagcgcagcgcatcgacgaggagatcgagatcagctccggctccttcaacccgatgatggcgttgttcggccctcgaagctccgccgcgctcgcggatatgatatctcccagacccgaggaccgcgtcctcgactgcgccctcctcgtcagtagggtccggagcaacgagaaggtcgtggtgctgtcaaacagcgtcacgctcaagatcaaagccatggcagagggcctgccatgcgagggagccaaggagttccgcgagtccctcgtggacccgtcctccaggcggttcatgtgggcggccagcgccccacgggggtcggcctggtcctgcctggacgcgtccgcgctggcggagaactactacaacagccgccaccacgctatgaagcggagggttctggtggcggcgaggccctccgagtccgaggccgccaagggcctgaagctgatcctgcgtcacaattccctgtacgcgcaggccacggacgccgtcaacaagacgccgctggtatcgctggccgcggtgtgagatcccccgccctcggttcttgttttggcgtgttgttgtcatgatttccatgccgagcgaaactgtgggccgtgtgcagactttgaacaggacaccgtcagtggtttcgttttgggccatcatgagtttttg

SEQ ID NO: 103701 - DNA, 933 bp, Zea Mays
gagcaaatgcagctgttgtgtaaatgttgtgcaaactcatcctgaaatgctctggagaccatcaccaaaggttttgctaactgaggcagtacatacgtttctctttacagtgatcagggagttggattccatgaagcagcgggagggcctgttcagacggtcaacgaaggcgacctccatcctgcaatggatcgaggagtgcatggcaagggagagctggtggatccacgtccagagctcggccgacatgttcccggtagcaccaaccccgcccgcgaccccttcagcgcagcgcatcgacgaggagatcgagatcagctccggctccttcaacccgatgatggcgttgttcggccctcgaagctccgccgcgctcgcggatatgatatctcccagacccgaggaccgcgtcctcgactgcgccctcctcgtcagtagggtccggagcaacgagaaggtcgtggtgctgtcaaacagcgtcacgctcaagatcaaagccatggcagaggttagtacggtaaccacccaaacccaaccctgcctgcttgctgtgtgcgttcgaactgaacctggttgtgttgcgttgcccgcggcgcagggcctgccatgcgagggagccaaggagttccgcgagtccctcgtggacccgtcctccaggcggttcatgtgggcggccagcgccccacgggggtcggcctggtcctgcctggacgcgtccgcgctggcggagaactactacaacagccgccaccacgctatgaagcggagggttctggtggcggcgaggccctccgagtccgaggccgccaagggcctgaagctgatcctgcgtcacaattccctgtacgcgcaggccacggacgccgtcaacaagacgccgctggtatcgctggccgcggtgtgagatcccccgccctcggttcttgttttggc

SEQ ID NO: 103702 - DNA, 1087 bp, Zea Mays
gagcaaatgcagctgttgtgtaaatgttgtgcaaactcatcctgaaatgctctggagaccatcaccaaaggttttgctaactgaggcagtacatacgtttctctttacagtgatcagggagttggattccatgaagcagcgggagggcctgttcagacggtcaacgaaggcgacctccatcctgcaatggatcgaggagtgcatggcaagggagagctggtggatccacgtccagagctcggccgacatgttcccggtagcaccaaccccgcccgcgaccccttcagcgcagcgcatcgacgaggagatcgagatcagctccggctccttcaacccgatgatggcgttgttcggccctcgaagctccgccgcgctcgcggatatgatatctcccagacccgaggaccgcgtcctcgactgcgccctcctcgtcagtagggtccggagcaacgagaaggtcgtggtgctgtcaaacagcgtcacgctcaagatcaaagccatggcagagggcctgccatgcgagggagccaaggagttccgcgagtccctcgtggacccgtcctccaggcggttcatgtgggcggccagcgccccacgggggtcggcctggtcctgcctggacgcgtccgcgctggcggagaactactacaacagccgccaccacgctatgaagcggagggttctggtggcggcgaggccctccgagtccgaggccgccaagggcctgaagctgatcctgcgtcacaattccctgtacgcgcaggccacggacgccgtcaacaagacgccgctggtatcgctggccgcggtgtgagatcccccgccctcggttcttgttttggcgtgttgttgtcatgatttccatgccgagcgaaactgtgggccgtgtgcagactttgaacaggacaccgtcagtggtttcgttttgggccatcatgagtttttgagtttgtgcctttattagctagcgcagcgaccgactagtgggtgagcaggaagctcccgagggcaggcagtgtctttgactctgtcttgtggacgtattctacacacatctctcgactgagatacgaatgttttttttctt

SEQ ID NO: 103703 - DNA, 1635 bp, Zea Mays
caaagtgtggtacatttaagccacaaaccaaacatgtctgaaagtcccagtaattcttataaaaaatatgggtggagccatcacccacgcccccaagatcctgtccacccggacccgagcgggaacgccaatgcgaagacgaaactgccgcagctggtgacggcgccggctccgtcgtcggggcgtccggcgtccgtgcttccgtacaagacggcgaacgtgcgggaccactaccgcatcggcaagaaactggggcaggggcagttcggcaccacgtaccagtgcgtgggcaaggcggacggcgctgagtacgcatgcaagtccatccccaagcgcaagctgctgtgccgggaggactacgaggacgtctaccgcgagatccagatcatgcaccacctctccgagcaccccaacgtcgtccgcatccgcggcgcctacgaggacgcgctcttcgtgcacatcgtcatggagctctgcgccggcggcgagctcttcgaccgcatcgtcgccaagggccactacagtgagcgcgcggctgcgaagctcatcaagaccattgtcggggtcgtggagggatgtcactcgctcggcgtcatgcaccgggacctcaagccggagaattttctctttgccagcaccgccgaggaagccccactcaaggccactgactttgggctttccatgttctacaagcccggtgataaattctctgatgtcgttggaagtccatactatgttgcaccagaggtgcttcagaaatgctatggtccagaagctgatgtgtggagcgcaggagtaattctgtacattttgctttgtggtgtgcccccgttttgggcagaaactgaggctggaatcttcaggcagattctgcgaggcaaacttgattttgaatctgaaccctggcctagtatttctgatagtgctaaggatctggtctgcaatatgcttacacgggatcctaaaaagagatttagtgctcatgaggttctctgtcacgcatggattgttgacgatgccgtggcacctgataagcctattgattctgctgttctctcaaggctgaagcatttttcggcaatgaacaagctcaagaagatggcattaagggttattgctgaaagcctgtctgaggaagagattggaggcctcaaggagttgttcaagatgattgatactgacagtagtgggactataacatttgatgagctgaaagatggcttgaaaagggtaggctctgaattaacagagaacgaaatccaggctctaatggaagcagctgatattgataacagcggaaccatcgactacggcgaattcattgcagctacgttgcacatgaacaaactggagagggaggaaaacttggtttcagcattctcgttttttgacaaagatggaagtggctttataaccatcgatgagctgtcacaagcatgtcgcgaatttggtctcgatgacctccacctcgaggatatgattaaagatgttgaccagaacaatgatggccaaatcgactacagcgagttcacggcgatgatgaggaagggcaatgctggtgcaacaggaaggagaaccatgaggaacagcttgcacttgaatctcggcgaactcttgaatcccagcaaaacctag

SEQ ID NO: 103704 - DNA, 2253 bp, Zea Mays
ggctaacctttacctcccgcttgctccccccttttattttggcaggattgcacatcttccccaagtaacacctgacaaagggcgaggagagcatagatttcttctttcccttgccgttgccgcttccgtttctcgcttccattcctctctgctcgtgggtttgtcgaagataaacctcgcataaagcttcgttcgtcggcttttggtatcaatcggcagggctcccccgtttcctctctccaagatcttccccccttttcttctgtctccaacccgcggaaatccttggaggagttgcggaaatttgtagcaagaggttttcctttccagctttcctgctgcggcggcctccgcacggtttttgatccggggagcgcacctggggcgcgccaatgcagccggacccgagcgggaacgccaatgcgaagacgaaactgccgcagctggtgacggcgccggctccgtcgtcggggcgtccggcgtccgtgcttccgtacaagacggcgaacgtgcgggaccactaccgcatcggcaagaaactggggcaggggcagttcggcaccacgtaccagtgcgtgggcaaggcggacggcgctgagtacgcatgcaagtccatccccaagcgcaagctgctgtgccgggaggactacgaggacgtctaccgcgagatccagatcatgcaccacctctccgagcaccccaacgtcgtccgcatccgcggcgcctacgaggacgcgctcttcgtgcacatcgtcatggagctctgcgccggcggcgagctcttcgaccgcatcgtcgccaagggccactacagtgagcgcgcggctgcgaagctcatcaagaccattgtcggggtcgtggagggatgtcactcgctcggcgtcatgcaccgggacctcaagccggagaattttctctttgccagcaccgccgaggaagccccactcaaggccactgactttgggctttccatgttctacaagcccggtgataaattctctgatgtcgttggaagtccatactatgttgcaccagaggtgcttcagaaatgctatggtccagaagctgatgtgtggagcgcaggagtaattctgtacattttgctttgtggtgtgcccccgttttgggcagaaactgaggctggaatcttcaggcagattctgcgaggcaaacttgattttgaatctgaaccctggcctagtatttctgatagtgctaaggatctggtctgcaatatgcttacacgggatcctaaaaagagatttagtgctcatgaggttctctgtcacgcatggattgttgacgatgccgtggcacctgataagcctattgattctgctgttctctcaaggctgaagcatttttcggcaatgaacaagctcaagaagatggcattaagggttattgctgaaagcctgtctgaggaagagattggaggcctcaaggagttgttcaagatgattgatactgacagtagtgggactataacatttgatgagctgaaagatggcttgaaaagggtaggctctgaattaacagagaacgaaatccaggctctaatggaagcagctgatattgataacagcggaaccatcgactacggcgaattcattgcagctacgttgcacatgaacaaactggagagggaggaaaacttggtttcagcattctcgttttttgacaaagatggaagtggctttataaccatcgatgagctgtcacaagcatgtcgcgaatttggtctcgatgacctccacctcgaggatatgattaaagatgttgaccagaacaatgatggccaaatcgactacagcgagttcacggcgatgatgaggaagggcaatgctggtgcaacaggaaggagaaccatgaggaacagcttgcacttgaatctcggcgaactcttgaatcccagcaaaacctagcgcgttactggaaggccttgtcaggtacattcccatggcatctgaagtttttggatgcgttgtcgatctgctggcctattctgagatgttgagtggttatcctgtggtattactaagatgctggacaattttcgtagtgctggtggtatcctctagagaagagggatggctggcacaatgtggctactatcgccaactgcttttgtatgtgtaactatcgatgtagattgactatggtctaaacatcagtttagttgatatttcgttctctaagttccgttctacttggctcctcaaccaaacattacctatatatatatattctttc

SEQ ID NO: 103705 - DNA, 2204 bp, Zea Mays
attttggcaggattgcacatcttccccaagtaacacctgacaaagggcgaggagagcatagatttcttctttcccttgccgttgccgcttccgtttctcgcttccattcctctctgctcgtgggtttgtcgaagataaacctcgcataaagcttcgttcgtcggcttttggtatcaatcggcagggctcccccgtttcctctctccaagatcttccccccttttcttctgtctccaacccgcggaaatccttggaggagttgcggaaatttgtagcaagagctttcctgctgcggcggcctccgcacggtttttgatccggggagcgcacctggggcgcgccaatgcagccggacccgagcgggaacgccaatgcgaagacgaaactgccgcagctggtgacggcgccggctccgtcgtcggggcgtccggcgtccgtgcttccgtacaagacggcgaacgtgcgggaccactaccgcatcggcaagaaactggggcaggggcagttcggcaccacgtaccagtgcgtgggcaaggcggacggcgctgagtacgcatgcaagtccatccccaagcgcaagctgctgtgccgggaggactacgaggacgtctaccgcgagatccagatcatgcaccacctctccgagcaccccaacgtcgtccgcatccgcggcgcctacgaggacgcgctcttcgtgcacatcgtcatggagctctgcgccggcggcgagctcttcgaccgcatcgtcgccaagggccactacagtgagcgcgcggctgcgaagctcatcaagaccattgtcggggtcgtggagggatgtcactcgctcggcgtcatgcaccgggacctcaagccggagaattttctctttgccagcaccgccgaggaagccccactcaaggccactgactttgggctttccatgttctacaagcccggtgataaattctctgatgtcgttggaagtccatactatgttgcaccagaggtgcttcagaaatgctatggtccagaagctgatgtgtggagcgcaggagtaattctgtacattttgctttgtggtgtgcccccgttttgggcagaaactgaggctggaatcttcaggcagattctgcgaggcaaacttgattttgaatctgaaccctggcctagtatttctgatagtgctaaggatctggtctgcaatatgcttacacgggatcctaaaaagagatttagtgctcatgaggttctctgtcacgcatggattgttgacgatgccgtggcacctgataagcctattgattctgctgttctctcaaggctgaagcatttttcggcaatgaacaagctcaagaagatggcattaagggttattgctgaaagcctgtctgaggaagagattggaggcctcaaggagttgttcaagatgattgatactgacagtagtgggactataacatttgatgagctgaaagatggcttgaaaagggtaggctctgaattaacagagaacgaaatccaggctctaatggaagcagctgatattgataacagcggaaccatcgactacggcgaattcattgcagctacgttgcacatgaacaaactggagagggaggaaaacttggtttcagcattctcgttttttgacaaagatggaagtggctttataaccatcgatgagctgtcacaagcatgtcgcgaatttggtctcgatgacctccacctcgaggatatgattaaagatgttgaccagaacaatgatggccaaatcgactacagcgagttcacggcgatgatgaggaagggcaatgctggtgcaacaggaaggagaaccatgaggaacagcttgcacttgaatctcggcgaactcttgaatcccagcaaaacctagcgcgttactggaaggccttgtcaggtacattcccatggcatctgaagtttttggatgcgttgtcgatctgctggcctattctgagatgttgagtggttatcctgtggtattactaagatgctggacaattttcgtagtgctggtggtatcctctagagaagagggatggctggcacaatgtggctactatcgccaactgcttttgtatgtgtaactatcgatgtagattgactatggtctaaacatcagtttagttgatatttcgttctctaagttccgttctacttggctcctcaaccaaacattacctatatatatatattctttc

SEQ ID NO: 103706 - DNA, 2127 bp, Zea Mays
catcttccccaagtaacacctgacaaagggcgaggagagcatagatttcttctttcccttgccgttgccgcttccgtttctcgcttccattcctctctgctcgtgggtttgtcgaagataaacctcgcataaagcttcgttcgtcggcttttggtatcaatcggcagggctcccccgtttcctctctccaagatcttccccccttttcttctgtctccaacccgcggaaatccttggaggagttctttcctgctgcggcggcctccgcacggtttttgatccggggagcgcacctggggcgcgccaatgcagccggacccgagcgggaacgccaatgcgaagacgaaactgccgcagctggtgacggcgccggctccgtcgtcggggcgtccggcgtccgtgcttccgtacaagacggcgaacgtgcgggaccactaccgcatcggcaagaaactggggcaggggcagttcggcaccacgtaccagtgcgtgggcaaggcggacggcgctgagtacgcatgcaagtccatccccaagcgcaagctgctgtgccgggaggactacgaggacgtctaccgcgagatccagatcatgcaccacctctccgagcaccccaacgtcgtccgcatccgcggcgcctacgaggacgcgctcttcgtgcacatcgtcatggagctctgcgccggcggcgagctcttcgaccgcatcgtcgccaagggccactacagtgagcgcgcggctgcgaagctcatcaagaccattgtcggggtcgtggagggatgtcactcgctcggcgtcatgcaccgggacctcaagccggagaattttctctttgccagcaccgccgaggaagccccactcaaggccactgactttgggctttccatgttctacaagcccggtgataaattctctgatgtcgttggaagtccatactatgttgcaccagaggtgcttcagaaatgctatggtccagaagctgatgtgtggagcgcaggagtaattctgtacattttgctttgtggtgtgcccccgttttgggcagaaactgaggctggaatcttcaggcagattctgcgaggcaaacttgattttgaatctgaaccctggcctagtatttctgatagtgctaaggatctggtctgcaatatgcttacacgggatcctaaaaagagatttagtgctcatgaggttctctgtcacgcatggattgttgacgatgccgtggcacctgataagcctattgattctgctgttctctcaaggctgaagcatttttcggcaatgaacaagctcaagaagatggcattaagggttattgctgaaagcctgtctgaggaagagattggaggcctcaaggagttgttcaagatgattgatactgacagtagtgggactataacatttgatgagctgaaagatggcttgaaaagggtaggctctgaattaacagagaacgaaatccaggctctaatggaagcagctgatattgataacagcggaaccatcgactacggcgaattcattgcagctacgttgcacatgaacaaactggagagggaggaaaacttggtttcagcattctcgttttttgacaaagatggaagtggctttataaccatcgatgagctgtcacaagcatgtcgcgaatttggtctcgatgacctccacctcgaggatatgattaaagatgttgaccagaacaatgatggccaaatcgactacagcgagttcacggcgatgatgaggaagggcaatgctggtgcaacaggaaggagaaccatgaggaacagcttgcacttgaatctcggcgaactcttgaatcccagcaaaacctagcgcgttactggaaggccttgtcaggtacattcccatggcatctgaagtttttggatgcgttgtcgatctgctggcctattctgagatgttgagtggttatcctgtggtattactaagatgctggacaattttcgtagtgctggtggtatcctctagagaagagggatggctggcacaatgtggctactatcgccaactgcttttgtatgtgtaactatcgatgtagattgactatggtctaaacatcagtttagttgatatttcgttctctaaggtagtgtttggttg

SEQ ID NO: 103707 - DNA, 250 bp, Zea Mays
aataatcgtgtcgggccgggccagcactatgggccgaggctatagcccaagcacgacacgacgttcttggctcttgcaagcattaggtcatttctgagatcacattggcgcaatgtactacatggtgtttgaggttgctgaattggatggagcagcaatgatttgtcacactaacagcaaaatgaaaggttatttgttggttttaaacgttaataattgctacgaagtagcataatttatatagagctgt

SEQ ID NO: 103708 - DNA, 1862 bp, Zea Mays
aggcaatctttttcctccccaatgccgccgccgtttccgccgtctacccttccgccgcgtctcctcgccggcggcgaccaccacccgcccccgacctccgcctcctccccggaacaccccttcctctccgcgcatctcgtcctcccctccccgtctccgtcccccgccgatttctcctcgccgcacctacccctcgctctcgccttcgccttcctcaccgagccttccccgctcccgcggcgtctccttgtcgtcctccacgccgccggcgcacgcttccccgccttctaccatgccttcgcgtccgctctccactcccttcccttccctctcctcctcccccacccgcgcacccgcctcctcctcgccgcctcggagctcgcccgcgcgacggcgccggggttcgcgcccctcctcgcctccctcctccgccgcgtgccgttccccggggacgcctgcttgctcgatgtcttgcacgagcacgcctcgtttattgccgacgaagagccccagctcctcgccaccgccgtgtacgccttcctccgactcctttccagaaaccgcttcgtttcggcctcaggtagcgtcgagttgaaggattgcgaggagtgcaagggtgccaaaaacctgcaagaatgcagggcaaagctggtgtctttctgcatctccatgctgcaggatcacttccaagtgtgcgcactgctcggaagggaccttgtaaggtcgctccacgagctggcgctggtgccggagttccaggtgttgtggcgagacttgatacttgaccatgctgccaatgtctgtcggatcggcacaccccgttggtgcactgtcgtttccatcacgtcagagatggagacgcagctcttgttcatgatgaacaatgtgaagtggggggatcagaagaggtaccagctgtggttcgcaaggaagcacctgatggtgcctggaggggaggagaggatccccgacattgtaaggttcatatgctgcgggcaccacccgaccaacgaggtcatgaaatctggtgtcattgctcgctgggcggttgtaggttggctgctgacgagttgcagcaagggttatgttgtggcgaatgtgaagctggcgctgttctatgactggttgttcttcgaggacgggatgggtagtgtcatgaatattgaacctgctatgctcctgatggtgaattcagtgtctcagtacgctgatatcacgaacatgctgcttgagttcttgtttcttctgattgacaactatgatgtgcagaggaaggaggcgattgcacgctgtgtgaggagtgcgtttggggtgctggtgaagaaaggagtggttccgtcattggagccattgacaggttgtgacaagttatcaccactgctgaggcaaaagcttctggcatttttatctgatacttgtgaggcagctgaagaagcttgtgggaagacaatcaatgaggtttctaaaggaacagagttgaacaagagaatttgctgaagcatgcacacaatttatggttgtcacaaccatctctacgaggaatgaatttagcacctattcgtcgggttttccttgttttggaaactttcgtagacctgtaaagaggaaacagaaggtgctttgggtattatataaggacaagggagaggtgaagaaaattttggaagcggcaagcataaggaatgtgaaatatgtgttaatcattgacttgccctgttacctgcatgccagtttctggttcatatttagagacaatgagaagagagagaggaaggatgaccgaagttgacatagagttagacatggaaggaggagatatacccaaagatttagtcttgaataaaagtgcatgaaaagcagct

SEQ ID NO: 103709 - DNA, 174 bp, Zea Mays
atcacatgttcaacaatattcaacattaaatggcaatatcatgccttcaaatcacacaaacatagcattgattctacaaaactgtggacaaaatcatgccttcaaatctaattgttcaatacacaatacttaatatttgaatatataagacttctaacctgttggagcttaagg

SEQ ID NO: 103710 - DNA, 1036 bp, Zea Mays
aaaatagtcggtctcgcgtctggagattttcagatcagaaccaaactcggctcgagagagatcgcatacgcctgcctgcccacccacctccccttttccttcctcttcgccccagcgacgcggccgcccggagaccgagcgaggcaggcaacccaccaccgagaggcagggacaggaacaggaagccggaggcgaagatgtcgtcggtgttcagcggcgatgagacggcccccttcttcggcttcctcggcgccgccgccgccctcgtcttctcatgcatgggcgccgcgtacgggaccgcgaagagcggcgtcggcgtggcgtcgatgggtgtgatgcggccggagctcgtcatgaagtccatcgtgcccgtggtcatggctggtgtgctcggtatctacgggctcatcatcgccgtcatcatcagcacggggatcaaccccaaggccaagccctactacctctttgatggctacgcccacctttcgtccgggcttgcctgtggtctcgctgggcttgcagctggcatggccatcggcattgtcggtgatgctggagtcagggcaaatgcgcaacagccaaagcttttcgttggcatgatcctcatcctcattttcgcagaagcgcttgctctctatggtctaattgttggaattatcctttcgtctcgcgctggtcaatcccgggcggattaagtgcaccaccattctgtgattaccgcaccgtttattatgctattctgagaggattggaactctattcccttgtctagtttattcttgttaccatgtattaatgtaacaatctgtagctgatggaaggtgacttccagtcatgttttggttttggtggtgtcgagcagaggttatttatttttgggttaaggtcggagtcggacggatgctcttgggctaagtggatttaattttatccttgctgaataaagaacacggaattgtagccaaataagaacgtgatatataaatatttctttcccactttgctggatgcctggattttcatcaccatctatact

SEQ ID NO: 103711 - DNA, 165 bp, Zea Mays
atgggctttgccgcggacacagggaaggcacgtggctggtgcacaccaggtcctgatgtcgatctgctagagaaaatgctccagtacgagccgacgaagcggatccccgcgaagaaggccctggagcacccctacttcaacgttgtgaggaacaaaatgcactga

SEQ ID NO: 103712 - DNA, 148 bp, Zea Mays
gactttagctcatctaaagaagtggcttcacctcgtgagccagagccaaagccgtttttggagaagccagagccctgccaaaggggccctaaacttgtatatatcaatgcagtagtactaatttagatagagaattaaatatatttct

SEQ ID NO: 103713 - DNA, 835 bp, Zea Mays
cgcgcaggcaccggagtcacaccatcctcgctgtcaatctcgtcgcaaaccctccgcccctctctggtccagcgccgccatgagcttctagacccccgcccgagaaatgttgtagcgtcttatgctgggatgggcggcatccgcgccgtctctctcgccctgctgtggttcctcctcctctgggtggagtcctgcactctccatggtatcgacacttctttattgtcccgtcttgctcgctcgtcccctaaatcatgtctacgttgccccctccattttcacgagtttgctcgcgttggccgggggacgagggtctcgagcctcgtgccgcactccatcagagaccccacaacctttccgtgagcgctgttgttcctgctcctgccggcggccttgctaccaacctgagcgtgcatgtgttggtggagcgaggcaattccattgcacggtgtggattcagctttcgatcagtgaattgcacatacaactacccttgagtcaaactgactgtatccgcttgtttctaacatctcccttccacagttccaccttggcgaccggtgtgacgaagcaggttagtctgtaagttgttgggctgtggagcaaccgtttcctaatggggaattcaatctgaaatttcaaaggacctgatggtggaagtaaatcgtacctatgcaacctatattcaacaagccctaacaatgtgcaattgcaaaaaacgccaaagtcttaattcaggaatttaaagaaaggcgaagttaactttcagacaattggaggcgtgtgttcgatgggggggtattttgtgctgaccactcatcacacatatgcatgg

SEQ ID NO: 103714 - DNA, 276 bp, Zea Mays
gacaacgcctggatgacggtgccgacgttcagggattggaacatgaagaacagggcgctgctggactactccatgcacttctccaagatccacgagatgtgcaagtagaacaagagtctcggcagcggcagcgacctcctcgcccacgcgcaggcctagaagccacgtcacagcgactagccgtaggccaacagtgcccagcccaagcacagccgcccctaccccgaccgacgaccgctggtgccgcccgctccacgcctgcgaccactccacaat

SEQ ID NO: 103715 - DNA, 147 bp, Zea Mays
atgtcaaaggatcacaagccgacatatgacgcagagcgtcaaaggcatcaaagatggctacctcaacggcgtactgcctgtgacctaggctttgggggactgggacttgaaactacctcaaggctcgccatcgcctcttattgctaa

SEQ ID NO: 103716 - DNA, 192 bp, Zea Mays
tatgtactagtgaataactataacaataataactataacaataataataacaataactataagaagaagaagaagaagaagaacaacaacaacaacaacaacaacaacaacaataataataataataataataataataataataataataataataataataataataataacaacatgcaatcatcaaat

SEQ ID NO: 103717 - DNA, 166 bp, Zea Mays
tattttaattttattttactcctcacatattttagatgtcaacaattactcaaacatttctttattgtaaatatatacacatctttataagtgattaaaatattttatcatcacacaggcctactaatattctactcgacacactaattcagctaattgactggaa

SEQ ID NO: 103718 - DNA, 1091 bp, Zea Mays
tgtgccgcgcgccctgctcctcttccttcctcctgttttctctctgcttgtcgcgtccggtcgagcgttcctgcgccctgctccctccctagtgcgcgccccatctcccggtgctcggccagctcgcccatgggagtcgcgtcccgggccaagctccctactcggcgtccgtctcctagctccatggccacacgcccatcttcctccctctctgcttgccgcgtgcgtagttccctggcgtgccctcgtcttcttcctcgcgcccggcttcagtttgccggacctccccgcctcgagctcgccccccatggcgcctgaccgagctcctccctcgcaaaactgtgccctcgctgctcaccggtgctcgccgcgcgtgcccatctctctgtttgtctctgcgcatagttccccaagctccatggccggttccctgctcgcgtcgtggtctcccagctcattagcacttgttcaagtcgtctcggctcgctcggcctcaaattctagcgcctcgccctgctctcgtggttcagcaacggccggcgcgagcctagccgtggtggtgttgtggcgtggcgacgtcgtgcgcgtcgcgacagctgtcttgtccgtgaagcagtccgtgccatagagttcgctcggccacggtctcgtcaaactgtgaagcttcctcgccgtgcgctctggcatcggctgccgcagatttcgccataaagtttacgagcgctccttgctcagtttgtttcacagtgggcaatttctccatgtttcaattccgtgttgtttgccttgtgtgcactcgctcctcatccattgggtttcggcgtgttcgcgtttaccgtcgagtcgtcgaacccgtcatcccctgctcgacccccacctcaccatctcgctccagactccaatcgaaggtcgtcgtcgttccgtgcgtcgtcaagaaatcccaagcattgggtgaagacgaagctagccgcgtgatatttaccaagtgctcgacagaaggcctgagcaagaatcaacaatgtttgcttggaattttaattgaatagataaccgttctctagttcgttatttctttaagtgattgaatcaat

SEQ ID NO: 103719 - DNA, 1725 bp, Zea Mays
cttatctcttccccgccgtactcaggtttttcagccgctagcttatcttctacgcgccgcgcgtgcccaccctctgtcctcgccgccatgtcctcttcctgccggcgctcctccagggagcttcctagctcacccaggtcgccgccgttcgcctccagctcgcgacgccccctgcttttctctctctcccacacggccgcgccttgccaagatccgtgctgagctcccatcgccgcgcgcccccttctcctccatagccgtgcgagctgagctccctgctcgcgcccgtcgccctgcctgctcgagcgcgcgcccggccccagctccaaccttcctcccatggctctcgggcttctccaggtccgaccggagcttcctctatgcggcgctcctgctccccggcttgcccctctgcccgccccatctcccaggtgctggccgcgagctcctcgtccggcccggccaccgacctgtctgtgctcgtcctggtctcggacgccaccgcgcctcaacctcgccatgaccctggttgtgtctgtccgctgctccagctcgttggcggtcaatgccctcacccggccttcagctcgccttgcctcgggctggcacatccttgccgaagcgccatgctcagtggggtgctcgctgtcggcatcgcttcaactgctcggccctgtacaggccctcggccatgctgtgctgctgagcacaataccggacgccgcacagcgatggtgccctccctgctcctctcggccagctgcttgcacgtgctatgcgacatcgagtccgtgacgctcgcgtgatggacgctatgaagtcgctgcgtgtgtttgtgtccgagcccgtccggctgcaagctcgctttgctcctcacgttgctgctcgtcgagtccttccccagtccacgctctctccctgtccatcgtcgcatcattcgccatcgagcctcgctgcccatcgtggagttccctactgtcagcctccgcacccgtcctaggccatcgttgccagtttgcctatgtcccgttgtggtgttgtgctaccgtcgagtcctgatgtcgatctggtggccgtcgaagcgaagctctaaacagatttggccacatccagcactatccatgtcattgtcgttcgccttcacgctgtgtgcaacaacatcatcgtttcccttaatgtgctcatcctcaatctccgcctcgccatcacccttggtcgcagcaccgtgtcgacgacttgcgatcctcgccctcgcgctcacgcttcgtcaaatgccactccagtactcactagaagaagatcttcagtagttgattactgaagaaaagaagacccctaggtgacgtctatctagtgctcgacgaaaagtctgaagtagaatttgtcgccgtgtccatggaagtggagcgacttgatattggtaagcgaactcgttactttggatagtgggtatgataattggattggtagatttattaattgtgatgatcttcgtgtttagcacatgcgcgttgtggtaggttaaatatatgttaagtacgatggagttagtaatgcgaaaggtagattaaattatgtgatattcgggcgagctgatgatgtaaaagatagatatgctacgagcatgtgtcttggaatttccacaaaagtgggatgattgtttgccattggcagagttttcctataataatagctatcaagagagtatcaaaatggcaccttttg

SEQ ID NO: 103720 - DNA, 110 bp, Zea Mays
tatcaaaaactgcgaccaacaggaaataacaaatcgactcgccatactaaaatcctacttgaatccacgaaatcaacgacgcttcccggtccgcacataacactaaatac

SEQ ID NO: 103721 - DNA, 327 bp, Zea Mays
atggggcttggggccgggcacgcagggagcagggcgcgcgcggcaacagagcggagggcgtgcgcgggagctggagcaggagcaccagagagcagggaggagatgggacggcgcatgggagatgggagctcgaagccgagctcaaccaccagggaacgacggacggaggtggaagacaggctgataaaaatcagagagcagagcgcgccttgggagatatgtgctgagggaaatatccagcggctgcaggggatagaaacaaacgcagagaaaaaatcgacgcctgagagaggacaacggcgtctagtggtgattagccgtgactga

SEQ ID NO: 103722 - DNA, 1881 bp, Zea Mays
tttagcccatatacgggtatcgagtcgcgggtacctattcccatctatcatctgccatctatactcgggacccctatatataactaacctctgctagggtttactcgcattttggctcctcactgccgcgccgccaccccctacaggtggatgtaacgaatccgccgccggcgtcatctcctcctcccacctcgactcgccttgctcgccggcggcggccttttcttcgccgcgcggcgagtcgcccatgttgagctcgcggctgatctgatgggcttgttgtgatctcctgcaggtaaggaagaggagggcaggatgtcgcaccgtaagttcgagcacccgaggcacggctccctcggcttccttcccaggaagcgctcctcccgtcaccgcggcaaggtgaagtcattccctagggatgaccccaagaagccttgccatctcactgccttccttggctacaaggctggcatgactcacattgtccgtgaggttgagaagccaggatccaaactccataagaaggaaacttgtgaggctgttaccatcattgaaacccctcctcttgtcattgttgggctcgtggcatatgtgaagactcctcgtggcctccgcacactcaactctgtttgggcccaacatcttagtgaagaagtgaggagaaggttctacaagaactggtgcaagagcaagaagaaggctttcacaaagtatgctctcaaatatgaaaatgatgctggcaagaaggaaattcagctgcagcttgagaagatgaagaaatatgcttctgttatccgtgtcattgctcatacccagattaggaagatgaagggtttgaagcagaagaaggctcacctgatggagattcaggtcaatggtggtaccattgctgacaaggtggactatggctacaaattctttgagaaagaggtccctgttgatgctgtcttccagaaggatgagatgattgacatcattggtgtgaccaaggggaaaggttacgagggtgtggtcactcgttggggtgtcacccggcttccccgcaagacccacaggggtctccgcaaagttgcttgtatcggtgcatggcatccggctagggtctcctatacggttgcccgtgctggtcagaatgggtaccaccaccgcactgagatgaacaagaaggtgtacaagatcggcaaggctggacaagagacccacgatgcctccacagagtttgacaggactgagaaggacatcactcccatgggtggcttcccccattatggtatcgtgaagggtgactacctgatgatcaagggctgctgtgtgggaccaaagaagagggtggtgaccctccgccagtccctcctgaagcagacttcccggctggcgctggaggagatcaagctcaagttcatcgacacatcgtccaaatttgggcacggtcgcttccagactaccgatgagaagcagaggttctttggcaagctcaaggcgtaaggtgctgcggtgcagcgaagtcccatttctcaaaatcatcaaactgtgatacttttgtttgtaaccttgctgtaccaagttttgtagccggatggtttaggagcatggtccggtcttctatggatcgttccatgcttcagaactgtagtgtctatgttttgtgctattttggttgtttaatgccccaatcattacatatagatttcaattgttttgttgtttgatgatcaatgtaactatttatacttaggtcatgtttggtttctttagtctagggactaaagtttagttagggactaaagtttagttagggactaaagtttagtccataacatgtttggttctagggactaaaaatagtaagaatatactaaatgactcataagaaaactaaaa

SEQ ID NO: 103723 - DNA, 2115 bp, Zea Mays
aactaacctctgctagggtttactcgcattttggctcctcactgccgcgccgccaccccctacaggtggatgtaacgaatccgccgccggcgtcatctcctcctcccacctcgactcgccttgctcgccggcggcggccttttcttcgccgcgcggcgagtcgcccatgttgagctcgcggctgatctgatgggcttgttgtgatctcctgcaggtaaggaagaggagggcaggatgtcgcaccgtaagttcgagcacccgaggcacggctccctcggcttccttcccaggaagcgctcctcccgtcaccgcggcaaggtgaagtcattccctagggatgaccccaagaagccttgccatctcactgccttccttggctacaaggctggcatgactcacattgtccgtgaggttgagaagccaggatccagtatgtccacccccttcttttttattaatcaattaagctgatgacatagtccagtttgtttatatctgaaaaatgaattgtaacatgagaacgatttgatttctgaccagcagttttagtttttttatgaatttgagggcacttaactttagatgatataagccacacaactatctcttcacaggcccatagacttactcaaaacaatagatttttctgttgaatatccacaactgcttgcacccatgaatctcgagtatatggataccatttcactccattatcgtaactgctctgcctacttgatttctacagaactccataagaaggaaacttgtgaggctgttaccatcattgaaacccctcctcttgtcattgttgggctcgtggcatatgtgaagactcctcgtggcctccgcacactcaactctgtttgggcccaacatcttagtgaagaagtgaggagaaggttctacaagaactggtgcaagagcaagaagaaggctttcacaaagtatgctctcaaatatgaaaatgatgctggcaagaaggaaattcagctgcagcttgagaagatgaagaaatatgcttctgttatccgtgtcattgctcatacccagattaggaagatgaagggtttgaagcagaagaaggctcacctgatggagattcaggtcaatggtggtaccattgctgacaaggtggactatggctacaaattctttgagaaagaggtccctgttgatgctgtcttccagaaggatgagatgattgacatcattggtgtgaccaaggggaaaggttacgagggtgtggtcactcgttggggtgtcacccggcttccccgcaagacccacaggggtctccgcaaagttgcttgtatcggtgcatggcatccggctagggtctcctatacggttgcccgtgctggtcagaatgggtaccaccaccgcactgagatgaacaagaaggtgtacaagatcggcaaggctggacaagagacccacgatgcctccacagagtttgacaggactgagaaggacatcactcccatgggtggcttcccccattatggtatcgtgaagggtgactacctgatgatcaagggctgctgtgtgggaccaaagaagagggtggtgaccctccgccagtccctcctgaagcagacttcccggctggcgctggaggagatcaagctcaagttcatcgacacatcgtccaaatttgggcacggtcgcttccagactaccgatgagaagcagaggttctttggcaagctcaaggcgtaaggtgctgcggtgcagcgaagtcccatttctcaaaatcatcaaactgtgatacttttgtttgtaaccttgctgtaccaagttttgtagccggatggtttaggagcatggtccggtcttctatggatcgttccatgcttcagaactgtagtgtctatgttttgtgctattttggttgtttaatgccccaatcattacatatagatttcaattgttttgttgtttgatgatcaatgtaactatttatacttaggtcatgtttggtttctttagtctagggactaaagtttagttagggactaaagtttagttagggactaaagtttagtccataacatgtttggttctagggactaaaaatagtaagaatatactaaatgactcataagaaaactaaaa

SEQ ID NO: 103724 - DNA, 1651 bp, Zea Mays
aactaacctctgctagggtttactcgcattttggctcctcactgccgcgccgccaccccctacaggtaaggaagaggagggcaggatgtcgcaccgtaagttcgagcacccgaggcacggctccctcggcttccttcccaggaagcgctcctcccgtcaccgcggcaaggtgaagtcattccctagggatgaccccaagaagccttgccatctcactgccttccttggctacaaggctggcatgactcacattgtccgtgaggttgagaagccaggatccaaactccataagaaggaaacttgtgaggctgttaccatcattgaaacccctcctcttgtcattgttgggctcgtggcatatgtgaagactcctcgtggcctccgcacactcaactctgtttgggcccaacatcttagtgaagaagtgaggagaaggttctacaagaactggtgcaagagcaagaagaaggctttcacaaagtatgctctcaaatatgaaaatgatgctggcaagaaggaaattcagctgcagcttgagaagatgaagaaatatgcttctgttatccgtgtcattgctcatacccagattaggaagatgaagggtttgaagcagaagaaggctcacctgatggagattcaggtcaatggtggtaccattgctgacaaggtggactatggctacaaattctttgagaaagaggtccctgttgatgctgtcttccagaaggatgagatgattgacatcattggtgtgaccaaggggaaaggttacgagggtgtggtcactcgttggggtgtcacccggcttccccgcaagacccacaggggtctccgcaaagttgcttgtatcggtgcatggcatccggctagggtctcctatacggttgcccgtgctggtcagaatgggtaccaccaccgcactgagatgaacaagaaggtgtacaagatcggcaaggctggacaagagacccacgatgcctccacagagtttgacaggactgagaaggacatcactcccatgggtggcttcccccattatggtatcgtgaagggtgactacctgatgatcaagggctgctgtgtgggaccaaagaagagggtggtgaccctccgccagtccctcctgaagcagacttcccggctggcgctggaggagatcaagctcaagttcatcgacacatcgtccaaatttgggcacggtcgcttccagactaccgatgagaagcagaggttctttggcaagctcaaggcgtaaggtgctgcggtgcagcgaagtcccatttctcaaaatcatcaaactgtgatacttttgtttgtaaccttgctgtaccaagttttgtagccggatggtttaggagcatggtccggtcttctatggatcgttccatgcttcagaactgtagtgtctatgttttgtgctattttggttgtttaatgccccaatcattacatatagatttcaattgttttgttgtttgatgatcaatgtaactatttatacttaggtcatgtttggtttctttagtctagggactaaagtttagttagggactaaagtttagttagggactaaagtttagtccataacatgtttggttctagggactaaaaatagtaagaatatactaaatgactcataagaaaactaaaa

SEQ ID NO: 103725 - DNA, 1601 bp, Zea Mays
aactaacctctgctagggtttactcgcattttggctcctcactgccgcgccgccaccccctacaggtaaggaagaggagggcaggatgtcgcaccgtaagttcgagcacccgaggcacggctcagtcattccctagggatgaccccaagaagccttgccatctcactgccttccttggctacaaggctggcatgactcacattgtccgtgaggttgagaagccaggatccaaactccataagaaggaaacttgtgaggctgttaccatcattgaaacccctcctcttgtcattgttgggctcgtggcatatgtgaagactcctcgtggcctccgcacactcaactctgtttgggcccaacatcttagtgaagaagtgaggagaaggttctacaagaactggtgcaagagcaagaagaaggctttcacaaagtatgctctcaaatatgaaaatgatgctggcaagaaggaaattcagctgcagcttgagaagatgaagaaatatgcttctgttatccgtgtcattgctcatacccagattaggaagatgaagggtttgaagcagaagaaggctcacctgatggagattcaggtcaatggtggtaccattgctgacaaggtggactatggctacaaattctttgagaaagaggtccctgttgatgctgtcttccagaaggatgagatgattgacatcattggtgtgaccaaggggaaaggttacgagggtgtggtcactcgttggggtgtcacccggcttccccgcaagacccacaggggtctccgcaaagttgcttgtatcggtgcatggcatccggctagggtctcctatacggttgcccgtgctggtcagaatgggtaccaccaccgcactgagatgaacaagaaggtgtacaagatcggcaaggctggacaagagacccacgatgcctccacagagtttgacaggactgagaaggacatcactcccatgggtggcttcccccattatggtatcgtgaagggtgactacctgatgatcaagggctgctgtgtgggaccaaagaagagggtggtgaccctccgccagtccctcctgaagcagacttcccggctggcgctggaggagatcaagctcaagttcatcgacacatcgtccaaatttgggcacggtcgcttccagactaccgatgagaagcagaggttctttggcaagctcaaggcgtaaggtgctgcggtgcagcgaagtcccatttctcaaaatcatcaaactgtgatacttttgtttgtaaccttgctgtaccaagttttgtagccggatggtttaggagcatggtccggtcttctatggatcgttccatgcttcagaactgtagtgtctatgttttgtgctattttggttgtttaatgccccaatcattacatatagatttcaattgttttgttgtttgatgatcaatgtaactatttatacttaggtcatgtttggtttctttagtctagggactaaagtttagttagggactaaagtttagttagggactaaagtttagtccataacatgtttggttctagggactaaaaatagtaagaatatactaaatgactcataagaaaactaaaa

SEQ ID NO: 103726 - DNA, 481 bp, Zea Mays
ggaaatgaagaataagaaagacaaaaaaacctgaaaaaaaatatgtgcattcaccagtttttgtagcagttttcagagaagttgaagtgcagctaaaacagaatagtaaaggtgacaggaccggttctcaactaaatctatgccctaggtgatttcttcgcatcaggaggcagcaaggttcagagatgctaacaagatctggaattttcattgaaattcatcaccatcaatcagtctagccaaccagaacaaccatggctcatacatggctcatgagttgcttccaagttcctccaccactcttcaacctctaaatcaaatcatcaagaacgatttcctcttatattttgctaagattaagcagatcaatgcaattcctgcaacacatgtatcctttttatacagtttcctgcttgctttgcgatcactacagttattaatttaagaaacaaaacaaaaggagaccagaaatcaaacaagc

SEQ ID NO: 103727 - DNA, 256 bp, Zea Mays
ttctttgccgagtgtcaaccagctggcactcggcaaaggctgctttgtcgagtgtcatttcttgacactcggcaaagtacatttttatttttttaattttcccaaccaaaatttttgtggtatgttcctacactatatagacctacatgtaccattttgagacaattagaaaattgttttctatagctagtagatttagttcgtttatttgaatttcttcgaaaaaatcacatttgaactgcaggtcactggaaac

SEQ ID NO: 103728 - DNA, 83 bp, Zea Mays
aggcaacacacataaaacttctagctagcatacaattcatttttcacatgataaatgataatatctataaacccaccaccaac

SEQ ID NO: 103729 - DNA, 1632 bp, Zea Mays
aactaacctctcctagggtttacgagcattgtggctcctcacttccgcgccgccacccccttcaggtaaggaagaggaggagggcaggatgtcgcaccgtaagttcgagcacccgaggcacggctccctcggcttccttcccaggaagcgctcctcccgccaccgcggcaaggtgaagtcattccccagggatgaccccaagaagccttgccatctcactgccttccttggctacaaggctggcatgactcacattgtccgtgaggttgagaagccaggatccaaactccataagaaggaaacttgtgaggctgttaccatcattgaaacccctcctcttgtcattgttgggctcgtggcatatgtgaagactcctcgtggcctccgcacactcaactctgtttgggcccaacatcttagcgaagaagtgaggagaaggttctacaagaactggtgcaagagcaagaagaaggctttcacaaagtatgctctcaaatatgaaaatgatgctggcaagaaggaaattcagctgcagcttgagaagatgaagaaatatgcttctgttatccgtgtcattgctcatacccagattaggaagatgaagggtttgaaacagaagaaggctcacctgatggagattcaggtcaatggtggtaccattgctgacaaggtggactacggctacaaattttttgagaaagaggtccctgttgatgctgtcttccagaaggatgagatgattgacatcattggtgtgaccaaaggtaaaggttatgagggcgtggtcactcgttggggtgtcacccgccttccccgcaaaacccacaggggtctccgcaaggttgcttgtatcggtgcatggcatcctgctagggtctcctatacagttgcccgtgctggtcagaacgggtaccaccaccgcaccgagatgaacaagaaagtttacaagatcggcaaggctggacaagagacccacgatgcctccacagagtttgacaggaccgagaaggacatcactcccatgggtggcttcccccactatggtatcgtgaagggtgactacctgatgatcaagggatgctgtgtgggtccaaagaagagggtggtgaccctccgccagtccctcctgaagcagacttcccggctggcgctggaggagatcaagctcaagttcatcgacacatcgtccaaatttgggcatggtcgcttccagactaccgatgagaagcagaggttctttggtaagctcaaggcgtaaggtgctgcggtgcagcgacaagtcccatttgtcaaaatcatcaaactgtgaaacttttgtttgttaccttgctgtaccaagttttgtagcaggatgatttgggagcatgttctggtcttctgtggattgttctacgcttcagaactgcagcgacattgcaagtgttttggtgtttgatcatcaacgtaactatttatattaattatgtttgctagtgtttaagaatatagtttagacggtgcaacgtggatttggatgaagacatcgtggtgatcaagaaattcatcttaaagtagtacagtagaagatttattgaagacttacgtagatcatgtaagagttcacacaagaagaaacacgaaattttttgagtt

SEQ ID NO: 103730 - DNA, 440 bp, Zea Mays
atgcctagaccccagcctccgtcgtgctcacctgcctcggtagtaagtacttcgtgtcgaagcaatggcagcaacaccctcctttgcgtcgtgctcaccagatcggacctcgtgtcgtcgatctgtacaattcctgttcggctatcggttttgccgattgtcgatttcctattcgccatggtcatcctgtcggttgttcctgtccgagctagcccagctcgcaagccgtcgcgccctctttacccattattgagccgtgtgttgccgcgttcacctcgttgcgtcgtcgtggacttgtcggcgtactgctatggtacctggatcgcgcttgcctcaacttgaacgagtcgtactgccatcatcttggtaaaatggaaattgtcgcgctggcacgtcgatatcgtcgatcgccatcctcgtctatgccaagtcccaagccg

SEQ ID NO: 103731 - DNA, 293 bp, Zea Mays
gaaattgtgtgcatcgcttgccagacgtgtgtgatcaaaggcgtcaaccggaaaccgtcgtcgtgcttccggctatcccatcgaattagtcaagttaagcaaattggttattcgtgctagtggattgatgaatggtctgactaggtatactatttattaggatgcccaagtcatctatagtgatttggtcgatgtcgtgtggagaaagaggtcacaataggtcccagtgcttgtgggattgtgggtgttaaaatgtgatgttttattaatatatgtgatacacatgttaacta

SEQ ID NO: 103732 - DNA, 440 bp, Zea Mays
atgcctagaccccagcctccgtcctgctcgtctgcctcggcagcaagtacttcgtgtcgaagcagcggcaacaacgccctcctttgcgtcgtgctcaccagatcgggccacgcgtcgtcgatctgtgcaattcctattcggctatcggtttcgccggttgtcgatttcctattcgccatggttatcccgtcggctgttccaatccgagctagcccagctcgccagccgtcgcgccctctttacccgttgagccgtgtgttgccgcgttcacctcattgtgtcgtcgtggacttgtcggcgtactgctgtggtacctggatcatgcttgcctcaactcgaacgagtcgtactgccatcatcttcgtcaaatggaaatcgttgcgctggcacgtcgatatcgtcgatcgccatcctcgtctacgccaactcccaagccgtga

SEQ ID NO: 103733 - DNA, 228 bp, Zea Mays
ggggggggggtagacggggcgtttgggggtagacggggcacgacgagccgtgccaaggcacgcgcactacgttttattttttttttttgtttttttttttttttttttttttttttttttgtgttttttttggttcttttttttttgttttttttttttttttttttttttttttttttttttttttttttttttttttttttttttttttttttttttttttttttt

SEQ ID NO: 103734 - DNA, 961 bp, Zea Mays
tatagctagccagccatcctactgtcacacacacacacacacacagacaagtggtttccaaagccaagtgtgtgtactagcaaccagctagctcgggcggcagcaggcagccatcatgtcggaggagaagcaccaccacttcttcaaccaccacaagaaggacgaggagcagcccgccggcgagtacgggtactccgagaccgaggtggtcaccgccaccggcgagggcgagtacgagaggtacaagaaggaggagaaggagcacaagcacaagcagcacctcggcgaggccggcgccatcgccgccggcgccttcgcactcgtacgttcaaatacatcacatatataacttgctcgtcgccgtcgacgacgtacctagctacctgccaccgatgcttcttaattgtgcttgttcttcgtgctgaccttccatgggtgctttatttcctcccgtacagtacgagaagcacgaggcgaagaaggaccccgagcacgcgcacaggcacaagatcacggaggaggtcgctgccgcggcggccgtcggcgccggcggctacgtattccacgagcaccacgagaagaagaaggaccacaaggacgccgaggaggccagcggcgagaagaagcaccaccacctcttcggctgaccgtagtaccggccggcgcgcgaccgagctagctagctccggcgcacacaaccacacacctgtttaattctgtactgcatgcgtgtgtaatttgatggttcacaataatgagtccctctccggaccttggtagctgcttgcttgtggtgagtgagagtgtgagactgagggagaagaggtggtgggcgtggggctacgtcgagagaggcgtgttcctgtaatcctgtactcgcttcgttttctctgcatgcgtctataattgtgttcaataataagtgagagcggtgtgatgtgtggctccccttgtcaggctc

SEQ ID NO: 103735 - DNA, 959 bp, Zea Mays
tatagctagccagccatcctactgtcacacacacacacacacacagacaagtggtttccaaagccaagtgtgtgtactagcaaccagctagctcgggcggcagcaggcagccatcatgtcggaggagaagcaccaccacttcttcaaccaccacaagaaggacgaggagcagcccgccggcgagtacgggtactccgagaccgaggtggtcaccgccaccggcgagggcgagtacgagaggtacaagaaggaggagaaggagcacaagcacaagcagcacctcggcgaggccggcgccatcgccgccggcgccttcgcactctacgagaagcacgaggcgaagaaggaccccgagcacgcgcacaggcacaagatcacggaggaggtcgctgccgcggcggccgtcggcgccggcggctacgtattccacgagcaccacgagaagaagaaggaccacaaggacgccgaggaggccagcggcgagaagaagcaccaccacctcttcggctgaccgtagtaccggccggcgcgcgaccgagctagctagctccggcgcacacaaccacacacctgtttaattctgtactgcatgcgtgtgtaatttgatggttcacaataatgagtccctctccggaccttggtagctgcttgcttgtggtgagtgagagtgtgagactgagggagaagaggtggtgggcgtggggctacgtcgagagaggcgtgttcctgtaatcctgtactcgcttcgttttctctgcatgcgtctataattgtgttcaataataagtgagagcggtgtgatgtgtggctccccttgtcaggctcatgtttatccgtattgaatcctggcaccatgcatgactgaggatctggatgtctatgaagcaccgtgtatctatcatcacttttgcaaaaaaaaatattcttatatttcttgaagtagcatgtcatgattcatg

SEQ ID NO: 103736 - DNA, 102 bp, Zea Mays
gctgttttaagggagggtggagcaggtttttttagatcccacctttcttcacaaaaacgactcccaatctttcggctccacacgagaatcagtttaaaaaaa

SEQ ID NO: 103737 - DNA, 2052 bp, Zea Mays
cgtccttctcctgggcatggacacggcgttgccgtcgaagagctcctcgatgatggcctccaggtcctcgccgctgagcttgacgtacttctccgcctgcctccccgcggtaaagtggtgcgagaaccgtcccaggaaggaccggtacgccggcacgatgaccgcggcgatggacacgcggagctcggactgcagctgctcgtcgctcaccacccagctgccctgcgtccgctggatctcgtccatggcggcgttgaaatgcttgaaccggtccttcagcacctgcttttgcacgtggcccttcacggtgatcacgccatcgtcgcgcagcaggttgagcacgcggctccaagtctcgcgctggtagttcttgtggtactgccgcaggtccgtcgaccgcttccgcgaccacgcctcgccgaccaccgcgtttatctccggcgagccccggatcttctgcagcatgtacctcccgttgttcatcaggaagatgctgctcagcgacgggtccttgtacagcctcgacttggcctccaggttgctgtgcagcagctccatcacctccatcagctgcgccgcgaacgggtccccgccaccgccctcgtggtccgcgtcgtcgtcggggcgccggtactcctggaacacctgctccagcgtcttcttgtactcgcacgcgtacttgaggtagttcatcaggtaccgggtcagcgggtgcaccgcgccgccgggcaccggctgcttcccggcgtccgcccggatggaactctccaggtcgcaaaagatggccgccgccgactcgcctacgcgggtgcgcacggaggccagctcgtgcttgaggtcaaccagggcggtgggcgcgctgccgccgtcttcgtcagctggggcagggcccccctcgccgtcgttggccgcgaccaggaacgcgtccacccgggggacggcgtcgcggatggcctcgtacatgtccagcaccttgaagagcttctccgcggcgcgcttagtcagcaccacggcctccgtgaaggtgagcatgagcagcattgcgcggcgcgcgaggtcggcgaagatgtcgcgcccgaagcacctttgcctgccggcgaagacgcgggcgcacaggtccctctcgccggggaggtccacctcgacggtgcgctggaaggccttgatccacgtcccgatctccgactccagcgcctcccagggcatcttcaccacgtcgtcgatgctcgccttctcgtacccgaggctctgcagcgacgcgtccagcgcgttccgccgcgccaccaggaacacctgcgtgcactccgtctcgtaccccgcggcgaacatagcctccgccatggcgcggagccggaccacggtctccggagggaacggcggcgaggcgtcggcccatggggtcgggacaacgcagcggtcgagctcggcgccgtgcccgaacgacggcggccgcttcatggacctgcccgtggcgctgcccgtgtcggcggcctgcggcaccaccttggcgacgcgggggtcctcgagcgtgccgtggaactcatcctccacgaacgtcatggcgcggtgcagcacgccggtgacgcggtgcaccccgatgctgtatgtggtggccctgcccggcgttttgtccgcggtgagcgcgcaagcgagcgcggacaggcgcctgatcgcggcgacgagcggcggcgcatccccggcctcgctcggcgcccacttgtcgtccgtgccctccgactgcgcaatctcctgctcgacggcgctggcaaacttgtccagcgtcacctccgagaccgccatcggcgcgtcgccgtccctgtgggacgcaaggaacgcgtcgatctcagccgacagcgccgcgaggtccggctccgcggcttcctcgggcacggcatcggcattgtcgacggctgctttatccttccgcgcctccttgatgtgctcggcgagcttgatggggccgagggagaggttgcgggcgagcttctcgtcgcgggaggtggccgccgagaagctgctggacttaagcggcgtgacggggatcctgtccat

SEQ ID NO: 103738 - DNA, 744 bp, Zea Mays
caaacaccattaattgcattcatcaacagagagaataatgggagaggagtaacggctccaataaaactccattgacgccgggacggcgaacggacggcgcgggctcggagtcggtcgtggggcttggtcaggcgcggtgcaggttggcgtcgatgttgcggctcggcagcgaggtcgcggtgcacggcgtcggtcgggttgcacggctcgggtcgcctgggcttcgcggcttcggtgtgcgtgcagtcgggtcgaggcagtcgggtcttaagcgtgcggtcggggtcgcgtcacgcttcggtttgagcgcgcacgtgctcgggtccggatgcctagtcgctgggcgcggtagagcgtcgtgcggggaaggcgcctggcggtcggtgtcgtagctcggagtcgcgcctggcagcggcgtcggggcacggttgcgcagggcgggtgtcacggcacaggggctcggggtcgtggatggccgaggctggcggcgtgcagggcgtcgaggtgcgcgggggaggcgcggtgcgcgcagcctgtcacggcttgctcggcttgaggcgcagggtcgcgaggccgtgctgctgggcgcggggcgcgcagggcgggggcggggtcgtggcgcctgctcgggcgcgatcctggcgtctccctggcggcgttcggctggagggagagagcagggaagagagaaacggaggcagggagagagagggccagggaacgacggctaccagggaaggcaag

SEQ ID NO: 103739 - DNA, 740 bp, Zea Mays
acacatggcagcctctctctcccataactttcgatatcgccttccatttgcccttcttctgcattattgtgaagttcctcctgccaccgccggaatcagcaccatgatcatctccagtgtaagacactgctgttatcaaaagttttaccattgaatctgtccacttcatccgatgccatgcagagcccttcttgcctttgccacttggggtatcagtagcatcttcagccacaacatgttcctcaccatcactcttgcagttctttgagtgatgactatggtgttggtggtggtggtcatcactctttccctgttctttgaactgaaacccaggaaagtcatcaggctctgtagccctggtcatagacattgtgaaagtacctggcatctgggagctgctgaagatatgttttcctgagtttggagcataattttgcatagagctgccacgtaagtctaaactttcatagggaaccccttgcaacatgtttccaaggggtacatcgttgccttccatttgctcaaatggatcacccagacaattaaaatttttgttaataccatataagggatgcaggaagtgccacaaaacttcacagcaatatcacggtgtcacctggaaaaggatggcgcacccagcaggcgagcggcgaggagaagagtcccgcggcgccgctgccactcgcacgccaccagccgcgcacctctccttcggtccttccctaggcagtaggcactag

SEQ ID NO: 103740 - DNA, 309 bp, Zea Mays
cttgtctgcaggtaaccttcagggcaacatattggtgtcgcttctgggcacagctacagcttaagatggaggaccaagagttaataaaatcttcatgtcgcaagatggagatggtgctactaaagttttttcgcaatttcggatggggagctgcttggcgattaacgttgtagtacctttggtcttgtcataggtggtcttgggtgcagtcatgtgttttgtcaaggcagtaagttgccttcagttgtaaacgttggccgtagcctctctagaggtcaaggtcggactatgtttccattataaaaaaaa

SEQ ID NO: 103741 - DNA, 102 bp, Zea Mays
attcaatttcacagatttagggaaacatgttcacaggttcatattaacagcttcatcatttgcaaagggttgtcaatcttagttttcagactgaatcacaag

SEQ ID NO: 103742 - DNA, 480 bp, Zea Mays
tgtacaggctaatcctccgtagctccactcaaactgttgtacatacaaagatatagacgacaaacaagattggtgtcagaggctcaatacttttttacaaacatattgtctgctgagtctttcatatggaacattgatggggaatcattaccgatgaatgaattagatttcaaaggagaatggattcagcaagggaacacatgttggggttatcaactgactcagaataccaggataatcaagccaatcctgatgtccaagatcgtagatcacaaagtcttggagctaacaggaattctgatgccagcttatctttgaaagaccacgtccaaggttcagggcaggatatgagaagggacagtgacgtgactgagtggtaaacaagttgagcaggtgcaatctatttctgaattagagaagaaaggaattgcggagctcctcaatgaggatgacttgaacaaaaaattccaggagtacccg

SEQ ID NO: 103743 - DNA, 650 bp, Zea Mays
accaggacgagcctataaaaaccggcgaaatccttggctctcctctcctcacttggccaccataaccacaacctcttctcccctgtttcctctcgtgcgttctccgcaggagcgaggagggctcgcggcagcggcagggtctccgggtacgtcgtgaatgagaagagaaagggttggaggaaatatttccgaatctgtttccattacgattttggtggcgtagaatttggtttcaaacgcgcagttatgcgcacactagatcagatccgacttgttctgcggcattccgattgcttggcccttttttgccgattagttatctacgtaaaccatggtcggcataatgcgtttttgtttattgccttggtctctgaataaaggtagttattatttggttcttgggtaatggagtgccattgaatggtccctgcatagcgtggtattggttctgtagatttagatgaatcacagtgtcaagagagacaagattcacctgaatcctctgctaaatctgaaaaatagagatgatccaaggtcctctgctgaaaatgcagttttcttgttaataccaagcattctgccgtttcctattgagatagatattctgttactgatttttaccctagcttggtctcctctcctcctagtgt

SEQ ID NO: 103744 - DNA, 1682 bp, Zea Mays
accaggacgagcctataaaaaccggcgaaatccttggctctcctctcctcacttggccaccataaccacaacctcttctcccctgtttcctctcgtgcgttctccgcaggagcgaggagggctcgcggcagcggcagggtctccggtgtttttgttccagaatctgtagcaaatggctgacggcgaggacatccagccccttgtttgtgacaatggaactggcatggtcaaggctggttttgctggtgacgatgcgccaagggctgttttcccaagcattgttggacgcccacgtcacactggcgtgatggttggcatggggcagaaggatgcgtatgttggcgatgaggctcagtccaagaggggtatcctgactttgaagtacccgatcgaacatggcattgtcaacaactgggatgatatggagaagatctggcaccacaccttctataacgaactccgtgttgcgcctgaagagcaccctgtgctgctgaccgaagccccactcaacccaaaggctaacagggagaagatgacccaaatcatgtttgagactttcaatgttcctgccatgtatgtcgccatccaggctgtgctttccctgtacgccagtggacgtacaactggtattgtattggactctggtgatggtgtcagccacacagtgccaatctatgaaggttatgcccttcctcatgccatcctgcgccttgaccttgctgggcgtgacctgactgacagcctgatgaagatcctcactgagagaggttactccttcaccacctctgctgaacgcgaaattgtaagagacatcaaggaaaagcttgcatatgtggctcttgaatacgaccaggagctcgagaatgccaagagcagctcatctgtggagaagagctacgagctgcctgatggtcaggtgatcaccattggggcagagaggttcagatgccctgaggtcctcttccagccttccttcattggtatggaagctcctggcatccatgagaccacctacaactccatcatgaagtgcgatgtcgacatcaggaaggacttgtatggtaacattgtgctcagtggtggcacgaccatgttccctggtattgcggaccgtatgagcaaggagatcactgcccttgcgccgagcagcatgaaaatcaaggtggtggcaccgcctgagaggaaatacagtgtctggataggaggatccatccttgcctccctgagcaccttccaacagatgtggatctcaaaggctgagtatgacgagtcaggacctgggattgttcatcggaagtgcttctaagctctgggtcccccttcggctccattttatttattccttgagtgtttttcatataagctactatgtttgggattgcatgcctttgagcaggcaatgttgttgaatttatattttgggatttatattttgtggctcactacaatgcatacattgctccagctcctttccatgccaaatttgttgctagtggtgaaaacatcaaccacaaaaaagagaggatggaaattaataaagtacctaggatcatattataactgtacttgtcgagtaacactattggttctctttgtacatccatctctgagacatgcaattcatttgcgacgtgtttggtttgatgtagtgtaagggtataggacagttatctgataacgtt

SEQ ID NO: 103745 - DNA, 2671 bp, Zea Mays
accaggacgagcctataaaaaccggcgaaatccttggctctcctctcctcacttggccaccataaccacaacctcttctcccctgtttcctctcgtgcgttctccgcaggagcgaggagggctcgcggcagcggcagggtctccggtgtttttgttccagaatctgtagcaaatggctgacggcgaggacatccagccccttgtttgtgacaatggaactggcatggtcaaggctggttttgctggtgacgatgcgccaagggctgttttcccaagcattgttggacgcccacgtcacactggcgtgatggttggcatggggcagaaggatgcgtatgttggcgatgaggctcagtccaagaggggtatcctgactttgaagtacccgatcgaacatggcattgtcaacaactgggatgatatggagaagatctggcaccacaccttctataacgaactccgtgttgcgcctgaagagcaccctgtgctgctgaccgaagccccactcaacccaaaggctaacagggagaagatgacccaaatcatgtttgagactttcaatgttcctgccatgtatgtcgccatccaggctgtgctttccctgtacgccagtggacgtacaactggtattgtattggactctggtgatggtgtcagccacacagtgccaatctatgaaggttatgcccttcctcatgccatcctgcgccttgaccttgctgggcgtgacctgactgacagcctgatgaagatcctcactgagagaggttactccttcaccacctctgctgaacgcgaaattgtaagagacatcaaggaaaagcttgcatatgtggctcttgaatacgaccaggagctcgagaatgccaagagcagctcatctgtggagaagagctacgagctgcctgatggtcaggtgatcaccattggggcagagaggttcagatgccctgaggtcctcttccagccttccttcattggtatggaagctcctggcatccatgagaccacctacaactccatcatgaagtgcgatgtcgacatcaggaaggacttgtatggtaacattgtgctcagtggtggcacgaccatgttccctggtattgcggaccgtatgagcaaggagatcactgcccttgcgccgagcagcatgaaaatcaaggtggtggcaccgcctgagaggaaatacagtgtctggataggaggatccatccttgcctccctgagcaccttccaacagatgtggatctcaaaggctgagtatgacgagtcaggacctgggattgttcatcggaagtgcttctaagctctgggtcccccttcggctccattttatttattccttgagtgtttttcatataagctactatgtttgggattgcatgcctttgagcaggcaatgttgttgaatttatattttgggatttatattttgtggctcactacaatgcatacattgctccagctcctttccatgccaaatttgttgctagtggtgaaaacatcaaccacaaaaaagagaggatggaaattaataaagtacctaggatcatattataactgtacttgtcgagtaacactattggttctctttgtacatccatctctgagacatgcaattcatttgcgacgtgtttggtttgatgtagtgtaagggtataggacagttatctgataacgttacatgtgtttgttatgagttctattggaatcggatacattagaatcggataccacagtatagaaaactcaaaccctccaaccctagccggaatcaacgacccgattcactcgctcggcgccgctcgagccttcctcctcggacgccagtgccacgccgcgccgccacccagcctccctcctcctcggacgctagccgccggcgccaagtattcgccgccgtccaggtaacaaatcctgttctctccgaatctcaagtttgcacagagtccgtctcaccgaattccctagagtccgtttctccgtctctccgggtctggtggccacacctccgaaaccggctccttgttcctgtcgcctgccatcggcgacagatgcaacgagacgcagcgggatgctagctagagcgcgcgccaccactgtttccgtcccgctcagggccgtgacttgactgagcctcaagattgctgctgctggaatcattcacgggcttcggtctagatgatgactgatgagcgacgactgggacttgtgcgtgttcgccagatctagctagcatcccgttgtcagcctgttcctaatctaaacggagcagcaatggacagcattcttggacgacgacgtggggcacagtgggcagctctgtccatgtatttatctgactggaatagccaaagccagctctgtccatcagctctggatagctctgccatcagctctgtccatgtatttatcctcaagaactcatttgatattcagatttatcctcaaatctgaaaccgactgcagtgagcagccatgtcgtctgtttaatttatttgatgtgcacaatgatatccagatttatatgaaactcatttgttgacctccagatttattctcaagaactcgacgaaggaatatggcatttaggggtatcttgagttctctccttgtcacgtactattatgtctggttgctcatgggattagcatatagaagaaaatgtctg

SEQ ID NO: 103746 - DNA, 427 bp, Zea Mays
gttatattttagatcttttgtttagcattttttaatccacatgtatttctctatcatataaaactctatattgattctttaaaataatttatatgaatttgataatgtttgtcacaactcacatgaattatgtataccatcatgaattgatggttgagagactatgcgcgaggcatgcaaattaacaagactcatacaagcgtcgaacagtgtgttgatgatgatcagacacaagggcagcacatgatcagatcttaacatgtttggctttcgaacatgcttttctccagatcccgaaggaaaaagaagatccggtcagatatatgtcgatgttcatcccaacgtacataagctatcaatggtattatatgttcccgttgcaacgcacgggcacacaactagtaaagcatgaaaaaaggaagtgcaa

SEQ ID NO: 103747 - DNA, 439 bp, Zea Mays
tgttgcgccgctcaatttcaatccggaggctgaagccacgggggagaagggcgcatggtttccgcagcgcgcgctgcatcccttctggccttgttgcggcctccggagcgcggatcttgacatcggcgacgacaacggcgaggaggaggatcttctcacggcactgcgaccctgcgagatggacatcgtatgtgaagtgtgtggtgttgttggctacaggcaacttttaatacaatgtagcaattgcaaaaatgctgcaaggcacctgtaacttctctttctacttgttctttcaaagtcttcatgcctcttattttcaaattaaaattcctaagtaaaagaacaaaagaaatgcatggattttgactatcttgccataattaattttgggatttcttggacacatgatttattaacattttatagagaattatttgca

SEQ ID NO: 103748 - DNA, 3064 bp, Zea Mays
atggagtgtctggacctctcaatgggaaaagatggctgctctttttcacagaattgtgttgaaggcttcacccaaggaacaaagtctgactttttttcttcaatcaatgatgttgagacatcatatccatttgttaagggtagttcttgtcctacactaccgaatatggagcaaaaagatggtgtattggaaaatgcggaacaacctcatcttttggagatggttaatcttgatggtacaagccattcacttgtggaccctccattagaaatcaaagaacaaggagcggaagctggcttatttgcttcagttgaagatgtcgagcaaacccatcccattttaactgatgaaactagtcctatatggtcaagtgaggagcaagtagacggttcttgtcctgcatcggaaagccgggagcaacctgttcctttcaaggtggttatactcggaccatggcatgatgtgccaaatagcatcctaagatcaaggcctccttcaaactactcacagtccatgcaaggatcagatctatatgttggaaatgtggatgtattggatctttctaaggagcagttggactcgaggttaaaacctgaagaacaaggagcggaggatggcttatttgcctcagtggaatatgttgagcaaacacatcccaattttactgaggagaaagtagatggttctattcctacaccagcaagttcggagcaacctgatcagttggaggtggttagaccatgggatgatgcgccgaatagtaccctaaggtcaaagcctccatcaaactactcacagccaatgcaaggatcagatctagatgttaggaatatggatgccttggatccatctaaggagtggttggactcaaggttattgtcaaatacggtagagccatcaagttcctcaaatggaggaggcacatctgttgagaaagacaacattgaaaaaacagaacgcttgtcaggcattgacaccgtcacccctggactggataatgtccagggatcaaatccctcagcagagccatcaagttcctcaactggagaaggaaactcagctgttgaaaaacacagtgctgaaatgacagaatgcttgttaggcatgggaattttgaaccctgcactgcataatgtccaggtattgagtccctcgacaccaaaagaatgcttggtttctagcgcagacaagtcagatgtagcaaataggtcagatgaaattaatcacagtctcgatgattttaaccaaagtaatcccaagccagtgctgaagggaagagtctccaaaatgatgtgcccaagacttgcgtttcaactgccaaaagtgttgcctgtatgcgaacatcacaaaagggagatgtcattgccttccaagcatgttagtccacggaaagcaacaaaaagtagctttagaaagcaatatgaaggaccaaacagacatgtttcacgtcatactgaacatcagaaaaccaaactcgttatgaaggacagaaatacaggtcctgctcatatgagaagttgtaggccaacaaagcaaattgattgtacttgctcaagtgcttccttggattcatctacaaagactaaggaagtaaatgatgcagaaccaagatgttctaaatctgtaaaaacttttgagaatgtcatggccaagaaaagaaaacgacctattctatcatatgatgaagatgccaaggccatgcagatggaagtgaggatgcgcaggagacacagggaaagtggtgtgatgaagctgcgaagatccacagaaaattctgatgaagcgatgtgtccaggaaattcaaataatcaacttaccaatgatcatacgaaggcaaggaagcagagaagggccaacaaagacaataaaacaccaccagtgaacgctagtgttccatgcacacagattgatgctgcacgattagcatcagatcagcaaagctttatttgcacgcgacccattgatagaccttactggactggaatcatgaagattggccaggaatatatttcattggttgcacacctgtcaaatcaagcatgcaagaaggtgcaggaattatcgatgtcattaccaccactaatgaaagtaacaaagcattcaaagttgaaagcctggccagggaggtggaaggcatcggaacctactgctgaatgcgttggcttgtatttcttctcagataatatgagggaactggatcaacttgtgcattatctcaatgatcatagcttagtcctaaaatatgtcgttggctttgccaagctgctgatctccccgtctgttttcctaccagagcaatgccaaacgttccaagggaaacgctatctgtggggagtgttcaagcgcaggatgaatacggggagaatacatcatgtgaatgcaaagtgacaccctagtccaataaatccatgttgtgaagggtatcgctagctcaaagagacaacagttcgccaagcactgttgatgcctttttgagctgagaccgacccctgtgatcataagcagccccgcgagaactctcccctacccaggctatcgggccttgtcattgtgcggacgtctgaggtcggagcacttcatttgtttgggagctggaaaaatgaaggtgcactggttggtttctctgaacttgtgaaagggttagcgaaggaccgtactgtaatgttcatggcctggaggaatgatgcagcaagtaggatcagaaatcagaactagccagcgacaatcacgctccagcttctgaaacgttgctgtagccttttgttgatgttcaggactgggagctagattgtcacgatttgacactgaggacgttactgtgcctgcaagcctaacctaagatgtatcaagcatcaagtgctgctgctgctgctatggaaggtcttagccaaaattaaattatgtttctaagctctgcatgcatcttaacctgcgctaataggttttcttgatggcctcaatgggagcagcaggaacctactactttttatgcgcataaactggcacttcgcatgatgtacttgttcataagttggtcaaaaagtcggttccgtggggtaaatcc

SEQ ID NO: 103749 - DNA, 221 bp, Zea Mays
cgtaacttatgctaaataacatggatatcatttttgcattcacggttttctatttttcgagtgacttgcagttcaaatctgaattatccgagtaaattcaattaaaagaacaaaatctaatagttataccaaacacttttataattgtgccaaaatagaacatgtaagtctacatagtgtagtaacaaaccacaaaaagtttagttggaaaaagaaaaaaa

SEQ ID NO: 103750 - DNA, 1879 bp, Zea Mays
atggcggcgtactacaacggcggcgccagcacggacatccaggccagcaccgatggcctgcagacgctgtatctcatgaacccgagctacgccgggtccaggcgccgccgccgtcgggctattggcgtgtcggccacgtcgcaggggcaggtgctgctgagctccaagtacctcaaggccgcgcaggagctgctcgacgaggtggtgagcgtcagcaaggtcgtggtggacgacgccagcaagacggccgtcgccgcggccaagagcctggcggcggcgaagaaggaggaggactgcgagggcatttccaccgaggacggtgccggcacaaagagcggcagtggcagcggcgcggcggagttgtccacggcggagcggcaggagctgcagacgaagaagagcaatgcaagcttatcaatatgcttgacgagtgtaggcgttcacaggcccgtgttctgcctcctgcgcgtccgcatctcccgtctcagcaatccgcgcctccgccgccgcaatccacgccagcgattccttgcctccgcgcaatgcccgtccatacatggctccgccgcattccacgccgcgcgagccctcgcctccgtggcaacgcaccggctcccatcgcacgctcttcccaccgcgtgtccgcgtctaccgcacgctctccctcaccgcgcggacagcgatggaaggtcgccccaatccctgcacccgctcgcgcagcttgacctcgccgcctcccccaccacgcgggcgccgatgcgggcgccgatggaaggtcgccccaatccccgcacccgctcgtgcagcttcaccgacacgcatcggagggtaatcagcttctcgtcgacgggaccggggggcgaggaggcggcgcggcgcgagacgccggaggagacgcggaagcggctggaggaattggacgcgctgctggaggggctggtcgagcccaagatgcggccgccaacaccacctcctcctccggccaatatgccgttaacaaaacaccttagagtcgctattatcgatagcaatccagcgctggagtcaagaagttacctgggcaaaaacagtatacccgattctagggtcagcaccgttacccctgcaaccatttccttcttcgaggcttctagactaaacgagtcaacaatctcaaacaggatgactccaaatatggctgcttgcattgctgtagagagcatatcaattcttgagaagctccattctaaagggtttgtgcatggtgatgtgaaaccagagaattttctgcttggtcagcctggatcgcctgaatataagaagctttaccttacagatcttggtttagcatccaagtggagagagaataatggtcatcatgttgattatgatcaacggcctgatatctttaggggaacaattagatatgcgagtgtccatgctcatttggggcgcactggtagtaggagggatgatttagagtcactggcatacacccttattttcctgataagaggaagattaccttggcaaggctaccagggagataccaagagtttccttgtttgcaagaagaaaatgtctacttctctggagatgctttgttgttattgtccagctccattcaaacagtttcttgagattgtcacaaatatgaaatttgacaaagagccaaattatgccaagcttatctctctttttgatggtttgattgaagcacctgcttcgagacaaatcagaaatgatggggctctcaaggttggacagaaacgtggaagactggttgcagatctagaagaagatgaacaacctaaaaggaaggttagattagggagcccagcggctcaatggatttcagtttataatgcgaggtggcccatgaagtagaggtaattacaat

SEQ ID NO: 103751 - DNA, 504 bp, Zea Mays
gttggacagaaacgtggaagactggttgcagatctagaagaagatgaacaacctaaaaggaaggttagattagggagcccagcggctcaatggatttcagtttataatgcgaggtaccattacaatgtggctgactcgaggctaagccaacatatagaaaagggcaacgatgatgggctttacattagcagcgtggcttcctcggcaaacctttgggcactcatcatggacgcaggaaccggtttctgttctcaggtttatgagctctcaccagttttcctccacaaggcttgcatattgatcttccatttcctcactactttcccgttagcagtgcaaaatcctattgtttctcttgaactccttacacccagaaatcatacaaggggaataattagatatgcgagtgtccatgctcatttggggcgcactggtagtaggagggatgatttagagtcactggcatacacccttattttcctgataagaggaagattaccttag

SEQ ID NO: 103752 - DNA, 832 bp, Zea Mays
ggccggcgctgccggttggattcgattcctcccagacttgtcgtccccaagcagcagcctttccctccctttcccatggccaccaagcccggcagggcggccgccgcggtgctgctcctcaccctgctcgccgctctacatgtggccgcccacaacaacaacaacgagaaccgcaacccgagcggtggcggcggtgacccgggcgccttcttcgccgggatgccgcggttcagcggcggcggggtgccaggcagcggcaggttcttcggcgggtggggcgagggcggtctcgggtaccggcgcggcgttgtggtgccgccctccacggtgtgcccgcaggacgggccctgccgcgggaagcgcctcacctgcccgccgcgctgcttccggaccttcagctacggcggcaagaacgggggcggcggcggaggctgtagcttcgactgcaccgagcgctgcgccgccacctgctgagtgaatctgggatgtattagaggagggcgtggccgtagctatagctaaagctcgtgtactccttcgtctacttggcatgcggtgcactgcttcttactgctcgtccactcatacgaattatcgctactactattagtatcgaggtggtttggtttcgtttagctgttggcttgttgcgagctgtgatcggtcgtgatcacgtacgtgatgactgctgagatcatttatgcatgtgtgtctgtaaatttggtgtctgccggtgccagtgccagactctgatcaataataataataataataacagagcagaggagatgaatattgagaaaattaaatatgtaccattaaaagattataa

SEQ ID NO: 103753 - DNA, 198 bp, Zea Mays
atgggtatctggttcgctaatctgggtgcatcgctggcatggaacaattttgagaccatgacgtttgaagacccgcctaggggaacctgcagggaggcggcgtacgcctcgctgcgaccgaagggtcgcttggatgcctccaaactctcggcaagggtcgctcaggggagccacgtcaaacctccgcgctttaagtag

SEQ ID NO: 103754 - DNA, 237 bp, Zea Mays
atggcagagccatcagatgggccagccaccaagtcgtggtcacgtcttacagcaccacatgccatggagacaccagcacctccgttgcgccattgtggctccgcagaacagctagtactgggatgtaggtggggcattagcgattggaaaatgccaaagaggacaagcagccagccagcaaccgagcaacaacaaacagatgcatttcgatttaaaacttttgaaatagtttcatga

SEQ ID NO: 103755 - DNA, 647 bp, Zea Mays
cgccggacaggtacaggtagtagtacgggttggacgacgacggcggcgtcggcggagaggagaagtgcgagggcgccgacggggaagatgaggaagacgacgacccgctgctgctcttcggtggcggcggcgggggcggtgacggcggaggctccgacgacgaggaagaggaagaaggcggggtcgagcacggggactccggcgccgggctcgttagcggcgtgaccgggggcagcaggtcgtactcgtcccccggcggcggcggcggtcccagctccaggtacggcggcgggggcgcggacagcggaagcagcgccagggccggcggcggcggcgcggtcatcggcaggatcgtcggcggcgacgccgtgcagatcgtcgggcacgtcccgcacttgctcacgcacagctggtgagattcccgcgaggctggtggacctctgggtttataagacgaagcctggagctggaggccaagcgcggcgggcaaacaaatgtgccaaacttgaggcgcaagctctaactaacggagagagagatgagcaatgctggctgtgcaacggggatgccggggtcataataggctataaactttacactgcaaaatttaagggtcaaatcagattaggatcgggccttattcttat

SEQ ID NO: 103756 - DNA, 1011 bp, Zea Mays
tcgccgaacccaaagcgaaccccacaacgccgccacccccacctccgtctgctctcaccgaccagcacagcgccgcttcgccggccgccggatccagcatgcagccctcgtcctcgtcctcgtcctcgtccgcgcacccgcccgaccaccacgacgcaaagccctcgggccccgccatgggctaccccgtccccatcgggaaccccgccgctgccgccgtcgctaacggctctgctccggcggccttcggcatcgcgtacccctaccccgccccgcctcatcacccgccgccgcaccaccactacccgtaccctccaccgccgccgcaccaccaccaccactacgcagcccacccgccgccgccgcccagctgcctgcgccacctcctcgcggccatcgtcggcgccttcctcttccttggcgccgccaccttcatcgtctggctcctgctccgcccacgcgccccggccttcgccgtcacctccctcgccctgtcccgtgtcgcctactcccctgccaactcctccctctccgcctccttcgacgccgccttcctcgccgcaaaccccaacagcaagctctccgtcgcctacttctcgcccctcgcctccgtcttcctcgcgccctcctccccgctcgccgtcgcctcgctcgcgcccttcggccagggccccggcaatgccaccacgctcgccttccgtctcgtcgtcgaggacgcctacgtcgggcccgacgccgccgccgcgctcaagacgggcgccgtcgacgtccaggtcaggctcatggccgtcgccgtcttcgatagaggggggtggcggacgagccggagggtcatgagggttatgtgcgatggcgtcaaggtcgttttccgcgggaagaattccactgaggcagccttccatgggccgccaagaaggtgtgatgtcttcctgtgaaggtcagttgccctggtggttttactctccgatcatgtaatcttactctcgcaatccagggcggtgtacgtttttt

SEQ ID NO: 103757 - DNA, 1242 bp, Zea Mays
tcgccgaacccaaagcgaaccccacaacgccgccacccccacctccgtctgctctcaccgaccagcacagcgccgcttcgccggccgccggatccagcatgcagccctcgtcctcgtcctcgtcctcgtccgcgcacccgcccgaccaccacgacgcaaagccctcgggccccgccatgggctaccccgtccccatcgggaaccccgccgctgccgccgtcgctaacggctctgctccggcggccttcggcatcgcgtacccctaccccgccccgcctcatcacccgccgccgcaccaccactacccgtaccctccaccgccgccgcaccaccaccaccactacgcagcccacccgccgccgccgcccagctgcctgcgccacctcctcgcggccatcgtcggcgccttcctcttccttggcgccgccaccttcatcgtctggctcctgctccgcccacgcgccccggccttcgccgtcacctccctcgccctgtcccgtgtcgcctactcccctgccaactcctccctctccgcctccttcgacgccgccttcctcgccgcaaaccccaacagcaagctctccgtcgcctacttctcgcccctcgcctccgtcttcctcgcgccctcctccccgctcgccgtcgcctcgctcgcgcccttcggccagggccccggcaatgccaccacgctcgccttccgtctcgtcgtcgaggacgcctacgtcgggcccgacgccgccgccgcgctcaagacgggcgccgtcgacgtccaggtcaggctcatggccgtcgccgtcttcgatagaggggggtggcggacgagccggagggtcatgagggttatgtgcgatggcgtcaaggtcgttttccgcgggaagaattccactgaggcagccttccatgggccgccaagaaggtgtgatgtcttcctgtgaaggagttttgaggaccattataccgggtttgctgacaactctcgatgctgatcggggggagacttttattctataggcacaagaagctaacaggcactgcgggtcgtttgttttgaccgggaatatccagcagtccagctgagtaaccatgctttttacctgactgtaatagagtagtgactagtgagtgcgagaaagtctgaaatggttcatgcttggtggtagattttatatataactatatttatatgtacaactccatgtacatgtatatataatttctagttcacaacaaataatttaaaac

SEQ ID NO: 103758 - DNA, 94 bp, Zea Mays
tttggattcatcgcaatcaatgtgtcttcaacggagagcagcctagggctagcaaggtcataaattgggtcatggctgagtctcatctctggtg

SEQ ID NO: 103759 - DNA, 103 bp, Zea Mays
ataatgttcattttggagtttggacaactatgtttatgtaaacacttattgcaaccatttgtaactatgttgttatgttaaattttgtgaatgtgaatgctta

SEQ ID NO: 103760 - DNA, 1094 bp, Zea Mays
gcctaccaacatccacacacttgcatgcaagataggcagcagccacttgtagagagattcttcctctacaactgaggcagcagggcaccgtgcaagcaacaagcgacgacgactagcagctgaggcagagcacaccaaacggcccgggatgtcaaccagagcgcgcggcggcgggaggcagttgcagttcccggtggggcggcgccgccggtacgcgccggtggtcgacgccgagtgcgggtgccggccgcgccgcccgaggctgctcagcctgccgtccttcctcagacggccctgcagccagctgatggacggtgttaaggcggctgcgacgacgacgacgacgaggggcggcgtcggcgagcagtactcctcctgcgcctccacctccaccgccgcctcgtcggcggccacacgcagcaccggcggctacgcgtcggcctactcctccgactactactactgctacccctcgcgcgtcgcatacggagctggagccgcagccaaggcgcagcaggcgaccaagaagaagaagaaggagaaggagaagcggggcgagaaggcggaggcggaggcggacggcttgggcgtggcggtggagaaggagtcgtcggacccgcgcgcggacttccgcgacagcatggtgcagatggtgttggagatggggctgtgcgactgggacggcctccgcggcatgctgcgccgcctgctcgccctcaacgcgccgcgccaccacgccgccatcctcaccgccttcgccgaggtctgcgcgcagctcgccggcgcggcggccgctgccgctcctcctgcgcacccgtcgccgccagcgccgtgccagtaccggcgctagctgatgacgatagcgtccaccctgcccgctcgtgccggccgggctgctgctctggtgacagggatagatttctcggagcagaggacattttttctttagccgtggttagtcaggaaactaaagctaatcaacgacatataaatatagcagtaataaagtggtgtgtggcagctagctagcgttaatagactagctagcaccatgtccttgatcccagtcgtagttgatgattgagttgcttgct

SEQ ID NO: 103761 - DNA, 113 bp, Zea Mays
gcgcattgcatgagagaactgtacgcatacattgtagcattccatttaagttacatttctaaaaagaaaagtatttaactttcagctttaaacaagggtttctaaaaagaaaa

SEQ ID NO: 103762 - DNA, 660 bp, Zea Mays
atgggggcggctggaggacaggcgctggtgcgagattgggaaagggagcgagaaaacgcagctgctgcaggggcggagctcgccaaccgccgccgtaggctggatcttattcttgatgatgatgaggaggaggaggatcgcgtagccttggccttggctccctacgttgatcgccattacaatgatcctgtctattaccggctgatctcgcctcgaacccgtccccgatccccatccccgtcctcacacgccggggacgacgacaacaagcgtgcttgcatcctggggctcaaggaggtggtgccaaccgctaagaacgacgacaactgtgccatctgcctcaacccattggccgatatcgttggtcctgatcctgatcacaagaaggacgacgccacagctacgtcgatgcttcgggccatgccctgctcccacatcttccaccagcactgtatcttacagtggctccatcgcaacgccgtctgtcctctctgtcgctaccaactacccaccactttcaaggacgaggacaccgaagaggaggatgaggatgaggatgaggatgaggaggaggaggaggaggaggaggaggaggagacgaacaactcaaattctcgattgaatcagatcagacgacgactgcagatcttgtataactaa

SEQ ID NO: 103763 - DNA, 99 bp, Zea Mays
gtttttttttattttatttactttctgtgatcataattactgtattttaagtaggctaatcactgttcatgctatgggaaaataggaagtttaatttaa

SEQ ID NO: 103764 - DNA, 1974 bp, Zea Mays
atggccgtgcccagccagccggccctccccttcccccctcgccctctctcttccatggatggaggaagaatatggagggaggaagaagatggctgttttgcaaaaacacacctagcagatttcgaaacccaacaatatgaaggtagaaaacgtgaacaacttcgcaggggcattggattggaccgcactagcaactttttcttcatggagaaagtggacatgatcatagctcgtgcatggcgaaggttccttgagaagacaagactgcaaaagctgttctcaagaaagaaaactagtaagccaaagatagattccaagaagaatgatgatttagctagtgaaatagaagacaaggagctttatgttgaacacatacgtcttgaaacaatggatttaagctttgggaatttatttggcaaggtcacaattcaagagcctacatttgaagaggtgattgtcttgtataggagaaaatgtccaaagggccaggatgatagagcaattcatgtaaagcacttcaaaaatatcccaatggcagacatggagttggttctgcctgagaagaaaaacccgagcctcacacgtatggactgggttcaatttattgtttctgttgtcattggacttgttacacttgtcagttcactggaaatgcctaaagctgatttctgggttgtaattgcaatcctctctgctctggcaggatattgcgcgaagatctatttctcgtttcaacagaatatggcaacctaccaaaacttaatcactcaatcaatgtatgacaaacaactagttagtgggaaaggcacactcctccacctctgtgatgatgtgattcaacaggaggtcaaggaggtcataattgcctactacattttgatggagaatggaaaggctactagtgatgatcttgacttgcaatgcgaggagttaatccaggaagagtttggcttgcaatgcaattttgaggtgatggatgccgttcagaagctggaaaggtttggtgtcattacaagagactctattggaaggatttgctgtgtccctctaaagcgtgccaatgagatcatcggcgcaaccacggaagagctggttatgaaagccaggcaaagctagcaatctattattttgaacaatgtagccgcattgtagattcttgcctgatggcgctgtaacgtttatggttactccagaaagtccaaacactgaactcttgcacaccaggtgcaaacatgtgatctttgggaaggtggtcagtggaattgctttgcttaaaaagcttgaagcagttggtagtgaaactggaaatccttcttatcaagtgaaaattgtagactgtggttaagtttccaacacaaattctcaggatctgctaaagggagataaaggtttgcgcgacatggcttttcatagtgctcaattggatctatcccctgagcataggagaaaagtatcaatttgtacagtggatccaagtattctataaagcatgcatcctccaatttcccacaagcgagaatggcatgatctgatggatgaaatggctgttgtatcaataaaataatatctgtcaattgcctttcaaggatcaattgtgtttcaagaaccacgctttgttgaatacttcagatcgttcatgctctgcaaggtgaggtctgttcagtttggctagaaaggcatcccctacctgaacacctacgacggccgcaccatccgctaccccgaccctctcatcaaggtcaacgacaccatcaagatcgatctggagaccaacaagatcatggacttcatcaagttgtatttgccctttcatggacttcatcaagttatatacttagttaggctcaatgttagcacaaacagttgatgagcaagtttaaatttagagtacacttatgtatgagttatttgacaatgcttatttatgagatattgaatgttatttatctatattatattaattatagtgttatt

SEQ ID NO: 103765 - DNA, 446 bp, Zea Mays
attgttcttctgttttgaaatctatatgggagaaatgttatgactaattattcatgtgctcccactgtgctaggatcttgacttgcaatgcgaggagttaatccaggaagagtttggcttgcaatgcaattttgaggtgatggatgccgttcagaagctggaaaggtttggtgtcattacaagagactctattggaaggatttgctgtgtccctctaaagcgtgccaatgagatcatcggcgcaaccacggaagagctggttatgaaagccaggcaaagctagcaatctattattttgaacaatgtagccgcattgtagattcttgcctgatggcgctgtaacgtttatggttactccagaaagtccaaacactgaactcttgcacaccaggtggtaagtacattctggtcatctctacagtagttctcctgtgagagctacaaca

SEQ ID NO: 103766 - DNA, 684 bp, Zea Mays
cttgacttattactatgtgcaaatagtagcaatgctccaattttcagtttttcgtatgcttgcttctaccttgcttaattttgaaatggcgcaggtttgcgcgacatggcttttcatagtgctcaattggatctatcccctgagcataggagaaaagtatcaatttgtacagtggatccaagtattctataaagcatgcatcctccaatttcccacaagcgagaatggcatgatctgatggatgaaatggctgttgtatcaataaaataatatctgtcaattgcctttcaaggatcaattgtgtttcaagaaccacgctttgttgaatacttcagatcgttcatgctctgcaaggtgaggtctgttcagtttggctagaaaggcatcccctacctgaacacctacgacggccgcaccatccgctaccccgaccctctcatcaaggtcaacgacaccatcaagatcgatctggagaccaacaagatcatggacttcatcaagttgtatttgccctttcatggacttcatcaagttatatacttagttaggctcaatgttagcacaaacagttgatgagcaagtttaaatttagagtacacttatgtatgagttatttgacaatgcttatttatgagatattgaatgttatttatctatattatattaattatagtgttattaaat

SEQ ID NO: 103767 - DNA, 93 bp, Zea Mays
atttcaaatccaagtttgattatgaacttcaagcatatattagatgtatcaaatagaagtctcagcataacaatgcgattattatatatatac

SEQ ID NO: 103768 - DNA, 120 bp, Zea Mays
gtacatccactcacggtcctccatcctctaacagaagcctagcaatagaaaatttcggcaccacctcccctgcacggggaggtttcgaaatcctacaaataaaactatcagcacgatggc

SEQ ID NO: 103769 - DNA, 1241 bp, Zea Mays
gtccatgccagtgccatcctcatcctatagcgaaccgcaaaggcatagtcacatagactaggaacgcacggcattctgcagatcgatttgagttgtgtgtgtgtgcgcgtgcgtgtgtgggaggttgcacttaccacacacacacataaccaagctacctagggtaggcgttgaatccgagcgctagcagtagcaatagcatcgtcgtcctccatgccgcagacaccttcgactcgctggtgcccgacgccggagcagctgatgatcctggaggagatgtaccggagcggcgtgaggacgcccaacgcggcggagatccagcagatcacggcgcacctggcctactacggccgcatcgagggcaagaacgtcttctactggttccagaaccacaaggcccgcgagcgccagcggctccgccgtcgcctctgcgcccggcaccagcagcagtacgcgcagcagcaggccaccgcggcggccccggcttcgagccctaacagcagcgccaccgttccgtccctcgcagcaggtggcagcagcgccggtgtgcatccggcggtgatgcagctgcaccatcaccagcacccgtacgcaaccaacttcatgccacaccagctgggctacatgggacagcaggtggcgactgttccgccagtgctgaacccagctgctgccggcatggtggaccttgcagctgcaagagcaggaggaggaaataaggctactgctgcaggtagtggtgcctatggaggtggagctgggttatacaacagctgcagcagcaatcagctggaggagtgggaggccacagatgcaatggagcactgcgacgccagctgcggtgcggcatcgggcagctctgacgagggtggcgcgctccagctgccgccatgctgccgccgtcctctaaagaccttggacctcttccccactaagagcactggactcaaggacgagtgcagcagctccaagtcctcctcttgctccacatccaccaactaattaatcgttattaccaaatcgctctagtttctacatatattgcttctagtagttcttcgatttgctggctagctagtagctagattcgatcatctcaagtgtgccattatattgttgtgttgtgtttgtgtgtgacgctacctgttttcatttgttataataactacgtttaagtttcagtactcgaactcaatctatgtatatctatcctggtgtaatggatttattgttttatcaca

SEQ ID NO: 103770 - DNA, 1149 bp, Zea Mays
acggtggccactcgtcccacatccgcttcgtcacgccccaacgagaggcggacgcggatccagcgacatggacatggctctatatatgccgtcggtgggggagcccctacaggacgacccaagcaagcaagctcgatctactactactactagctggtacacatactagccagcctgccagccagcttgccatggcgcccaccgtgatgatggcctcgtcggcaaccgccgtcgccccgttccagggtctcaagtccgccgccagcctccccgtcgcccgccgcagcaccaggagcctcggcaacgtcagcaacggcggaaggatccggtgcatgcaggtaataataactcctccatcacatgcatcttctttgcaggctgcagctagccagtgagccagccagcaatcgagctaggaactggtcgatgatgtaccatgtgtgtgcgcgcatgcaggtgtggccggcctacggcaacaagaagttcgagacgctgtcgtacctgccgccgctgtcgacggacgacctgctgaagcaggtggactacctgctgcgcaacggctggataccctgcctcgagttcagcaagctcgggttcgtgtaccgcgagaactccacctccccgtgctactacgacggccgctactggaccatgtggaagctgcccatgttcggctgcaccgacgccacgcaggtgtacaaggagctgcaggaggccatcgccgcgtacccggacgccttccaccgcgtcatcggcttcgacaacgtcaggcagacgcagtgcgtcagcttcatcgcctacaagccccccggcagcgagtagagaccgtggctagatcgacccatggccatgcctctgcctgttgatcggatcaccttcttgcattggttcctctctctctctccctccttttttttccctttatctcatcatttcttttctcctgcatgcaatggttccttttgcttccaacaattctcctgctgatgtatccagcatggcatcatccatctacaattacgtacgtagtgcaacgactgtcgattcgttgggtgaggaacatatatgtgaatgcaagctccggctaccatacatgtgtaatgtgtaatagatatatatacaaaactgccgaggcgccgacaatacttt

SEQ ID NO: 103771 - DNA, 1072 bp, Zea Mays
acggtggccactcgtcccacatccgcttcgtcacgccccaacgagaggcggacgcggatccagcgacatggacatggctctatatatgccgtcggtgggggagcccctacaggacgacccaagcaagcaagctcgatctactactactactagctggtacacatactagccagcctgccagccagcttgccatggcgcccaccgtgatgatggcctcgtcggcaaccgccgtcgccccgttccagggtctcaagtccgccgccagcctccccgtcgcccgccgcagcaccaggagcctcggcaacgtcagcaacggcggaaggatccggtgcatgcaggtgtggccggcctacggcaacaagaagttcgagacgctgtcgtacctgccgccgctgtcgacggacgacctgctgaagcaggtggactacctgctgcgcaacggctggataccctgcctcgagttcagcaagctcgggttcgtgtaccgcgagaactccacctccccgtgctactacgacggccgctactggaccatgtggaagctgcccatgttcggctgcaccgacgccacgcaggtgtacaaggagctgcaggaggccatcgccgcgtacccggacgccttccaccgcgtcatcggcttcgacaacgtcaggcagacgcagtgcgtcagcttcatcgcctacaagccccccggcagcgagtagagaccgtggctagatcgacccatggccatgcctctgcctgttgatcggatcaccttcttgcattggttcctctctctctctccctccttttttttccctttatctcatcatttcttttctcctgcatgcaatggttccttttgcttccaacaattctcctgctgatgtatccagcatggcatcatccatctacaattacgtacgtagtgcaacgactgtcgattcgttgggtgaggaacatatatgtgaatgcaagctccggctaccatacatgtgtaatgtgtaatagatatatatacaaaactgccgaggcgccgacaatactttaataactggtccttttatatatcgtcatctgtctatcataa

SEQ ID NO: 103772 - DNA, 1827 bp, Zea Mays
tggttctgcacggttcctctgttgatatgatttccacttgctttggtagacacatctacgaactacacgacctccatggcgctgccgctggacaggacctttaatgtcgtagccgactgcgaacggtttgaggagtacattggtgagctgcgagaggcagtgagggaccctaccgaaccgccgccattagcggcgactcatccgaacctctaccggctccggcagaccacgagacgggagcccaggcagtggctccaccttcggatggtggccaggaacgccgagatcattgtgtggatccgcacggacaacctctacgtcgtcggcttcgagcaggtgcgaggggcacggtacgagttcggtgttgaccccgccaatgacgccaaagagaagaacaagaagaagaaggataaagagaagaaagccaagaagaagaacaagaaagaggaccaggagcaacaggaacggcggccactgatatcgggcgcaacgttcctcgggtttaatggcggctacggcgatctccgtcagctgcagacgggtccggacccggaaaggcggacggtaccggacctcggacgggagccgctggtggaagccatccaaggcttggccgcgtacacgccggcggcgccagggttggtccgggactggcttcgaaccatcgtcgtcaccgtcagcgagtccctcaggctacacaacgtttgccggcatatcgcccggctcctcctcggtgagtacacgagagggtggctggaccaaagcctagtcgactgcatccgtgactggggcgacgtctcggcgtgtgtgcttgctagcgccgcccaccccgaaggcgacgctcatgggcggtacagtcagctgagtcacatctgcgagaacaccgatcaggcttgtgaggtggtggccatcctcaacgctggcgctgtccccgacgagccaggcccgagccgccgtcccaagcgtgaggccgcggtcggtgacggagacgacgacggctccgtcccgccgctggggctgaccttcgtcgaggtcttctcggcggtcgtcgagggcggcggcggcacggggaggaacaggagcctgctgtacgggcacatcgccatcgacgacgggctcagctcgggctcttcccagctgctcttcatgcgtggccgctccaacgcgctgccggcgagtcttgacggccaggtccagctcaccggcccggccagggcggtgtggggctacggcgaggtcgtcatgcacgtcgacctcatggacgccgccatcccacacgtcgccgacatgacgcccgacgacgacgatgccgaggaggtcggctcggggaagctggtgtggaacacgtacgacacgccgcggatggtgtacgacgaggccgaggagtacgtgttcgagggggtgtcgggcgccgtcaacgttcgctgcgccgtggtcaccaacgccgtcgtggccaccgtggcgctcaggcgcaccggctccggcggcgggcagagagtcgacgtctacggcaccgtctccgccgccacggccatgttcgccccacaggataaggtcacgctcttcagcagggagtggaaggacgccgtctccgtgggggccggcgaggacgtcccgctgctgaggaaggtcgccgtcgtgcagctcggttcgcctctcacgatatgcgccgatctgtggaccagggctcacgtcgccgacatgtcggttgatgatcggatctcatccggcgatgtggctgtgtttcaccccagcccctttggggtggtccggaagatgatcggcggcggcgacgtcgaggtgtccgtcacctggtcactcaactag

SEQ ID NO: 103773 - DNA, 2236 bp, Zea Mays
ggaccaatgggcctagagcccctagacaggcagtttccatgcctgctccaggcccaggcaaaacagcaccggactgcggctccaccattgccgttcctgtttcttcgaattcttctcccgttcaggcgtccatccctcttttctctcgtggcgacgaagacgaccgacgccgacgctgacgccctacgccaggtgccaggttccgtcgggtccttcgccggcgaagagcatccaccaggcgacccagtgctgttctggtgcggtttcattgcggaagttttgttgtgggattttccggtggcgaagatgatccgactacccatgtacgcggcgttcagcctgctggcgacggcttcggcggcgtactacgcgttcagcagccgggagcagttctacccggcgatggtgtacctctccacctccaagatctgcttcgtgctgctcctcaacacgggcctggttgccatgtgcgtcgcctggcagctcgccaggcgtctcttcctcggctccctccgggaggccgaggtcgagcgcctcaacgagcagtcctggcgggaggtcatcgagattctcttcgccgtcaccatcttccggcaggacttctcggtgtccttccttgccatggtcgctgcactgcttcttgttaaggcactgcactggctcgcgcagaagagggtcgagtacatcgagaccacaccctccgtgcccttgctctcgcacatcaggattgtatccttcatggttttcctgctcacggtcgattgcctcttcctgtcaaactcactcaggtcactcatacagaagcgggaggcgtctgttgccatcttcttctcctttgaatatacgatactagcaacatccactttatcaacatttgtgaagtacatattctatgtcagtgacatgctaatggaaggtcaatgggagagaaaggcagtttatacattttacttggagctcatcagtgaccttgtgcacttgtcattatacatgctcttcttcatagctatcttcttgaactatggtgtcccgctgcacttgattcgtgagctatatgagaccttccgcagcttcagaattcgcattgcagattacatacgttacagaaagatcacttccaacatgaatgaacgctttccagaagctacatcagaagagctcgatgcgagtgatgctacatgtattatttgccgtgaggagatgactacagcaaagaaactgctctgtgggcatctgttccatgtgcattgtctgaggtcatggctagagcgccaacacacttgccccacgtgcagagctccaatcgttcctgcagataatggacgtgctgcatcatcacgacaacatggagcccaggctggggttcaacctggtactgccactccatcctcagaaggagcaccaggtgagaacatgagcaggcgccaagcaaaacttgaagctgctgctgcagcagcttctttatatggaagatcttttgtttatcctccagcaaacaccctaaacagcaggtctggttctccccagcctacatcaagtgcaccacaatctgaagccagtagctccaatcatcagtcacaaaaagaccaagaaacacagctccaaaacagcagcgatggtttagtgcctctgccttttagtgcagatggtgttgttggttcaggaacaagcacaagagatcttgaaaattcactgcagaaggcacaagaaaactttattaagagccagattgagatgttacaaatccaactgcaaatggtgcagcgtggcgctgctgggttgagcagtagcgagaacactgagcacacagaagactgactgaatctgtaaacaggcactcctgcatcgtggagtaataatgagaatactgagcacacgcagctgaatctgtaaataggcggagatgaggatggggataaaagaaagcaatcaaagaattggctatacctgggggaaactgatgttttgcctggattttggtaggcttgttgactatgctttcctgttactgtgttagtgccttcttgccagcgttagatgtttctctacgtgtggtggtttctgtaggttgggtacatctaattgctagtttaattatacgattacacaaaattcttgtaccgagggaaaatagaaaggataattgtacaaatgacttttttgtgtgcatatccatgatatcgggattgtctgtagattttgtgtttactggagtaaaacagaaaatttggctgct

SEQ ID NO: 103774 - DNA, 2193 bp, Zea Mays
caatgggcctagagcccctagacaggcagtttccatgcctgctccaggcccaggcaaaacagcaccggactgcggctccaccattgccgttcctgtttcttcgaattcttctcccgttcaggcgtccatccctcttttctctcgtggcgacgaagacgaccgacgccgacgctgacgccctacgccaggtgccaggttccgtcgggtccttcgccggcgaagagcatccaccaggcgacccagtgctgttctggtgcggtttcattgcggaagttttgttgtgggattttccggtggcgaagatgatccgactacccatgtacgcggcgttcagcctgctggcgacggcttcggcggcgtactacgcgttcagcagccgggagcagttctacccggcgatggtgtacctctccacctccaagatctgcttcgtgctgctcctcaacacgggcctggttgccatgtgcgtcgcctggcagctcgccaggcgtctcttcctcggctccctccgggaggccgaggtcgagcgcctcaacgagcagtcctggcgggaggtcatcgagattctcttcgccgtcaccatcttccggcaggacttctcggtgtccttccttgccatggtcgctgcactgcttcttgttaaggcactgcactggctcgcgcagaagagggtcgagtacatcgagaccacaccctccgtgcccttgctctcgcacatcaggattgtatccttcatggttttcctgctcacggtcgattgcctcttcctgtcaaactcactcaggtcactcatacagaagcgggaggcgtctgttgccatcttcttctcctttgaatatacgatactagcaacatccactttatcaacatttgtgaagtacatattctatgtcagtgacatgctaatggaaggtcaatgggagagaaaggcagtttatacattttacttggagctcatcagtgaccttgtgcacttgtcattatacatgctcttcttcatagctatcttcttgaactatggtgtcccgctgcacttgattcgtgagctatatgagaccttccgcagcttcagaattcgcattgcagattacatacgttacagaaagatcacttccaacatgaatgaacgctttccagaagctacatcagaagagctcgatgcgagtgatgctacatgtattatttgccgtgaggagatgactacagcaaagaaactgctctgtgggcatctgttccatgtgcattgtctgaggtcatggctagagcgccaacacacttgccccacgtgcagagctccaatcgttcctgcagataatggacgtgctgcatcatcacgacaacatggagcccaggctggggttcaacctgctgcaggtactgccactccatcctcagaaggagcaccaggtgagaacatgagcaggcgccaagcaaaacttgaagctgctgctgcagcagcttctttatatggaagatcttttgtttatcctccagcaaacaccctaaacaggtctggttctccccagcctacatcaagtgcaccacaatctgaagccagtagctccaatcatcagtcacaaaaagaccaagaaacacagctccaaaacagcagcgatggtttagtgcctctgccttttagtgcagatggtgttgttggttcaggaacaagcacaagagatcttgaaaattcactgcagaaggcacaagaaaactttattaagagccagattgagatgttacaaatccaactgcaaatggtgcagcgtggcgctgctgggttgagcagtagcgagaacactgagcacacagaagactgactgaatctgtaaacaggcactcctgcatcgtggagtaataatgagaatactgagcacacgcagctgaatctgtaaataggcggagatgaggatggggataaaagaaagcaatcaaagaattggctatacctgggggaaactgatgttttgcctggattttggtaggcttgttgactatgctttcctgttactgtgttagtgccttcttgccagcgttagatgtttctctacgtgtggtggtttctgtaggttgggtacatctaattgctagtttaattatacgattacacaaaattcttgtaccgagggaaaatagaaaggataattgtacaaatgacttttttgtgtgcatatccatgatatcgggattgtctgt

SEQ ID NO: 103775 - DNA, 1996 bp, Zea Mays
ggcagtttccatgcctgctccaggcccaggcaaaacagcaccggactgcggctccaccattgccgttcctgtttcttcgaattcttctcccgttcaggcgtccatccctcttttctctcgtggcgacgaagacgaccgacgccgacgctgacgccctacgccaggtgccaggttccgtcgggtccttcgccggcgaagagcatccaccaggcgacccagtgctgttctggtgcggtttcattgcggaagttttgttgtgggattttccggtggcgaagatgatccgactacccatgtacgcggcgttcagcctgctggcgacggcttcggcggcgtactacgcgttcagcagccgggagcagttctacccggcgatggtgtacctctccacctccaagatctgcttcgtgctgctcctcaacacgggcctggttgccatgtgcgtcgcctggcagctcgccaggcgtctcttcctcggctccctccgggaggccgaggtcgagcgcctcaacgagcagtcctggcgggaggtcatcgagattctcttcgccgtcaccatcttccggcaggacttctcggtgtccttccttgccatggtcgctgcactgcttcttgttaaggcactgcactggctcgcgcagaagagggtcactcatacagaagcgggaggcgtctgttgccatcttcttctcctttgatgacatgctaatggaaggtcaatgggagagaaaggcagtttatacattttacttggagctcatcagtgaccttgtgcacttgtcattatacatgctcttcttcatagctatcttcttgaactatggtgtcccgctgcacttgattcgtgagctatatgagaccttccgcagcttcagaattcgcattgcagattacatacgttacagaaagatcacttccaacatgaatgaacgctttccagaagctacatcagaagagctcgatgcgagtgatgctacatgtattatttgccgtgaggagatgactacagcaaagaaactgctctgtgggcatctgttccatgtgcattgtctgaggtcatggctagagcgccaacacacttgccccacgtgcagagctccaatcgttcctgcagataatggacgtgctgcatcatcacgacaacatggagcccaggctggggttcaacctggtactgccactccatcctcagaaggagcaccaggtgagaacatgagcaggcgccaagcaaaacttgaagctgctgctgcagcagcttctttatatggaagatcttttgtttatcctccagcaaacaccctaaacagcaggtctggttctccccagcctacatcaagtgcaccacaatctgaagccagtagctccaatcatcagtcacaaaaagaccaagaaacacagctccaaaacagcagcgatggtttagtgcctctgccttttagtgcagatggtgttgttggttcaggaacaagcacaagagatcttgaaaattcactgcagaaggcacaagaaaactttattaagagccagattgagatgttacaaatccaactgcaaatggtgcagcgtggcgctgctgggttgagcagtagcgagaacactgagcacacagaagactgactgaatctgtaaacaggcactcctgcatcgtggagtaataatgagaatactgagcacacgcagctgaatctgtaaataggcggagatgaggatggggataaaagaaagcaatcaaagaattggctatacctgggggaaactgatgttttgcctggattttggtaggcttgttgactatgctttcctgttactgtgttagtgccttcttgccagcgttagatgtttctctacgtgtggtggtttctgtaggttgggtacatctaattgctagtttaattatacgattacacaaaattcttgtaccgagggaaaatagaaaggataattgtacaaatgacttttttgtgtgcatatccatgatatcgggattgtctgtaga

SEQ ID NO: 103776 - DNA, 2119 bp, Zea Mays
ctaccactctctctctctctctctctctctctctccaaatatattatcgcccatgtccgtgactggctctgccccctttgcttggattagctggctgacttctgagatttgtttccctgtatatcgcgcctggtaattttggatcattcgtttcttctaggcgacccagtgctgttctggtgcggtttcattgcggaagttttgttgtgggattttccggtggcgaagatgatccgactacccatgtacgcggcgttcagcctgctggcgacggcttcggcggcgtactacgcgttcagcagccgggagcagttctacccggcgatggtgtacctctccacctccaagatctgcttcgtgctgctcctcaacacgggcctggttgccatgtgcgtcgcctggcagctcgccaggcgtctcttcctcggctccctccgggaggccgaggtcgagcgcctcaacgagcagtcctggcgggaggtcatcgagattctcttcgccgtcaccatcttccggcaggacttctcggtgtccttccttgccatggtcgctgcactgcttcttgttaaggcactgcactggctcgcgcagaagagggtcgagtacatcgagaccacaccctccgtgcccttgctctcgcacatcaggattgtatccttcatggttttcctgctcacggtcgattgcctcttcctgtcaaactcactcaggtcactcatacagaagcgggaggcgtctgttgccatcttcttctcctttgaatatacgatactagcaacatccactttatcaacatttgtgaagtacatattctatgtcagtgacatgctaatggaaggtcaatgggagagaaaggcagtttatacattttacttggagctcatcagtgaccttgtgcacttgtcattatacatgctcttcttcatagctatcttcttgaactatggtgtcccgctgcacttgattcgtgagctatatgagaccttccgcagcttcagaattcgcattgcagattacatacgttacagaaagatcacttccaacatgaatgaacgctttccagaagctacatcagaagagctcgatgcgagtgatgctacatgtattatttgccgtgaggagatgactacagcaaagaaactgctctgtgggcatctgttccatgtgcattgtctgaggtcatggctagagcgccaacacacttgccccacgtgcagagctccaatcgttcctgcagataatggacgtgctgcatcatcacgacaacatggagcccaggctggggttcaacctgctgcaggtactgccactccatcctcagaaggagcaccaggtgagaacatgagcaggcgccaagcaaaacttgaagctgctgctgcagcagcttctttatatggaagatcttttgtttatcctccagcaaacaccctaaacaggtctggttctccccagcctacatcaagtgcaccacaatctgaagccagtagctccaatcatcagtcacaaaaagaccaagaaacacagctccaaaacagcagcgatggtttagtgcctctgccttttagtgcagatggtgttgttggttcaggaacaagcacaagagatcttgaaaattcactgcagaaggcacaagaaaactttattaagagccagattgagatgttacaaatccaactgcaaatggtgcagcgtggcgctgctgggttgagcagtagcgagaacactgagcacacagaagactgactgaatctgtaaacaggcactcctgcatcgtggagtaataatgagaatactgagcacacgcagctgaatctgtaaataggcggagatgaggatggggataaaagaaagcaatcaaagaattggctatacctgggggaaactgatgttttgcctggattttggtaggcttgttgactatgctttcctgttactgtgttagtgccttcttgccagcgttagatgtttctctacgtgtggtggtttctgtaggttgggtacatctaattgctagtttaattatacgattacacaaaattcttgtaccgagggaaaatagaaaggataattgtacaaatgacttttttgtgtgcatatccatgatatcgggattgtctgt

SEQ ID NO: 103777 - DNA, 303 bp, Zea Mays
atgtcgtcctcgccgccgtcaacaagcccgcctctgagctctcctcctaccagcggaaggtgttccgcgttgatggatctacaatcaggtggaccacgtcgatccctggatgaccgacaattgttgcggctcctcctctgccttctgcctcctctacaagttcttcaccatgaagctcaccgtcaagcagatgcatggcctgctcaagccccaagactacccctacatcagagttattggattcctctacctacaatatgttgcagaactgaagacattatggactcggtatgaaccctatat

SEQ ID NO: 103778 - DNA, 298 bp, Zea Mays
gccacgcctagccccctcggctcgcccccatggtgctggtcgtgtccctcggagccggtcacttcttcttgctattccatgccgcggcaatcgccctgctgctccagtgcgcccagccgagcgattctctgctccatgcgcgcggtatttctccagcatgccgcgcccagtccctgctccttgtttttctctgcgacgtggagtctcctcgccgcgcggatctctctccttcctaccctgctcggattgtgtcgcgcttgctgtcgcgttcggcctgctccggatccgaagttggtcg

SEQ ID NO: 103779 - DNA, 1050 bp, Zea Mays
atgccaagtacatcaacgaaccccgacgatcacctagcgctcgtcatcgtggtcgtcgtcgtctatgcatgcgttcttgccacgggggtcgccatcgtcgtcacctccgtgcaccgcctcgtcgacgacacccacaccacctgcggctgctgcggcagcgttggcgaactgcagcctgagccggccgccctcgcgcgtggcctgcaggagctccttcccggggatcaccacctccagcagcacgaaccggccgtcctcccggaacgaccggaagcacacgtacggcttgccgccgcgcccgatggacggtatcggcggcgggaacgtctttggctgcctctcctccttcaccgcctcctcggcgtcgctgccgtccgccgtgtccgtgcccttgagcgcggcggcggcggcctcggcctcggcctcggcgtcgccgtccttgaacatgtcgtcagcgtccacggtgctctcggagccgagcccctcggtgcagagcagcagcgacgcggaggagcccttcttggtgcagaagctcgcgctcctcttcaccgtggccacggtggtcgctggcttgggcctcagcagcgcgtccagcgacgagtcgtccttgctcttctcggcctcggccgcgatgtcgagccacgacagcgtgcgggaaggagggagcggcgtcggcgggggcgacggcgacggcggcaggagggcgcctcggtcgggctgctgcttctcctggaagtggagctcgccgaagatctccgtgaaggacgccgtgtcgatgggcttgctgctggggtggtgcacgttgcggttccacgccgagagcgcctccagcagcgtcgggttctccggcagcggcttctcgaacagccgcctcagcccgccgtccgccgcggccatcggcgcagccatcacctgcttatctctggacaacatgcacctgggctgcaagtctgcaactgcaaaagaaaggagctgaaggatgtgcagaacagttttgaggtctgtgactgtcaggagctagactcagatgtttgtatttctctcaactga

SEQ ID NO: 103780 - DNA, 935 bp, Zea Mays
attttcacgccacgccacgccacgcctctctcctctcctctcctctcctctcctcctcccatctcatcatctcatggccgcctcgcgcgtcggcgacccggcggagtcctcgcgcctgcgtatcggcgacgagatcgcgtggtccgagatcagcggcgtctacgaccgcgacgactcgctcaaggagaacaccaaccccaagtgcctcctcaagaaccaccccggcggaggcggaggcggaggcggccaggccaacggctcctcgcagcggttctctggcaacctcaagccgacggcggcgcccatcatcggcctctccggcaagctcggccagggcggcgcgcggcggcaccacccgcctgccatcttccccaagaaggccaagaccggcggcggcgggcgcgcgcccagggccgccgtcccggagcccagctcgcctaaggtgtcctgcatcggcaaggtgctctcggaccgcgagcgcgggcgcctgggccgcccgccgcggcctcgcggcgccgcgggcgggtgctgcggaggcctagcgttcttgatgcggcggagcaggtccaggaacagcgtcgagtgcgtcgaccagtctcctcctcctccgccgccgcccctggccgaggcgtccaggcggagggagaagagggagtcggcgcaggaggcggaggctgagccggcgccggggctgggcggcatgcggcggttcgcgtccgggcggcgggctgcggagtgggcggccgaggtggacggcgacggacgcgtcgcgacgtctgggccgttgtagcgcgtgcgcaggtgggtaggcaggcccccgtgtagtaggcggtttgggtgcgtgggtttcggtttgctttgttgctctttgtacacacttgttgaaattagattagaaattgagattttggcttgtcaagcttttttggttgctc

SEQ ID NO: 103781 - DNA, 936 bp, Zea Mays
caaccccctacaccactagcgtgcacacacaattgtgaaagaaagaaaaaaacacttgtgatcttgttctttccaacttacaagaacagctagagagagcttcagaactcttgccacaattctctataggtcttgcgtgtgtgtagctcctttgcagctacctctttgaccagctagcttgcctgccatcatcatgggaaactgcctggtgattcaagacaggaaggagatcaagatcatgagcatgggcggcggcggcggcgaggtcctcaagatgccatccccgccgggcagcttgagtaaggcggccgacgatgtcatcgtcgacgccgacgctgctgcagctggcgccgctgccgtcgtcagggtgaagctggtgatcagcaagcaggagctgaagaagatgctcgacagggagggcgtgtcgctggacgacgtggtgtcgtctctcgtgctgcgcaatcgagaactggaggaggtctgctgcggagggtggcggccggcgctcgagagcataccggaaggcagcgatctctagcatgcacgtacgacagcgcctggcatcggtcgttcagatgtctagctctagcttgtggaagtcactggatcagtgacggtcgtgcctacactacactggagtacacaagatactttttgggaataagcgtaagcaaaacatgtgtgtgctgggtataacattatatacacatatatatagagagaaagatagtattggtaggagttttgagatagggattctcttcatcttttcttgctgcctacgtgtgcttgtaaagaagaggtaaagatgatcctggaaatcaagcaagtcctttatgcatgtatactatatactatgtgtcctaatcagtgattcagtcatcacagttacaatcccaagggatccatatatatatataagctgcttcttatata

SEQ ID NO: 103782 - DNA, 202 bp, Zea Mays
aaaatacaaacaaggagattcttccctgcacgctgaggggcagcacacaggcacgtcaaaagacctagaaatcaatacctcgcacccctccactactaagttgactcggatgaaagcaaaaacagcgacgatctaatgtttagacctttcgtcgagcatatgttgagcgtcgcactggcctcgcttcttctccatcaaaaaa

SEQ ID NO: 103783 - DNA, 221 bp, Zea Mays
tgaggttgaagacctgcacggcgaacgtgtctggtgtgagcacacgagccgaaactggaagacgaaggcggggtaaatcagtggagcggttcgagctagaagatgttgtgctggcgatgcttcaccgacgaggagacttggagcagggcgcacggttctagtgtgtgcacggctggaggcgaggtcgaagtcgaggacgcacagcccgacgaggaacaggg

SEQ ID NO: 103784 - DNA, 94 bp, Zea Mays
aatttcttgacatacaggtagagtctagaagaatttttcctcaaaagaaagtgcttgaggcttcgattgatgctgatatcttattgcaatcagc

SEQ ID NO: 103785 - DNA, 492 bp, Zea Mays
gcgatttacaacacctgcataaccaaacttgagtggaatcacatttcccaacaagaagttacaagaatcagtgctcatgtccatgatatctaactaaagacattaaaatgatgttatcaaaatgaccatacagtgataaaaggaccataaaacattagctaagtacaataaataaataccttgctgataacacggattgtacgagaccctgccagataagcaagccttgctagttggagcgcatcagagttagctaaatcagaatttgcaggagaaacaaccaagataatacaacttggatgcttaatgtattgcatgatctttgctcgcattcttgattaaatatcactgggctagtctccaactggcatccgtgttattccaaggaagtcaaccaaggtgatgtctaggacatttggtgagaagactttcaaacgaatttgtttctcaataatccctttgttatctccaactttgtgcgcttcaagctga

SEQ ID NO: 103786 - DNA, 1878 bp, Zea Mays
ccgcagtccgcagttcctcccgcgaatgcgataccctgctccccgttccttcaattattccctcggctcgcgtgctaatccacggattaaactcccacctgctctccaaaaccttgacacaccgcacgagcgccgggcgaagagccattctcgcccgccctcgcgtccgcctccgcggacgaactgccggctcggtccaagtttagcgccccaaccccagaggaatggaggtggaggcggcggggccggataggccggagcctccctcgccggcgaaggggactggcgagaatggcgcggccaccacgctgcagaaggtgtaccgcagctaccggacccggcggaagctggccgactccgccgtcgtcgtcgaggagctctggtggcaggcgctggactacgtgcgcctggagcacagcaccgtctccttcttcgacgagcccaagccggagacagccgcctcgcgctggaaccgcgtcagcctcaacgcgtccaaggtgggccagggtttatccagagacggcaaggccctcaagctggctttccagcactggatcgaagcgatcgacccgcggcatagatatgggcacaacctgcacttctactacgacgagtggtgccaaagccaagcaggccagccattcttctattggcttgatgttggagaggggaaggacctagaccttcctgaatgtccaagagctttactgaagatgcaatgtatcaggtatcttggtccgcaagagcgcgagcactatgaatacatcattaaggagggaaaagttatccataaacagtctggagaaccgcttgatacaaggggtcctaaggggactaaatggatatttgttatgagtacagcaaaaaagatttatgctggacagaaacagagaggcgtattccagcactccagctttttggcaggaggtgcaactatagctgctgggagatttactgcagaaaatggagtgatcaagtccatctgggcatacagcggccactacaaacctagtgcagagaacctcctcaacttcatgaacttccttgaagggaatggagtcgatctcaaagaagtcgaggtacgctcatcgaccagagaagactacaacgaagatccagtgcctaatgactcgcagaagttcgcttcagctaccatggaaccaacaaatcttccacagctggtcccccctctaaacaccacgcaaggcaatgaaggcgacaatgctcctaagatcaagctaggccaacctaccaaaggaccttgtcgggcggtctgcagagccccagagccaccgaagtcccccagaaggcgattcttgagaggatgaagtccaagagcgggtctaagtcctaccagctcgggcacaggttgtcccttaaatggagcacgggggctggtccgaggattgggtgtgtcaaggactacccaatggagctcaggatgcaggctctggagatggtggatctttcgccaagggcgtcaactccgtcggcgtcgaggcgactgcctccgtgcttgtctcccactgaaatcgccttgccaacatcactgctcgccctgatctaggcctccctgcctcagccaagtgaacttcgagtagcttatgccacgcaaagagcacacaaccatgcggctgtccggttactgctattctgcaataccatctttcagcactgcaaagatcacatacctggtctgttgtcctttcttcttgtcccctgtcctgtggttccacagagagtagcacaatgcaatgctctccagctgaaataggctatgggcaagctgattctgtcacatttcagacatggtagctttgaagcagatggtgatggtatgtttttgttaccgtggtttaagtaacctgcttttcattc

SEQ ID NO: 103787 - DNA, 1525 bp, Zea Mays
cttttcgctagtgcgctcgtcgcgttgccgaccgctcgccccgccctgaaacgagggagctcggcgacggcaactagggggggcacggcagcgaggcgcgcacgcaggccacagaaacgggcggcgcggacgcaaagcgaaggcatcagcatccgaggtagtagcaggcaggagacctatctatcattctatccatcgcaccgagtgcgcatcgacacggcccaccagccgagcagtccagtccagtctagtccaccacaagtccccacagccgcagtaggaaccgaaccggccgagagggaggccggaggggggagagcagcgcagcgcagcgcgcggggtgggagtgggagccgcggcatggcgtccggcgtgtcgccgagcatggcgctggcgctggcgggcttctgcttcagcctcatcttcatcgccttcgtctgctcccgcctcgcctgcgcgctcctccgccgccgccgccgccgggcccgctcgcgcctcctcgccctcccgcgctactacaccgactactccttcgccgcccaccaccccgcgcccggcggaggcggcgggctcgggctcggccccgccgccgtcgcagccctccccacccgcgccttcgccgcccgcccccgcggctccgccgcctccgacgccgagtcccagtgcgtcatttgtctcgaagaatacgaagagagggacgtgctacgcgtcctccctcactgcggccatgacttccacatggcatgtatacatgtatggctggagcagaactcgacctgccccgtctgtagaatctcgttgctcgataatcccaacagcgagcacaatgcccctccgccgccgccgccgccgctacccggtgtagcagtgacgatgagctctccaggctctcctgagccgccaggctccgacccgtgccgctgcctgttcgccggtgccgggcactcgtcgagggcgtcatcagaggctcctcctaggcacgagcccgaccaggagaatcaggtggcgtctgggccatcggtggacgggggtgctaacagtaacggcatgccgctgtccgaagttaaccccactccacccgagagcaacagccagacagtgaggaagcagcagccagggccctgcaaatagcagctgcctggagtcggcgaggcgagatcgctgttctgcagcggtctgctgcaggacgagcaaacacctgtacagtggcagatggctgtctggctgctgtaggttggggtttgatgagggtatggtgtaaatatgagaaatcattcagatttgttgttggaaaccaaacacacttcatctgttcagttcagtattgatgctgaaaacagcaaccccccgtggtatgcggatacgggataccacagagagattcaaccatcggtgaattcgccaaaaggctagtaactattcatgtcattaactgttgtcatcagcaaatatgatgatcttgactggttccatttcgaaactaacaggattttctgcaacagaaatcaaaatgagcattttttat

SEQ ID NO: 103788 - DNA, 1662 bp, Zea Mays
cgattcctaaccggattgcttctctaatttatataaactttgattagctggaacgattccggctgcaatccgacacaaacgaataaggccttagctggaacgattgtgggtgcaatctgacataaacgaacaaggcctaaggaatctgattggcaccagaaagttgattaacacacctttaggccttacctcaagctagcagaacactagctagcgctatataaactgcctagcggctagctagcgcaagcaatcgagaaaagagaattagctatagccagccgtgtgtcgaacacgacacgcgataatggcactcatgcaggagagcagccaggacttgctcgaagcgcacgacgagctcttccaccactgcctgtgcttcgccaaatcgctcgcgctcgccgtggcgcaggacctccgcatccccgacgcgatccaccaccacggaggcggcgccaccctccaccagatcctcgccgaggccgcgctccacccaagcaagcttcgcgccctacgccgcctgatgcgcgtgctcaccgtctcgggcgtcttcaccgtccagtattcttcaaccgtcgacgcgtcggacggagctgatgtcgtctacaggctgacggcagcctcccgcttcctcgtcagcgatagcgacgaggcgggcacggcgtccttggctccctttgcgaacctggcgctccaccctatcgccatctccccgcacgccgtgggcatctgcgcgtggttccggcaggagcagcacgacccgtccccgtacggcctggcgttccgccagatcccgaccatctgggagcatgctgacaacgtaaacgccctactgaacaaaggcttgctcgcggaaagccgcttcttgatgccaatcgtactcagggagtgcggagacgaggtgttccgtgggatcgactcgttggtcgacgtcggcggtgggcacggtggcgccgccgccaccatcgccgccgcattcccgcacgtcaagtgcagcgtgcttgacctcccgcacgttgtcgccggtgctccatccgatgcctgcgtgcagttcgttgcgggcaatatgttccacagtattccacctgcaaccgccgttttcttcaagacaactctatgtgactggggtgacgacgagtgcatcaagatattgaagaattgcaagcaagccatatctccacgggatgagggtgggaaggtgataatcatggacgtggtagtcgggtatgggcagtcaaacatgaagcgcctagagacacaagttatgtttgatttggttatgatggcggtcaatggagtcgagcgcgacgagcaagagtggaaggagatgttcattgaagctggattcaaagactacaaaatccgaccagtagctggcctcatgtcggtcatcgaggtctatccatgaattctttgtgaacaaaaggccggctgccataatataaactgaagaccacgacgtcgtcatggagctgagcgtgttgttttttagactactaggcacttgagcctctgagaatttgtaataataaataagctgagcaacagcgttctgttaatgtggtcttgccttgcacgttctacacaccaattccgtcggcctaactaatactatacaaaccgtcggaaataagcaacttgcccacgggcgccgtcatgaat

SEQ ID NO: 103789 - DNA, 639 bp, Zea Mays
atggttggcgccacctacagatcagttcattctcattcagtatattgcctatcctttcatgatcctagctcacttcctctctctctcccaaaatgtatcagcgtagaggcgacggaaagaaaagagaagacgacgacgagcccaacgatcctactcctggggagtcaagctgacgttgatgtcaggggaagccctgtacaccatctgctgcggcgagcttgcgggccagccagccacggggaagcccgtcgcgttcaggttcatggcgctggcgtggggctggggaggtgcggcggagggtggcggcgcatcatggaacccgttcccaggacctgccagagagatcggggtggctgcggtgagcacgggtgggggcgcttcaggttctggcagtgccggaaccggggagagctgctgctgcgcgctcatccgcctctggtgctgcttcaggctgttgggcaggaagcttcccacgatcacctgtataggacttgcggcacgcagcatcccagccactacgccgccgaccacacggccgtctgggccagcgagagagacgctgaggccgcctgtcctcttacgaccttcctcagccattgtgaaggagcccatcagctgcaggatctcgaaacggccctg

SEQ ID NO: 103790 - DNA, 2583 bp, Zea Mays
aggaggccatttggaacacttgtgagcatattggagcctttcctctccctctctctcactcatattggttgggattgcattctagtgagattgagagccatctagtgcattgcatcaagttgttgatctttgaggcactagggagatcatcaagtgaggtcgttggcttgttactcttggaggttgccgcctcctagacggcttggtggtgtttccccgtgagctcttcaaaggagactgtgaagaggccgcggtggtgattgtgagaggcgttgtgcttgcctcgccggagcggtgaaaagcaactctagtggaatcgaggtttgagggttcattgaccaatccggctcaagagatcaagtggagacttgatagaggagcggttgggagctttgaatctacctcaacgtggactaggggtgaccggcaagtcatcgacaccacgggaaaaaatcattgtgccacgtgtcatcatctttccgttggtttgcaactttcctcactagcttgtatttacttgttcatatacttatgctagtgagtatttgttgctcgtatatgctcttgtatatctagtcatatctataataaaatagttgctcacttgttgttagcttgtgtagctaatctgttttacttagcttgtgtagctaagtagttgtttctctctagtagtgcttgtgctttgtgctctttgcttactagtatgtttaggagctatcgttgtgcttaaaattacatttgcataatttgtatgtcgttgctaactagatatgtatgggagagctttttcactatcttggcaccttagttgtttcaattagaatcttttgtcaggtgtttgtaatagttagaggagtgtagtcttggctaaaccaaaatagttttaattccgtatttatttgtgttagccattgtaattagttttagaaaggactattcaccccccctctagtccgccatctcgaccctacaagtggtatcggagcctggttctctcatttggtggtcttaatcgacccgagagtaagctggatggcgactaaagggctagaggttacttgtgaaccacatatttttgatggcacacattttgcacagtggaaaacttgcatgagccattattttcatacaattgatgtaaaattgtggtggatcataagtgtaggcttttatgaaccttttgatgagaacacaaaagatctcacccaagccaaaaagaaatgcttacatcttgaacatcgagctactaacattttgtatcaatggataagtgataaggtgtttaaggaaattatgtatatggagaccgctcatgatatttggacatatcttgatgacatatatgggaggatctctagcgagaatgttgagcacatccacaacacggtggttgtgaaagattgcttcacctcatggtcaagtgatgatgatgaaagacacaccacaagttcacttgataataatgattgtgttggctctaactcaagtaatgcaaatgatggttctatctcaagcatacttgatgattatggtgattgttcatgctcggacaatgatatcgctactacaagcccatccattacatcacattgcttcatgtcacaaggtaatacgaaggtatataatgctaatgtgactaatcattcatattcatatgatgagcttgttggtatacttgcaagcatgaacattgctttagaaattgagaaagataaaacaagaaacttggaaaatgaaaactcatttctaaagtattcatgtgaacaacaaaagcatctactttatgttgttacttgttcacatgaggagctaaaattgagtcatgaggaacttagtgttgctcatgaaaatttgatacaagagcatgcttttctcactaacgagttttctagtaaagaaaataaaactagtgataattcatcccatgaattatatgatcaattgaaaaatgttgctaatccatgtgatgaagacaagaagcatgtatccacctcttgtgatgatttattagctatgccatgttcttcaagtatagattattactattcttccttgtcttgtgagactaaccttttgaaggaaaataataagctcaaaaacaaagtgaagaatttaagcaacatgtttgagagatggcataaatcaaaagtcactcatgatcttatattgaaaaatcaaagaagatatgatgacaagagtggccttggtttcaacaagagcaatatcaaaggcagacaattcaaattaaaaggaaatgagctatctcacttcatgtgctataaatgccatgagatgggtcatcttgcaaaggcatgccccaataaaaggaagctcaagttgaagaaggaagaaaggaggctaaagcatgacaagtgcttcaagtgccacacttggggtcacctcacctcaatgtgcccaaccaagaaattagtgaagccacaagtgaagcctcaaccaaagccacgagttgagcaaaggaaggatccccaaaagcaaatcaagattaaccatgaatataatgtttacttgctctatacatatgatagcaaagtctgtgcaaatttcataatcattggataa

SEQ ID NO: 103791 - DNA, 166 bp, Zea Mays
ctcaaattttggtggtcgcacaagtgtggagactcgaattcatatatacttagttaggctcaatgttagcataaacagttgaagaaaagttttcccattagtattttagtttgaatttagagtacaattatgtatgagttatttgacaatgcttatttatgagata

SEQ ID NO: 103792 - DNA, 6276 bp, Zea Mays
atggacaccgccgcgggcccggggccccgggacggccccgatcggacgccgcaggggcccggcgcctcccccgaggaggccgccgctgatggcgtgaagacggacatcgcaggtggggcggaagcgcttgcagcggcaggcgcggccggtgaggccgatccgggtggaggcgccgctgcggcggggcgtgggggtgacgcggaggcctcggcgagcgagcccacggcggaggaggttaacgaaggctgcggcggcgccgctgctgctgcgggcggagatcgccccgccgcgcccgaggcggatgcggacggcggcgcgggcaaagggcggtctgctgtgcacgcggtgagtgaggtggagcagggccaaggcattgcgggggcagcgcaggatgtggatcccgcggtgtttgaggtgaagaagatggacgtgagcgagggtggcgacgcaagcaagcagaatcagcactctccgtcttgtacggccagcgaggtggatgtggggatcgttcctgtggcagtgcgagatttggatcctgtggggtctgaagtgatgatggaggtggacgacggccatgtcagggaacaagagcgcgcgggagtggctgtggcgggcagcgagtttaagatggaggaagctgatggaagagtggtgcatcaagggtctgctgccacatctgctgggggccttcaggcgcgagccgaggaagtgggagagtgcttggtcggccgttacattggccgcaacgcgccaatgcaagcggggatccttattgggaaggttgcatcctatgatagcacagctggcatctacagcgtggtgtttgaggatggacataatgaggatttggagcttcctgagctccacgagttcctcatgcccgacaagaatggcacgttaggcatgagtgtgaactgcaggaagaggaagctgggcctgctggttttgtcggggagtgtctcggaggtgaaagagccagcaagtactagacagagggttgacggatgcgagatgcctgccaacactgatgcactgcggtatagtgggtctggctcggatatgtccgaggatatcgaatcttcgagtaattcatccgatttcactaaagaagaaccatctgagccgtgtcctcctgtacaggctgtggagttgcccccgtcatcgggagacattcatgtgccagaagattccataagctatctcttttctgtttataacttcctgagatccttcagtgtgcagctgttcctgagtccgtttggtctggatgattttgttgcagccattaattgcactgttcagaataacttgttggatgccgtacatgtctcgctattgcgtgcactgaggcggtatcttgaatctaaatctgctcaaggatctcagatggcttcaaattgcttgaagtatttggattggacattactagatgcattgacttggccaactttcttactagagtacctgtatgtgatggggtgcattaagaacctaggggggcagagttttgctagaagccttctagccgctgaatactataaactttctgttgccacgaagttgagggtgctgcaaatactctgtgatcatgtccttgaatcacaagaatacaaaactatactggaagatcgagtaggctacaatgaggagatggaatatgagatagattctagcacctttttggaggctggttccagagcagtcttgactagagcctcaaaggcctcagcttacaaaatgctgaatgatttacagaactttgaaagtggtccaaatgtaacaaattcagatgttgctgtagcagatgtttctcaggacggtaatagtgatgattgccgaatatgtggaatggatgggactttggtatgctgtgatggctgcccatgggcatatcattcgagatgtatcggtcaaaataaagctttccttccccagggggactggttctgtccagaatgtgttgtcaacaagcttggaccaacttcatcaagaattgaacgtggtgcaagaggagctcaaatgtttggcattgatatgcacgggaggctattcttaggaacctgcaactatttactggtgatcgaaatatcttcagatgtagagtcttatgcaagatattacaatcattatgatgttgtcaaggtactccagagacttgcactctcagatgcatatgtggatatatgcaggcaaataatggaatactggaaacatttactcggtagagttcagagtgagagatcaacaatattgaaagaagttggtacaagacatactccacaatccagcatgttgagttttactccaacaatgtcaggagatggaagtggctggacaactttaaaagatggtggggacagtaaaacagtagcacttcctcaaacaaatgtgcaacagaaaattttcgctaatcagtatacagtgtgctctgctgaacaaacggagaagaatgttgatgtttgcaagcaagctctgtcagctcagaacaacatacataatgcacctagaaatggagcttctggaccatttgtggcatcccccgtttctcatcagaatggatccattggaacgggtatgtctaacatagcacaagcacagccagctcatagtatatatcgtccagacttatccactgtttctgcaaagtcagaatcatttcgttcatctttgcaaggtaaacttcaccttcagatgtgtactgaaagacctggaaacatgagttgtggcaaggcagcaaagttgtcttcttttaaaccacaagcttacatgaacctctacaatcatggcaacattgcagcatctgctgccgccaatctagctattattgcatccagtgaaggtaaggtttccacatcccaactgtccgcaaaaccaaagaagaaggtggctgcagacaatgctctacagttgaaagcattttcctcagcagtcgcacaatttgtttggccgagtactgaaaagaagcttatggaagttccaagagatagatgtggttggtgccttgcttgcagaagttcagcaagtggaaacaaaaaggcttgttttcttaacatgaccacatcaaacgctgctaaaagttctgctcgagttcttagcacaatgcgcgtaataaagatttctgacagccatttccccagtattgctgcttatttagccaacatggaggaaagtttgcgtggcctgttggttggttcactacaagacatgcagcagagagaacggtggcgtgaacaacttgaagaagcttccaactgcagaactgtaatacccctcttgcttgagttggaaagcaacatccgtggagtagcattttctgcaagctggttcaagccgatagacgattggcctgcggaatctccttgtccatcaacaggggcatctcgtcctgcacaacaccaaaaacgtggggctggcggaaggcgtggcagaagacgtttgttggtgtctgaacccggtactgttactgatgatgacaacagctggacttggtggaccggaggaaatataataaaacgtactttgcagaggggggctcttctacattcaaccataagaaaagctgctcgccaaggtggtaagaaaaggttagcaggtttatcttatcatgaaggttctaattttccaagacgatctcggcaacttttctggagagcatgtgttggactaagccagacttcgtctcaacttgctctgcaggttagatatcttgatgctcacatcagatggaaggagtttatctctccagatcaaattccttcagatggaaaaagttctgacgctgacttttctgcactcagaaatgctgtactctgtgataaaaaaataatcgacaataagataagatacgcactgaagtttcccaaccaaaagcatcttcctgtccgtctgacaaaaaatatcttggaagcagaaagtgatcaggatgaaattagaaaaatgtggttttctgaaaaccacgtgccattgtacatgttacgagaatttgagcagcatgctgaggctagctccttgcctactccaggaattccggaatgttttaccaatttatacccaaggcgagtgaaagcacctgacagagatgttttttcatatctctttcacaagggagaagtctatccctgcgcgtcatgcaagaagggtgttctctacagggatattgttaaatgcagctcttgtcaaggtaattgtcataaagagtgtacatcaagatctgttgttagcaaaggaggcagtactacttccagtttgatatgcaagttatgtctccagaagcgaaatcttatgctcactagttacaatacaaatgcaagttatatccagcatctacagaagaataatggccaacagccagtgaccgctcccagaaatgtctctaaggttagttcttcccattctgctgagcctgcccccaaagtggaagccgagccagtcacaaaggttaaggcacaacgagttggaaatgtggaagctacaacccagccagttctaaatgtgaaagcccagccacccgccaaagtggtaactcagaacatcactagtgtccaaaagacaaaagctaaaaagtcaaagtccgaaaaaccaacgaaggctaaaaaagttcaagcgatcacatatttcggtctcatatggaagaaaaataagaacgacaaggatgatggaagcgagttcagggcgaatgatgtaatccttaaaagcaaggatggtataggttcgtcaataaaaccaaaatgttgtctatgtgacaaagcatattctccggaattcctgtatgtacgctgtgagaggtgcaaaaattggtttcatggtgattccttgcaacttgaagaagataggattggtgagttggttggataccgatgctgtaggtgccggaggagggccatccccccgtgtcctcattcagataattatgtaaagcctgaacccgaatttagtgagcaaacagttgcaacatcatcggtgtcaactatgctatccagtgggaagacttctgcttcagcagatcaggacccactgcttgcttcgtatggaatagttgaaccaatcggggaagagacaggggatgttgatttatcagcgaacacggcaagcattgccccgggaagtagccagaagctgtctataagaagagcactagctaaaacttctggataccttgaccaagctggtaaatctgtgaatgagtattatgtccagaaccagaatacacctccaggcaatggaaacatcaatttcagccacacgaatgagatttccttttcggaggctgacagcgtgggcgcttcaggactactggggtgggatttttcgagaggaaccgcgtatgctgccccacctggtttcacttctaatcgccagcagaaccgcactagccgtggcagctttgtgccggacgagtgtgagcgtgagccccagacttatttctcgttcactgagctgcttgaggctgacgacgcacagcttgatgacaacgcgtttgggatagctactggtctgcaaggtgatgctaacggctccggaagctttgtccaacgaggagttggttttggtggtacgtctttcatggcagaagatggagcttcgaatatgaacgtgccaacaaatggtcccacgcctgaagaggtagcgtgccacaacggcacgaacactcagccgccacctgatcccagatgttctgtccgtgacctccgcacacaccggtagtgctctccctgggaaccgaggcgtgtagagcctgtcgagagcggcaactggagttgtggtggttgccgcgaatggtgatgatgagcctctaaacttcactgccagttgcaatggcaggtaaatccaacggcatcccatatacttaccggatttctcgttaccggtcgctgggttgctgctgtcatgatgtgctactgatttctcggatcatttcattatttgatctaatcttaaccatcatacagttagagtagcgattaccgcttggggtttacactgtacatactgaaaggatgggtcgacgacgacgtaccatttccattctttaggctatttatttttttggggtgggagttttagagctaggatgctgctagcacatagcaacatggtatatgggtcgtctggaaaaaaaaaaccatattattatgtaactgtattaaccttggttgtctcttctcgccttctgagatacaagtgtctcttggtcagagtgggtggccgtttctatgcctatgcagctatgctccagtattgtcgcatttgcctaggtaaaataactaattacatggc

SEQ ID NO: 103793 - DNA, 641 bp, Zea Mays
atgttattagtcttgacctgtctaggcagcattgatgcatgttcatgtgttctttttcttaaactgtcaatcattatttgactatgttgtattgctgttggcatgtaccaatatttcatggcaaatcttatatcccaagtttttatatgctcaacaggccgcacttgaagaaatcttatatcagtttgaggaaaaactccaagctgaaagaaaggaagctgctaggaagcaggaagagttgcaagcacaactacaagctcaacatgtcgcacttgaagaaaaccaaagtttgctgtgccagaccccagaggaagtgaaggggatgcataccaagtttgaagagaccaatgcactgctacgagctgtcctgaaacttcagaaagattgaggtagggatgcataccaagtctgaggatgatgcctttgcttaagggttttctaccttgctagaacatatctgtggttagaactttgtcagaactacgtgcaatctgtttgaatgcttcaaacctttgtggtggaacctttgtatgtttgaacctctgttgtggaagaactagtgtgctggaattgtgtatgacttgtgatgagaatgttgtgtatgatagcttttctgtgtattatgattctgtgagctatca

SEQ ID NO: 103794 - DNA, 1076 bp, Zea Mays
aaaaagacgcggcccagccgtaggagggttctgttgtctctttcacttgctccgcgccggcatcctccccccttcgccgccaccgcgatcttgttctcagttctacggcggcgatacccccctccactccccaccctgtcacccccacaaaataagttctgcggcggcgatggcgctctcctcctcccggccgaagcacctcctgcgccccatcctgcggggtttccacgcctcagcgcgggccctggcgcgggtggagccgcacgagttctccaagcccagcgagtacctgggcagctgggagcccgcggcggagcctcgggaggcgtgggcgcggctggaccggctgcgcaaggggtacgcgagcgaggtgcgggagctgcggcggcagtacgcctacgaggtgcagctgttgcaggccgagcggcagcggaaggccgacgccagagccgaggccgcccgcgccgccaaccaggagcgcaaggccgccaagctcgccgccgcccagacgcgcgccgccgagcgccgcgcgttcgaggaggacttccgccagaccctcatgaaagaaagagctgagaagctggagagctggcggaagaaggagaagcgcaaagaggagaagaaggcaataaagaaggagctcctgcgcaggaagagcagcatgtggctttctgaagataagattgaagaacaaatacaaactgctatcatgcaaaccactcctctatgaggttggttctgcgaggaaagctgataatagtagcttgcgaatcatgaggagggggggtggacatcacatggacgtgctcgtcgttacctgtgagaagctaataagaacggacctggtatttggcgtggaaaaggccgtgtgtttatttagttagacttgatcacaccaaaagctgtgcctggagagatggctgaatctgctgtgccttcctttttcacgatccatttgttgttctcgtctgcttaaactcttggcgtgatctggacggaacatatttttggcaattttcttacttggacgaagaatgaccatcatcatcgatgttgtcgtcgtgctgttatgctaa

SEQ ID NO: 103795 - DNA, 2978 bp, Zea Mays
cagacagcggtagacatatatagggggagattttaaatggttggctggctgtgttgcacaacggctgtagtgtcatgggagatgggacaaggctgctccgctctggcctaggagaccagactaggggggccccacgggcagacagaaacagagcaaaagcgaaaagtggaagcctccagtactgacaccgctctacggagggaccgcccaaagagagcagtggagtggaggaaacaggtcccagtggccaatccgagactccgaccccaagcgccagctccgtcgattcttcaaaaatcaaaagttgcatggagatggagtagcacttctctcgtcccaatgcagactgactgacggagcagccaagatcactcactccagtcatggctttggttgagtgattcctccggacctctcctttcctttcctctctcgcccggcccactcccatgccgatctcgctccacctccactcgccccgtcgccgtcggcgtccacacctgcggctgccggcggcggcaatgcgcgtgcggctctccttcttgctgctttccgcggcattcctgacgatcctgtcggcagcggcgccgtcggccgtaccggacccagagccggaggtgaagccgagcgacacggacgcgctgaccatcttccggcacggcgcggacgcgcacggcatcctggcggcgaactggagcacgggcgacgcgtgcgcggggcggtgggcgggcgtgggctgctcggcggacggccgccgcgtcacctcgctgaccctgccgtcgctggacctgcgcggcccgctcgacccgctgtcccacctggcggagctgcgcgcgctggacctccgcgggaaccgcctcaacggcacgctggacgcgctgctccgcggcgcgccgggcctcgtcctcctctacctctcccgcaacgacgtgtccggcgccgtccccacggccgcgctcgcgcgcctcacccgcctcgtccgcctcgacctcgccgacaacagcctcaccgggcccgtcccgcccgcgcccgcgctcgccggactcacggcgctcgtcacgctcaggctccaggacaacctcctcacgggcctcgtccccgacgtggccgccgcgctgccccgcctcgcggacttcaacacctccaacaaccagctctccggccggctgcccgacgccatgcgcgccaggttcggcctcgcctcattcgccggcaacgccggcctctgcgggcccgcgccgccgctgccgcactgcgagttcctgccgcgggagcccgcgccgacgccgccttcgtcttcgacttcgtcttcgtccgtgctgccgtccaacccggcggcatcgtcctccgtcgcctcgtcgtcgccggcgctggccacgcaggagtcgctcagccgcaggccggggttgagccccggcgccgtagccgggatcgccgtcggcaacgcgctcttctttgctctcgcgtcactgctcgtcgcgtgctgctgctgcggccgaggtggcggcggcgagccagcggcggccaagaagaggaagaggcgcggcggccgcgtcggcctggaagacggaggcggaggtggcgcgctgttcggccacctcaagggggagcagcagccggctcgtccgggcagcgccggccagtgcagcgacggcggcgacagcgacggggcgcgcagcaagctggtgttcttcggcgcggacggcggggaagaggaccacggcgacggcgacggtgacggtgcgccgctgacctcgcacctgcaggggcggcgggggacccggttccagctggaggagctgctgcgcgcgtccgcggagatggtcggcaggggcagcctgggcaccgtgtaccgcgcggtgctgagcgacggccgcatggtcgccgtgaagcggctgcgcgacgccaacccctgcgcgcgcgacgagttccaccgctacatggacctcatcggccgcctccgccacccgcacctcgtcccgctcagggccttctactacgccaggcaggagaagctcctcatctacgactacctccccaatggcaacctccacgatcgcctccacggtcacaagatgtcgggagagtcggcgctggactggacgacgagggtgcggctgctgctgggcgcggcgcgcgggcttgcgtgcatccaccgggagtaccgcacgtccggcgtgccccacggcaacgtcaagtccaccaacgtcctgctcgacaaggacggcgcggcgcgcgtggcggacttcggcctcgcgctcctgctcagcccggcgcacgccatcgcgcggctggggggctacacggcgcccgagcagcaggacgacaagcggctgtcgcaggaggccgacgtgtacagcttcggcgtgctggtcctggaggcgctgaccggcaaggcgcctgcgcagcacccgcagcccgacgcgcgcaagaagggcgcggcggcgacgagcctgagcctcccggagtgggtgcggtccgtggtgcgggaggagtggaccgcggaggtgttcgacgtggagctgctccggtacagggacatcgaggaggagatggtggcgctgctgcacgtggcgctggcgtgcgtggcgccgctgcccgagcagcggccctccatgggcgacgtggtgaggatgatcgagagcgtgccggtggagcagtcccccgcgcccgaggaggacgtggacgtctcggtgacgtcgccgtccatcggcatcaccacggacgacggagatggtcgcctcagctactagctgctgcccgctgtactgcccagcttctgttcctttttcttgtgtgtgatcttgacatggatcttccatgtatggctgattggttgacttgaacacattcgtctcatccggtttttgcacgtctgagtctgagaatggacccatgctcactgttgaagctgcggctgtagtttacctgcttgtttggcgtgatcttgagtcttgactgatatgcatggttctcta

SEQ ID NO: 103796 - DNA, 196 bp, Zea Mays
gaattgtgtattttgcaggttggccagaacgcagggtgtggggaattggtgagcgactgcagccatgtctgtggccaccggcgtgagcgacgcggccatcgcagtgcgcgataagctctgtggcaagattggcgagaccaaggtgaagcggtactggccagaaaagccgtctgagtgggccaactagagatgacaa

SEQ ID NO: 103797 - DNA, 1433 bp, Zea Mays
gagacgagcactgtgtacccgatagacacaaagaaggaaaggaaagagagtgaaacagcatgaagcacgttgccgattccaatcgagtcggggacgtctctgggctctggcagcatggatcgttccgccacccttcccagtcccagcatacgatacagctttcccgcattccgaggcccttaaaatcatcggcatgcagcttgccaagcaccattccgattcggcgatttgattcccagccttcccccctgctctgcccacctcccatttcccgcccctctttcctactactacaataaaaatatccaaaattcccgaacagagtcacccccgcttctcagaaacccaattcccgttcccgatcctcatcacctcaaccccgcgccgccccctccccaccaccctcgccatggtcagcgccgccgcctcgccgccgccgtccgggaagccgacgcaggacgagctgaagcgcttggcggcgcaccgcgcggtggagctcgtggagcccggcatgacgctgggcctgggcacgggctccacggcggcgcacgcgctggaccgcctgggcgacctcctccgcgcgggcgcgctgccgggggtggccggcgtgccgacctcgctcaagacggaggcgcacgcggcgcgcgtcggcatcccgctgctcccgctcgacgccgccagcatcgcgctgtccatcgacggcgccgacgaggtcgacccggacctcaacctcgtcaagggccgcggcggctcgctgctccgcgagaagatggtcgagggcgccggcgcccgcttcgccgtcatcgtcgacgagtccaagctcgtgccgcgcctcggctgcaccggcgccgtccccgtcgaggtcgtcccgttcggcgcgccccacacgctgggcctcatccgcggcctcttccacggcctgcccggcttccacgccaggctcaggaccaccaccgtccccgagggggagcaaggctccgagcagcagcccttcgtcaccgacaacggcaactacatcgtcgagatgttcttcgacggcggcattcgcggcgacctgcgcgacatcagcgaccgcctgctccggatcactggcgtcgtcgagcacggcatgttcctgggcatggccaccgtcgccattgtcgccaagaaggacggcacggtcgcagtcatggaaaggaagtagttagtatacaattcttcgaagcagccatcgcctgctctccatcaacggcgtcttcctctacgtggccatcatcacgacgacaataagtaataattctgcatgtagcctgtgtctgtgcaacatccagctactcttatctaaagttggagctgttattatcgtgtccgtgcgtcatcctcccatactatactgagtgtctgctgattactatggagtatgttaatcatcatcatcatcattatgttatcat

SEQ ID NO: 103798 - DNA, 1879 bp, Zea Mays
cttttttggctttccggtcttttggtggtgtactggtggctggctggctcctgaatcgtcgctgtctctctctctctctcgctttcggcagctcagctgcactccacagtctgcctccactccactctccaccttttgctgtcgccttcctccccttgccttccctgtgtcctcccctccctcgcgccgcaaaaaacgccggagggaggaagagagagagagagagagagagagagagagagagagggccaggctgagcttactggcggcgagctggagaagaaggaaggagcatggccatgccggcggcgctgcttctcttcctcctagtcctctccgccttcgaggccggggagcttccacgctgctcggctgctgctgcaggtaaaccggcagtcctcgtccatgatgacttgagtccggttcaagacaccagccccatcgcaacagtcccctccacgaacccgtcgcccgccatcatcaccgtgccttccacgaatcccaccatcaccatcccttccttgaaccctctgcccacacccatcacagccccctcaacaaacatcccttctccttccaccatgctgccgccggttccggtcatatatccgctgccaacgccgtcaacatcctccccaccagctgtgccggtcaccaatcctgctgtcaccacgccttccacgtcccctccgtcgacaccaacaccattcaacaacccaccattgttgaacccaacgccgacccctgctcctacagtcacggccccagctgcttcaggccgggaggtctggtgcgtggccaaggctgctggctcaagtgaagccgcgcttcagaacgcgttggactacgcgtgcggcattggaggagtagattgttcggcgattcagccgtcagggagctgctactatccgaataccatccaagcccatgcatcctacgcgttcaacacttattaccagagaaaccctgtttcttccagctgcgactttggggggacggcaatgctcgtcactgctaatccaagctctgggagctgtgtctttgcatcatcattgccatcgtcgtcaagctctactgttggatatgatcccgcgtccacggctactccatcgtcaccgtcgtctggttccgactcgggagcacccgtgctgaatgccagtggggcaggttcttctgaatcatcagattttggctttgacatcccaggagctgtcaatttgggcagcggttggaggtcagtctcaccacccaactggccctgggcagccctggtctggattctagtagcattgtgtgtgcacaaagaagggatggtctgaaaacctgtgagagcatctgcagtattttggagacagattgcaaagtagccaggtggtgtagagaccagtagagagctacaaagctagagaatcggaccttagcatggctaagtttatcgatgtatgtatgaagtatggtgctccagttcgtagtagcaactgggaactgatgtagtcctgatggatggacttggactcaccctgatcggtcactcaggcactctgtagtgtagatgtaggcatgtagctgctgctagtagtagtagtaatgcaagtactgctttgcatcgtatgggtgagagagttgaacaactaatggaatgcaaatgtgccgttttgttttagctactggtctgcgacaccgtaacagtaagcctgtaaagtatagatcacaaggaaggaagggaggggaaatctctaacccaaggcactcgtaaaaatgttaaatatcatcaataaattaacatgtttgaatcaataaatgtttctgaacataatatacagcttattgtacacactagcatctgcaataacattttttgcataataaaaaaggaaaa

SEQ ID NO: 103799 - DNA, 1497 bp, Zea Mays
tccgccgccaggttcgcgaacgcggcgatcgaggcctccgacggcacggtgtacttcagcgacaccaacaccaggttcggcttcgatcggtggttccacgacttcctagagttcagctccaccggctgcctgctccggtatgacccgcgcaacggcgagacgcccgtcgtgctcgaccgactcggcttcgccaatggcgttgcgctgccgagggacgaggccttcgtcgtcgtctgtgagaccatgaagttcaggtgcatcaaagtgtggctgaaaggggataaggccggcgaggcagagacattcgtcgaccttccggggtggccggacaacattcgtctcgggtcaaacggtcacttctggattgccgtcctccagctgaggtcgccatggctggacttcatcacacgctggaccttcacgaagagagtggtggcctcgttctctgcgctcagcgagtggagcaaggggacggcgacgggagccatggtcgctcaggtgtccgaggacgacaccatcctccgcgtgctcgacgactcccaggggaaggtgatcaacttcgtcacgtcggagggttatcagccttaccagttaccaccatgcctcctaacttcccgcccttcctcttcgctgcttgaggcttcacttgattcctcatcgttgttgaccccctgctctttctcgtcctcgctgcttgaggaatcctcgctggatgacagctcgtcatcatcctcgctactctctaattccgactcttcatcgctgctctcctgcccttccttgccaccttgagcttccacttccacggacaccatggtattcatcatctcagcatcagcaggtgtggccggtgcctcctgcccttctttgccaccttccgattccacttcaacggatatcgtggcattcatctcagtatcagcagctgcaggcggtgtggcagccatcttcatagcaaccgctttctctggaatatcctctctcatggccaaatcgtcgatcccagacacaagaaggtgatctagggcaagcagcccgtccaattcgctgctcaccacctcgaccttctggtccttcacaccaaactcgaggtcgaagctcttttgcgccgccgtctccagcgtgtgcggaaccgccgcttgctcagcgagttcggggcccttggcctctagctcgctcaacatggctgggtcgaagtccacgagccactcctcgatggggtcgaagccgctgcctgggtccgggtccgagggcgggcacggcggtggggatggggacgcgggcggcttaggctgttgccccataggcgacggaggcgaggctggggtactggcgatggagagggaggtggtgcggcggctgcatcatgggtttagggctttagattagtggcgccgcgattttgaaggataggagtaagcgtgggtacggagccagctcggctcagtgcagcagctctgaccgtttagctagcgagctacaacaagctgtcggcgg

SEQ ID NO: 103800 - DNA, 336 bp, Zea Mays
atggccgagcagccccggcggcaagggcccctacgtgcggtcgcagcgagcattgccgacgtgcctgttgggcccgtcccccttcccctggccgacagaactgccccgcccctgcgccgcggcctggctcccagccgctgtgccccacgtgccccggctgcagcccgccttgcgatgccatcttccctgcgcggcagcggcgcagagccgggtggccgtgcttcggccatggctagccctctgtggccatgccccagccatggcgcagcccgcgtggtcgccccgtcgcccagccagctagctgcggtggcacggccatggcccctgcgcccctga

SEQ ID NO: 103801 - DNA, 804 bp, Zea Mays
tagttcatggattgttgatgcactttaagtagtatatagtaaaacaacaacagcatgtcacgcattacacacaactgtaggtcaattaattgtcccttaccatgcacacactgcgcccatgtatggaactaatcaacctccagatacagacctcgctcacatgcacttattcatacttaagtatgcatgcgcacatttctgcatagtttccgtgcacccaaatatatatatgctcatactgttaagggccgggagtgcctacaggaacacatttgtaggtggggatgccgggccatggaatcctaataatgggaaatcagtagcacaggcatttgtagggtggaaatggaagaatgcccgaccctgggtttaccggcgagaatggaacggggacaataataatattgcacttattaggataggtggtcttaatggcttgaattaaggtgattaggttagggaagccagggggacaccggttttcggatggcgccggggcaggagtcggcgctggtgtcagtgatggtgttggcgctggtgtcggtgctggcgccgttggggctgaagcaggaggagtcgttgcaggcgtcggagcaggagtcggcgctggcattattggggctaaagcaggagtcgttgcaggcgccggggctggagcaggcgtcggagctggagacgacgactggccacagactgataccgttaacacgagtgccatagcggctaggaatcggagcgcagggtgaccaacggacttgttgggtgccatggcactgaaaccgtgatgtgttccaaaccgtgtgt

SEQ ID NO: 103802 - DNA, 3105 bp, Zea Mays
atggagaggagctgtttgacccgcgtgtcgcacagggctaactccaaagctcaggtcaacgagctgctgctggtctggaggacagcaactgatgcctttgccgtgccatggaaagaattgaaaaggtatcaaccatctgctggcctggaaaaagcttggagcaggaagagagaaatggtggcatggcaatatggcatgcattcccatgcgcagtgcacaacacaatgcctggactggattcaattcaacggccgaggcgctgcctccgcttccctccaaatgttgcgctcccgagctctcctcggcagcctcccacccccgagtcgccccgacaactcctcccagcctccaaccaccgagagcgtagaactcgtaatccaaggccagcgcgcgcacgccattgcctcgccccgtcccgctccggcgcccccccaccgccagcatgcacaggctcgccccgccccggtcgtgctgagacgacgtacctatactatacacatacacacggacacaccaaacgacgccaacgtggcgacgtcggcgaggaagatgagccagctccccgccccggccagccggctgtgggaagcgagcatccgcaagctccagaccatccgccgcgcgacgacagccacagggcccgcggccgacggcgccgatggcggggccgccctcacgcccagtctcctctccatcaattcctcctccgcgtccagcactatctaccagtaccaccacgaggacggcgaggacagcgacacgagcaccgatggcggcaacgattcggaagccggcgaggacgaggacgccggcgagcccacgcacgcggagcagctgctgcccagcggggacttctaccagggcgacctgcgcggggaccagccgcacggcgcgggcaagttcctctggaccgacggcagcatgtacgagggctcctggcgccgcggccgcgcgtccggccgcggcaagttctcatggacctcgggggccacctacgagggcgacttcgccggcgggtacatgcacggccagggcacctacatcggcgagttcggggacaccttcgcggggctctgggccaacaacctccgccacggccggggcacgcaggcgtacgccaacggcgacgtgtacgacggccactggcgcgacggcctgcaggacggccacgggcgctacatctggcgccacggccacgagtacatcggcacctggagggccggcgacatgcacggctgcgggaccgtgatctgggcggacggcgaccgctacgacggcgcctgggaggacaccaggcccaagggccagggcacgttccgctgggccgacggcgggatgtacatcggcacctggtgcgaggaggccggcgccgtgcacgccgacggcgtctactacccgccgtccggtggccccgcggtgcccgtgccccgcgagccctgcgaccccatcacggcgctgctccaggagctagaggtgtgcgagggcaagacggcgtcgctcatgccgtcgcagaaggtcctcacgtggcccggcgtggaggccgtgcagaagaagccggtgtggcgcccgcccaaggttagccttgaccaaggcaggaggtccagcgtgagcaggaggagcagcgcgtcgctggacctggacatgctgcagccggccgccgccgagggtggcgagaccgaggaggtgcgcgcggacaggtcgtgcctgcggacgtcgtcgtgcatgcgcacgccgccgaggccgggcaagaagcagggggagaccatctccaaggggcacaggaactacgagctcatgctcaacctgcagcttggcatcaggcacgctgttggtaggcagtcagcgccaaatacgctggatctcaagtcatcggcattcgatccaaaagagaagatatggacaaggtttcctcccgaaggatcaaagcatactcctcctcaccagtcctgcgatttccggtggaaagactactgccccctggttttcaggactctgcgcaagctcttcgacgtcgatccagcagactacatgatctccatttgcggggacgaggcgctccgggaactgtcgtctcctggtaagagcgggagcttcttctacctcacgaacgatgacaagtacatgatcaaaacgatgaagaaggcagaggttaaagtgctccttaggatgcttccagcctactacaaacacgtccgctttttcgaaaacactctgatcactaaattcttcggcctgcactgcgtcaacgtcaagcttacaggagctatccagaaaaaggtccggtttgttataatggggaaccttttctgctccagctacgcgatccacaggcgcttcgacctgaaagggtcctcgcatggtcgcatgactgacaaacccatcgatcagatcagcgagcacacaacgttgaaggatctcgatcttaatttcatcttccggctgccagggacctggtttgaggaattctgcaggcaagtggacaaagactgcgaattactggaggcggagaggatcatggattatagtcttttggtcggtattcacttcaaggacagatgcaaagacagcagcaatggtgacaatgggacgtcacagaatgctgaagattctgaagaaaacaggtaaagttaaaataaaatttgccgaattatcacaatttactgtttgtatgtattttgcatagcttataattgggaagaaggccctagaattggtctaacataggatggctaacatgctagttgtgatccatgcagaaaaggaccattgagactagggatctgcatgccctcgagggtggagaacgtagtgaagaaccctgagagtgaatctccgctcattggcgagcccacaggcgagttccaggacgtcatcctgttctttggaatcatcgacatcctgcaggactacgatatcagtaagaagctggagcacgcttacaaatccatgcagtacgaccccaactccatatcagctgttgacccgaagcaatactgcaagcggttcagggacttcatttttaaggctttcgccgacgatgtacagtaactagctaatttgacagaacagggagccgtttaactaaggcaattaacacttcttaat

SEQ ID NO: 103803 - DNA, 2082 bp, Zea Mays
ccctcactcctaagcgccgtcgcgatctgctgcggtggccgctgccgtcgccgtccatccccaccgcctcgaccacgccaccgacgccgcctctcgctccccctcgccgcgccgcccgaacgccacgatgcgtcacctcctcctctcccgcttcctccgccgcggtggcggcagcggcatccccaacggccactaccaccacctccccctcctccgcgccctctcctcctccccctccccggtctcctcggacgcagagctccgcaagtacgcgggctacgcgctgcttcttctcggctgcggcgccgcgacctactactccttcccgttccccgccgacgcgctgcacaagaaggccgtgccattccggtacgcgccgctgccggaggacctccacgccgtctccaactggagcggcacgcacgaggtccacgcccgcgtcctgctccagccggactcgctcccggccctcgagggcgcgctcgccgccgcgcacaaggagcgccgcaagctcaggcccctcggctccggcctgtcccccaatgggatcgcgctctcccgcgctgggatggtcaacctcgcgctcatggacaaggtgctcgacgtcgacgccaagaagaagaccgtcacggtgcaggctgggatacgtgtcgcggagctcgtcgacgcgcttcgggaacatggcctcacgctgcagaactttgcgtccattcgggagcagcaggtcggagggttcactcaggttggtgcccatggcactggtgcaacattacctcctgttgatgagcaagtcattagcatgaaactggttacccctgccaaagggacaatagagctgtcgagggagaaggatcctgagttgttttatcttgctcgctgtggacttggtggcctaggtgttgttgcagaagttacccttcagtgcgtagaaagacaccagcttgtggaacacacatttgtttccaatgcagatgaagtcaagaaaaaccacaagaagtggctatccgaaaacaaacatattaagtacttgtggattccatatactgacacggttgttgttgtccaatgcaatcctccctcaaagtggataaccccaaagttggcatcaaaatatggaaaagatgaagctttacagcatgttcgggacctttatcgcgagtcactgaaaaaatatagaactgaaacagaaagtaaagacccagaaatagatacactttcatttactgagctgagggacaagctgcttgcccttgatcctctggataaagatcatgtggtgaaaatcaataaagcggaagctgagtattggaagaagtcagaagggtatcgcatgggctggagtgatgaaatactgggcttcgattgtggtgggcagcagtgggtttctgaaaactgcttccccactggaaccctagcaaagccaagtatgaaggatcttgattatatagataagctgctgcagttgattgaaaaggaggagatacccgcacctggacctatcgagcagcgttggactgcccgcagcaagagcccgatgagcccggcatcaagctctgaagaagatgatgtattttcatgggttggtattataatgtatctgccaacatctgatgctcgccaaaggaaggaaatcacagaggagttcttcagttacaggagcctggcgcgaagtctctgggatgattattccgcctatgaacactgggccaagatcgaggttccaaaagacaaggacgaacttgccgaactccaggcccggctgaggaagcgttttcctgtcgatgcatataacaaggcacgtatggagctggaccccaacaaggtgctctcaaacgccaagttggagaagatgttcccagtgttggagcctcctcaccagacaaagtaatacgtgttgaagagcgcagagcaagggcacgtacgtagaacttggttgcaggaggcttaacccatacacatttgtagcactgttagttcctgtcatgattctgggaccctaccctggctgtcaaatgtgatggcgattaagattggtcactgaaataaagttttttttgaagttcgaaatggaacccttttgaa

SEQ ID NO: 103804 - DNA, 1804 bp, Zea Mays
gagccttttgaactctctcccaaagaaaaatgagcattcaaaatactgcgactatctgaagcacaacgtagccttcggttatggcccacgggcggtagcagctagcagactagtagtaggcttcggcttgtcggcgcacccaaaaggccaaaaccacccaaaaaccccagcgcacccaacccaagagcgaaaatggatccgcaccagttcgccccctcccagcagtcggcgctgaccatggaatcggcggagagcacggccgccgccgccgcgcgggcgtccaacggcgctgcccgagctgtcgtcgaggacgacgacgaggacgacgacgtccccgaggtggccgcctgcatatcgacgatgctcgaccgcgggggtagcgtggagagccaccgcctcttcctggcgcgccgcaccgcgctggagatgctccgcgaccgcgggtacgccgttccggaggaagagctcgcccgcaccctcccggagttccgcgcctggtgggaatacaggccggagctcgaacgcctcgccttctccactaccctcacctccgacccgtccagcaaggtgaaagttgtgttctgtccacctggacctgtcaaaatcgcagctatccggctgatatataccgaagtcaaagatgagaacttgtccagactgattctgatactgcagggcaaaataatgtctacaaccagagaatccatcaaggagatctttcgatttaaagttgacacattccagatcacggaattactggtgaacatcactaagcatgtcctcaagcccaagcatgaagtgttgactgcagaggggaaagctaagctcctgaaggagtacaatgtggtggattcacagttgcctcgcatgctggagaatgatgctgttgctcgctattatgggctaggcaagggaactgttgttaaggttatatacgacagcgagcttaccgggaaccacgtgacgtaccgatgcattacctgaggggcccatgtgtttcggtggatgaagtctcgtaagcagtctgtaaaaaattacctctaagaggggcaggtgacactgttctgctaggcttttgtaagcacccaattgtgcaggatgaagcttgctgtaagctattggtaaaatcatcttgcgccattgccgtaccttaagtgcttggtgttaatcttggaaacagtgagacaactaatcctgtagtgagttatctcgatcactttcagatgtctctgatggccttcgaggctgttaccttagctgtcctcttgcaggctacagctgaagtgtgttgcaaaatcacttgattcgaaccaagctgtatccagttatggattctgttaggttttgcaaatcagtgacaaacatctgtcacaaacaatagtccagaggctaagtaaggtgtcctataatatgcagctaactgtgccttggtctgtttttctggggcagaatttcttcgttgccctctgccttccactttcgtctgctgctgctcttgctcgtggggttactgcaatacttgctgttgctgtcactctgctggtgatgtactgctgttcctggtggagtggtgggagtgctccctgcatctgcttttcagtatgtgaggcttgagcttgctcatgtctgatagccggcactggttttatgaagaactcgtcagctactttctccagacatctgatctaggagatgatccagtctgaaacaaaagtatcttttgattttatttgacttcgtcaataaaccgggacaaagcctgtttcatttcatggatacggcaatatgaatggaatttaatatc

SEQ ID NO: 103805 - DNA, 773 bp, Zea Mays
ctgaggggcccatgtgtttcggtggatgaagtctcgtaagcacccaattgtgcaggatgaagcttgctgtaagctattggtaaaatcatcttgcgccattgccgtaccttaagtgcttggtgttaatcttggaaacagtgagacaactaatcctgtagtgagttatctcgatcactttcagatgtctctgatggccttcgaggctgttaccttagctgtcctcttgcaggctacagctgaagtgtgttgcaaaatcacttgattcgaaccaagctgtatccagttatggattctgttaggttttgcaaatcagtgacaaacatctgtcacaaacaatagtccagaggctaagtaaggtgtcctataatatgcagctaactgtgccttggtctgtttttctggggcagaatttcttcgttgccctctgccttccactttcgtctgctgctgctcttgctcgtggggttactgcaatacttgctgttgctgtcactctgctggtgatgtactgctgttcctggtggagtggtgggagtgctccctgcatctgcttttcagtatgtgaggcttgagcttgctcatgtctgatagccggcactggttttatgaagaactcgtcagctactttctccagacatctgatctaggagatgatccagtctgaaacaaaagtatcttttgattttatttgacttcgtcaataaaccgggacaaagcctgtttcatttcatggatacggcaatatgaatggaatttaatatctacgatatcaa

SEQ ID NO: 103806 - DNA, 1794 bp, Zea Mays
ctatatataaataccgcccaccaacgtctggtggtatcaaagaatctcctctatctctggcagccgcatcgtctcaatctcagtcactcccggacacgcgcacgagccaccccgcagccaaccaaccaacccatggacgcgggcggaacgccgccgctgccgctgctcctcctggccgcggcggccgccctgctgggcgcggcgctcgggtggctgctcctggcctggcggtcggcggcgaggccggggcggctgccgccggcagcacggggctgccgctcatcggggagacgctgcgcctcatcgcggcgtacaagacgccgaacccggagccgttcatcgacgagcgcgtggcggcacggcagcggggtgttcacgacgcacgtgttcggcgagcgcaccgtgttctccgcggacccggccttcaaccgcctgctcctggccgccgagggccgcgccgtcagctgcagctacccgtcgtccatcgccacgctgctgggcccgcgctcgctgctcctcaccgccggccccgcgcacaagcgcctccactcgctcacgctcgcccgcctcggccgcccggcctcgccgccgctgctggcgcacatcgaccgcctcgtcctcgccaccgtgcgggactggggccggccaggcgccggcgccggccccgccgccgtcgtccgcctcctcgacgaggccaagaagatcaccttcaacctcaccgtctggcagctcgtcagcatcgagcccgggccctggaccgagagcctccgccgcgagtacgtcaagctcgtcgacggcttcttctccatccccttcccattcgcctacctcctccctttcaccgcctacggccaggccctcaaggcgaggaagaatgtggctggagctcttcgggaggtgataaggaagaggatgggcgaggaggccggaactggccctggcgccggtagaaatggggagaagaaggacatggtggaggagcttctggaagcagagggtgggagcttctcggtagaggagatggtggatttctgcctgtctctgctggtggctggctacgagaccacctccgtgctcatgacgctcgccgtcaagttcctcaccgagacgcccactgcactggcgcagctcaaggaagagcacgacagcatcagacacaggaaaggcaaggacgagcagcctctgcaatggagcgattacaagtcgatgccgtttacacaatgcgtgatcagtgagacgctgcgcgtggctaacttgatcagcggggtgttcaggcgggcgaacgccgacatccatttcaaagattacgttatcccaaagggctgcagaatcttcgcgtcgttccgagccgtgcacctgagccccgagcactacgagaacgctcgcgccttcgacccctggagatggcagcagagcaagaaggagggagtacgagtagtaggccaggacgcgcagcaggggggcagcgtgttcactcccttcggcggggggcctcgcctgtgcccgggccacgagcttgcccgcgtggtggtctccgttttcctccaccgtctggtgacgcgcttcagctgggaagaggctgaggaggacagggtcgtcttcttccccaccacccgcaccctcaaagggtaccccatcatcctgcggcggcgaccgggttgggatgtctgacctcatcatgttacaatagagtcgatccatctatagttgttaccctcatctctctctctctctgtctgtctgtaataacactactatctaatataaacaagcatctccgctctcttctgttca

SEQ ID NO: 103807 - DNA, 572 bp, Zea Mays
cgaaattaatgcccatacccctctcattgtcccatcaaactcgctactggcctcgggcccgcccgtcgtgaggtccgagctcgatgcagccgatccggcggcggcaccgaggctttgcactcctctgtctctccgccgccctcctcgctgccgccactctgctccccggcgccgccgtcgccgaaggtgtcacgccctccgaggcgcgccggctccgcgacgaggtgaaagatatgttctatcatgcgtttgatggatacatgaagtatgctttcccactcgatgagctgcggcccttaagttgccaagatcgattctttggataccttggctttactgggtgataaggagaaatttggtgctgctgtggagtgggttggtaagaatgtccactttgatattaataaaaccgtctctgtttttgaaaccaacatacgtatccttgggggtctgctatcagctcacctgattgccagtgattatgccactgtatgaaaaataggattttgttattatctgttagttcctaaaataggggagtttgttcagtaaattagttgggccataggcca

SEQ ID NO: 103808 - DNA, 1466 bp, Zea Mays
atttaggataaaaattattacaacatattcataaacaataaaaatcactacagaaatgaattagattatagattaaaaagaccactagcaaatgttatgcaaggcctgtgataaaaaaaggaaaaaaatatcgactagtggttgtgaaaagctaaagatagatattagtgacaaattatgaaaatgaaagtaattgaaagcaaaataaaaaaaaacatgggaaaagcaagggaaaaggaaaaaggtgatggagaaagaatgagccagtttcagggtctgctttctgaaatagaaatcggcccagtagcgcgtgccgagagaacccagccccgggccacgagccgacgaccgccgccgccttgctgcgccagggcttcgtcgggcattttttccggtgccagcgacgaggacccaccgcaccaggattctgattactcttcattaggttataaatgacagagaggcatcgtgcatctcggcaatatcatgacgaccctcgggggtatcgtgaagctccacctcctccacttgcacgaacaaggcttctctctccgcgacgcttggaagctccacctcctccacttgcacgaacgaggcttctctctccgcgacacttggacgaggaattgtctagtcgccgtgccgagatgcgcagaatccgtggagacaatcagcgtctggcagatgaaattgtcagtctcaggcaaaccatgcctcgtttgaaagaagacctccaagtctcaagtcaagctgtaccaaagctccgggcagagaaagagcttgaatcgagggagctgactcagaggaatctgaagctggaagctgagctacgtgccttagaaccccttaggcaagatgctttgcatctgcgatctgaagcaagtaaactacaatctttgaagcaagagttggctgcaaaggttcaaggtctatcaaaagagcttgaacatcagaaatctgaaagccagaaaatgactgctatggtagctgaacgtgatgctctgtgtcaagaattgttgcaggccagggctaatcttgagtttgagaagaaggcaaaaccagagcttactgcacaggttcaggcaatggagaaggatcttgtagctatggctcaagaggctgagaagctaagggctgatatttcgaagagaaacacacctagtttcagcggccgtggagcttatggaacttctttgtcgacgcctgggatgggtttgcaaggcatgtatgatggcggctatgctacggccgggagccgctatggcagtggcgctggggcttggagctcgcatgatccccatggttacccgcatctgtaattgtgcttctgacccgtattcactcctgaacagctcctagagtactttggcaattttctgtagtagtatataacttgtgctttttggtgcaccacattgctaccctttctggtcaatgaaatgcagtgtattgtgaaagcatctaaa

SEQ ID NO: 103809 - DNA, 1444 bp, Zea Mays
atttaggataaaaattattacaacatattcataaacaataaaaatcactacagaaatgaattagattatagattaaaaagaccactagcaaatgttatgcaaggcctgtgataaaaaaaggaaaaaaatatcgactagtggttgtgaaaagctaaagatagatattagtgacaaattatgaaaatgaaagtaattgaaagcaaaataaaaaaaaacatgggaaaagcaagggaaaaggaaaaaggtgatggagaaagaatgagccagtttcagggtctgctttctgaaatagaaatcggcccagtagcgcgtgccgagagaacccagccccgggccacgagccgacgaccgccgccgccttgctgcgccagggcttcgtcgggcattttttccggtgccagcgacgaggacccaccgcaccaggttataaatgacagagaggcatcgtgcatctcggcaatatcatgacgaccctcgggggtatcgtgaagctccacctcctccacttgcacgaacaaggcttctctctccgcgacgcttggaagctccacctcctccacttgcacgaacgaggcttctctctccgcgacacttggacgaggaattgtctagtcgccgtgccgagatgcgcagaatccgtggagacaatcagcgtctggcagatgaaattgtcagtctcaggcaaaccatgcctcgtttgaaagaagacctccaagtctcaagtcaagctgtaccaaagctccgggcagagaaagagcttgaatcgagggagctgactcagaggaatctgaagctggaagctgagctacgtgccttagaaccccttaggcaagatgctttgcatctgcgatctgaagcaagtaaactacaatctttgaagcaagagttggctgcaaaggttcaaggtctatcaaaagagcttgaacatcagaaatctgaaagccagaaaatgactgctatggtagctgaacgtgatgctctgtgtcaagaattgttgcaggccagggctaatcttgagtttgagaagaaggcaaaaccagagcttactgcacaggttcaggcaatggagaaggatcttgtagctatggctcaagaggctgagaagctaagggctgatatttcgaagagaaacacacctagtttcagcggccgtggagcttatggaacttctttgtcgacgcctgggatgggtttgcaaggcatgtatgatggcggctatgctacggccgggagccgctatggcagtggcgctggggcttggagctcgcatgatccccatggttacccgcatctgtaattgtgcttctgacccgtattcactcctgaacagctcctagagtactttggcaattttctgtagtagtatataacttgtgctttttggtgcaccacattgctaccctttctggtcaatgaaatgcagtgtattgtgaaagcatctaaa

SEQ ID NO: 103810 - DNA, 1497 bp, Zea Mays
agccccgggccacgagccgacgaccgccgccgccttgctgcgccagggcttcgtcgggcattttttccggtgccagcgacgaggacccaccgcaccaggtatggcctgccccttctcccaccttcccgcattgcaaaattgagcaccgaaccctaactcgggcattatttgtattcgggtctgattgaatctcgaagtgtatgcatgttttttgcctactaacttcgattttttttcgtgtatatatgtgtgcaccccatgccctgggtccgcctgtgtgtgaatattttgtggatcggacaagttcctgtaaattgcagttgcagtatactttggttgcttccttgttgcaaaatgagcaaatgtaagagccatggggcagagggtctgaaatttgcttagaaaacttcgagggcgaggaactgatacatatgttgttgtctttgacgccaaggattctgattactcttcattaggttataaatgacagagaggcatcgtgcatctcggcaatatcatgacgaccctcgggggtatcgtgaagctccacctcctccacttgcacgaacaaggcttctctctccgcgacgcttggaagctccacctcctccacttgcacgaacgaggcttctctctccgcgacacttggacgaggaattgtctagtcgccgtgccgagatgcgcagaatccgtggagacaatcagcgtctggcagatgaaattgtcagtctcaggcaaaccatgcctcgtttgaaagaagacctccaagtctcaagtcaagctgtaccaaagctccgggcagagaaagagcttgaatcgagggagctgactcagaggaatctgaagctggaagctgagctacgtgccttagaaccccttaggcaagatgctttgcatctgcgatctgaagcaagtaaactacaatctttgaagcaagagttggctgcaaaggttcaaggtctatcaaaagagcttgaacatcagaaatctgaaagccagaaaatgactgctatggtagctgaacgtgatgctctgtgtcaagaattgttgcaggccagggctaatcttgagtttgagaagaaggcaaaaccagagcttactgcacaggttcaggcaatggagaaggatcttgtagctatggctcaagaggctgagaagctaagggctgatatttcgaagagaaacacacctagtttcagcggccgtggagcttatggaacttctttgtcgacgcctgggatgggtttgcaaggcatgtatgatggcggctatgctacggccgggagccgctatggcagtggcgctggggcttggagctcgcatgatccccatggttacccgcatctgtaattgtgcttctgacccgtattcactcctgaacagctcctagagtactttggcaattttctgtagtagtatataacttgtgctttttggtgcaccacattgctaccctttctggtcaatgaaatgcagtgtattgtgaaagcatctaaa

SEQ ID NO: 103811 - DNA, 1241 bp, Zea Mays
agccccgggccacgagccgacgaccgccgccgccttgctgcgccagggcttcgtcgggcattttttccggtgccagcgacgaggacccaccgcaccaggtatggcctgccccttctcccaccttcccgcattgcaaaattgagcaccgaaccctaactcgggcattatttgtattcgggtctgattgaatctcgaagtgattctgattactcttcattaggttataaatgacagagaggcatcgtgcatctcggcaatatcatgacgaccctcgggggtatcgtgaagctccacctcctccacttgcacgaacaaggcttctctctccgcgacgcttggaagctccacctcctccacttgcacgaacgaggcttctctctccgcgacacttggacgaggaattgtctagtcgccgtgccgagatgcgcagaatccgtggagacaatcagcgtctggcagatgaaattgtcagtctcaggcaaaccatgcctcgtttgaaagaagacctccaagtctcaagtcaagctgtaccaaagctccgggcagagaaagagcttgaatcgagggagctgactcagaggaatctgaagctggaagctgagctacgtgccttagaaccccttaggcaagatgctttgcatctgcgatctgaagcaagtaaactacaatctttgaagcaagagttggctgcaaaggttcaaggtctatcaaaagagcttgaacatcagaaatctgaaagccagaaaatgactgctatggtagctgaacgtgatgctctgtgtcaagaattgttgcaggccagggctaatcttgagtttgagaagaaggcaaaaccagagcttactgcacaggttcaggcaatggagaaggatcttgtagctatggctcaagaggctgagaagctaagggctgatatttcgaagagaaacacacctagtttcagcggccgtggagcttatggaacttctttgtcgacgcctgggatgggtttgcaaggcatgtatgatggcggctatgctacggccgggagccgctatggcagtggcgctggggcttggagctcgcatgatccccatggttacccgcatctgtaattgtgcttctgacccgtattcactcctgaacagctcctagagtactttggcaattttctgtagtagtatataacttgtgctttttggtgcaccacattgctaccctttctggtcaatgaaatgcagtgtattgtgaaagcatctaaa

SEQ ID NO: 103812 - DNA, 1927 bp, Zea Mays
catccgtctccgtcactttcactcaccctagcaagcagcctgcctgcttttccctttcccatcgtcttcctctcccctccacacacatacatacacagttgcgttgtcgtccggccgctgtgcgtgcgttcctgcctgcgtgcagtgcgtgcgtgctttctttcgctccatccgctccccccctccaaatctctcgaaaatccgagccgccgccgaccagcctttaccgccgatccctctccggccggcgcgcgtacgtacgtccgtccggccccagaaaatataaagggaaggcagccgggcgcgcgggtggttagccggccctctaccaccggcgcctcgccgccgtccagttccaggccgcccgcacgcacatgagatcatgagctcggaggactcggtgaagtcgctgtcgctggactacctgaacctgctgatcaacgggcaggccttcagcgacgtggccttcagcgtggaggggcggctggtgcacgcgcaccgctgcgtgctggccgcgcgcagcctcttcttccgcaagctgttctgcggcctggacccgaactaccagccgccgacgccgacgctgggctcgtcgtcctccggcgcccgcgcgccggagctcgtcatccccgtcagctccatccgctacgaggtgctggtgctggtgctccagttcctctacagcggccaggcctccgtggccgcccccaagagcgggccgctaccgggctgcggcgccaggggctgctggcacaccagctgcggcgccgccgtcgacctcgccctcgacaccctcgccgccgcccgctccttcggcgtcgagcagctggccctcctcgtccagaagcagctggaggccatggcgaaggaggcgtccgtggacgacgtgatgaaggtgctgatggcgtcgcgcaagttcgagatgcaggagctctgggccacctgctcgcacctggtggcgcgctcgggcctctccgccgacctcctcgccaagcacctccccatcgacgtggtggccaagatcgaggagatccgcgccgccgccaataagtcccccgtgtgcgccgtctccggcggcggcgggccgcgctcgccgttcctcctcacccaccactacctccccgtcaacggcgcgtcggcgtcggcgtcggcgtcggaggccgagcgcgaccacagggtccggcgcatgcggcgcgcgctggacgccgccgacatcgagctggtgaagctgatggtgatgggcgaggggctggacctggacgcggcgctggccgtgcactacgccgtgcagcactgcggccgcgacgtcgtcaaggcgctgctggagctgggcgccgccgacgtcaactcccgcgccgggcccgcggggaagacggcgctgcacctggcggccgagatggtgtcccccgacatggtgtccgtgctcctcgaccaccacgccgaccccagcgcccggacgctggacggcgtcaccccgctcgacgtgctccgcggcctcacctccgagttcctcttcaggggcgccgtgccggggctcacgcacatcgagcccaacaagctcaggctctgcctcgagctcgtgcagtccgcggtgatggtgaccacgcgcgacgacgacgccggggcagggggaggaggaagcgatgccgccgacgacagcttggtgagcctcaccatgaattccacgctcatgtaccagggccaggagatggcggcagcggtggccggcgaggccaggaaagggagcagcggtggtggccgagggagcccgtccaacttgtacttccccactgccttcccataataagtatttagtttccttcatcaagcaagcaatgccttttgttttcatacatatatgcatccatccatccaaagatgatggatcttcaatttcgttgtattagatttttaatctgcattgtga

SEQ ID NO: 103813 - DNA, 1858 bp, Zea Mays
actgcacctgtcatcacttgtcatggatggatcgcttccaccccctgcccccctctctgactcatctttactaggaagggtcttgtcacgcccttgttcatgtctcgtgtccccttccttcttcccatccccatcccatccattgcacgcgcgcgctgcgtttcattccgtagcaattgcaatggcagtatatggattgctagggtttctcggagatcgatccgatcgatcccggtctagtccgtccaagggcaaggctcgtcacaggccctcccaaccccaattcccaacaacaagcaaacgcacgcagcagccgcgcggtgcatcatttccgaaacacacctcgctttgctgccttactgctgttcaagcagtacaacacagcgctgccatggcgatgaatgcaagtatacgcgcagtcaaaagcgccatatgcatgcatgctgcgtatcgatccaaacagctctggtcctgagcggcctgcagcgtcgaagtggaagaagcgtgtatctatgcgcgcgatcgagcggtgcccagggcacgcgccggccggagaatcttcggccgccgctacatttcatgctgctaatcacctatacctgcctgcctaaccgtacccgtgcagtgtttaattaatattgttcggctcgatgttgcgctgcagaagcagctggaggccatggcgaaggaggcgtccgtggacgacgtgatgaaggtgctgatggcgtcgcgcaagttcgagatgcaggagctctgggccacctgctcgcacctggtggcgcgctcgggcctctccgccgacctcctcgccaagcacctccccatcgacgtggtggccaagatcgaggagatccgcgccgccgccaataagtcccccgtgtgcgccgtctccggcggcggcgggccgcgctcgccgttcctcctcacccaccactacctccccgtcaacggcgcgtcggcgtcggcgtcggcgtcggaggccgagcgcgaccacagggtccggcgcatgcggcgcgcgctggacgccgccgacatcgagctggtgaagctgatggtgatgggcgaggggctggacctggacgcggcgctggccgtgcactacgccgtgcagcactgcggccgcgacgtcgtcaaggcgctgctggagctgggcgccgccgacgtcaactcccgcgccgggcccgcggggaagacggcgctgcacctggcggccgagatggtgtcccccgacatggtgtccgtgctcctcgaccaccacgccgaccccagcgcccggacgctggacggcgtcaccccgctcgacgtgctccgcggcctcacctccgagttcctcttcaggggcgccgtgccggggctcacgcacatcgagcccaacaagctcaggctctgcctcgagctcgtgcagtccgcggtgatggtgaccacgcgcgacgacgacgccggggcagggggaggaggaagcgatgccgccgacgacagcttggtgagcctcaccatgaattccacgctcatgtaccagggccaggagatggcggcagcggtggccggcgaggccaggaaagggagcagcggtggtggccgagggagcccgtccaacttgtacttccccactgccttcccataataagtatttagtttccttcatcaagcaagcaatgccttttgttttcatacatatatgcatccatccatccaaagatgatggatcttcaatttcgttgtattagatttttaatctgcattgtgatgtgaggatgcatgatggtggtgtggctagctagatactaatgcaagaatttcatggtatttgatgtggattaattgttccatgcatcttagtacatgtaaatgatccgtc

SEQ ID NO: 103814 - DNA, 255 bp, Zea Mays
ctggcaccctgtggcaacgcgaagtaagggtgcagccccaacccgacctctgtgtctttggaccgtttatacccaccgcccaccgccgtcaccaccgcgtccgccacaggctggaacacggtcgggtctaggtatgtgaacgtggtgccggagtccacgatggcgccttcggaccctgctgcgttggccgcgaacgcctgcgccgagagccgcaccgccttcccgcccactgtcacgcccctcaacaccaggtag

SEQ ID NO: 103815 - DNA, 855 bp, Zea Mays
cttcccatttcacgctacacaaatgatgcgtcaaaaaatgtatttattaatttttaaattaataaattcgaattgtcaatattaattacattgcttgttttgttgttgtgtaattgttgtcgataaagcgccgcatagtatattatcggtacgaaaatatgttttgaaattgacaagcttccaccgtaatccagaactcttcttcgagaagccatggacttgcttcccctgcacggcaaccgcatggcttgtctccgaagcgtacttcctttataaataccgagtgagctttgcatacttcactcaaccttgcctttagaaactccacaaccatgaacccctacttagaaaacaattttcttgtgcggttgatggaagaaatggaagaggaagaagagttcgagttggcgaggcacatgctcaataggaggtggcgtgcacgcaacgagcgtcgtcatggtggttcgattccagggcgtgttaggattcatcgtgatcacatgagcggcgatgcaggaatccgagcggactactttggagcgcacccggtgtacacagatgctcaatttcgtaggaggttccgcatgcgtcgccatgtgtttgagcgccttgttgatgttgtgcaacaagtggatccatactttattcagcgtccaaactgtgcggtgctggcagacacaagtcaaggttcaatggaagagcgcaacgacttcgtctatcaaaggtacaaccaactcaaagaccacaacaaatatactcagcttcaggttgatctgatgcaccatcattgggcgcgacatggatccggagttgcataggaagcaatgaaacgagttgtgtcatgtctgttcttat

SEQ ID NO: 103816 - DNA, 2364 bp, Zea Mays
aaaccccaccgccgattctccctattgcttcgctgtcgcctgggagacgccggaggcggcgatggcgaagaagctagggaagaaggcgcgcaagttcgcgcgcaagaacctgcagtctgccgccaagcgcaaccgcaagatccgcaaccagttcaagcaccgccgaggaccccgcggaggtgggagcgccggccgggaggatggggacgagcacgtgctgcagcgggtcctcgatcccaccatggttaccgacgatgctgctgctactttgatccacggtttggagtttccagaggacgatgctgaactagatgctgatctgtctgacagtgatggttatctttctgaggatcctggatgtccatactattctgacagtgaggatgagaaagctgccaaagattgtatcatggaagaaggtttggacagacagaatgatgacatgaatcgagatatcaagaagcaaaagaaaaagttgaagaagttgctggataaggaccctgaatttgcaaattttctcgaaaaatggcagtcggagttggagagctccagaagtaaaggagattctgatgaagagggtatggattctatggatgatgacgatgactccaatgatgggaatttaccaaatgctaaggtccttacaagaaagacgataagtgaatggtgccagttagtgtcaaaggaacctaaagcacctgccttgcgtaatctactaaatgcttttcgagatgcttgtcgatatggtgttcactctgatgggcccttgatgcagagatttcaaagtgccagggtgttttatcaaataataatgtttgttctttctgagtcggacaacattttccgtgctcttttggaaattcaagatgacgttaacaaaggaaaaattatgaacctgagaaattcaaagaaatggctaactgttgattctctcataaagtcctacttatcaagttctcttgatcttcttagtcaacttacagacaacaagatacttgcctttgttttgactcggttgagggtatcagtggtccttttttctgcatatccatcaacatcaagtaggcttgtcaagattttatttcgcttgtgggcaagtggtgatcggagtttgtctctgtcggcatttcttatgatccgagaagtagcttcactgttacctgactgtttggatcactgtttaactaaatcctacaatacataccttgccagtaccaatcttgtgaatgacagaaacacaaagcatatttattttctgatggactgcctggtagagctgtattctcttgatgttcagaaatcatatgagagggcaataatctccgtggagcaactgaatgctattcttagacaggcttctaaaaccaaggaaaaggaagatctcaggaagatagataactggcaatatattagttgtgtcaacctatgggttcggtttctgtgttgtcactataaggattacaatctccatcccttattttctcaagttcttcaagtaataagaggagtggctcacttattcccaggcacaaggtacttaccgttgagactgaagcttgtgcagatgctgaacgagctttccacttgcagtcagatgttctatccaattccatcgttgctctttgactgcctagaattaagagaagtttctcagaaagaacaaacacaaagaacaaagatcaacttttcgtcgttgttgaaggtgccaaagaacctgctgaaatcaagggattttcaagaggagtgtattctttcagcgattcagattctatcagcacattttgcccagtggagttaccatgtttccttcccagaagtagccaccattcctcttgtcctcttgaagaggctacatgagcagacaacagtcgaatcacttcgccgtcctattaagcgtttgatagaccaggtgacggagaacaaggattttatagaaaggaaaagagaggttgtatccttttcaccaaatgataaggcgtcagttgatagcttccttcaggaggagaaggtcagcagaaccgcttcattcactcggttctatgcatccgtagctgaaaaccgtcaaccaaaatggagaaaaacactttaaaataccaagggaatttctgagagacatctcacatctggaatcggttggtttccaagtgagggccacgaagaaccacatcaatgtagaacattttagtgcagatatacgccgaggcagctattgtgtaacctctagtgagactgattcctacgagtcctcgagtgctcaacaattttgtacgattgtaaccttaattccgaagtgagttgtcaagtgatgaatgaaatttgctgttgcttttgaatctgttgtcactgtgcccgtagtacagagta

SEQ ID NO: 103817 - DNA, 315 bp, Zea Mays
atggcattggcattctacagagcagaaggaagcctggagcagagattgccgcaccctggatgctggagcagggacagctgcacgctggagcagggacaggtcacaggtcgaagcagagatgagggcgacgggccggcagtagatgagggcggcagcgctcagcagtcagcagtccagctccaacaagcagatgagggcggcggcgctcggcagtccagctccagcaagcagatgagggtggcggcgctcagagcagtccagcaaccaaatgaaggcggcggcgctcagctccagctagggcaaaagactgtataa

SEQ ID NO: 103818 - DNA, 251 bp, Zea Mays
tagtcgtcgtctgaccaatcggctcggacactagaccgcttgtgcccgcccattctgtctcgcactaaatggaatggctctcttatcttagttacgatgtgccccgacccaagtccccacgtccgcttttatctgcctgcaacccagccaacacaacattagggtcgtcccccccatgctatgctgacctgggccagggctcgctttttgggaagcccattcccaccacgctcacggcctggctggcgtgc

SEQ ID NO: 103819 - DNA, 1678 bp, Zea Mays
gtagcctcatccattacgcgtcatcgttcctatcttcttccttcccagatttttccgccgccgttccctgttgaattctctgccgtcgtccttagcaacggcagatttttcctggctcgccggtgcttatccccgcacccgccctcgccggatttttctcagccgagctcgtcttctacggcgccgcccctgggagtcttcaaatatcagccgtgctttgcttcttctccgtggccggcgtcctctaccccatccatggccagagcttcctgtccgacgcccagccgaagccgcccagccgaagtctctttcctggccgcacgcccagcccgctctccttcctctcagttccgtgctctgctcggccggatttccatggcgcgcgtccagcttctggcgccttgctctctctctatttctcctgccgtgagcccggtgcccagccccaactccctgccgagtgctctctgcgcgcgtcttgctccgactagatccggccatggagctcgcctgcacgtgtcctccctgctcatgccgcggtgctcccagccgagcgccctctgccatggccgcgtccctagctcagacctggcttggccttcgccccagcgtcgcggcttcatccccaagtccggtgtccagctgtgctcgcgagcctctccctccgcgcgtctgctcttccgagctcgccgcgacctgccgaagctcccctggcgcgcctagccatggccaccaagcaccccaactccttctcagttttccagcgcctgcttccctgctcggattcagggccgcgcgcacgaatccctgctcaccagcgtgctctagattcagccatggagtgttccctgcgtctcctcgccggatctttttccagctcgcgcaggtctgctgctcatctcccatggtggttggtcgctgctgcgcagcttcctggtgccgcgacccccccgccgtggatgtcctctactgcgccaaactgcgcagcgccgttgacgcctgccgattgttcgatgctttgcgcggctagtcacggtcatacacagcagtgcctgctcctagctccgcgccccagtccctagtgtccgaccgtcgtcgtcactggtagtacgccggcgcagcgttcctgcacatcaacaccaacaagtcgtcatgccatcgtcttcgtcgtatggagatcgtcatgctgacatgtcaatgtcgtcaatcgccatcctcgtctacactaaagatccgagaagattaggcgcgggagggaaacaaattagtacgtggcggaaaaattgctcgatgtggagaagaagtgtgattcgatgcgacactcaccgtgtattcaggggaaaagttagagctgaaagacatcgtccatttcatgatttcaagccagatttaattatggtaagctaattcgcccacttccaataattggtttaatggatagattgctaggtacttatatcacgacgattatcccacttgtagctcgggcacgtatttatttgacgcttgttggaatacggggctacatgtagcggggtaattgtgtccacaattgcgaagtcgtccaatcaggtagtttagaatgttgacgtgcttctgtttttgttttaagactcaaatgtcttagactaatgaatttagaattattaagtttttggtgtcgaactttaattaaggc

SEQ ID NO: 103820 - DNA, 1396 bp, Zea Mays
gtagcctcatccattacgcgtcatcgttcctatcttcttccttcccagatttttccgccgccgttccctgttgaattctctgccgtcgtccttagcaacggcagatttttcctggctcgccggtgcttatccccgcagccgccctcgccggatttttctcagccgagctcgtcttctacggcgccgcccctgggagtcttcaaatatcagccgtgctttgcttcttctccgtggccggcgtcctctaccccatccatggccagagcttcctgtccgacgcccagccgaagccgcccagccgaagtctctttcctggccgcacgcccagcccgctctccttcctctcagttccgtgctctgctcggccggatttccatggcgcgcgtccagcttctggcgccttgctctctctctatttctcctgccgtgagcccggtgcccagccccaactccctgccgagtgctctctgcgcgcgtcttgctccgactagatccggccatggagctcgcctgcacgtgtcctccctgctcatgccgcggtgctcccagccgagcgccctctgccatggccgcgtccctagctcggacctagcttggccttcgccccagcgtcgcggcttcatccccaagtccggtgtccagctgtgctcgcgagcctctccctccgcgtgtctgctcttccgagctcgccgcgacctgccgaagctcccctggcgcgcccagccatggccaccgagcaccccaactccttctcagttttccagcgcctgcttccctgctcggattcagggccgcgcgcacgaatccctgctcaccagcgtgctctagattcagccatggagtgttccctgcgtctcctcgccggatctttttccagctcgtgcaggtctgctgctcatctcccatggtggttggtcgctgctgcgcagcttcctggtgccgcgacccccccgccgtggatctcctctattgcgccgaactgcgcagcgccgttgacgcctgccgattgttcgatactttgcgcggctagtcgcggtcatacacagcagtgcctgctcccagctccgcgccccagtccctagtgtccgactgtcgtcgtcactggtagtacgccggcgcagcgttcctgcacatcaacaccaacaagtcgtcatgccatcgtcttcgtcgtatggagatcgtcgtgctgacatgtcaatgccgtcaatcgccatcctcgtctacactaaagatctgagaagattaggcgcggagggaaacaaattagtacgtggcagaaaaattctcgatgtggaagaagtgtgattcgatgcgacactcaccgtgtattcaggggaaaagttagagctgaaagacatcgtccatttcatgatttcaagccggatttaattatggt

SEQ ID NO: 103821 - DNA, 788 bp, Zea Mays
agcatagggacacggctgcgcgcggcgtgtgcgcaaagagctcgaccgggcacggcgagctggggactgaacgcgctccgagctaggaaaagctgggataccacgacgtgcagggagacggcaaggcggagcgcgcgtcaaggagaaacgccggctcgcgtggcaaacggaggccggtgacctgcgcgacaacaaagttggagcgagctgggccgaaagtcgagatccgcgcagagggaggggatccgagcagggcgcggctgggacgaacttgggtgcgagccgcgcgcagagagactcggcggccatggacagggacagggacgcggctggagctcgacactgggagcgcgacatggacataggagcacgcgcaggggcagagggacgcgcaggaacttgggcacgcggcgcgtcttccatcgccgaacagggagccggcgtgagcgcggccgagcagaggcaagctcgcgcggcaaggtcctggggcaaggagccgggcgtggcaccagggagctcgccggtgaagagccgagcgcgagaggaggtcgaccagagatgaagaggacgctcgaccatggaggaaagtagaaatccgagcaggggaagtaggaagggcgcgcagggggagggaaccactcagctgggagctgcgggaggtaggaagatgagcaggggcggtcggatgggaggaagaagccgacggaggtggctggagggggctcggttaggagatggagtagagaatcgtgcgtgggagctccacggctggggaaggagagcgccgg

SEQ ID NO: 103822 - DNA, 281 bp, Zea Mays
gttctctgtgcagggtcaatcggtggcgtcgaacaaccctcatgcttcgtccagcccttcaccaaaccagtccagatgcccacctcgttgatgatttgttttgtgatgatccagacttacctttatgagtgttggtgatgtttgttacactttatcttgtgagatacttggtgatgttagtgatgatgcagacttgtatctgttttgtgatgatcctgactttagtgagacttgtgatctgttttgtgagactttgtgatatatatggtgttgatgataaa

SEQ ID NO: 103823 - DNA, 1664 bp, Zea Mays
gatgatgtcacgttgttgatgtaaggactcctcgtccatcggttccacacagttcgctgcgattttaattcacccgcttttgctttttctgcagtcaaaacggctttaatccagcatcctaacagcctcaggattgttgaaaaaaaactaggtcttccactcttcctccactagtctactcggcagatttcactgactctcaccggcggtctttgtgcctccaccggccgccgccatgccgtacctcgtccgcgagcggctctacttcggcggcatcaaagacgccattgccgccctcacggagtcttcctccacgccggacttcacccacgtcctctccgtggtcagctccgcctccatctccttcatcaccgattgccgcccgggcctcgagatccccaccgaggaggtcctccgcgtagtcgccggcgaggagggcgcggcaccgactgccgcggttcccccggggacgctgatgcgggtggtggagcgcgccgggcacgggctgcgggtcacgcgcatggccgtgccgctgcgggacaccgaggaggcggacctgctcgaccgcctcgagccctgccttgagttcatcgatgagggcaggaaggtcgggaatgtcctcgtccattgctttgctggggtgtcgaggagcgcttccatcattgttgcttatcttatgagagcagaacagaaatctcttgaagaagcattagaagctctgaaggagatttctgagtcggcgtgcccaaacgatggttttcttgaccagctgaaattatttgaagaaatgggcttcaaagttgatacttcaagtcctttgtacaagagattccgcttgaaattattaggccaatcctacatatctggggagaaaataagcagctatatgtttgaagatgaccctggcctttctctagagtctggctcttgtcaagattcttcaaaggttgagcaacgtaaaacagcttaccgctgcaggaaatgcaggagagttattgctgtagagggcaatgttataagtcatgttcctggtgagggtgaatcttgctttgattggaaccgaagaaagagtggtcatccatacaacaacaaagaacatggttgctcatctttgtttgtcgaacctctgaaatggatgactccagtagaagacggcgctttggagggaaagctatcatgcatccactgtggagctcggttgggatacttcaactggtcaggaatacagtgcaactgtggtagctgggttactcctgccttccaaattgttaagagcaaagttgatatcagcaccatctagacctgtgagcaaacgactggcaagtttgagggacgaggagcgcgacagcagtgacgcctgacggtttaatgttttgtgtaccatatgaacgctacgtatacaggtgaagcaatagcgtattttatgtttttccattgccgatcagaagctgtgtgtgacaaataccgtataaaatttcgcatttgctgatgtaacaagtagccgtgatgtcggccatctgtttagctggaacgggagcgaatgcagattgtgcagagaaatgaacacggttgtgtttctattctttctgtggattcaaatgtgcgcccaatatgaatactcgttcgtttctttttttcaacggtgcacatgcatcttaaggttc

SEQ ID NO: 103824 - DNA, 2168 bp, Zea Mays
ggtaactggtacccatgccatgtctggacccttcgccgagactcgccgtcctcccgcccgtcgacccctctcctcctgccgcagcgcgcccctctccgaccacccgcctccgcattcctcccccgccaccggcgcccacttccatgaactagcatcccctttcttcgcccagtacccacctgcttcctcccccccccccccttctctttcggcttgggtgcccatggagaccagcggtgcggccgccgccgccactgaagtgggctggtacgtgctcggcccgaaccaggagagcgtcggaccctacgcgcttgctgagcttcgagagcattttgcaaacggttatctcaatgagagcacaatgctctgggcagaagggaggaaggcttggatggcactctcgtccatccctgacttacactcggcagtcacagcgaaggatcgatttgaacaagatgctccagatgttgatggtgattttgagaaatttcagaaggaggttacggaagctgaggcagaggtcaaggccttgaaaggcagtgatgtggatcagcaagatgatgagcggccagcaaccccaccggacggagagtcagaatttactgatgatgatggcaccatttacaaatgggaccgtactttgagggcatgggttcctcaaaatgatgcatctggtagcaaggaaggttatgctgttgaagagatgacttttgcacttgaggaagaagtatttcaggcacctgatatcctgggtccttctgcattagaagaaatcgacactctgtctgaaagcaaaaacaaaggatcagacaaagcagaaacgagaggagacaagaaacgaaaatcttctgagaagccatctgagaaaaaggaagctaacaaacctccagacagttggtttgatctcaaagttaacacacatgtctacataactggtttacctgatgatgttacagtggaggagattgtagagacattttccaagtgtggaataataaaggaggacccagaaactaaaaagccacgggtgaagatttatactgataaggaaaccggcaggaagaagggtgatgccttggtaacatatttcaaggaaccttctgtagctttagcggttcaattgttggatgggacatcattccgttctggtggtaagactcctatgtctgtaagtccagccaaatttgagcagaaaggcgatgttttcatttcaaagaaaagtgacaagcaaaagaaaaggaagataaaaaaggttgaagacaaaatgcttggatggggtgggcatgatgataagaagctgatgattcctactacagtaattttaaggcacatgttcactcctgctgagttaagagtaagtagctgaaatatgcttggcgcctcctgcaatatgtgctcttttgatctgagacagctcttgtacttgattgcacattagatcattcagattgttcacatgaggtgttcattcttcagagcaactttattttcattcttattggattaaccaataatatccttcaggctgatgaagagcttctttctgagcttgagactgatgttagagaggaatgcatcaagtttggtcctgtggataatgtcaaggtttgtgaaaatcatccacagggtgtcattttggtgaaattcaaagatagaaaagatggtgccaaatgcatagagaagatgaacggtagatggtttgctgggcagcaaatccatgcgagtgaagatgatggttctgttaaccatactcttatccgtgattacgatgcagaggtgtcaagactggaccgatttggagaagagttagaagaatccacataaaggatgtataaatatacctgggattgctgcctcgtatgataagatagcagcaggagcttagttgtattttgcctcattcataggttgggtctttcctttgcccgattgacatcagaaagaaaaaaagttattcgatgtcagttatgagccatgagcacgtcgtttgttgctgcaagcctgcagctgaaagaggttcattgtttccgatgctaacatgtaacacctgccatttagtacggagcagtacccagcttgttagttgattattgttttacacttttgaggaagatatcactttctttgtcatctttcattcacatattatttctttttgctttacatta

SEQ ID NO: 103825 - DNA, 2001 bp, Zea Mays
ggtaactggtacccatgccatgtctggacccttcgccgagactcgccgtcctcccgcccgtcgacccctctcctcctgccgcagcgcgcccctctccgaccacccgcctccgcattcctcccccgccaccggcgcccacttccatgaactagcatcccctttcttcgcccagtacccacctgcttcctcccccccccccccttctctttcggcttgggtgcccatggagaccagcggtgcggccgccgccgccactgaagtgggctggtacgtgctcggcccgaaccaggagagcgtcggaccctacgcgcttgctgagcttcgagagcattttgcaaacggttatctcaatgagagcacaatgctctgggcagaagggaggaaggcttggatggcactctcgtccatccctgacttacactcggcagtcacagcgaaggatcgatttgaacaagatgctccagatgttgatggtgattttgagaaatttcagaaggaggttacggaagctgaggcagaggtcaaggccttgaaaggcagtgatgtggatcagcaagatgatgagcggccagcaaccccaccggacggagagtcagaatttactgatgatgatggcaccatttacaaatgggaccgtactttgagggcatgggttcctcaaaatgatgcatctggtagcaaggaaggttatgctgttgaagagatgacttttgcacttgaggaagaagtatttcaggcacctgatatcctgggtccttctgcattagaagaaatcgacactctgtctgaaagcaaaaacaaaggatcagacaaagcagaaacgagaggagacaagaaacgaaaatcttctgagaagccatctgagaaaaaggaagctaacaaacctccagacagttggtttgatctcaaagttaacacacatgtctacataactggtttacctgatgatgttacagtggaggagattgtagagacattttccaagtgtggaataataaaggaggacccagaaactaaaaagccacgggtgaagatttatactgataaggaaaccggcaggaagaagggtgatgccttggtaacatatttcaaggaaccttctgtagctttagcggttcaattgttggatgggacatcattccgttctggtggtaagactcctatgtctgtaagtccagccaaatttgagcagaaaggcgatgttttcatttcaaagaaaagtgacaagcaaaagaaaaggaagataaaaaaggttgaagacaaaatgcttggatggggtgggcatgatgataagaagctgatgattcctactacagtaattttaaggcacatgttcactcctgctgagttaagagctgatgaagagcttctttctgagcttgagactgatgttagagaggaatgcatcaagtttggtcctgtggataatgtcaaggtttgtgaaaatcatccacagggtgtcattttggtgaaattcaaagatagaaaagatggtgccaaatgcatagagaagatgaacggtagatggtttgctgggcagcaaatccatgcgagtgaagatgatggttctgttaaccatactcttatccgtgattacgatgcagaggtgtcaagactggaccgatttggagaagagttagaagaatccacataaaggatgtataaatatacctgggattgctgcctcgtatgataagatagcagcaggagcttagttgtattttgcctcattcataggttgggtctttcctttgcccgattgacatcagaaagaaaaaaagttattcgatgtcagttatgagccatgagcacgtcgtttgttgctgcaagcctgcagctgaaagaggttcattgtttccgatgctaacatgtaacacctgccatttagtacggagcagtacccagcttgttagttgattattgttttacacttttgaggaagatatcactttctttgtcatctttcattcacatattatttctttttgctttacattatca

SEQ ID NO: 103826 - DNA, 697 bp, Zea Mays
ggtgatgttagcgggaggctgcaatggaattttcagattgcagccttgcacctcttgtctgtttccagcacaagccattttggtatatcatttattcattggctttactgtgaaatgctgcgggaaacctatctgattaaagatgaattgtgcatattgcttgtctacacatagaaaattatctagcgtttgtgcacctagattgatctgttctgacagcatctgttctcatttctagcatctgttctcatttcttgccttgcaggtttgctgggcagcaaatccatgcgagtgaagatgatggttctgttaaccatactcttatccgtgattacgatgcagaggtgtcaagactggaccgatttggagaagagttagaagaatccacataaaggatgtataaatatacctgggattgctgcctcgtatgataagatagcagcaggagcttagttgtattttgcctcattcataggttgggtctttcctttgcccgattgacatcagaaagaaaaaaagttattcgatgtcagttatgagccatgagcacgtcgtttgttgctgcaagcctgcagctgaaagaggttcattgtttccgatgctaacatgtaacacctgccatttagtacggagcagtacccagcttgttagttgattattgttttacacttttgaggaagatatcactttctttgtc

SEQ ID NO: 103827 - DNA, 88 bp, Zea Mays
cagcagctgccaaacacctggtgaagtctggacatcgatcgagcccttctcttgctatgcgcttggtctcctcagtgcttgccttgcc

SEQ ID NO: 103828 - DNA, 402 bp, Zea Mays
tccggaacagaggtttccggtagctcatccggtcctacttcaggtccggtgatcgtgttctggacgtcgtggtcctgaactctggcctgcacgatggctgctactggaccagtgtccgcatctacgcgcaggctacggatttcgcagcatagttctggtccggagtcatggacaaagtccgggctcgtgggcatgcagtgcctagggtgttctaccggacgcagatgcctcagggtggtatagatgcagggaaaaaccaggtgactcccttcacggaattgagagatgaagctggtgtcacatactcacatccgcagggatgggtcacgttgcagacacttcctaatgcagtccttgtagtgctccgaaaggtaatcaggtattggaagaacttccttgctg

SEQ ID NO: 103829 - DNA, 1758 bp, Zea Mays
atgggccagtgctgctccaagggcgccggagaggccggcgccaccgaggcggcgccaaaggcgcaggcgccaagccgcggcgcgtccgcgaacaacgccgacggacaacgggcgtcgtcctcgtccgcggtggctgctgccgctgctgctgccggtggtggtggcggcggcacgacgaagccggcctcacccaccggcggcgccagggccagctccggcagcaaaccggcggcggccgtgggcacggtgctgggccggcccatggaggacgtgcgcgcgacctactcgatgggcaaggagctcgggcgcgggcagttcggcgtgacgcacctgtgcacgcaccggacgagcggcgagaagctggcgtgcaagacgatcgcgaagcggaagctggcggccagggaggacgtggacgacgtgcggcgggaggtgcagatcatgcaccacctctccggccagcccaacgtggtgggcctccgcggcgcgtacgaggacaagcagagcgtgcacctcgtcatggagctgtgcgcgggcggggagctcttcgaccgcatcatcgcccggggccagtacacggagcgcggcgccgcggagctgctgcgcgccatcgtgcagatcgtgcacacctgccactccatgggggtgatgcaccgggacatcaagcccgagaacttcctgctgctcagcaaggacgaggacgcgccgctcaaggccaccgacttcggcctctccgtcttcttcaaggagggcgagctgctcagggacatcgtcggcagcgcctactacatcgcgcccgaggtgctcaagaggaagtacggcccggaggccgacatctggagcgtcggcgtcatgctctacatcttcctcgccggcgtgcctcccttctgggcagagaacgagaacggcatcttcaccgccatcctgcgagggcagcttgacctctccagcgagccatggccacacatctcgccgggagccaaggatctcgtcaagaagatgctcaacatcaaccccaaggagcggctcacggcgttccaggtcctcaatcacccatggatcaaagaagacggagacgcgcctgacacgccgcttgacaacgttgttctcgacaggctcaagcagttcagggccatgaaccagttcaagaaagcagcattgaggatcatagctgggtgcctatccgaagaggagatcacagggctgaaggagatgttcaagaacattgacaaggataacagcgggaccattacactcgacgagctcaaacacgggttggcaaagcacgggcccaagctgtcagacagcgaaatggagaaactaatggaagcagctgacgctgacggcaacgggttaattgactacgacgaattcgtcaccgcaacagtgcatatgaacaaactggatagagaagagcacctttacacagcattccagtatttcgacaaggacaacagcgggtacattactaaagaagagcttgagcacgccttgaaggagcaagggttgtatgacgccgataaaatcaaagacatcatctccgatgccgactctgacaatgatggaaggatagattattcagagtttgtggcgatgatgaggaaagggacggctggtgccgagccaatgaacatcaagaagaggcgagacatagtcctatagtgaagtgaagcagcaagtgtgtaatgtaatgtgtatagcagctcaaacaagcaaatttgtacatctgtacacaaatgcaatggagttacttttgcaact

SEQ ID NO: 103830 - DNA, 1846 bp, Zea Mays
atcgccaatctcctctgtgttcttgcgtgcgcgttgacctgctggcgactctgcgctggtccctctcttcttctgtgaggagccaccagagtacgtacgtacaatggaggaggagggcggcgtcacttcgccgttgctgctgcggcaggggcaggagaaggtttaccacccgggctgcccgggctgtgccaacgaccggaggaaggagctccaggagggactgccgtacaaggagttcttgtacgtctggatcatctgcctcgcgacttctttaccggtgtcatcattattccccttcttgtatttcatgataagagacttgcacgttgcaaaaagaacagaggacatcgggttctatgccggatttgtgggcgcttcatttatgctcggtagatgcttgacctcaactgtctgggggatggcagcagatcggtttgggaggaagccagttgccatactcggcgtcttctccgtggttatattcaacactttatttggactcagtactagttactggatggcaatagccacaagatttctacttggcgctctgaatggtctgcttgggccaatcaaggcttattcgatcgaagtttgcagacctgagcacgaggcgctgggaatatcacttgtcggcacagcctggggaataggtctcatcattgggcctgctctaggaggctaccttgcacagcctgcagaaaaatttccagacctgttttcacctgactcgttcttcgggaggtttccctatttcttgccatgcttatgctcctcgctcttcgctgctgttgttcttgtcatctgcatatggatgccggagacactacacaaacacaaagctcgccatgacgaaaataaaaatgacgaagctttggaggcccaccagagtgactacaaggacaaggacgaacagattccaagtttggatgacaagaagagtttgctcaagaactggcccttcatgtcatccttaattacgtactgtgtgttttccttccatgatatggcttattcagaggtgttctctttatgggccgaaagcgataggaagtatggcggcctcagtctatcatctgaggatgtaggtcaagtgctttcagtcacaggcgtcagtcttctcatataccaactctctgtgtaccctcgtaccaacaaaatccttggacctatcaagacttctcgagttgcagctgttctgtgcatgcttattctcttgggctacccctacatgacacatctgtcaggaactgcactgtccgtcgttctcaacattgcgtcgatcttgaaaatcaatcttgcttctaccatcatctcgagcagcttcatccttcagaacaatgccgtgcctcaagatcagagaggagctgcgaacggactgtcggtgacagtgatgtccctgttcaagtcaatcgctcctgcagctgcaggcactgtgttctcttgggcacaagaacggcagcatgctttcttctttccaggtgaccagatggtgttctttcttctcaatgccatcgagctccttggacttgtcctcacgttcaagcccttcatggccgcaccagagtccagagcagcatgatgcaggtattagtgtgtacgtagctagtcagtcatagacggctgccttaattagtcacgaagaagagatggaaggggaggatcgattgctctataacagtggtagtatattttatgggtggcgtacttaattgtgttggtttgttctctccaacacaattaagtacaccaaggtgatgagactaggtgttattggacaaagctgaaactctgaaattatagatatagatggtatataatagcagagagcaaaactatgaatggc

SEQ ID NO: 103831 - DNA, 1454 bp, Zea Mays
cacccaccaactagccattacaggcatctcactgcgcaatggcgcaccggatagtccggtgcgccaccggtgcgccaacggtcgtttccaacggctagttctgacagttagccgttggactcatggcacaccggacagcgaacaatccgtgctagaaaaccaagggaaactgagtctggtgtatcttttgatgatcccactgtcgaagaagcggcaaaaaaaatatatgcaattgcagctaagcagagccaaggaacatttaagcggcaaagggagagagacattctaacggctggtctcggtaaccctgagcatcctggtcgtgtacgaggaatctcatctaaggaaggatggaaggaaggattcagaccacaatggaaaggtctgtacaagaaacgtgatcgatacaaggaagagatggcgaattattttaaggaggaggccaagaaagagttcaaaggcctgatgtctgaaatgctatcgaatccctctctagaattgatgcagcaattggcgatggcgagtgtgatgtctgttcaacagatgaccactccacagatgcaaataattccaggagctcaaacgttggcttccaccgagggtacaaccatcccaagctctatcgcgtcaacgggaaataaggtccactatccagttgatgacatcacaaggcctgtggcatgcacactagttataagatatggtattaacaatcagcgtacaaagaaagtagccacaggccttgcgatcccaggacacaagttccatggaaacgacattccagaagaatattgctgggtagaagtgacgacagtcgtccaaggatccgaggacgacatgctagacatccctgggcccgaaggtatcgagacacttggacaagctatcaagaattttatcctttggcctcgaagggatgtcgaattggttgatccaccacgacagccgtcgtcgcagacccaaccatctccgccttctcaaattgttgttcctattgtacatccatcatcacctcctcaaacttcacatgctgctcctcatcctctttctgaccctccttctcctcatcctcatggtggcccaccgtctccgccacatacatcgcccttcagggatccaccttctccacagccatcaagggatccacgaccatcaaataaatctaaagtttctataccaaaattagtgtccccgttcgagaagaaaaggaagagtaaatccactgctggcacaactcgttttttgaaagggattggacggagcctcacgtcagacactgttgatttggccgatctcgaggagtccgcaaaaaaggctgaggcaatgaccgcaaagataaagaagccaactaaggcagattataaaaacgtgcctaaaaaaatgtgccgggcagaccactactcacttttgagaaactaatgaaggtcccagctaatattaaaaggttgcatgat

SEQ ID NO: 103832 - DNA, 1927 bp, Zea Mays
gagctgagctctagtgatagactggtaggtcctagctgcgcgcacgtgcactagctaggacgagccatactgcgcgcgcggcattccgtccatcggtcgattggtatggcgggtcgtcggggcgactcggctgcggcgccgttgctggagaacaaggcggcgccggcgtcggcgtcggaggcggaggcgggcggcgggtaccatcaccacaacaacaactactactactacgtggacgggtgccccgggtgcgccgtggaccggcgcaaggcggcgagcccgggcatcccctacgccaacttcatctacgtctggatcgtcaccctctgcactgccctacccatctcatcgctgttccccttcttgtatttcatgataagggacctgaacgtcgctgaaagaaccgaagacatcggcttctacgccggcttcgtaggtgcctcgttcatgtttggtagatgcttgacttcaaccgcctggggaatagcggcggaccgtatcgggaggaaacctgtcgtcgtgttcggcatctcctctgtggtcgtgttcaacacgctgtttggcctgagcgtcaactactggatggcaatcgccacacggttcctgcttggtgctttgaacggcttgcttggaccaataaaggcttatgccatcgaagtctgccggcctgaacatgaagctctagcgctatcacttgtcagcacggcatgggggataggcctcatcatcggcccagctcttggaggctaccttgcactgcctgcagagaacttcccggctatcttttcacctgactcggtatttggaaggttcccgtatttcctaccatgcctttgcacgtcggtcttcgctgctgctgttctagtgagctgcatatggatgccggagactctgcacaggcacaaagttcacgagagtacgagccaggacgttgaaaaggttcaagaaagcggcattaggaagaagaagagcttattcaggaactggccgttgatgtcgtcgataattgtctactgcatcttctcgttccatgacatggcttacacagaggtgttctctctatgggctgaaagtgacaagaagtatggtggactgagcttatcatctgaggacgttggtcaagttcttgcagtcactggtgccagtcttcttgtttatcaactctttctataccctagaatcaataaggttctcgggccgatcaaatcttctcgaattgcagctatcctgtgcatacctatcctctttgcctacccctacatgacatacatctcagaaccaggactgtcaatcattttgaacattgcgtcagcgataaagaataatcttgctgttacgatcattacaggcactttcatccttcaaaacaatgcagtgcctcaggatcaacgaggagctgcgaacggactgtccatgacagggatgtccttcttcaaggcacttgctccggcaggagcgggcattgtgtgagttctcgtgggcgcagaaacgccagcatgcctttttcttcccaggtgatcagatggtgttcttcctgctgaacgtcgttgagctggtcgggctcatcctcacattcaaaccctttctggcagtgccagagcgatgcgatagtagatagctgttctttggaggatgaactatagaagttttggaatgattcaaaatttcatcgtgtatggcagcaataccagtgagacccaggaagaagcaagagctgtgtactggtaaccgtaagcggtgtatgcagtatcgctgcattagcatttgtgcttacgaaatgcacatgtatgtaggtgataaatgactaaatgtggccagtggatcgagttgttgctgcactgtgagtagtggtagtgtaagattcagcgactcgaaattgtgtgttggaaataaaattggtaggtgttagacgcgcggtatgagcgcc

SEQ ID NO: 103833 - DNA, 1928 bp, Zea Mays
gagctgagctctagtgatagactggtaggtcctagctgcgcgcacgtgcactagctaggacgagccatactgcgcgcgcggcattccgtccatcggtcgattggtatggcgggtcgtcggggcgactcggctgcggcgccgttgctggagaacaaggcggcgccggcgtcggcgtcggaggcggaggcgggcggcgggtaccatcaccacaacaacaactactactactacgtggacgggtgccccgggtgcgccgtggaccggcgcaaggcggcgagcccgggcatcccctacgccaacttcatctacgtctggatcgtcaccctctgcactgccctacccatctcatcgctgttccccttcttgtatttcatgataagggacctgaacgtcgctgaaagaaccgaagacatcggcttctacgccggcttcgtaggtgcctcgttcatgtttggtagatgcttgacttcaaccgcctggggaatagcggcggaccgtatcgggaggaaacctgtcgtcgtgttcggcatctcctctgtggtcgtgttcaacacgctgtttggcctgagcgtcaactactggatggcaatcgccacacggttcctgcttggtgctttgaacggcttgcttggaccaataaaggcttatgccatcgaagtctgccggcctgaacatgaagctctagcgctatcacttgtcagcacggcatgggggataggcctcatcatcggcccagctcttggaggctaccttgcactgcctgcagagaacttcccggctatcttttcacctgactcggtatttggaaggttcccgtatttcctaccatgcctttgcacgtcggtcttcgctgctgctgttctagtgagctgcatatggatgccggagactctgcacaggcacaaagttcacgagagtacgagccaggacgttgaaaaggttcaagaaagcggcattaggaagaagaagagcttattcaggaactggccgttgatgtcgtcgataattgtctactgcatcttctcgttccatgacatggcttacacagaggtgttctctctatgggctgaaagtgacaagaagtatggtggactgagcttatcatctgaggacgttggtcaagttcttgcagtcactggtgccagtcttcttgtttatcaactctttctataccctagaatcaataaggttctcgggccgatcaaatcttctcgaattgcagctatcctgtgcatacctatcctctttgcctacccctacatgacatacatctcagaaccaggactgtcaatcattttgaacattgcgtcagcgataaagaataatcttgctgttacgatcattacaggcactttcatccttcaaaacaatgcagtgcctcaggatcaacgaggagctgcgaacggactgtccatgacagggatgtccttcttcaaggcacttgctccggcaggagcgggcattgtgttctcgtgggcgcagaaacgccagcatgcctttttcttcccaggtgatcagatggtgttcttcctgctgaacgtcgttgagctggtcgggctcatcctcacattcaaaccctttctggcagtgccagagcgatgcgatagtagatagctgttctttggaggatgaactatagaagttttggaatgattcaaaatttcatcgtgtatggcagcaataccagtgagacccaggaagaagcaagagctgtgtactggtaaccgtaagcggtgtatgcagtatcgctgcattagcatttgtgcttacgaaatgcacatgtatgtaggtgataaatgactaaatgtggccagtggatcgagttgttgctgcactgtgagtagtggtagtgtaagattcagcgactcgaaattgtgtgttggaaataaaattggtaggtgttagacgcgcggtatgagcgccaatca

SEQ ID NO: 103834 - DNA, 1784 bp, Zea Mays
attgaaattcagggctttaatttgcatgatgattaacaatacgagtgtcctactactatctccaacacagataagggacctgaacgtcgctgaaagaaccgaagacatcggcttctacgccggcttcgtaggtgcctcgttcatgtttggtagatgcttgacttcaaccgcctggggaatagcggcggaccgtatcgggaggaaacctgtcgtcgtgttcggcatctcctctgtggtcgtgttcaacacgctgtttggcctgagcgtcaactactggatggcaatcgccacacggttcctgcttggtgctttgaacggcttgcttggaccaataaaggcttatgccatcgaagtctgccggcctgaacatgaagctctagcgctatcacttgtcagcacggcatgggggataggcctcatcatcggcccagctcttggaggctaccttgcactgcctgcagagaacttcccggctatcttttcacctgactcggtatttggaaggtatatatatttttcacacaccaacaacaaaactaggtggttttaaccagtacacttaaggtcagtttgaaagccacaaatccagaggatattggagggactaaaattccctccaaacccttccggatttgtggctcccaaactagccgcccttacagagtatatacgtactttattttgtttgagaatctgtcaggttcccgtatttcctaccatgcctttgcacgtcggtcttcgctgctgctgttctagtgagctgcatatggatgccggagactctgcacaggcacaaagttcacgagagtacgagccaggacgttgaaaaggttcaagaaagcggcattaggaagaagaagagcttattcaggaactggccgttgatgtcgtcgataattgtctactgcatcttctcgttccatgacatggcttacacagaggtgttctctctatgggctgaaagtgacaagaagtatggtggactgagcttatcatctgaggacgttggtcaagttcttgcagtcactggtgccagtcttcttgtttatcaactctttctataccctagaatcaataaggttctcgggccgatcaaatcttctcgaattgcagctatcctgtgcatacctatcctctttgcctacccctacatgacatacatctcagaaccaggactgtcaatcattttgaacattgcgtcagcgataaagaataatcttgctgttacgatcattacaggcactttcatccttcaaaacaatgcagtgcctcaggatcaacgaggagctgcgaacggactgtccatgacagggatgtccttcttcaaggcacttgctccggcaggagcgggcattgtgttctcgtgggcgcagaaacgccagcatgcctttttcttcccaggtgatcagatggtgttcttcctgctgaacgtcgttgagctggtcgggctcatcctcacattcaaaccctttctggcagtgccagagcgatgcgatagtagatagctgttctttggaggatgaactatagaagttttggaatgattcaaaatttcatcgtgtatggcagcaataccagtgagacccaggaagaagcaagagctgtgtactggtaaccgtaagcggtgtatgcagtatcgctgcattagcatttgtgcttacgaaatgcacatgtatgtaggtgataaatgactaaatgtggccagtggatcgagttgttgctgcactgtgagtagtggtagtgtaagattcagcgactcgaaattgtgtgttggaaataaaatt

SEQ ID NO: 103835 - DNA, 851 bp, Zea Mays
cgcaagagcacgaacaaacagaggaatttcaccttggcccttcctcgtcgatcaacgcgaatccgtctccgtccgtacagaagagttgcctgtgaatctgtgattgaggacgaaccatgcgtcgtccatcgatcatgaggcggcgtctccaacggagctaaggagatcggtcggtgagcggtggattgaagaatcgggagctagcgaggagggaggaggatggaggaggtggagcagcagctgaccaagaaacagatcgaggagttccgggaggcgttcagcctcttcgacaaagatggcgacgggacgatcacgaccaaggagctgggcacggtgatgcggtcgctggggcagagcccgacggaggaggagctgcaggagatggtggacgaggtggacgcggacggcagcggcgccatcgacctgcaggagttcctgaccctgctggcgcgccagatgcgggaggcgagcggcgccgacgaggacgagctccgggaggccttccacgtcttcgaccaggaccagaacggcttcatctcccgcgacgagctccgccacgtcctccagaacctcggcgagcgcctctccgaggaggagctcgccgagatgctccgcgaggccgacgcggacggcgacggccagatcaactactccgagttcgccaagacgaaggaaccaggagctggaagagcatgggagtgaatcgtctcactccaagggactctgcccctcctgtataatcctctgaaactcgactcgttctgccaccctagtttctactttctagctgccaggaggaagaaatgtactgtaactaacagcaagcaaagcagaagaatctgcatggctca

SEQ ID NO: 103836 - DNA, 2872 bp, Zea Mays
ctctccgctctgccgtcgctcgccaccggaattcggggatcggtgggaagaacaaagaaaagaaaagaaatcgccgatcgatttctcccgaaataaacccccccaccttttttctacctccttccgtctgtttccggagggcgactgatgtcttttctcggggctggggcggccgtccagcgaccacggagctgctgcgcctgcgcggaggcagttggggaggagtagtcgctctacccctaccactcccgctccaatctagcgacgacgacgacgacgacgacccgcccgccccatggaagaccaatcgcctgaccatatatcagtcggttcagcacaaaagaagtctagtacttcctcacgaggccggcaccgtaatttctcatcatcaacatgcaaagattttctccggaagtttgtggacagtgaacttttaacttcaagcctagaggattggttctctggtcacagtgaagattgtggtttcaggaagccatcttttgatgttcctttcgaccttacagaattacagagttttgattacgctctggagagtgttacttttcagcagctagtacggatgccaaatgccctatatgcatcgacatcagatgtttttgaagctactgcatatcttgctttagaggatttccttcatgcaagcattaaaggactgtggcaaactttctggggtcctgatgaatcaatgccattttcagttgcctgtatacacagcacaagctccaaattttatcctgctgagaaggctattagcagtggaaaactcgatggtgtttgtgcaaccgctatactactcaagaatttgaagcattcacaaggaagatgggaccatattgtcgtcttggctttgttgagacctgatattggaatggtttctgcacatggtgaccaggagccgtctcctgctgttttaggggaggcactgttctttgctttgcgtgtcctactatctcgaagccttggcagatcctccactgttcttcgcaattcagactgtgtttacttgcttcttgttgattcacagtttggcggagtggtaaaagtgcaaggtgatttgaacaagctggattttgacctaaacaatgtttatgactgtgctgctgaatggataaagaaacatgccaacatttcagtttcttccatagatcgagtatggaacaaacttgggaatgctaactggggagacatcgggacccttcaggttctcattgcaatgtttcactcaatgatccaattttatggagagcctaagtattctcttgatgagctggcaacggaacatagttcaaggctacaaagtcgaagatcagaaagacatttggttgacagacaagctaatggtaatggtttatttcgattccaacagcggagtcgttctcctgaaattgttgaagtacaggaggaagcagctgtcgatgtgaaaccacatgaaaccttaaggattgaaataggatctgttgtgttgatggatgatgcttacatgcagaaaggttttcagatcaatgacatcctaacagacagtgatcctcctatttatacttctactcctgtagaagaacctaccagaacctatttgctgtatgtgggctccagcccttctcatttggaaccggcatgggaggatatgaactcctggtaccaagtacagaggcagacaaaagtactgactgtgatgaagcaaagatgcatttctagcagatatataccacagatggtatcttctggacggctcgtccatccaggcccatgtaacaagcctaactcaaatggaagttgtggccatccatggtgcagtactccaatgcttgtcacctcaccagtcggtgagaccatttcaaatctgataaggaatggactgtttggtgttgaggaggctctgagatgttgccatgactgtttatctgctctcgccgccgccgcagcagcaggaatccgccatggtgatatccggccagagaatgtgatccgtgtcaataacggctcaaggcatccatatttcgtgcttattggatggggccatgctatcctagaagatagagaccggcctgtgatgaatctattcttctcatccacgtttgcgctccaggaaggaaaactatgtggagcatctgacgcagaaagtttaatctatcttctatatttctcttgtggtggagtttgccctgagcttgactctgttgaaagtgcacttcagtggagggagacttcgtggtcgaggagagtcatacagcagaagttgggcgacatctctgcggtgctgaaagcttttgcggattatgttgacagcctttgtggaaccccgtacccgatggactatgagatctggttgaaacggcttcgaagaacaatgaacgaagatcatgggaaggaggtcgacacatcctcgagttaataacacagcgccattttctcgcaaatccgagattcggaagatcaagtgattggcctgttacctgtttttgttgttgtagataatttatttgtgaaaggtccataggtcatagtctgtccatcgttttgatataccgttgcttggatataagggtattctgaagttgcaatctgctgctgctatcctcaatgggatcactgcccagtgtttactatcccgtgtgcttgccctaagcccttccttcgcacaggtgatccttgaggatatcagcaacatgatgtattttgtgaatcttgggtaaattggtgagcctccgctctggttgccttgagagattctggtcccgttttatccggttctggtaggcttcagggtgatttgtttttcttgtgatcggtgtcagaacttgttaatcagttggtgaatgtgtacctctaactgtgtggtatcaatcttttg

SEQ ID NO: 103837 - DNA, 1827 bp, Zea Mays
gtattttctcaattctcgaaaggagcttttctatggtcaccgaaaaacttattaaaatgcgaaatggttaacctgcgcccccgaatatatatctcctctcagccgccgacgaaagccgtagacataagacgctccggttcgagaacgaaccaagcgagcaagaaccaagaaacgaacaggcggagaagacgtacggccgtacgggagagtaggcggcagccggtgtttctgggctgggttcgccatgcccctgccgccgcccaacatgcgcacgcaagaacctcacccctggctccgcgatgcccccgacgacctcccggactgcgacgggacgggcgcctgcttccctggcggcggtctgtgctaccccgacgacccgctcgaactcgtccactcgctcttccctgctcagaccaccgtggaccgatcggcgctcgggataggcaccagcgccggcgagcctccctgtagggagcaggagcagccgctggcggagagcgcgtatggtggtggcggcagcggcgggcggaattcttgtggcttgtccagctacgttcttgagggactctccggcctcgaggaaattgatacgaacatgttctttgctgacgacgcgctggacggcggcggcggcggcggcggcggcgaggcgacccaagacaacttgccctgcgactcgacgggagccaagcccaagccgccggcgcacatgccagaagctggtgacgttcacgcgtcgccgctgcccgcgcacatgctacccggcgccctccaagcgtacgacgcgtgccgtgcgttccatggcgcgtcgccgcccatggcagcgggcggtccgctgcccgacttcgtcaccaacgacggcgcgcccatgccagctgctgctggccttcacgcgtgcggcgccttgcccggaattgtctctaacggcgcgtctaagccgccatcgtgccgtgcgttccatggcgcgtcgccgcccacggcagcgggcggtccgctgtccgtcttcgtcaccaacaacggcgcgccaatgccgggggctgctgctggccttcacgcgtgcgtcgtggtgttgcctggcattgtctccatcggcgcgtctgggccgccacggatggagcccatgccagcacgtgctagtctccacccgaacgctgcgccggcgcacgcccctccgccaccgtctccgccgtcgtccagcgcgtcttccggctcgggccgctgcccgtcgtcagcgacatcggggaccgagttcttgcaaccccacgcctgggttgttcccaggcggcagcggagcctacccacaggtgcccgcaggtcacgatccgcgccacgccagaggaacatgcaagcccagaaggtatgccgccactgccactcgccggatacgccgcagtggcgcacaggcccgaacgggcgggccactctgtgcaacgcgtgtgggttacgctacgcgggacacaggctggtgccggagtaccggccgctcacggctcctagcttccggagcgggcagcactccaaccgccaccggaacgtcatgaaactcagggagcaaatgaaggcggcggcgacggaggaggaaccgtcggaacagccgacagaaggcaacacgtagaatgatgggctcatccgctcatggctcacatatcagcagcaggcttatgacaccggctaggccaaggtttaggctttgaatcttttgttggtttcgtttcttagcgatgattctgtgctactagctagtgtagtagtaagaactagtgatcaatcatccatggatccatgaatgttagctagtctctttcgattgattcattattactagtc

SEQ ID NO: 103838 - DNA, 1047 bp, Zea Mays
tggccgttgcaacgaaacaaaaaaagccaaagggatcccaaacgaaaacgagccagctgagcaaacacaacactcgcatcggcacccacactgccactcatcacattggcacccctccgacacgggccgggacttctcggactgcaggcagccaggcacgcaccagcaacaccccccacccgccggctcggagcggggccccacccgaatcacacagatcgggacgccggaggaggagcaacgccgtcccgcatcaccggagcaacgcgggcgcggagaggccagccagcgcaggcgcagttcaagctttggattcccggatcccacaccaccggtctctctcggggagtgtaatccagcgagcgttgagttgaaagccgcgcaagtggagatgagtactctgaagaaatccgacaagaaggctgccctcgacttcgcagcatggagtttcaatgtcaccacatcggttggactcatcatggtcaacaaggccttgatggctacgtatgggttcagtttcggtatgcctgtgctctgctcgtccagggatttatttaccatacctccgactttcaccttcggtctctacttcttgcgcttctgactgcttagcgctattatgttatggcagtgttgtatttttgttgtgcgattgctagattccaaatacctaagtaataaccagatttgctttgctaatgattgaagaattattgtgaagttatgaagtgctgcagctatttgaggtttctgcagaacctaaaacctacctggctcccctcttatggacttccttgcaaaattggtagtgtctctgctaattgagccttcatggcattagtggaagcaatcgaaacatgctagcatatgtgatttcttactgtatgttaggtggcgattgcagattctaccgtatttctggacattctcaacaaagtgtgcatcgatgtgaacttggatatatctcctgtcatgtcattaattaccttttcctcttttttttcagccacaacattaaccgggcttcattttgtgactactaccttg

SEQ ID NO: 103839 - DNA, 1822 bp, Zea Mays
tggccgttgcaacgaaacaaaaaaagccaaagggatcccaaacgaaaacgagccagctgagcaaacacaacactcgcatcggcacccacactgccactcatcacattggcacccctccgacacgggccgggacttctcggactgcaggcagccaggcacgcaccagcaacaccccccacccgccggctcggagcggggccccacccgaatcacacagatcgggacgccggaggaggagcaacgccgtcccgcatcaccggagcaacgcgggcgcggagaggccagccagcgcaggcgcagttcaagctttggattcccggatcccacaccaccggtctctctcggggagtgtaatccagcgagcgttgagttgaaagccgcgcaagtggagatgagtactctgaagaaatccgacaagaaggctgccctcgacttcgcagcatggagtttcaatgtcaccacatcggttggactcatcatggtcaacaaggccttgatggctacgtatgggttcagtttcgccacaacattaaccgggcttcattttgtgactactaccttgatgactatcttatttcgttggttaggcctgagtcagccatcccacttacccctagcagatctagttaaatttgtgatattttcgaacttgtcaattgttgggatgaatgtgagcttgatgtggaactctgttggcttttatcagatagcaaagctgtgcatgatacctgcatcatgtcttctggaggttgtatttgatcatgtacattattcccgggacacaaagctgagcataatggtcgtgcttataggagttgcagtctgcacggttactgatgtcagtgtgaatgcaagaggtctaattgctgctgttatagctgtttggagcacagctttgcaacaatactatgtccattttctccaacgcaagtactccctgaactcattcaacctcctgggccacacagctccagcccaagctgggtcactgctgctagtgggaccatttgcggattacttgttgacaggcaaaagggtggatcagttcagtttgtcatcgcttgctctgtttttcctggcactctcatgcttcatcgccattggtgttaatctgagccaattcatctgcatcgggcggttctctgccgtatccttccaagtcctaggccacatgaagaccgtacttgttctgtcccttgggttccttttctttggcaaggagggcctgaaccttcaggtagtccttgggatggtcctggccgttctcggaatgatatggtacgggaacgcgtctgctaaaccaggtggcaaagagcggcgcagcatcctgccggtgaggtctgcgagtctcaagggaagttccgaagaaaaggccggtgccgagaaatagtcttgctatatctgactgcaaactttttatttagatggggaatttttcgttccgaaggttaaatttctggtgaggtgacgcgagtatcacagattgggagctctgcattatgtctgacgcgcacaaaacaaacgcgtcccttgtagagactctggattgttatagttacaggtatactgtaaagcttcatttttttttggcgctctgaatcgtttgcagtgagggggaaagacggacatggtttacggcccgttcggttcttccggaaccgtagcctggaatggttcctagctcaattgtttacctaatttatataagttttgatcaacccgaatgattcttggatgaatccaggacaaacgaacaaggcctacggagggtttaagacagtttttttttatcttatcgaacatatagttcggtagtttgagg

SEQ ID NO: 103840 - DNA, 2929 bp, Zea Mays
ggttggtgtcatatactttcatgcttcgtgtcctcctgctccttccattcctctccttcccgtagccattgttggtccttttacctgttatatattgtttagatctccgcgtccgcaggcagggccgaatccagttgaaggcaggcggcgaagagccaaagatgggactcgacgcaaccaacgccctgctgcacatcaagagcgcgttgcgttcttccgccaggcttgcctgccagtccgcgtccgagtaccccgtggcgctcggcgtcggcacgctgctgctgttcctgcacaggctctgccctgccctgctcgctctcctcctgtcctcgtcgccggtgttcctgctaaccgcgcttctgctcggggcgctgctgagctacggggagccaggtgacggcgctccagcgaccggagacggagagggcccgtccccccctgatgctgtggctgtggctgtggctgtggctgtggctgtatccacaccatccgttgctgagtcttgtccagcagttgccgtggaggttcagcgtgtcgccgccgtcgcccacatgccaaggagttcttctgcgagccccgttgtccgcgccgaggaaacaacgtccggtaccaccttcttccatgaagcccaccgtgacgagggcagtatcgtcgcatctgtctctgctgacgacgctcttcgccgcgcggaagttgttgttgtggaaagagaggagcagccggccaccaaggaaatctgcgagaatgttcagctgcggcagtttcggagcagcgctggtgaaggtgttccgatcgaagtggacagcaaagcttctggagctgtttcgcttgatgctcggtgggtggctatggagtcttctagctttcacagggacaacggtgccatcgctgaaggagagggagaggaggatgagcatgttaaggagatatgccagcaggctgagagcgccgtcgcagggaggtgtggtggctatggagtttgcagccagtatcagttcggtgagctcatgagctcgtgttggcaacctgttacgcggcaggatccttgttccgagtccgagtcggattctagtgaaagctcttcggatgcgtcgatcagtgacatcataccgatgctcgacgagctgaacccgcctgtggacttgggtgctggccacccttcctcagccttcagagagaagttgagcgccggctcatcggatgatgaagatggctcggaggaggacaataaccttagctcagatgaagatggagaagaggaagaggaggaggaagagaaaggtgatggaaacaactggaagggctctgtggatccaaactctctggaagctgaagaaaagaacgggagctcggagagtctgatggcgcggcgaagagcaaagaacgctctcgtgttcgatctcgacaggaggctaatggacctgcaggcagctgatgcagtctcgaaaatggaggcggcgtcacgcttccgcgtccaggtgccctccatctccacaccgaggcggcctggcccttcagacgatccagcagagggggacacagtggagctgccgcagatccctggctcggcgccgccgtccgttctgcttccacggaggaaaccatccgatgatgctccgttcgacgaccagatcgtggaccgcgacaggcgtctgcaggagacctggactcctcctcgctcaggctttccatcatcagcacagggtagtaggacacctgacactggcagcttgttcgtgaggccgtcttcttctccgcgacatggcagtggcgtggtagaagtagaagcagaggagcctggattgtccggtgccaaagatgccgctgacgaccactcggagtcggagagcggttccgaggaggaaccgccgcttccgcttggcagcaatggcaggctattcggctcgctggaaccgcgtattggcgacgagatcagaattctgggcgcggcggtctcagacgtgtgcgtgctagaactagaagcaaatctgggaagaagtaatggaggcagcgctggttccatcgacgccgcagattcctctcatgtccaaaagcccgtgtcgagcagcgggtcggatgatgcggacgattcagcttccgcagatgcaggcaatgcgcgatcggtagtactgcgtcctctatctgaagaagaagaagaagacggcggtgctgaggaacacgtcgtcgttgatgaagaaggagaagaaggctccatgagcgaggccacctcgctgttcaagtgccgcatggagcaagtgctggtgcagtccgtttcggaggccggcgtagggcagcccctggcggttggacccgggcgtgagcggctgagcctgagcgatgctctgttacctcctgcgacccctttggttgttactggtgaggcgagaccgtcggcaaaggagctgctgagctcacggcttgctcaggtggatggagaagaagcgctggcgccggtgatgcctgctgctgctggtagcccagagtcggagctcatgtgtgctgttggttgcggtgtgctgggtcgtgacgcagaacctgcttcggaggacgacgccaacgaccctactactactactcatgtgccgtcaagcatcggcggccgcggcggcggcgacattgctggtgatggccaagtataaccctgcttgtgcttgctcaaggtggtggtgggaatgggcgagggagacgtcatcgtcttctcggatgtgtgttttttgatcttcggagagaatggagtgcgcatgtgtatggtggtctgttcttttttttttcttttttctgtttagtttagttcgtctgttcatacttgttccttttctttttttttttattgtcgaattcggatggacaaagtagggcgacgcatgcagtttggtagcagcgtggatcgctggttgtttcgtgtaacgcgtgccgagtgcagtttttt

SEQ ID NO: 103841 - DNA, 1257 bp, Zea Mays
agctcacaaccacccaccgcgcatcacccctctctacctggccaggctccagttccaccaccgcactccgtccgtccgtaccatggccgaccgcgtccacccggcgcctccgcctctgccgctctcctccacgccgccgcagcaccctccgacgacggagacgacgcctctgcagcagcacccgtccttcgcccgcccgccgccgccgccgccggggacgtacatcgtgcaggtgcccaaggaccaggtgctgcgcgtgccgccgccggaccgcgcgcgccggtacaagaagctcgcggcgcgccccgcgcggcgccgcgcgctccgccgcgcctgctgctgcgcctgcgccgccgcgatcctggccgtgctcgtcgccgccgccttcgccggcgccgtctacctcgcctaccgcccgcgcgcgccgaccttctccgtcacttccctttccatccgcggcctcgacgccgcctccctcttgcgctcctcctcctcctcctcagagacgctctcgcctcggctcgacgccgccgtgcgcgcggacaacgggcgcaacgcgaaggtgggcgtggagtaccgcggcagcgggtccgtcgccgtgtcctactccggcgcaaggctcgccgcggggccgtggcccgcgttccgccagccgccgaggaacgtgacggcgttcgcggtcgccatgagcgggcgcggcgtgcggctcacggaggaccaggcgacgcggatcgccgccgagcaggccgccggcgccgtgccgctgcaggtggagaccacggtgcccgtgcggctgcgcttcggctcggtgctgcggacatggaccgtccccgtcagggcgcgctgcgacgtgtccgtcgacaggctcgacggcgacgccgtcgttgtaaaccgcgggtgcagggtcagggtcaggccgctctggtggtggtggtgatttcagtggtggccgccgccgcgacgccgctccgctcgccggctgtcgtgtcctgtgtccactgtccacacgggcgtttggccgttgcctgaacccgttcgaacggctagtgatcagttactgctcctgctgcacttagtggcagcaacggtgctttgaccacgcttacttgtttactgcttactgctagtatttaccagtaatgtggtacttgcttgtgaagaattattttttgggtgtatttaatttggatttcacatgtcttatgttgtatacaaatgaggaccaatagcacggttgttattactggttgttgcttt

SEQ ID NO: 103842 - DNA, 381 bp, Zea Mays
ccaaaaccagcagcacgccgacacgccgccgcgccgcgccgccattctcccatccgcccccgtgcccccgccgcccttccctaacctcgccgcggaagacgtcgcgccgtgcgtagctagcagttccccgtcgcacgcgcgtcggataagaattggttttggctcttcgtctccccccatccttgggtccttcccctcccactccctcttcgcctcgtccgcggcagtaggctcaagcttaggaactcgctaccgagaattagttggaggcttcgtgatggcgggcgcgaaggcggatgtagacgcagaaacaggagatggcagcggggtcggcagtggcggcggcggcctctttagcgagcagatgctgattgataagct

SEQ ID NO: 103843 - DNA, 107 bp, Zea Mays
atgcaatgtgcagtcttaggagttcatgttatcattttccatttcacaaagggaacagcctcaaaatacaatgaaatccatctttattgggaaatggaaaccaaaca

SEQ ID NO: 103844 - DNA, 261 bp, Zea Mays
tcttatgcagcactttcacaatggtgcatttttcaccgcaagagggccaaaagggttgtagatacatgggaaaaacagtttactagttcaagggaggagaagaaaataccattcctctatctatcaaatgatatcctgcaaaacagtaaacgcaagggggcagactatgtggatgagttctggagggttctacctagatccctgaagcatgtttatgaaaatgggggagaggaagggaggaagcaggtggcgagattggta

SEQ ID NO: 103845 - DNA, 1848 bp, Zea Mays
cagatattaatctgggaccaacgtaaagtttttgggactcgtattggaagtatgaaaaatagcattcttggtgacaaccctcctatattggataacaatgtgaatagtttaaatcctagctctaatcccacttcaaattccaaagctgcacggaaggattctggtacagtagtaaaaaaactcactgttggcgggatgcctgaaaagattgtgtctgcataccaatcagtgtttgatcaacattttgatgaagacacagctctaaacaaatgtaagagtactgtgggccttttggagagaataaataaagatattaacgatgctagcatcaacggtaatcagccagcatcatcattgatctctgaccttcaagagcaggaaatgaccttaaaacagtgcatcgaacaacttgaaagtgcaggtagggtgaggatatccctgatcaatcaattgaaagaagctctcagcgaacaggagtcgaagtcaataattctccgtgatcaattgcaagtcgctcgagcagaggctgaacatgccattcaacttagacaacaactgggtcgtgttcttgtcacgaacgatacacaatctacttctagtccgctcatgattactccaccagatcaaacagcagctatgatgcacggttcgggagtaagatcgacacctccccattcacaaccactgaaccctgcagtgtcacttccccctacagtcagtgcagtgggtgatgagtccaagagaacggcagcagctatggcagataagcttgcatctttgtcagctcctgtgcaggtgctgacctccattctctcatcttttgccgctgagcaagctgcttccataaacggcggatcaccttctggagaactctctggagtaccaccaggtttccatattgataagaggcctaggctggagaaaacagggcaggccgaggcgggcgctcctcccttttttgggcaagcgtcacaggtgcaacaacaggttggagcagtgcctacttcttttggaggcacacatccaccaactccaggcccattcccaccccctccaccgccattgccacctctattgccaccgctcatgcaacagtttggtcaaaatactggaggaatgatgggaatgcgaggacctttcgggatgatggctggctctatgccacctccgcctccattgtccaacattctgccggcaggttttccgggactaagtggaccacctcctccacctccacttccaccagctcagagccagccccagcagcagcagacctctcaggcgccacagcaatcaccaacatcagctggattctttcaatcatcaggcatggggttctttcctcctgtgcaggtgcagcaatctcagcctgcccaacgacagtgattcaactgtgtctatttgcactcatgggcttaaaggcagcaccttgcattaactttgtgcattaaacaatatctcaccgagtattgagcctaaacgttggctggtcctgcaagcgaggcacggccaatgacgacggattagaaagattgtagaataggcatgcacgttgtagaactatccccttttttgtccgagtagttttaactcttcctggttatgtgaagttgctagacttcgtttgtttttgatccagtctgcattgatcacccgaagcaaaagaaaacgactttggaaaactggggctgaaattgggacttcgccaactgacaggacagttttatggctgaaacagttgtagaacttactggtcttagtctcatagatatgatgtgaactgcatatttggcatgctgtttaaatctgtggattattattatcatcataccaccttttctgggtttg

SEQ ID NO: 103846 - DNA, 855 bp, Zea Mays
catttcctcccgtcttctctcgctgcttttcattacctcctcccgcgccgcccgtagtaccgattcgcactcggatggcgtcggcggcgttcaagtccaccacgcgccgcgccctccacgccaccaccacctcccgctccgacccgcccccgtgcccgcgccgcacccgctcgcgctccgtcagcgcggcgccccgcgccgcccacgaggactacgccaacacgcgcaccaacccgctcttcgactccgcggcctccccgtccgcctcgccatctccgccccccggggcggctgctgctactggtgctacctccggccgtggggatgcggcgggccgggagagggggcgtgagccgcggctcaagagcggggggcgcggcggcggtggagggagggcgcggtcggcctccgtcgcgccgccgcagcggcgccacaccgcctcggtggcggactctgctgccgatgtcggcgggaggaaggcttcgcgggcgcggtcggtggccgacgtcgcacgcacctaccggggctccgagaccgatgcagaagccaggggtgtggcaaggaaactgcagtcatggaggagccagcattcagttccagaggggaagcgtaagggaactgatgcaagttgttcatcccaggggtcaacaaccggagcggggtgccggcaaatggatgaaactacacagtcagaatctagcactgttgtttcttcacctggccatctcgagcatcaggaccactcaactgtcccagtggatccagttctggaaattcctcctgaattcgatccagattctgctgagtttatctctgacattagtgattatgtaacagaatatggaaagaaaaatg

SEQ ID NO: 103847 - DNA, 673 bp, Zea Mays
agcatagaaagactgaaagtgtcaaggcgtttagctgaagaggcaatgaactattttgaggaatgcgtttcaatttcaacaatggatagcactgatttctcatcacctgaggatcctcaaccaaattcagttgtgaatgtcccaccaaagagcaatagtagatttttccacaaagggagatcaatctttcaagaaccccacactctggctgatcaacatggatatcatgtggaatctgacaagcaaactcagtgctcaattagcgcaactggatccgatgtgtctgacagtgttatctttagtcacacaaatggtgctggtttgaaaatcaggagcgtctccagcgatgatcctgatggctttgacactccgcggagcagaagttcttgtttctctttcacccacgagccagtaaaaaagctcgaaaactgcgatgttcggcaataccttgggaatttcggaagggggaacaatacagagctaaaggagacgaggtcaagttattttgccgatgactatgcctcacagaaagttgatccggacttactgaaggatatggtgacctttcagaatcggatagagtatggagggctcgttatatgtaacatcagaacattctgacagtgaacagagccactgtccgaagaagctaagtatagcattgtgcaattat

SEQ ID NO: 103848 - DNA, 2014 bp, Zea Mays
ggcacagagatggcgagatgccaggcgagcacgagcaaggcaagactgcatgagcacaacgggggggccgggccagacggacgggacgggaagcagcacgcgccacgcaacaacaatggcagttggcacagaggcgcaacgcaaaaaccccccaccgccaccgctctataaaaaccccgtcctcctcctcctcctcctcctcccccgcctcgccgccagtcagattcaccaccggctcccctgcacaaccgcgtccgcgctgcaccaccaccgttcatcgaggaggaggggggacggagaccacggacatggagagatctcaacggcagtctcctccgccaccgtcgccgtcctcctcctcgtcctccgtctccgcggacaccgtcctcgtccctcccggaaagaggcggagggcggcgacggccaaggccggcgccgagcctaataagaggatccgcaaggaccccgccgccgccgccgcggggaagaggagctccgtctacaggggagtcaccaggcacaggtggacgggcaggttcgaggcgcatctctgggacaagcactgcctcgccgcgctccacaacaagaagaaaggcaggcaagtctacctgggggcgtatgacagcgaggaggcagctgctcgtgcctatgacctcgcagctctcaagtactggggtcctgagactctgctcaacttccctgtggaggattactccagcgagatgccggagatggaggccgtgtcccgggaggagtacctggcctccctccgccgcaggagcagcggcttctccaggggcgtctccaagtacagaggcgtcgccaggcatcaccacaacgggaggtgggaggcacggattgggcgagtctttgggaacaagtacctctacttgggaacatttgacactcaagaagaggcagccaaggcctatgaccttgcggccattgaataccgtggcgtcaatgctgtaaccaacttcgacatcagctgctacctggaccacccgctgttcctggcacagctccaacaggagccacaggtggtgccggcactcaaccaagaacctcaacctgatcagagcgaaaccggaactacagagcaagagccggagtcaagcgaagccaagacaccggatggcagtgcagaacccgatgagaacgcggtgcctgacgacaccgcggagcccctcaccacagtcgacgacagcatcgaagagggcttgtggagcccttgcatggattacgagctagacaccatgtcgagaccaaactttggcagctcaatcaatctgagcgagtggttcgctgacgcagacttcgactgcaacatcggatgcctgttcgatgggtgttctgcggctgacgaaggaagcaaggatggtgtaggtctggcagatttcagtctgtttgaggcaggtgatgtccagctgaaggatgttctttcggatatggaagaggggatacaacctccagcgatgatcagtgtgtgcaactaattctggaacccgaggaggttttcgctttccaggtgtcctgtcttgggtaatccttgatctgtctaatgccacagtgccactgcaccagagcagctgagaactttcttgtagaaagcccatggcagtttggcgttagacaagtgtgtcgatgttctttaattctttgaatttgcccctaggctgcttggctaacgttaagggtttgtcattgtctcacttagcctagattcaactaatcacatcctgaatctgaagtggttgtgcttgtgcagtttatcactgagtttacatggcatgatcatggtaacgcagccagtgcagcatagatttgttcgtttgaacagtttaccaaggctgtaaccctagtaagctccagattaaggaacctttgttttcaccattctatatttactagatgaatgcccgtatgttgcaacgggaatatataatattagtatactacaataacttatatacaaaatgtgtgttataccattatgagaaaatgtttcaaaatc

SEQ ID NO: 103849 - DNA, 1757 bp, Zea Mays
accccgtcctcctcctcctcctcctcctcccccgcctcgccgccagtcagattcaccaccggctcccctgcacaaccgcgtccgcgctgcaccaccaccgttcatcgaggaggaggggggacggagaccacggacatggagagatctcaacggcagtctcctccgccaccgtcgccgtcctcctcctcgtcctccgtctccgcggacaccgtcctcgtccctcccggaaagaggcggagggcggcgacggccaaggccggcgccgagcctaataagaggatccgcaaggaccccgccgccgccgccgcggggaagaggagctccgtctacaggggagtcaccaggcacaggtggacgggcaggttcgaggcgcatctctgggacaagcactgcctcgccgcgctccacaacaagaagaaaggcaggcaaggggcgtatgacagcgaggaggcagctgctcgtgcctatgacctcgcagctctcaagtactggggtcctgagactctgctcaacttccctgtggaggattactccagcgagatgccggagatggaggccgtgtcccgggaggagtacctggcctccctccgccgcaggagcagcggcttctccaggggcgtctccaagtacagaggcgtcgccaggcatcaccacaacgggaggtgggaggcacggattgggcgagtctttgggaacaagtacctctacttgggaacatttgacactcaagaagaggcagccaaggcctatgaccttgcggccattgaataccgtggcgtcaatgctgtaaccaacttcgacatcagctgctacctggaccacccgctgttcctggcacagctccaacaggagccacaggtggtgccggcactcaaccaagaacctcaacctgatcagagcgaaaccggaactacagagcaagagccggagtcaagcgaagccaagacaccggatggcagtgcagaacccgatgagaacgcggtgcctgacgacaccgcggagcccctcaccacagtcgacgacagcatcgaagagggcttgtggagcccttgcatggattacgagctagacaccatgtcgagaccaaactttggcagctcaatcaatctgagcgagtggttcgctgacgcagacttcgactgcaacatcggatgcctgttcgatgggtgttctgcggctgacgaaggaagcaaggatggtgtaggtctggcagatttcagtctgtttgaggcaggtgatgtccagctgaaggatgttctttcggatatggaagaggggatacaacctccagcgatgatcagtgtgtgcaactaattctggaacccgaggaggttttcgctttccaggtgtcctgtcttgggtaatccttgatctgtctaatgccacagtgccactgcaccagagcagctgagaactttcttgtagaaagcccatggcagtttggcgttagacaagtgtgtcgatgttctttaattctttgaatttgcccctaggctgcttggctaacgttaagggtttgtcattgtctcacttagcctagattcaactaatcacatcctgaatctgaagtggttgtgcttgtgcagtttatcactgagtttacatggcatgatcatggtaacgcagccagtgcagcatagatttgttcgtttgaacagtttaccaaggctgtaaccctagtaagctccagattaaggaacctttgttttcaccattctatatttactagatgaatgcccgtatgttgcaacgggaat

SEQ ID NO: 103850 - DNA, 1584 bp, Zea Mays
ccgtgatctgcgtccttgtcttaaagccggggggattaatttgtcaattgtgcatgatctgcaggggcgtatgacagcgaggaggcagctgctcgtgcctatgacctcgcagctctcaagtactggggtcctgagactctgctcaacttccctgtggaggattactccagcgagatgccggagatggaggccgtgtcccgggaggagtacctggcctccctccgccgcaggagcagcggcttctccaggggcgtctccaagtacagaggcgtcgccaggcatcaccacaacgggaggtgggaggcacggattgggcgagtctttgggaacaagtacctctacttgggaacatttggcactactgtactctgagaacaagggcacttggacaaattagccaagcgtcatgtctgaacatctgtttttatccacccattcagacagactacttaaccattcgtccgcttctgcagacactcaagaagaggcagccaaggcctatgaccttgcggccattgaataccgtggcgtcaatgctgtaaccaacttcgacatcagctgctacctggaccacccgctgttcctggcacagctccaacaggagccacaggtggtgccggcactcaaccaagaacctcaacctgatcagagcgaaaccggaactacagagcaagagccggagtcaagcgaagccaagacaccggatggcagtgcagaacccgatgagaacgcggtgcctgacgacaccgcggagcccctcaccacagtcgacgacagcatcgaagagggcttgtggagcccttgcatggattacgagctagacaccatgtcgagaccaaactttggcagctcaatcaatctgagcgagtggttcgctgacgcagacttcgactgcaacatcggatgcctgttcgatgggtgttctgcggctgacgaaggaagcaaggatggtgtaggtctggcagatttcagtctgtttgaggcaggtgatgtccagctgaaggatgttctttcggatatggaagaggggatacaacctccagcgatgatcagtgtgtgcaactaattctggaacccgaggaggttttcgctttccaggtgtcctgtcttgggtaatccttgatctgtctaatgccacagtgccactgcaccagagcagctgagaactttcttgtagaaagcccatggcagtttggcgttagacaagtgtgtcgatgttctttaattctttgaatttgcccctaggctgcttggctaacgttaagggtttgtcattgtctcacttagcctagattcaactaatcacatcctgaatctgaagtggttgtgcttgtgcagtttatcactgagtttacatggcatgatcatggtaacgcagccagtgcagcatagatttgttcgtttgaacagtttaccaaggctgtaaccctagtaagctccagattaaggaacctttgttttcaccattctatatttactagatgaatgcccgtatgttgcaacgggaatatataatattagtatactacaataacttatatacaaaatgtgtgttataccattatgagaaaatgtttcaaaatc

SEQ ID NO: 103851 - DNA, 2008 bp, Zea Mays
catgtcagctcctcattgcttattgtggcatccaacgcccgtgtgctactgccctactgctacctcctcttgattcctaagcagacagagacagagccccggcgacggcgagatggaagaggagcagagcagcggcggatggggcgaggaggcgacgaacaaggcgccgctgctggagccacgggcggcgtcggaccaccagcaccgcaacggaacatcagcaggagacggggctggcgccggcaaggcggaggcggagtggtcggcgctgccgctgcggcggcgcgtgtgggaggagaacaagaggctgtgggtggtggcggggccgtccatcttcacgcgcttctcctccttcggcgtcaccgtcatcagccaggccttcatcggccacatcggcgccacggagctggccgcctacgcgctcgtctccaccgtgctcatgaggttcagcaacggcatcctgctgggcatggcgagcgcgctggagacgttgtgcgggcagtcgtacggcgcgaggcagtaccacatgctgggcatctacctgcagcggtcgtggatcatcctgttcgcgtgcgccgtggcgctgctccccgtgtacctgttcacggagccgctgctggtggcgctggggcaggacccggctatcgcggcggtggccgggaccatctcgcgctggtacatccccgtgatgttctcctacgtgtggtccttcacgctgcagatgtacctgcaggcgcagagcaagaacgcggtgatcacgtacctggccatgctgaacctcggcctccacctgctcctgtcctggctggccaccgccaggctccgcctcggcctcgccggcgtcatgggctccatggttgtcgccatgtggatccccgtgctcggccagctcgccttcgtcttcttcggcgggtgcccgcgcacctggaccggcttctcctccgccgccttcgccgacctcgccgccatcgtcaggctgtcgctgtcgtctggcgtcatgctctgtttggagctgtggtacaacaccatactggtgctgctcactgggtacatgaagaacgcagaggttgcgctggacgccctctcaatatgcctcaacatcaacggctgggagatgatgatttccatcggctttctggcggcaaccggagtacgggtggcgaacgagctgggagccgggagcgcgaggagggccaagttcgccatctacaacgtggtggccacctcctccatcatcgggtccgtgctgttcgtgctgttcctcctcttccgcggaggcctcgcctacatattcaccgacagccaggcggtggcggacgcagtcgccggcctctcgcccctgctggccttctccatactgctcaacagcgtccagccagtgctgtcaggcgtcgctgtcggcgcgggctggcagagcgtcgtcgcctacgttaacatcacttcgtactacctcatcggcatccctcttggagccgtgctgggctacgcgctggggcttcatgtgaagggcatctggatcggcatgctgctcggaacgctggtccagactgttgtgcttctcttcataacgttgaagaccgactgggaaaaacaggtggaggttgctcaagagaggctgaagagatggtacatggaagagaacagaagactccaggggtccagacgaaacccttaggccggccctcagctccactgtgtatctctagttttccactcaccacgagaacaaaacgagggagacgactgctccacgtacaggccgatcgaggctgaaggatcatctctgggctgtatggtattgtagacacaaataatcatctgggctgggctgggcatgcaggtaatagtggtgtgcactagttctgaggttatatctctgccttgttcatcttaattcgatctgccggtgtcttgttgatcagtgcaatcctagctagttgttactgcattgcaatctgggaactcgggtgttgtttttccgagcgaaaccgggtcgatttcccgcgat

SEQ ID NO: 103852 - DNA, 338 bp, Zea Mays
tggttcgccggagcgccgcctctgctccacccctcctcgattgtttgtgccattgtgtgggctcaggcgctcagctcagcgcataactccgcctctcaaactgacgccatcgctggaacaactccacagttccagcactaggtggatgacaggtcgggctcgtgtgccaggagcgaatgttgccatctctccagagagaggtgtgggaagacgaagggccatctagggatggcaacagatcgcattcggatctgatattgcaaatatcggtctataaccatatctacgactgtaattaatatctgttcacgatcataccctggatagaaatttagacc

SEQ ID NO: 103853 - DNA, 1913 bp, Zea Mays
gcagggccaaatggagaggttagacagattataggggaattcacactttcaaatttactagcattacaaggaggaaaggtaattgtagagacagatgaaaatggtgtcccaaatgaaaggtcagcctccattcttggacagcaccttggccatgtagcagaaagcccaaccttagcccctttagacatcccaagatttgacaatagcaggtttaattcacacaaggaacaaataataaaggatgttgagctaaagtttgccttcccaaggcaaaccatacatcttacaagggactggatcctaaggacagttaataataggtggcgagcgtacaaatctaagttgaagaaacaatacttcaatcgtgacgagagaactctagaagaaatcctaagagagaagccactaacgactaatgaacatcaatggagatctctagttggaatttggtgccaagagcaacataagaaattatgttccacaaactctcgttgtgcaaaagaacagaagactgcacacacatgtgggaggaaaagccttgctagattaaaaaaagagatggtggaaaccagaactaaacgaaaggttcataggatagaacaatgggaggcagctcataaaaagaagaatggtagatacacaacagaaaaggcagagacactgatggtacgtacattttctggaatttaaaaaaggcgatggaacaacgatggtaatcgtctttcatctaaagattacaatgaagtgttcaatgatattgttgccaaggatttcaaagcatgtgggtactatgatgataagtactggagtcaagtacaagcttttcaaggtttaccgtttgttattcaaacagaggaagaaagaatgtaccaagagaaagtaaatgaaattgacaataaaatggaatccgtgagtggtctcatgaagcattggcttacttttatgtcaaaaaagtatccagaagatttaaccccagagatgagagaagctttacaaaatgaaggtggtgatagttatgaccaatgcactgaagatgacaaatctgaaaattatgctgccaaagatacgagtagcatccaagaagattcaaatgctgacgtgacctctcgaacaaatgaagtaacatggttcatgtcgagcagcagcaacaacaatctgtccatagaagtcttggacgaactcaagtccatacatctacaccacatgagcaaacaccttcaaagagaactcgaagggttcaagctaccagcatgggcatatcagaatcaagacaaaagcaagtctaccttatttcactgataaacaaaggcagagttgtggccaaagggaagttagtgactacagatagccaaagagaaatattaggagcaaagcttggaccagaatattgtggggttcgtgttgaaggccttgaaaatattgaacttggcaatattatatatgaggaggtacctagaccatctaatcagattcgtacactaattgatgctattggctatgttattccttggccaactacacatgtgaagcaagctagaagctcatcttgtacccacaacaagttggtacctgcagcacgtggacaaagctagatgggaagcctagtataattgcaaagtgaatcagttagattctagtagttactaatatttttaagtgatatttgtatgatattgccactttggctttgcttctttgtgaacacaattggcagttactgaacatgtttgctatcgagttagttagcttcttgatattttgccaaggccaaaagcaatattattgagggtttataatttgatttttttaacattcatctcgatgcacatttatatatataaatatataaatgaaaacatctttttttggcacgtaataaagtgtcacagtataacgtgtctatattattacaa

SEQ ID NO: 103854 - DNA, 816 bp, Zea Mays
gtggctataaaggccaatccactctctctccaggcaccccgagccgccaaaaccctaccgccgccgcgaatcccgcacgaccccaaccatgaccgtgctgagccgccctaccccgggcacggcccagtgcttcgggcggaagaagaccgccgtcgcggtcgcgtacacgaagccggggcgcggcctgatcaaggtgaacggcgtcccgattgagctgatccgaccggagatgctccgcctcaaggccttcgagcccatcctgctggcggggcggtcccggttcaaggacatcgacatgcggatccgcgtccgcggcggcgggaagacgtcgcagatctacgccatccgccaggccgtcgccaaggggctcgtcgcctactaccagaagtacgtcgacgaggccgccaagaaggagatcaaggacatctttacccgctacgatcgcaccctcctcgtcgctgacccccggcgctgcgagccgaagaagttcggcggacgtggtgcccgcgccaggttccagaagtcgtaccgttgagcggctgcctgctccatctcgatttttcagatcgttgtgggtgttcttcgctttatttcctatcaatggatctgcttatctggttctatatctagctgctgctttaccataatgtttagactttaatgcctagcctgaaaccttgtttgcaatgtgaaattaatgtgagagattatgaagactattttggctagtccctctattatgattttcatcattccagtattgagaattatgatattgtcccctaatggttttgttgtgtaacagctgccttcaat

SEQ ID NO: 103855 - DNA, 118 bp, Zea Mays
tttttttgttgggtctcaagtacttgtggcggttcaattcatactgtcttaagagctcgttcgtttgcctctagtaaagtttagcacctatcatatcaaatatttaaatgctagttag

SEQ ID NO: 103856 - DNA, 1524 bp, Zea Mays
atgcccgtttacctgggaggtgtttgtgttctgctccccacgactccccagtccccatccagacaagggaagggaatacaggcctgctccgccctgcctcccctctcctcttcttctctccccgcgcccaacaccacgccggcctcgatccaggctgccgcagcccgcaggtgtcctggacgccgcccttcccgtccgccggcggttgattccttctctccttcctcaggttcctggcctgatcacaaagcaggcggcgacggcgcggatggagctcccggtggcggagcccggcacggagcgaggcgagggcccgctgatccagtgcccgtactgcgactcggaggcgatgcacaagctagcgcagatcctgctaccggggctcgccgccgtgtgcgtggacggcacgacgggggacccgttccacagcccgtcggtggtggccgtggacctgcgcagggagatggtggactacatcacgcagcggagcgagagcttcatcgcggacgcgctgatcgagtcggaggccaatcaggaggggcccgacgcggcggtccccgacgacccgttcgaggccgtgtccgtgttcatggacgacttcggcagcacgaagcgcaacatcatcggccacgtctccgggtggctgctgagcgacagccgcgacgacaagatcgacgacttggtgcaggagatggaggcgacccggttctggccgctggagcggcgggaggccgtcgccgagacgctgctcaagaacgtggacctcaggacccggttccactgccccgagaagtacgagagcgaggcgcgcctggcggaccacaagcagcagtgcagcttccgccccgtcgcctgccccaacgacggatgccgcgccagggtctccgtccgctgcgcgcgggaccacgacgccgcctgcccgtacaagccgctccagtgcgagcagggctgcgagaagcggctgctcaggcgcgacatggacaggcactgcgtcaccgtctgccccatgaggcccatgaagtgccccttcggatgcgactcctccttccccgaccgtgacctcgagaagcactgcgcccagttccttcggccgcatttgatcaaggtgctcaaggcgattcataagaaggcgcgttcggaagatgagctcaaggacctcgctctgaagctggaaaagtacgatggagatggtaaactggctaaagctctggatgcaaggcctctcactaacgctgtcaaggacctcgaggccaagatgaaagctgaacactcgagtcgaagggctgttttacactgacagactttacagaatggataatgccattgtttagtatgaagggatgacgcagcttgtatacagagaagaatataagttttgttttcgttttttttttgcttcactttctcctccctcacgatcaaatcaactgtcagtatgaatattccactattgctctgtacgagtatattgtttgttttagcgtatgaatgaaggaatgaagagggggaaccattaaatccatc

SEQ ID NO: 103857 - DNA, 1408 bp, Zea Mays
tacgttcgattcggatgagccccggccccttctttggatgcgctgtgcatttctttgttgcgagctttcaaatcccccgcctacaatatccccgaaagaaaaaaaatgtttctgtttcgtctgaaacaataacagttgcagagatcgagcggcagatgtatatttcatcggaaaaacttgagaacgccgctgagctgctcggcacggcgccttcccgtgtgcaggttcctggcctgatcacaaagcaggcggcgacggcgcggatggagctcccggtggcggagcccggcacggagcgaggcgagggcccgctgatccagtgcccgtactgcgactcggaggcgatgcacaagctagcgcagatcctgctaccggggctcgccgccgtgtgcgtggacggcacgacgggggacccgttccacagcccgtcggtggtggccgtggacctgcgcagggagatggtggactacatcacgcagcggagcgagagcttcatcgcggacgcgctgatcgagtcggaggccaatcaggaggggcccgacgcggcggtccccgacgacccgttcgaggccgtgtccgtgttcatggacgacttcggcagcacgaagcgcaacatcatcggccacgtctccgggtggctgctgagcgacagccgcgacgacaagatcgacgacttggtgcaggagatggaggcgacccggttctggccgctggagcggcgggaggccgtcgccgagacgctgctcaagaacgtggacctcaggacccggttccactgccccgagaagtacgagagcgaggcgcgcctggcggaccacaagcagcagtgcagcttccgccccgtcgcctgccccaacgacggatgccgcgccagggtctccgtccgctgcgcgcgggaccacgacgccgcctgcccgtacaagccgctccagtgcgagcagggctgcgagaagcggctgctcaggcgcgacatggacaggcactgcgtcaccgtctgccccatgaggcccatgaagtgccccttcggatgcgactcctccttccccgaccgtgacctcgagaagcactgcgcccagttccttcggccgcatttgatcaaggtgctcaaggcgattcataagaaggcgcgttcggaagatgagctcaaggacctcgctctgaagctggaaaagtacgatggagatggtaaactggctaaagctctggatgcaaggcctctcactaacgctgtcaaggacctcgaggccaagatgaaagctgaacactcgagtcgaagggctgttttacactgacagactttacagaatggataatgccattgtttagtatgaagggatgacgcagcttgtatacagagaagaatataagttttgttttcgttttttttttgcttcactttctcctccct

SEQ ID NO: 103858 - DNA, 1447 bp, Zea Mays
aagacatcagcctctgttatcctggcccacacatcagcctccctggagtaagcgtggtagttgccactgccgtcccctccagaagtgcgatacagttcggattcagatcgcggccggtgcgaacccacgaaggcacgaacggtagaacccgaccgagcgcggcagcgcaaacctccgatccctgctgcgagcaagggatggcggcggcatgggcagtgctggcggcggtcctcgtcgcggcgcaggtggcgtctgcggcgccggtcacggcgccagcgttcctctgggcgcctaagaactacggattccgctctgatgatgctaaggaggtagtccattatcaaacaatctcaccaaagaacttagctaaatctgttcttgaggaaggtggctggtcaacctttatgtgttcaagggaggatactgagaagcatgttgatgttgccattgtttttattggctcaaagctacaatcatcagacatatcgaaagataagcaagttgatccagctttagcagatacattgaagctctccttcacagaatcagagttttctatggcattcccctacgtttccacatcagacgatgagaaactggaggagtcattgctatcaggcttcactgagaactgtaaaagtggttttggaagaaaccgtatcacctacacagacacgtgcgccgtgagtggccaagatctgaagacgtatcacaacatggatgctatcaatgacttggtagtgtcaggaagaaccaacccgagtggacagactgatgtaatcgtcttctgcagcggcgggttcgagaagttaggcaccacggaatcggaaggggagctgctttcccagcttgtcgacttgctgaagctgtctggggctagacacacgattctctacgcttcccagccatctggttatctactggagaacccttccggctcgccagtggctaggcaccttgcggagaggactaacggtacaaaaactggcctactgagcaaatgtgacggagagtgcctagtcaaatcaactcttcttgaaggaacctttgtcggaatagtgctccttatcatcttgatatcagggctcatgtgtatgatgggaatcgatactccctccaagtttgaagctccccaggagtcttgatctcccttcgaagcagaacccttgttttgttggtctgcactgtggatagatattattcagtttccccctttgaaagcgcctttcgtataattattattatttttttactgagccatctgttatttacgatgtgctcaaacttttgacaccaaacgaatgcatgtgtgtgaggcttgtgctgtgaccagacatagcattgcctccaggtgttttctgtgaataacctggaatttcaggtgggtactgtgcatcaaataaaaaagatgaaatcttgctgttgcaccttgtgcctcaaccaaaaa

SEQ ID NO: 103859 - DNA, 1469 bp, Zea Mays
ttcggattcagatcgcggccggtgcgaacccacgaaggcacgaacggtagaacccgaccgagcgcggcagcgcaaacctccgatccctgctgcgagcaaggggtaaggtttttccaagatcgccatgctcgatacctcatatcgatttccgccagcggttttcctcatttttttctctccctctcttgcccggtgatcggtcgggatcgattcgagcagatggcggcggcatgggcagtgctggcggcggtcctcgtcgcggcgcaggtggcgtctgcggcgccggtcacggcgccagcgttcctctgggcgcctaagaactacggattccgctctgatgatgctaaggaggtagtccattatcaaacaatctcaccaaagaacttagctaaatctgttcttgaggaaggtggctggtcaacctttatgtgttcaagggaggatactgagaagcatgttgatgttgccattgtttttattggctcaaagctacaatcatcagacatatcgaaagataagcaagttgatccagctttagcagatacattgaagctctccttcacagaatcagagttttctatggcattcccctacgtttccacatcagacgatgagaaactggaggagtcattgctatcaggcttcactgagaactgtaaaagtggttttggaagaaaccgtatcacctacacagacacgtgcgccgtgagtggccaagatctgaagacgtatcacaacatggatgctatcaatgacttggtagtgtcaggaagaaccaacccgagtggacagactgatgtaatcgtcttctgcagcggcgggttcgagaagttaggcaccacggaatcggaaggggagctgctttcccagcttgtcgacttgctgaagctgtctggggctagacacacgattctctacgcttcccagccatctggttatctactggagaacccttccggctcgccagtggctaggcaccttgcggagaggactaacggtacaaaaactggcctactgagcaaatgtgacggagagtgcctagtcaaatcaactcttcttgaaggaacctttgtcggaatagtgctccttatcatcttgatatcagggctcatgtgtatgatgggaatcgatactccctccaagtttgaagctccccaggagtcttgatctcccttcgaagcagaacccttgttttgttggtctgcactgtggatagatattattcagtttccccctttgaaagcgcctttcgtataattattattatttttttactgagccatctgttatttacgatgtgctcaaacttttgacaccaaacgaatgcatgtgtgtgaggcttgtgctgtgaccagacatagcattgcctccaggtgttttctgtgaataacctggaatttcaggtgggtactgtgcatcaaataaaaaagatgaaatcttgctgttgcaccttgtgcctcaaccaaaaa

SEQ ID NO: 103860 - DNA, 390 bp, Zea Mays
atgaagtctatgaaagggcaaatacaacttgatgaagtccatgatcttgttggtctccagatcgatcttgatggtgtcgttggccttgatgagagggtcggggtagcggatggtgcggtcgtcgtaggtgttcaggtaggggatgactttctggccaaactgaacagacctcaccttgcagagcttgaactgcacacaaaccaatacataagtgtggttcttgaaagacaattgatccttgaaagacaattgaccgcaacagccatttcatccatcatatcatgccattctcgcttgtgggaaattggaggatacatgctttatagaatacttggatccactgtacagattgatacttttctcctatgctcaggggatagatccaattga

SEQ ID NO: 103861 - DNA, 92 bp, Zea Mays
caaacaactaaactctagcatgatgcacattttagtgaggaaatatccactttatcaatgtctcctagtaattctcatgaatgaagaggtac

SEQ ID NO: 103862 - DNA, 1916 bp, Zea Mays
cctccctctccctctcgctctcgctcgctcgtttgtttccttccttctttgccccggaggcgtcaccagagcattcgtcctcctccgcctccgcctcgccgccaccacgcccccgccgccctatcccattccaccctccccccccccactctctcctcgcatggcgacagccccttgccggtagccctagatccagacatccctcgcccacgcagcaacagccctcctccctcccacctccatccatgcccatggacgcggggaatggctgcagtgcccgggcgctggtggcgtgcgtcatcggcagcatcgtgctgggcgcctcggtgctcgcgctccacctcgcgggcgggcctgccgccatcccgcacctgcccctgcctccgcttttcggcacgctccgccgccgccgccgccgccccgtgcgggtctacatggacggctgcttcgacatgatgcactacggacactgcaacgcgctgcgccaggcgcgcgcgctcggggacgagctcgtcgtcggcgtcatcagcgacgacgagatcaaggccaacaaggggccccccgttacgccgctccacgagagaatgataatggtccgtgctgtgaaatgggtagatgacatcattccagatgcaccttatgccataactgaagaattcatgaacaagctgttcaatgagtataacatagattacatcatccatggagacgatccttgtttgctaccagacggtactgatgcatatgctcttgccaaaaaggctggtcgatacaagcagattaagagaaccgagggagtgtcaacaacagacattgttggacggatgcttctttgtgttagagagagatcatctgatgcacataatcattcttcactacaaaggcagttcagtagcggacatggtcagaaagtcgatgatactggatctggaactggtacaagagtatctcatttccttcccacatctaggcgaatagttcagttctcaaatagcaggggtccaggtccagattctcgaatagtttacatggatggtgcttttgatctgttccatgctggacacgtcgagatattacgacttgctcgagaacttggagattttttgcttgtggggattcacacagatcagaccataagtgcaacacgaggacgacatcgcccaatcatgaatctccatgagcgaagtttgagtgttttggcttgtcgttatgttgatgaggtgatcattggtgctccatgggatgtttcaaaagacatgattaccacattcaatatttcgttagttgttcatggaactattgctgaaaacatggactttacggaggatgatttacacccatatgctgttccaatggctatgggcatttaccgccgactggagagtcccttggatatcactacaagtactatcatcaggaggattgttgctaaccacgaagcctaccagaagcggaacgagaagaaggaagcaagcgagaagaagtactacgagagtaaaagcttcgtcaacggggagtgaagttacgagtagcagaacttggatgaagattgctgcctagaccgtttagcaactgcaacagttgggcgatctacagactacagccgtaccttttcttcggtatctttgatgttccgctgacatagcttaggaagcatgagcaaaaatgactaggcagaggagatggcgagtctaggagcatttccatcgtttccctagcgtcttcagccaattccctgcccccgctgtattgtatgtatatgcgccttccagctgagttgcatttgagatctataggcttttccacccattgaaactatgcgccacagtatgaaaaccctgaatgttagcgtggttgacaactattcgctgctggtgtttctttcccgtatgcgctggcaggcagtcattttcttg

SEQ ID NO: 103863 - DNA, 1166 bp, Zea Mays
ctctcccccaccgttccttttctccaccagtgaagcacgctccgacctgaccctctctctctgtaacacacacagggcgtgttcggctggctgcaagccgacactgttgcagctgtttggattgctgcagctgcaatccatagagagaaaaatactgtagaagccgcagccgcagcaagccgcagcgaactgacagacacacaactcgtccgcagaagctcggctgctgctccttcagtcagtctagcaacggttgaggcgttgctggtgctcctgccgcttaccctgccctgttcactgttctgttccgcgtatcccacaggaagggaaggggaggaagcagcagcagcacacagctttgctctcgctctcggctccccgtccaccaaaggaggaaacgcgcagcccgcagcgctagccgtcgtctatctcgtctcctagtccaaggaaggaaagaggcgcttggcatgaagcgacctaccaagaatgagacgctgggctacccctggcacaagtagagcaagagccccagcaaccgagccacagtgaggaggactcgagggaagagatgggcaactgcggcacgcgggaggagaatgccgtcgtcgctgcgcacgcacaagttcaacagctccacttgttacaaaatcctgccaagaatgccattggagataggaagcacaaccgcacctcatcagatataagtgatccttccacacctaggaaagctgaagatgccaagaacatttccatatacaacgatgtgattgtcttcacattgtttgagctagagacaatcacaaagagcttccgtgccgattatgttctcggcgaaggaggatttgggaccgtttacaagggctacatagatgaaaatgtcagggtggggctgaagtcactgcctgttgcagtcaaggtgctcaacaaagatggacaccaagggcacagagaatggcttgtgagttgataagttgttcggttattttcatgctcactacgttttcattacatgcatggaaacatgaaaaattgtctactaatatggtgtgcttaaaaactatgcatgtcatattgacatggatacatgtaaatatcatcaggttcatgtcgctaacaagcatgctgacaaataaaatacacacattgaggattccatgtgtttcagt

SEQ ID NO: 103864 - DNA, 2578 bp, Zea Mays
ctctcccccaccgttccttttctccaccagtgaagcacgctccgacctgaccctctctctctgtaacacacacagggcgtgttcggctggctgcaagccgacactgttgcagctgtttggattgctgcagctgcaatccatagagagaaaaatactgtagaagccgcagccgcagcaagccgcagcgaactgacagacacacaactcgtccgcagaagctcggctgctgctccttcagtcagtctagcaacggttgaggcgttgctggtgctcctgccgcttaccctgccctgttcactgttctgttccgcgtatcccacaggaagggaaggggaggaagcagcagcagcacacagctttgctctcgctctcggctccccgtccaccaaaggaggaaacgcgcagcccgcagcgctagccgtcgtctatctcgtctcctagtccaaggaaggaaagaggcgcttggcatgaagcgacctaccaagaatgagacgctgggctacccctggcacaagtagagcaagagccccagcaaccgagccacagtgaggaggactcgagggaagagatgggcaactgcggcacgcgggaggagaatgccgtcgtcgctgcgcacgcacaagttcaacagctccacttgttacaaaatcctgccaagaatgccattggagataggaagcacaaccgcacctcatcagatataagtgatccttccacacctaggaaagctgaagatgccaagaacatttccatatacaacgatgtgattgtcttcacattgtttgagctagagacaatcacaaagagcttccgtgccgattatgttctcggcgaaggaggatttgggaccgtttacaagggctacatagatgaaaatgtcagggtggggctgaagtcactgcctgttgcagtcaaggtgctcaacaaagatggacaccaagggcacagagaatggcttaccgaagttaactgcctggggcagttaaggcatccaaacttggtgaagttgatcggatattgctgcgaagatgaccatcggctgcttgtctacgagttcatgtttcgaggaagcctagaaaaccacctattccgaaagacagctacaccattaccctggggtactaggatgtcaatcgcactgggagctgctaaagggcttgcttgcctccacaatgctcaaaggcctgtcatctacagagatttcaagacatcaaatattctactggactctgattatactgctaagctgtctgactttggcctggcaaaagctggccctgaaggtgatcagacccatgtatcaacacgggtgatgggaacctacggttatgctgcccctgaatatgtgatgaccggtactttcctcactgtttgtatatgcttggtgtctgcatttcttagaagatatcgtctaacagtttgggtatgaacttcatgtcgattttccagacactgaactattgtttgtactccatgagctgagatcacatattttgccacttcctatgctatgtctttcattatctgaatatagtaactttgtagcaatgtcttataaccaggaaaaaaacgtattattcttaatgcatgatctgatatcacatataccatcacacctacacttaatgatacctaatgtgcaggccacttgactgctagaagtgatgtctacagcttcggtgtggtccttctggagctcttgacagggcgcaagtcaatcgacaagtcgcggcccagcagggagcagagcctggttgactgggccctccccaagctgaacgacaagaggcggcttctccagatcatcgacccgagactggaggggcagtactcggccagagccgcccacaaagcctgcagccttgcgttctactgcctgagccagaaccccaaggccaggccactcatgagcgacgtcgtcgagaccctcgaaccgttgcagggcagcggtggaggcgatggacgcggccagccttctggccttcctgactataggggtcgccgcaggataaccgggaacagcgtccacttcagggccatcccgaaccccaagtgctcccctgccgtcccggccacggcttgccgagtgcggtgatgggtgctgtgtttcggttggagctgccggggtaggttccgttgtgtatattgcggccgtgggcagtggtgtgtgtgtgggtgcatgtgtgtgcttggcggcggcggggtttcggtttcttctcgggttttggcctgcgttttgatgtgtaaatttgatctgcgtgctgcattgctgctgctgcttttgtaaggccctctaattttcactgtggtcttatgtatccttcgactgagcgagccctgctgaaactggcgggttcgggattaaccctagaaatgaaatgaaaggctgaaccgagagcggttggatggctgatatggcatatgctgctgttgtgttgtgttgtatctgaggaatcaatcagtctgtatcgagtctcttggcaagttttctcttgtttggggcatcctggtatagtagggaagaacaatcgtgtgaccacatgatgcgcgatggtaaactgacaatgtttggaaatgt

SEQ ID NO: 103865 - DNA, 2397 bp, Zea Mays
ctctcccccaccgttccttttctccaccagtgaagcacgctccgacctgaccctctctctctgtaacacacacagggcgtgttcggctggctgcaagccgacactgttgcagctgtttggattgctgcagctgcaatccatagagagaaaaatactgtagaagccgcagccgcagcaagccgcagcgaactgacagacacacaactcgtccgcagaagctcggctgctgctccttcagtcagtctagcaacggttgaggcgttgctggtgctcctgccgcttaccctgccctgttcactgttctgttccgcgtatcccacaggaagggaaggggaggaagcagcagcagcacacagctttgctctcgctctcggctccccgtccaccaaaggaggaaacgcgcagcccgcagcgctagccgtcgtctatctcgtctcctagtccaaggaaggaaagaggcgcttggcatgaagcgacctaccaagaatgagacgctgggctacccctggcacaagtagagcaagagccccagcaaccgagccacagtgaggaggactcgagggaagagatgggcaactgcggcacgcgggaggagaatgccgtcgtcgctgcgcacgcacaagttcaacagctccacttgttacaaaatcctgccaagaatgccattggagataggaagcacaaccgcacctcatcagatataagtgatccttccacacctaggaaagctgaagatgccaagaacatttccatatacaacgatgtgattgtcttcacattgtttgagctagagacaatcacaaagagcttccgtgccgattatgttctcggcgaaggaggatttgggaccgtttacaagggctacatagatgaaaatgtcagggtggggctgaagtcactgcctgttgcagtcaaggtgctcaacaaagatggacaccaagggcacagagaatggcttaccgaagttaactgcctggggcagttaaggcatccaaacttggtgaagttgatcggatattgctgcgaagatgaccatcggctgcttgtctacgagttcatgtttcgaggaagcctagaaaaccacctattccgaaagacagctacaccattaccctggggtactaggatgtcaatcgcactgggagctgctaaagggcttgcttgcctccacaatgctcaaaggcctgtcatctacagagatttcaagacatcaaatattctactggactctgattatactgctaagctgtctgactttggcctggcaaaagctggccctgaaggtgatcagacccatgtatcaacacgggtgatgggaacctacggttatgctgcccctgaatatgtgatgaccggccacttgactgctagaagtgatgtctacagcttcggtgtggtccttctggagctcttgacagggcgcaagtcaatcgacaagtcgcggcccagcagggagcagagcctggttgactgggccctccccaagctgaacgacaagaggcggcttctccagatcatcgacccgagactggaggggcagtactcggccagagccgcccacaaagcctgcagccttgcgttctactgcctgagccagaaccccaaggccaggccactcatgagcgacgtcgtcgagaccctcgaaccgttgcagggcagcggtggaggcgatggacgcggccagccttctggccttcctgactataggggtcgccgcaggataaccgggaacagcgtccacttcagggccatcccgaaccccaagtgctcccctgccgtcccggccacggcttgccgagtgcggtgatgggtgctgtgtttcggttggagctgccggggtaggttccgttgtgtatattgcggccgtgggcagtggtgtgtgtgtgggtgcatgtgtgtgcttggcggcggcggggtttcggtttcttctcgggttttggcctgcgttttgatgtgtaaatttgatctgcgtgctgcattgctgctgctgcttttgtaaggccctctaattttcactgtggtcttatgtatccttcgactgagcgagccctgctgaaactggcgggttcgggattaaccctagaaatgaaatgaaaggctgaaccgagagcggttggatggctgatatggcatatgctgctgttgtgttgtgttgtatctgaggaatcaatcagtctgtatcgagtctcttggcaagttttctcttgtttggggcatcctggtatagtagggaagaacaatcgtgtgaccacatgatgcgcgatggtaaactgacaatgtttggaaatgtaattggtgatgtttttttttggatcaaatcgatctggacacatacatttctccatctgcagaacaagttagacgctgggaagttctccgggggtgattcttgagcgt

SEQ ID NO: 103866 - DNA, 768 bp, Zea Mays
atgacggcggcggccttccccgaccgatccagcggcatgatgatggcgatgtcgacgagccggatccacccgtcgtcggccgcggagacggcgacgacgacgcagccactgccgccgccgccgcttccgcttccgcttcctcctcttcctccccgccgcgccggcggccgggcgctgcaccacacggtgtggaagcggtccagcatggggttccccggcaccgacggcttctccgtctacgacgccgccggcgcgctcgccttccgcgtcgacaactactcgcgccgccggaaggtgttcgccggcgagctcctcctcatggacggccagggcgcgcccctcctcgccctcaggccgcagattttcagcatgcacgaccaatggaactgctacgcagcaacagcatcagaagaaggggagggcaagaggacaaggccacgcagacggctcttctccatgaggaaatgctcgctgctacagaagggccacgaagcgcaagtgtccatgtcaggaccgtgcggcagcggctgcggcagcttctgggtcgagggctgcttcgcgaggagaagctgcaagatccgcagcggcggcggcgaggaggtggccaggatcacgaggaagaatgccggggccgcgacggcgctgctgggcgacgacgtgttcagcctcgtggtccagccgggcgcggactgcgccttggtcatggcgttcgtcgttgtcctcgaccggatctgctggcagccgtacacgcccaggatctgctcctag

SEQ ID NO: 103867 - DNA, 1226 bp, Zea Mays
attgaattaacccccaacctccccaccgcccccaccttcgcattaattgaagctgcagtatctaaaaactccctcccggcccgctctgcctccccttccagttcctccccgttcctcccctcgccgcgccgcccgccccccacgatcccaccacccaatctcccctccccccccccccccccctgaaaatcccaatccacccaatggcggccaccggcggcagcgtcctgccgacgcacacagccccgtccgcccccgcctaccacccttcctccaccaagccgccccctccccggcgccgctgcctctgcctatgcgtcgtcgtcacgctggctctcctcgccgcgctggccataaccctgcttgtcctcttcctgaccgtgctgaaggtccgggaccccacgacgcggctggtgtcgacgcggctggccgggatcgcgccgcgcctgacgttcccggccgtgtcgctgcagctgaacgtgacgctgctcatcgtggtggccgtgcacaacccgaacccggcctccttcgcctacgcgtcggggggccacacggacgtgacctaccgcggcgcccaggtcggggacgcggagatcgagcccggccgcgtgcccagccgcggcgacgccaacgtcagcctcgcgctcacgctccaggccgaccgcttcgccgcgggcctcgcccagctggtcgccgacgtcgaggccggcgccgtcgagctccaggccagcaccaggatccccggcgaggtcgccatcttcggcgtcttcaggcgccacgccgtcgcctactccgactgcaccttcgtcttcgccgtccccgagatgcgggtgcgctcccagcagtgccgcgaccgcaccaagctctagctggtttggttggttgttggttgctgcgtacacgtcacgtggaacgtgccgctgtccgtacgtgtcgcttgcctcgtcgcgcatcccctcttgcttgtgctttgcttttttgctttgcttccctgtcacgcccgcgtcggtgcttggttacggtgagatacgactagtctagtggatcacgggtcgtcttttgtacaatttgattattgcagatagagcagtagagacagagagatatatatgaccatgtacataatcacagaatcggttgtgaattgatggagcagcagctgctctgctcatcgttcttttgctttgtattgataataataatacttcactcgttctgttcgttca

SEQ ID NO: 103868 - DNA, 229 bp, Zea Mays
gtttgtggcaatggcgggcacggtgaccggtcccggggtcgacgtcgaccctctccacgccgctgctcaagtccgagagcgacatcgcggggtccaccaacctcatttggagttcgccgttctggtggtgaagatcaattccaacatgatcaacttcggttctctgctcttgtttgatagctaccaccggatcattggactgctagctctgttaagggtcaaacattag

SEQ ID NO: 103869 - DNA, 123 bp, Zea Mays
tttaaattttaatcccttaaatgctattatcgttagttttgagttaacgtcgttggttcaatttaaagtcaatctctccaatggcattaaaatctatattgatcccttcaataccactagaaa

SEQ ID NO: 103870 - DNA, 336 bp, Zea Mays
cctgaggtttaagtacactaaaagtgggcgctgctgttcatttccaatgtaccaatagatgaagatattggatgcaaatcagaaatggggagtctgaaccagaacaaagatgtgattctcactatggtttcaactatgcagtattcaagacgcccagcacctacaaattgttggaggggatgctttcatgtcttcaatgctggagaaaagctaaatcttgttgaatttaaagcctactttccatcaagtgtcatccagagttattgatattgtcaagatgatgcccactgttttacagctggagttattacatcgaatggatgactagccaacata

SEQ ID NO: 103871 - DNA, 285 bp, Zea Mays
cgaggatctgaagaatcaccctggtaactggaatctcaagtgccaggagaagaacatgtggttcaagaggagccacaacgaggagttcgattcgatctaggtggtgtctcccagttgactttctggcgccaaggatggattttagatcctgctatatttatcttttattttgtcagacttccactatgtaataagtactctgattattatgacatttatctctatacactctgttattatatatgttgtcttctttggcgcatgtatgagatgcacccggctttg

SEQ ID NO: 103872 - DNA, 1925 bp, Zea Mays
tctgaagccatggctgctgcttcttcctccatggacaggatcgcccagtgggtgtcgtcccaggaggtcccgaccgacctcaccgtccgcatcgccgactccgtcttctctctccacaaggcggtgatggtgcccaagtgcggctacatccgccgggccgtggcggcgagccagacgcagggcccggggggcggcgccgtcgagctggacctctccgcgctgccgggcggcgctgacgccttccagaaggcggcgcgctgctgctacggcgacagcctcgagatcacggcgcgcgacgcggcggcactccgctgcgccgcggagttcctcgacgcgccggacctggcccgccgcgccgacgacttcctcgcgcaggccgcgctgcgcgcgctccccggcgccgccgccgtcctgcggtcctgcgaggcgctgctcccggccgccgacgagctcggcgtcgcgcgccgcgccgcggacgccgtcgcgctcggggtctgcaacgaggcgctgttcccgacgccgcgggcgccgcccgggtggtgggcggccgagctggcggcgctgtcgccggcgtcgttccggagggtggtcgcggcgctgcggtgccgccgggccgggcccgaggtggtggccgccgcggccgccgcgtacgcggagcgcgtcctggccggggtcctcgcggcgcccggccgccgggacgcggaccagcgcgcgctgctggaggccgtcgtggacgcgctgcctcccgccgccgacgcgcccctcccggccgccttcctctgccgcctcctccgcgccgcggtcaccgccgaggcgtccgccaagacgtgccgcgacatggagctccgcgtcgcggccgtgctggaccaggccaccgcgggggacctgctgggcgtcgcgctcgacggcgccggggagcgcgtcgtcaacgcggacaccgtccgccgcgtcgtcgccgcgtgcgtcgagcgccagcagacgcagcagggccggcgggcgtccctggccggaggtccggcaggtgagctcagcgcgctggagaaggtggcgaagacggtggatgaggtggcggcggagatggcgtcgcacgagtcgctgcctatctccaagttcgtgggcgtggcgggcgcggtgcccagggacgcgcgcccgtcgcacgactgcctgtaccgcgccgtggacatctacctcaagacacacccggggctggacgagatcgagcgggagaaggtgtgcagcgtcatggacccgctcaggctgtcgtaccaggcgcggatgcacgcgtcgcagaacaagcggctgccgctgcaggccgtgctcagcgtgctctactacgaccagctgaagatccgtagcgcggacggcagcggcggcacggaggaagggtgggagacacagtcggccgccgggaaggcccgtgcgcaggcgcgggcggacgtgtcgctggcaagggagaacgaggcgctgcggttggagctggcgcggatgcgagcgtacgtgtcagggatgcagcagagcagcaaggggagcgggtcgaggccatcgtcgtcatcgctggtaccaggcccagcgacggcgacggggaagaaggcaagcttcttagggtcggtgtcgcggacgttgagccggctgaacccgtttaagggcgggtgggccaaggacacgaccagcattgccgatgggcgtgacaggacttccatgcatgtggtgaagcccaagaggaggaggttctccatcggctaattcttttgtgatatatcgatatgatcgtgtcatcgtgtgtgtgacttatattaaatcactgtgattagaggctagaacaaggggtgtggatgtttgtactttctctgtcaatgaaaaaacaatatgcactacaaaggcaaaagtgtaggttaaaatagtggactaaggagtaaatattaata

SEQ ID NO: 103873 - DNA, 1616 bp, Zea Mays
cccgccgaccggacccaccccacacagtccacacccagacccatggaatcgacgtgggagtggaacagccagacgtgccctcgcctggcggcgccaccgctccgagcgacgccgcgcgtgccgctcctccgctgcgtcctcctcgttgcctcctgcatcccccccgccatgccgccggtcgccgacgagggcgagtgggcggcggtggagcgccggggcccgcacctttgggcgtcggggcggcccttcgtcgtccacggcttcaacacctactggctcatgtacttcgcggccgaccccgcaacgcgcgccgccgtcaccgccgccctcgcggacgccgcccactcggggctcaacgtgtgccgcacctgggccttcaacgacggggggcaccgcgcgctgcagctcaagcccttctcctacgacgaggaggtcttccaggcattagatttcgtgatcagcgaggcaagaaaccataagatgagactgatactgtcactgtgtaataactgggaagattacggaggtaaggcacagtatgtaaggtggggaaaggaggctggcctggatcttacttccgatgacgacgctttcttctctcacgccacaatcaagagctactataaagcttttgttaaggctgttttgacaagaaaaaacacaatcacaaatgtcgcctacatggatgaccctacgattcttgcctgggagctgattaatgagccacactgccattccgatccatcaggcgacacattgcaggcatggatagaagagatggcgtcttatgtgaaggatatagaccctgtgcaccttttagagatcggtgttgaagggttttatggtccgtcgactccagaacttctgcacgtgaacccagatgcttattctggaactattgggacagattttatcaggaaccatcatgcactgggaattgatttggcttctgttcatatttattctgacaattggttgactcactctgaagaggtcagtcacctccattttgtgaaaacctggatgcaacagcatattgatgatgcagccaacttgcttgggatgccaattctgatcggggagtttggggtatcgcttaaggatggaaagtttggccataagtttcgtgaagctttcatggatacagtctacaacatttttttgcgctcttggaagactggggtgattggaggaggctgccttgtttggcagcttttccctgaaagcgctgagcacatggatgatggttatgcagttatttttgcaaaatcaccagaaaccacattaaaattacttgcagatcactcgagaagtctggaatcttgacaatctgttgcctccctaattacacaagtatatgacagaatccatgctataagggtttgcaaaccaaaaacatgtctcagaaagttcagtttgtaaattgcaaggcacgtgtgagtatgacacaataatatgtactggtctctggatctaaaaaataatgtttttttcatgcaaatgaaaggctagatatggaactttggaatgaaattccctctgccatgcccttaccgaattgcattccaacaatatccttatacaaatgaagtaataatttctttgtcacgtataaa

SEQ ID NO: 103874 - DNA, 537 bp, Zea Mays
atggcagtgcgttcgctgctggaggcaagaaagccggcaatgcgaagcaaaacaagacggcacacgggagaagctgctggggctgagcgtggtgccgcgaacggggctgcaagcgcggcgactccgtgcaacgcacgaaaaaaagggctgcgcttcaacacggtgagcaggatgaactctcagccaggaaacgcaagaagctcaacggcggtgttagacaaaggaaaaacagagaacgcactccatcgagcctatccggatgaagatatttcccaactcacgacacgtcacaagccatcgcaagaggcaagcagctgcgtggccatgcatgggcatacggcgaattcaggtggcgacggtcttattaggacagaacagacaggtgcatcacaggtgggccaccgcttaactctatccattttgcatcaacttttgcccacttctgttatctacaacgagtccttcccttaccatttggttcactgtcatacgtcatccaaccacagttacaaagccccagctagacatagggagtga

SEQ ID NO: 103875 - DNA, 1272 bp, Zea Mays
gtcgaatcgaagatggcttgcgtggcggaccgtcaggccgcggtgagggaggtggcgcaggtgtacgagctcatcaagctccagcagcccctcctcctcctccattcctcctcgtcgcatctggcgcagagcctcctcggcaaggcgctgcgagccctcaacgtcgccctctccgtcatgaaccagcagcagcctccccctcctcctcctgcagtggcaccagtgaccgttgtcgtcgtcaaagctgagcctcacctgtcgccgcccagcccggcgtctgccgattccgaagccacggcaccgccggccagaagaggcgccaaaagaacaagacgatcagcggcgccagtgggagggaagaagaactcgtcgtcatgggcgaccttaaccgccgtgccctacgacgacggctacgagtggaggaaatacggcgagaagaagatcaacgggacgctcttcaccaggagttacttcaggtgcacctacaaggacgacgccggctgcctcgccaccaagcacgtccagcagatggacagcgacgacaacagcagcccgcccatgttccacgtcacttaccacaacgaccacacctgcagcagcgccaaagctgcagccaaagccaacacaggcagcagcagcaacaacaacagccacctcgctgcattgctggcagactgctgcgacggcagcggctgcaacaagggactgacgaccaccaccatcaatgggcatgctgctgctgctgccgccgccatgaacatgaacatgaagcaagaaccgtcgctgctgccgccgccgcctcctctggccgaacctccttccgcctgctttccttatgaccaaatgccacagcagtgccatcagctgctatttcctgtaagcatggagcagcagttccccggcaatggcgaagaaatcccgtcggctgctggttcgtgcatctccggcgagaccagctgggatgggtattattattctggggacatggcggcagctgaagacgaccgtttccacgatctcgagcgtttcctcctgggcgatagcttcatggactaccagtactagctagctcgatcgatctgaaacagaattgttaacagggggtttatgaaagtagaagaatggttttggtcttctttttttttttttttggattcttagggcagcagtgccaataataaagtgttctgtaggggaaaaaaataggcgtgcatgagatgtaaaaacaaacgatcgttttattgttatataaaaatgtccggcactttacta

SEQ ID NO: 103876 - DNA, 225 bp, Zea Mays
atggccgttgccttctccctgctcggatcccagctcgcggagctccctcctctcagcgcgcgcgtctgctccctcagctcgtacccgacttcagctcactggacctcccggccccgagctcgcccccatggcgcccggtcgagctcctccctcgccatgccgcgcggacccttctcttccctgcttcccagcttgccaaatcgcgtccttgctcctccctgctga

SEQ ID NO: 103877 - DNA, 485 bp, Zea Mays
aggcccaagggatacacgtcctggtgccccccaccaccaccacctctcgtacattatccttggtcttcacctccacctactcctacatctccacctaccgaacatcagacccctccagctaccttgccgacgcatgaacaagaagacgggttagactttgtcgaaaccatcttcgctagtggaggtatcgaccatcacttgtcgctgtaccccgttggtgatcggcgatcatgagcttccatgttatgtgttgtgatacttgagacttttattatgactatgagatattgtctcttattatgactggatgagatgtgtcttattatgactatggatgagacttttgtgatgtaattgatgagactatggatttaaatattgttatgtgattatgtgtgagatgttttatgtgaaaatatgttgttctatatagttgttgataaatttgttatgttgtggaatgtggtgtaaaataaaaataaaca

SEQ ID NO: 103878 - DNA, 380 bp, Zea Mays
tcttatccacgctgcccattatttcttagaagctacggacctcatttctccttcatcctcgtctcttcctcaagctccagccgaactccctcacgccatcctcttccctggcgttcatccctacggcagccaccacttgggcgctcctctccctgccctcccatggcggctccccctggatccctccctgcgaggaccctctcccgtggatggtgtcgtcccttcctgcagcacaccgtgctccctcccatggccgatgcccctctctggagctcgcccctgccctctgtccagcgccctccctgcttgccgttcctatccccctgcaatggagttcgtcgtcagtccgagctcgcccatcctctgctcggtttcaactt

SEQ ID NO: 103879 - DNA, 363 bp, Zea Mays
atggcattgggagatctcatggcgtccaggttcggccactcctcgtcctcgccgtcgccgtcattggccccggtgccgccgctaccccatcaccaccacaaccaccaccagaaccacgtcgcggatgacctccccgtcgccagcgggccggagcccaagaacgggttggaggtccccgaggtggagaagccggcgtccgaggcgtacctgccccaggtggtcgtgctgtgcgactatcgccacgaggggatcgacgaagctaccaccgccgcgctctctaccagcggcctcgtctccaactggcgacccaaggaccgggtaatggacgtgatgcagtttgcagatgctgtacctagtgcttga

SEQ ID NO: 103880 - DNA, 4342 bp, Zea Mays
aagcttcagctggatccaacagtggaggaagttaagaagctttctaatacttgccgcaaatatgccagagaagagagagtccttttccattataatggccatggtgtaccaaagcctacatcaaatggtgagatttgggtgtttaacaagagttacacacagtatatcccactttcaattactgatcttgattcatggctgaagacaccttccatttatgtttttgattgctcagctgctggaattattgtgaaagcctttctagagcgcctagactggagttctacctcctcggcatcttcgcagaaggatttcattcttcttgctgcctgtgaagcacatcagacgcttccccagagtgcagaatttcctgctgatgtgtttacggcttgcctcacaacgcccatcaaaatggctttgcactggttttgtaagcgaacatcactccatggtcctctggatcgttctcttattgaccaaattcctggaaggcaaaatgaccgtaaaacacttcttggagagctcaattggatttttactgctataacagatactatcgcatggaatgttcttccacgtgatctgttccaaaggcttttcaggcaggaccttcttgttgccggtctcttccgtaacttcttgcttgctgagagaatcatgcgatctgcaaactgttctccagtttcttatccgttgttacccccaacacatcaacaccatatgtgggatgcatgggacatggctgctgagatttgcctttccaagcttcctcagttaattgctgatccaaacacagagtttcagccaagtcctttttttatggaacaattgatggctttcgaagtttggcttgatcatggctctaaggacaagaaacctcctgaattgttacccatagttcttcaggtcctgcttagtcaaccacacagatctagagtgcttgttctgcttggaagatttcttgatatgggaccatgggcagttgatttggccctgtctgttggaatatttccttgtgtgctcaaactgcttcaatcaagtgctatggatatacgtcaaaatctagtgtttatatggacaaaaattctctcccttgataagtcatgtcaggttgaattggttaaagatggaggacatgcatattttattaagtttcttgacagtttggatgctttcccagaacagcgtgcaatggccgcttttgttatagcagtcattgtggatgggtataggatgggtcaagaggcttgtatgaatgctgggcttatggatgtttgcctgagacatctgcaacctgagaattctcatgcacaaacagaacctttgcttttgcagtggctttgtttatgccttgggaaactatgggaagatttccctgaggctcagttacttggtctgcaaacaaatggaccagaaattgtaatatgcttattgtcggagcctcaacctgaggtcagagctgctgctgtttttgcacttgggaatctccttgatactacatcaaatagtcatgatgatggttccgatgatgatgaaaaggtgaaagctgaaataaatgtagttcgaagccttctgcagatctcttcagatggcagtccccttgttagatctgaggttgctatagcgcttactcgctttgcgttgggtcacaacaaacatctcaaatctgttgcttccgagtattggaaacctcaacccaattcattgctgaaatcactaccatcgttggcaaatataagtaatccaagcaatgtttacagtcccaacaatattctacaaggcaggattggtcctgtgttgagggttgccagtgatagcggtgccgctggtcgtgatggaagaatttctacaagcaacccaattgcaacaagtagtatcatgcatggctctcctgagtcagatgattcttcccaacactcagattcaggcatattactgagggggaatgcaagtaatggtggtttcagctacactagatcgaggcctgttgataatgtcatttattctcaatttatatcaactatgtattctgtttctaaagatcctgacccaacaattgcaactattggtcggagagcactgtcccttattggtgttgaacaagtggttatgaaaaatactaggtttaacagtggcggttcacatcgaggagagacatctgcgtcaaattttggaatggcacgatcttcttcctggcgtgatatgaagtctggaagcatcttgatgaaatttatgacccctcctgttagcccccctcagcatgattatcttccaggattacgccgagtgtgttctatggagtttggacaacatcctataaatccccccaatggcttagctgatcgccttttaagctctgctgcaggtcccagtaatgcagaaccacttccccaatcaacaatttacaactggagttgtgttcaattctctaggccagttttaactgtctctgatgataatgaagaaaccaatgctagaagagaagagagagaacaaatcgcactagattacatcactaagtgtcagcgctcctcttgcaagatgacaagccagattgctagttgggatacaaagtttgagttgggaacaaaagcagctttattgttgccattttctccgattgtcgtcgcagctgatgaaaatgaacaaataagagtgtggaactacgacgatgcactaccagtgaactcttttcaaaaccataagttatctggcagagggctatctaaacttttgcttataaatgagcttgatgagagcttgcttttggctgcctcaagtgatggaaatgtacgtatatggaaaaattttgctcaaaagggtggagagaaacttgtaactgctttgtcatcagttcagggacatcgagctgctggtcgcagtattgtgattgactggcagcagcaatctggttatctgtatgcatctggtgacatgtcttccatcttggtatgggatcttgacaaggaacaacttctcagcaccattcagtcaactgctgatactgccatttcttccctgtctacatctcaggttcgctccggacactttgctgctggttttgctgatggttctgtcaggatatatgatgttcgctctcctgataggttcgtctatgtggccaggccacatgccccaagaacagaaaaggttgtgagcataggatttcaacctgggtttgatccatacaagattgtaagtgcatctcaagctggagacatccagtttcttgatgttagaagggcagcagaaccctacctgactattgaggcacacaggggttcacttacagcattagtggttcatcgttatgccccagttgttgctagtggctcagccaagcaaatgattaaagtgtttagtcttggtggggagcagttgacgataattgggtacctgccatcttttatgggccaaagaataggcagtgtaaattgcctttcttttcacccatacaagtcactcctggctgctggtgctggtgacaatgctctggtctctatctatgctgaggaaaattacaagtaagatgaggccttatatctcatgacaatgcagccacagtgcaatcggtaggccttacattttttcggccaagtgatgctccacagcatggttcagcttcaagatccaagatgacggtaagccttgtcacggagatgtcgacggtaccgtggctctcggtgcatattggctgttggacggcgtgtgcggtttgtaagatacagtcaagattcattagcctccttgcagaaggtttgtgaaccctaacctgatcctgtcattgaactcggaggctccccccagcccacccaaataattagccatacctaggctataaccaaaatgtaaatagccagcgcattcgggttgtactttgccagcattcaagtgtaaaaaggtctgaagatggttgatgtgataaacagggcttggtaggggctgctgcctgggcaagtggggttgtgcatatgggcccaggtagtagaatggttgcagaagtctgcccacagatgttgaagagaaaagtgtatttgtccagctaaaatatggcgttagatgggggtagtattggcctgcatgaatgaatgaatgaatgttgagtcatttgcattgtaattgtaacccttggatagatgactgcccgcttgtatatatgagtcgtgtttgtacagttgtctgctttctgtccccaagttgtaatccgtccaatgatgtgttttatgctggtgcattccggtagagatgaaccggaggtgctggaacatataggtggtcttgtggtctgtaactgtaatggatatgtgaatcttaatatgagtaattgattaccgccgcgtcc

SEQ ID NO: 103881 - DNA, 265 bp, Zea Mays
tctttatttaatcttcaacctctggcacttcattgttgtaggccctgtctgttggaatatttccttgtgtgctcaaactgcttcaatcaagtgctatggatatacgtcaaaatctagtgtttatatggacaaaaattctctcccttgataaggtatgcactcttcattgtaatcttttatgttcttttcgttttagattatattctggtgtttaacctgtaacattttcccaaacgacagtcatgtcaggttgaattggttaaag

SEQ ID NO: 103882 - DNA, 354 bp, Zea Mays
atggccgcatcgcccggcgacatcgtgcctgtcgcctcgctctcgcctgcactggagagcgtgctcgggcgagaggagggcgggagcggggcgacgcgctggcgcggtgggcgagagcgcgaggcgagacctgaggctgtagcctgctgcagcctgtgcactggagcagcagaggcgagagtggaggcgagagctgacgtggcaggggcgagagggaggctgtgcactggactcagcctaagtagcaccaagttccaggcctccctgttggagccctgctatctcacaattccatatggctgcaagaaaacttattcaccttactatggtctccaacctttctacatggagtag

SEQ ID NO: 103883 - DNA, 459 bp, Zea Mays
atggcatggagctcggccagggtgcgaacacagaccgaccatgggcaccgaccggacgagcagagagagacagagaaaccgcgcggcatagcggggagctgggcgagcagtgaggaagacgcgcgcgaagctccgatctgtggccagcgcagagcaccagagagacgcggcaagggaggagcagaggccaaggacgcatggaggggcgagccagggaacaggagcgtcgcacagaggaagcttcagtcggagcaggagaagcccgagcgccatgggaggaaaattggagctggacggcgcgcacagaggagctcagttgcggcgcgcagaggagctctgagctggagggcgcgccatgggggcaagcagcggacacggcaccaggagatggcagagggagatgggaggagatggagacatcgtgagagccgagcagagactgagcgccatggaagatga

SEQ ID NO: 103884 - DNA, 538 bp, Zea Mays
cctccctgcctctgaggatttgcttggggagggacatatgagattcgcgggttggtacctgaagatcgcggcggtaggggcctccattggcgccgccatggagctcttcatgatccacacgggcttctatgagaaggtaactgtcttggagtcagaaaaacgagcttgggaaagcagtccagaggcccaagctatgagagaagccctcaatccatggcacaagcatgatgaacaagaacaacaaaagaaatagtcaagatttatgtgtcctgtcgagtgtctgtgtcccccatccgtagacccatgaatgaggtactgttagtgtcaatcttctgtatttagtgaacaatctacatttttttatatacttctctaaaagggctggatgcctggatggtaccttccgcaagacgctgaagggctatgtgaaacagctataaactgtttttttcacgggaggaaaaaatcgagggaaaaattgtacactatcagactagtttcgcttgttttttatgatatattaacattaaacagcaaa

SEQ ID NO: 103885 - DNA, 1319 bp, Zea Mays
ccactgtctcctctccgtgacgcacgcccgagatcctctccgcgacacacgcctccctctcctctgccccaccctcctccccacgccatcggcgccgccatcatcggatccggcccaagatgcctccgccccacgcgcccgagtcgtcgaggcacactccttcccgcctccgtcgtccacgcatatctccgcctcacctcggcgcccgagtcgtcgcacgcgttcgcggtggtgtccatcccggcaccggcctcacgcaccgtctacagctcccaactctgctcctctcagttctccctccgcatttcgccttctctcccttcctctccaagcagcgtcctcctcgcctagatccgtacaagcggcaaataacctctccggcggcgagacagatggagtcgacctccggcgaggatgctccgaagcacaacccgattccgtccgcgctcgtctccaacctacagtccgtgctcaccgcccgccgcttgtccgcagccgaggtcagcaccgccgccacagctagcgaggttgaggccttggcttaggaagcagaggcgttcgctgcccccacgggagatgggacgctggcgaggcccatcgtgctactgacctatgccggggggatccggtcggcgggtctcgcggcgctcgtcgacgccctcgttgccgccgaccgctgcgacgtccacgtgtgtgcccccgaatcgtacgtgctgcgacttagaaaaccaaaccacagcgggaccagtgctcggatagggtccgacgacgatgcaagcaaggagtggcgcgcggccgacggggcgcagatcggctcctgcacgtgcagcgcagccgcgtgacagtgaagcagggaggccgcgataggtggcgcagggagggtgcgacggaggcaaagtgcaagcacctggggacttcagaaagaaagagtacaagtctactactgcagaaagcaaggagaatgccaatagaagcagatttcatgtatggatcggataaaatcttgagcaaaatgggagaaggtttgggttttctgcaatctgtcgtctcctcttctgctgggtatctccattattattctaatgaagagggctacgagttggattttcgtaggtacatttgagcgtgttttggaatgctgggatcgtgaaacacgtgaatatgttgccataaaagttgtacacagtatccacaagtactgtgatgctgcaatgattgagatagatgtgctcaatcgccttgtagaaaatgaaaaatatagatttctgtgagtatctcagagacctaattgcttaaagtataaccctattctgtttttg

SEQ ID NO: 103886 - DNA, 749 bp, Zea Mays
gggaatcaaagaaaagtgaaagtgccatgtcaaagttgatgaccagaagcttgctattggaaccctctctattgaaaaatacccctagatagaaattgatttggttttcaataaagagtgtgagctgtcacacacatcgaaaactacacgtgtatttttctttggttacaaggttgagcaaccaatcgaggaagatgaataatggatcttgattctgaagatgaagagaaggagctaaacattccagtaatcaaggaaaatggcaaaggtgatgggaaggaggaccagagaagtgaagagaaggcagttgctgcagcttcaaaatcaagtcttgggcttgaaaaaaagcaaggatgagtatgagtctgatgattctaatgagggtgagtgattatctcctgaagaaggcaatgttgtgatttgaagggtatggtgcagaaaagttttgtctgcatgtcatgacagtttcatacaatgcacgggcgaacgcaccgggagcctaccacctcccgtgctcaccattgctgtgtttgatacctgactactactgctgttactttgaatctccggggtgctcatggagtcatggtgcatatgctcatgtttgcagggtgtcagtttttttcatcgtctacttctagagataacaactttagcatgttggttaaagattcttggtgtgctaagcttttcttttttgcttcatttgaaactcaactatatatatggtgccctactttacattttgc

SEQ ID NO: 103887 - DNA, 1837 bp, Zea Mays
tgagcatagaaaaggcagttgagtttgatgattactgccatagtcaccagccgccaattgctttcattaagtcggaagtttgtggcctttttggcagtgttttctgtgattttggtcctgagtttactgttttggatgtcgatggtgaggagccacatacaggaattgtggcatcaatcagcaatgacaacccagcacttgtttcttgtgtggatgatgagcgtctggagttccaggatggtgatctagttgttttctctgaagtgcatggaatgaccgaactcaatgatggaaaaccaagaaagattaagaatgcaaggccttattcttttactctagaagaagacaccacctcatatggcacttacattagaggcggtattgtcacacaggtgaagccaccaaaggttcttaatttcaaaaccttgaaggaggcaatcaaggagccaggagaatttctcatgagtgatttctccaagttcgaccgcccacctcttgtgcatttggccttccaagctttggacaagtttaggactgagttgacacgattccctattgctgggtcagctgatgatgtacagaagctgatagaccttgctattagtattaatgaaactcttggtgatagtaagcttgaagaaattgacaagaaagtcttgcagcattttgcaagtggttcgagggctgttttgaatcctatggctgcaatgtttggtggtattgtaggtcaggaggttgttaaagcatgttcagggaaattccatccactgtaccagttcttctactttgattctgtcgaatctctgccagttgaaccgttggagcctagtgatttgaagccagagaacagtagatatgatgcgcaaattagtgtctttggggctaagcttcaaaagaaactggagcagtcaaaaatcttcatggttggttctggggctcttggatgtgaattcttgaagaaccttgcgttaatgggtatttcttgcagtcaaaatgggaagctgactgtgacagatgatgatgttatagagaaaagcaatctcagtcgccagtttctcttccgtgactggaacatcggacagcccaagtccacagttgctgcaaccgctgctatggcaattaatcctaagcttcatgtggaggcccttcagaatagagcaagtcctgagactgaaaatgtgtttaatgatgccttttgggagagtttggatgctgttgttaatgcattggacaatgtcactgcaagaatgtacattgattccagatgtgtatattttcagaaaccacttcttgaatcgggtactctgggtgccaagtgcaacacacagatggtcattcctcacctaacagaaaactatggggcatccagggatccaccagaaaagcaggcacctatgtgcactgtacattcatttcctcacaatattgatcactgccttacgtgggccaggtctgagtttgagggtctacttgagaagactcccactgaagtaaatgctttcctgtcgaaccctggtggatatgcaaccgcagcaagaactgctggtgatgcacaggctagggatcaacttgagcgagttattgaatgccttgagacagacaagtgtgagacattccaagattgtattacctgggcccggcttaagtttgaggattatttctccaaccgtgtaaagcagctgacattcactttccccgaagatgcaatgactagctcgggtgctcctttctggtctgctcctaagcggttcccgcgacctctggagttctcgtcttccgactcaagtcaccttaacttcttgttggctgcatctgtattaagggcagagacatttgg

SEQ ID NO: 103888 - DNA, 835 bp, Zea Mays
ccaatttccatatggacttgatcgctggttttgccaacatgcgggctaggaactacagcatccctgaagttgacaagttgaaggcgaagttcatagcgggaagaatcatcccagccatcgccacctcaactgcaatggccactggccttgtctgcctggagctttacaaagtcctcgctggtgggcacaaggtcgaagactaccggaacacatttgcaaacctggcaatccccctcttctccatggcggaacctgtgccacccaagaccattaagcaccaagacatgtcgtggactgtctgggaccgctggaccataaccggcaacatcacgctgagggggctcctggggtggctcaaggagaagggcttgaacgcctacagcatatcctgtgggacctcgctgctgtacaactccatgttccccaggcacaaggaccggctggacaagaaggtggtggatgtggccagggaggtggccaaggtggaggtgccatcataccgccgccatctggacgttgtggtggcctgtgaggatgacgacgacaatgatgtcgacgtcccacttgtgtccatttactttcggtaaagaggggctcaccgcccgtttacatgttgatcctgtgcgatatttgtcaatgtttgtctcagaaggatcaagtgtataatttgcgatagcaaccgtgaactagattgtgtttaagcacatactgatgatttcctgtgctgccatctggttagacttggctgggaattgtcgctgagatttggaccactgttatggaattcttaagcataacattatgatagctgttgcatgatactgtcgtcgctaaa

SEQ ID NO: 103889 - DNA, 1425 bp, Zea Mays
gaatgatccatgacgacgacctcagctcaccaacctttgttttgctacccccatttcttctttaatttgatcgagcttgctagatagatctcggtgacgtccgtccgtccgcgggagacggtggcggcatcagtaaagacttcgacgatgagggctctgcagaccagctgatgatgccgtcgtccgacggggagggtggcgccgatgtgccacgcgggcccgacggccggagctcaccaagcaatagcagcacggtggagctggatggggacggcggtggcggcaggaaggccggcgcctcgccgtcgtcgtcggtgcggccctacgtccggtccaagaacccccgcctccgctggacgccggagctccacctctgcttcctccgcgccgtcgacaggctcggcggccaagaccgtgcaactccaaagctcgttcttcagttgatgaacgttaaagggcttagcataggccatgtcaagagccatctccaaatgtataggagcaagaagatcgacggctcgggccaggtgataggtggtggtggtgggtcatggagaggtcgtcttcatcgtcagttgcaggacggggggcaagcggcgtacagcctcggccatctctccttgcatcacggcgccggccagacgactgctgctagcagtgccatattgtcagcaaggtctggcgcatggccccattggaacagtttccacgatgatccatcgtatacgatgcttcttcacggcggtcaccatcatcttcttggatcaaaaccctactactactactactcatcaacaacagctgaagctgctgctgctgctggtgcatcccttacaacctgtgctgcgctcccgctcatcagggctcccgctcctcctcctccgacggctcatcagaggtgtttgctgccacatcgtcaaaatcaaaacaatctgaatcatcatcatcatcaccaccacagacgacggctactgctgctgcgcaatgacgaggacgacgacacccagcgccagcgtgaccctcttgttgatctcgaactcgcgttggatatcggcccacgacgcccggacaagagagtaataatagagagatcgtcagcttgtgatcaacaagaggcggagaagaatgtcggggatcaacaagtcgacagtgctactgatgatgatgtcaggctgtctctttctctgttcccatctcctccttgtgcgaggaccggtaatggcggtcgtcataaaaaagtcataggtgtcaatatggaaaaaaagggaaagtgcatccaacaaggacaagtactcttgacctcaccatctgcatgatgatctagctagctagctactagtccatgcgtggtgatgatatcttgtggtacttatccaattatgtagaggaagacacatgtgaaagcataaacatcaatattttcct

SEQ ID NO: 103890 - DNA, 2721 bp, Zea Mays
gaatacgccaagcttgacaattgcccagtttgtggtctctcaagatggattgatgctgaaagaaagaagattccacagaaagtgttatgacattttccgttgatacctaggttacaaaggatgtttgtgaacaatgaaacaacagaacaagcacaatggcacaagctaaagagacatcccaaggagaaggaaatgagccacccagctgatggtgatgcatggcaagattttgatagaaaatatccagattttgcaaatgatgctagaaatcttagacttggcctagctactgatggatttaatcctttttcagaaaagaacactaattacagcatgtggcctgtacttgttatgccatacaacatgccaccttgggtgtgcatggacgagtcaaatttcatgatggctttgctaattcctggtcctgcatcacctggaaaggactttgatgtatttttggagcctcttatagaagaattacttcaactttggaatggtgtccgcacttatgatgctctaagtgggaaaaactttgaccttcgtgctgtagttttatggtgcatccatgattacccagctttgagtactctttcagggcgtaccaccaaaggctattttgcatgtattcattgtgacaagaaccctctttcataccgcttaaggagtaaaattgggtactttggacattttcgtttccttcctatgggacatcgtctgcggagaaataatgaatttgttggtcttcatgaaagcaatgagccaccaagtaaattttcaatagaagagttgatggctgagctagcgagagttaaacatgtcagacctgggaagcaacaaggaagtgggaaaaggaagcgttttgatttggacaagaatcatgtgacaatttggagttggatgattagcttatggaagttaccatattggaaggatttaaagttgagacataatcttgatgtcatgcacattgagaaaaacatatgtgagaacctgattaggactattctcaatataactgggaagacaaaggatacagttaaagctagactggatttaaaagatctaggaattatgaaggagctacaaatcaaagagagtggaggttcatgtgagatgcctcatgctcgatataccttgtccacaacacaaaagaaggccttttgtgagtttttaagagagataaagtttccagatggatttgcctctaacatatcaagatgtttaaatagtgagggaaccaaggtacagggtcttaaaactcatgattgtcacattcttttgcaaagaatattacctgctgctataagaggatttttggacaaggatatttatgaagcactagcggagctagggaaattttttagggaattgtgcagtagaactctcaacaaggatgtgttggctgaaattaagaaagaaatcccaataattttggtgaaacttgagaaaatctttcctccagctttctttgatgtgatggttcaccttgctgtacatttacctgatgaagcattgttgcgaggtcctgtgcaatatggttggatgtacccaattgaaaggaggttgtatactttgaagcggtatgtgaggaatagggcacgaccggaaggctcaattgctgaggcatatattgcagatgaatgtttgacattttgctctagatatatggatgacgttgaaacaagatttaatagggaaccaagaaataaaggtttttctaatgaagaagcctataaagttgatgtttttgggcatggagttcattttacttctgcgcctgaacatgtatatgatgagaatggcatcgatcaaatggtgtggtatgttctgaacaattgtagtcaagttgacaaatatgttagtatgttcaaagataaattggagagagaagtagtgcctaacattaatagaatgttgcagcgaggatttcaggcttcgtttaggaatcatgtgctaaggttacgaaattcagatcaagaagaggttgatgatgatctattttctttggcatgtggtcctgattttagaattaaaaaatactcatcatgcattgtgaatggtgttcggtttaatattgttgaccgtgacaagcatcggaagacacaaaacagtggagtaatggcacaaggtacccataataatcagttcattgattttttcgggaccttgatagagataattcagttagaatatggttgtgatgagagatcagtagtgttgtttaaatgtgactggtttaaattagatgggaagaggactgaacttaaagatgatggcctttttaaaagcataaattttgaaagtctatggtacaaggatgattctttaattttagccactcaagcaaggaaagttttctatttgccagacacaagattaggtaaaaattggcatatcgtccagacatttgaccatagacatctttacaatgtgagcgaaactgaacctgttcaatatactgctcctgcatatcaagaggatggatgttgtgtagatgagggaactcggcaaacaatttctgacattgtacatgagaagccattaaatagagatgatgaacaaggccttgttttagatgctactaaatttgcccaattgatgaaaggaaaaggccaagaaatgcatgagattgatattgaagaggaagatgacacaattatggagtattgcagcagtgaagatgaaggtactacaaatgaggttgacagtgatgatgaatag

SEQ ID NO: 103891 - DNA, 245 bp, Zea Mays
gttttggatatgatgtggtgttctggttggatagtctttattgtttgggattgtccatgtgaagttctggttggatatttgaatttaaatattgatattttgtcattataattgttatgttatgtgttgattgtgcttttgatgtgagaatgaaattattgaaaattatagtgggctgtagttataaatggtcgataaaatgtctagattttagccttggcaaaaataatcaaactgaataaaat

SEQ ID NO: 103892 - DNA, 1116 bp, Zea Mays
gccttcgaggcccagcgtctccattttattctgtagcgcgacggcaccgctaaaacctagcagaggctcgtgccgccaccgccagccgcaacaaggaaggaaccaggaacacaatgcccaagtccaagcgcaaccgcccagtgaccttatcgaagaccaagaagaagccaggtttggagcgcaagggcaaagtagtcgccgagataaaagatgccgtggacaagtacagcagcgcctatgtttttacctacgataacatgaggaatcagaagctcaaggacctcagggagcagctcaagtcttctagcaggatatttctcgctgggaagaaggttatgcagatagcgctggggcgttcagctgctgatgaagctaagacaggcctccacaaactttcaaagttccttcaaggcaactctggtctgttattcaccaatcttccaagggatgatgttgagaggatgtttcgagaatttgaggagcatgattttgcaaggacaggaagtactgcggcagatacggttgagcttaaggaaggccctctggaacagttcacacatgagatggagccatttctacgcaagcaaggacttccagttcgcttgaacaaaggtgtcgtagagttagttgcagaccatgtagtttgtgaggaaggaaagcccctttcgccagaagcagcacagattctgcggctgcttgggatacagatggcgacattccgtctataccttgtatgtcgctggtcgagcgatgaatttgaagcttacaaagaaggcttgatgcacctaggagctgatgattcctcttaagcttgtgtttcgtgtatacacaacacaaagggagcacttgctgtcttggctgggttggaaactagaaagatgctgtctgcagaaaaattttgctagtgtatttctgagattcagtggggggttttgtatgtgcgacgcggtgctgaacctaaagaaactgtttggattcaggtttctgagttgggtttacttgttcaaactgaatgtagctcagtggcaaatggcaaatctgtacctcgtgcaatgtttttgagccgtccgattaatcacgattaatgatccaagtaggtttagaccattcacgatt

SEQ ID NO: 103893 - DNA, 572 bp, Zea Mays
cattacatatatgcttaaaattctggcaagaagtcattaaaaagtcagtctaccatttgttggtgcaggtgtcgtagagttagttgcagaccatgtagtttgtgaggaaggaaagcccctttcgccagaagcagcacagattctgcggctgcttgggatacagatggcgacattccgtctataccttgtatgtcgctggtcgagcgatgaatttgaagcttacaaagaaggcttgatgcacctaggagctgatgattcctcttaagcttgtgtttcgtgtatacacaacacaaagggagcacttgctgtcttggctgggttggaaactagaaagatgctgtctgcagaaaaattttgctagtgtatttctgagattcagtggggggttttgtatgtgcgacgcggtgctgaacctaaagaaactgtttggattcaggtttctgagttgggtttacttgttcaaactgaatgtagctcagtggcaaatggcaaatctgtacctcgtgcaatgtttttgagccgtccgattaatcacgattaatgatccaagtaggtttagaccattcacgatt

SEQ ID NO: 103894 - DNA, 877 bp, Zea Mays
agggagcacccccaccactccccaaacacaccactccacacaaatccagacattggagattctacctgcgtgctatggaaactggcagatgagcagagtttgaacgtgagcagagccttggaggtgagggcaagcttggctgtggagggtgtcggcgttgggcagaggacaggagcgagctcgccacctgggggcaaagaaagggcggccatggagaaaactgggaagcaagggcgcgacggccatgggcgagctgagcttggaggagcagagggaggaagcttgggcgcgacgcagtgagctccggcaaggagaacaaaggagctggacgcgccgagggaaagacgccatggggggctcgcggcagccttttttggagcagagaaactccagcgcgcacagggaggagctctggagagggagtccgcggctggggaaaggggcatcccggcgagctgcgcgcaggggcaagctcgtgcgcgccagggagagagcagaggaactcggcgagctgcggcagaagagggaggccgaggagcaaggcaggggcgcttggttgagagcagaagatgcacaccgatgggatttttatccaggatggccgagcggatgggaacgaggcaacggcggtgagaaaaatcttgagcagagcggcggctgcgaggataagcacggccaccggcggacagatttttgttcccagcaaccggagcggatgaggacgaccgggtgaaggaagcagaggtgagcgctcgggaagaacagctgtagagatattttttttattttcttttctccttttttttacagaaaactatagatatttttgtgtccggatttttagcaatgcacactggatcgatacactattcaacta

SEQ ID NO: 103895 - DNA, 1387 bp, Zea Mays
cggcaggaacggacctcttatcataggccgtaacgaagcccacatcctatccgacgggcagaagcagagcaccaccaccatacgccgccaccgcaagcagacgtccccatggccatggcttccaccgccaccgctgctgcttctctccgcctcgccttccctctcctctcctcgccggcttcctcctcctcgtcctctaatacccttcgcttccctctccgccgccgcagcgccgcccgccccatcgccgtcaccgccttcaagaagctctccgaggcgtcccccgtgcccatccctcaggagcccaccgagcccctcctggtcgacgaggacgctctgcccccaaaggccggggtctacggcgtctacgaccccgccggcgagctgcagttcgtcgggatttcgcgcaacgtcagggccagcatcgagggccaccgccggaaggtccccgccaacctctgcgcctccgtcaaggtcgcggtatcagatgaggagacaccagatcgatctgcccttaacaacgcctggaaatcatggatgcaagaacacatagcggccaccggcaaggcgccaccagggaatgttgcaggaaacaacacctgggttggtggcccccagcggcctccagacctgcggctgacgcccggacgccacgtccagctgacggttccgctggagcagctgatacaccggctggtgaaggagaacagagtggtagccttcatcaaggggtcaaggagcgctccccagtgtgggttctcgcagagggtggtgggcatcctggaagggcacggcgtggatttcgtaaccgtcgacgtgctcgacgaggagcacaaccacgggctgagagaaaccctcaaggcgtacagcagctggccgacgttccctcaggtcttcgttggaggggagctcgtgggcggctgcgatatcgtttcgtccatggctgaaaagggggagcttgctgccctactaattcagaaatgaatgctttaccctacagtgacttgaattgcttcgatggttgtctgatccacacgtagtagcacggagatccaagttgttgtacctgctgtgcatgttggatgtggtacgtcccgagtttgaaaagcgtgtgatgtggtatggacgtgtggtttgcctgctgtttataggtagaagttgcctgaggacgacacacatattttttgttttatttatttgtggggatcggagagcgatcgagcctctgtttggttggttggatgtacgtagatggatgaaagagtcggccacagtttatataatgttcggatgaaagttaagtagagacgagttaaacactggagtagttttttgtagcgatgtggtaccaaaaaatcgaaggatggtgtcgtctccgtcttattct

SEQ ID NO: 103896 - DNA, 270 bp, Zea Mays
atgggacaaagaaaagaattcgggatgtctttttgccaaggtaggatcacgatcctcttgtcacagtcccctttagatatctgggagagtctagccgccacctacatagcgcttgaggctgccgacgatgagggggtcggtctctgtgaccgtctgttgcaggcggaccaccgtgtcatggagctggagtcgaaggttgtgggcctccatgagggtgtagatgaagtggtcgccttcgtccgtgcccagggtgccgatcgaggagagtga

SEQ ID NO: 103897 - DNA, 3179 bp, Zea Mays
ctaaaattctatttaaagaataaaataaaataaaatagaggattaaaaattagtctccgtaaatcaaacactcttaaatcaagagggatgaattggtgttaagtatttggttgatgctagagaaaaaaccaaacattctccccgttattctgaacagatacaaatgcgaacaaaaaagcatatccatccaaatatcgtaatccatttcattcccctgagaaattaatttatttctgcagtttcctcaaattctcatggtctcggtttctcgcctcgccgcttctccgcctcccgtctcgtctgcaactgcaactccacctcggccctctcatcctcgtcaccaccggccacggccggcctccaccgctgcctgcccaccgctcgctacactcatctccccaaagtggaagaagaatcgggctgttgctcactcgtaccctctaagtgaggcgggcctcaccaaccttgctgctatgccttccacgacgctcgctgcagtccaccaccaccggacaggaagcaccacctagttcctgaccctgatgtccatggcacccgaccatcccttcgatgccttcgtcgccgcagctcgtggcgccataacccaccttcaccttcccgtcatccacatccctggatccaattccagtcctaaccccgactccaagcagcaccacgaacccgaggtcgactgcctgctccacctccacgtcgtcgtcaccaacttcttccacaagcccctcagatcattcgctaggtgcttcaggcccaagcgacgggcaggcaaacactccccgccgctctaccaggagcccagcaatggcgcgaccccgcagcagcaactggagctcctgctctgcattgcgttcgatgccttcgcccacaacctccacgcgctggaggacgcctgcaagcacaaaggcgaggaatttgctgtcgctacccgacagttggagcaatttgtggttttcaggaaggtaatcgatgggaagagggccgatttcgatgggttcctttcaaatctgggctttgcaaaggttgggccaccgccaccgccagcaagcatcatgggtggtgcttcccctgtcccagcaccagcaccagtcagcaatcaggaggatggtgctgtgattgggaacggcgagagggtggacattgctagtggtacacaacagcaggcacaaaaattgcctgcccggttgcttaacattcctttgtcgaatgtggagcgtctgcggtctacgctttctgcagtttcactgacggagctcattgaattagttccgcagctggtgagcagatcatcgacatcggcagatgcacatcctgacaagaagaagcttttctcagtgcaagacttcttcagatatgcggaaattgaaggaaagcgattctttgaagagttagacagagatggtgatggccaagtcactctagaagatctcgaaattgcaacgaggaagaggcggttgccaaggaggtatgctcgagaattgttcaggcgtacaagaagcaacttcttttcgaaatcaattgggtggaagcaatttttatccttgatggaacagaaggaagcaaccattctccgagcatataccacgttgtgtttgagcaagtctggaacacttcacaagaatcaaattttgacttccttgaaaggtgctggacttccagccaatgaagataatgccgctgccatgctacggtatctaaatgctgattcagaaggatcaatctcatatggccatttccgcaacttcatgcttctacttccttcagaacgccttgaggatgatcctcggaacatttggtttgaagcagccaccgttgttgctgtatccccacctatagaaatatctacaggaagtgttttgaagtctgctttagctggaggtcttgcaagtgctctctctacctctctgctgcatcctattgattcaatgaagacacgtgtccaagcatctacactctcatttcccgagctcatttcaaagcttccacaaattggacttcgaggattgtatcgaggttctatcccagcaattctcggccagttttcaagccatggtttgaggacaggaatctttgaagcaagcaagcttgtattaattaatgtcgctccaacacttccagagattcaagtgcaatcaattgcatccttctgcagcacagtcttagggactgcagtccgtatcccttgtgaggttcttaagcagcgattgcaggctggaatattcgacaatgtaggggaggcgattgttggcaccatgcgacgagatggcccaaagggattttttcgtggcactggggccacactgtgtcgcgaggttcctttctatgttgctggaatgtgcctctatgcagaagctaagaaggcagcacagcatgttttgaggagagacttggaagcatgggaagtagtggcagttggagcattgtctggaggacttgcggcaatagtgaccactccctttgacgtgatgaagactaggatgatgactgcccctccaggcacaccagtgtctatgcagatgataatcttgtccatccttggaaacgagggtccacttgggctctttaagggcgcgatcccccgcttcttctggattgctcctcttggagcaatgaactttgcaggctatgagcttgccaagaaggcaatgataaaagatgagaaaaattccagtgagtcaacacgagagatcttgccaagaaagcagtgatcaaccatgcaacttttttattttatttttgggtccatgttgcagagaagcaacagaacatctgcctttttttgatattgggaattacattcccgtagggccttgagatggctgtatagtatacattacatgagaaaagtgctagaggacagaggcacatgctggagctgttgttcttttgctggataggacagctcacttgttttgttatccgacgatgatccatagccttccttgttaaacacgatgtaaatttgctcttgtagttaccctgaggacatttggctttcgacccaattgttttggtgttcgaaatggaatgatagagccatgacgaaactaaagaagaaaggacaagcgttcccaccaaagaggtttaggatttagaaatggcaatgggacttgatttcctgcgggaattcctctattataagtgaacgggaaagctattctacc

SEQ ID NO: 103898 - DNA, 1589 bp, Zea Mays
tgcttctttataccgttttagttcaaacaagtgattcagtaaagcacatgatattgaactggcactttctatgtatagcatcccattttgagatcttactttattatgtctatgatttcttatcacaaatgaatacacatatggtatgccatggcattatttgtggcctcacgaattaatatgggataacaaaagtttagcctgctgaccaaagtaatcaaaatgcaattgctttatctttaatgtatcagacacgtgtccaagcatctacactctcatttcccgagctcatttcaaagcttccacaaattggacttcgaggattgtatcgaggttctatcccagcaattctcggccagttttcaagccatggtttgaggacaggaatctttgaagcaagcaagcttgtattaattaatgtcgctccaacacttccagagattcaagtatgattaactactctagtacttgtgcaaaatttaaggctatctccagcagcttactcattttcatctctcatttcaaactccactctgaaaacaatgtagtttacagtgcaaaacaatgttttgcacgaccatatgcatgatctgttggccatagccttatggagcccaccttataaatcttatgattgaactttttagaatttagtagctgtaatagaaactttctggttctctgtaatagttattgtgttttgcggaattgcttgatgatatgctttttgttccataggtgcaatcaattgcatccttctgcagcacagtcttagggactgcagtccgtatcccttgtgaggttcttaagcagcgattgcaggctggaatattcgacaatgtaggggaggcgattgttggcaccatgcgacgagatggcccaaagggattttttcgtggcactggggccacactgtgtcgcgaggttcctttctatgttgctggaatgtgcctctatgcagaagctaagaaggcagcacagcatgttttgaggagagacttggaagcatgggaagtagtggcagttggagcattgtctggaggacttgcggcaatagtgaccactccctttgacgtgatgaagactaggatgatgactgcccctccaggcacaccagtgtctatgcagatgataatcttgtccatccttggaaacgagggtccacttgggctctttaagggcgcgatcccccgcttcttctggattgctcctcttggagcaatgaactttgcaggctatgagcttgccaagaaggcaatgataaaagatgagaaaaattccagtgagtcaacacgagagatcttgccaagaaagcagtgatcaaccatgcaacttttttattttatttttgggtccatgttgcagagaagcaacagaacatctgcctttttttgatattgggaattacattcccgtagggccttgagatggctgtatagtatacattacatgagaaaagtgctagaggacagaggcacatgctggagctgttgttcttttgctggataggacagctcacttgttttgttatccgacgatgatccatagccttccttgttaaacacgatgtaaatttgctcttgtagtta

SEQ ID NO: 103899 - DNA, 969 bp, Zea Mays
atgtggagctactcctggctggagttccagcagctcaatgacatctacaggttcaaggcggaggagtactcgcacacgtctgttaacaagttcaacgtgaacccggagtccatcccgggctgtggatccgggagcaaaaaccgtgtcaactgcgcccgtgcgggtgagggatcactagaggctggactcgcgctagagatggtcaaggcaaaagcaagggttcgctatgagcctggaccggcttttgaggaggtcaaagaagaagccatgcttgatatatcaccaacagactcgacagagttttggttaattcagtggcctaaagaccagtgctattttctcatgtttgagattcttcaattccaggcaaatagaattttaaggcaaaagattgctggggatcagtttctcgatcttgttagtgttgaaacagaagtgcgctcagtttacaaagagctctacagcatttacaaaactaccctcaaatccaagagtttaataaatgaggtgaatcaggttgcttagccgaggatcatcataaaaccaaaatcctgcaatggtgtttggccattgtgcactgcacaacagatctgctatcatgttcttggccttgttcatggcatatggacacccgttcctcaagctgtggaagattacattgcaactccaaaacctaatggctaccaaagcctacacacaacagtgataccatttttaatgagagtatgtttcatttggaagttcagataagaacagaagatatggatttaatagcagaaagaggcattgctacacattacagtggaagaggagtggtttctggacctgttcggcttggaatatcaagtggaagaaatgccaaggggaaagtaatctgcctgaacaacacaggctttgctctgaggattggttggctcaatgcaatccgcgagtggcaagaaaagtttgttggtaatatgagttctaggg

SEQ ID NO: 103900 - DNA, 2572 bp, Zea Mays
cgctgccgccagctgcccagctgcgcctcgtcgtcagagggttccctttcctgttcgatgtgacgcagccccccgctgcgccccgacggcggcggcctcaccggctggcgatgggcacgacaaactgagacctccctttccacccaagttctctttcctccttctctctctctctccctctctctgcggaaggtggcggtgctgcactctgttggtacaagagtctggagtgcagtgcagatccacccggccggacctggatcgatatctccgtttgttggttcaataaaaccaataaattctggggttcaactgaacccccaatccgagtataacggccactctgtgctgcaaggtttgtctaagattttcgtgcaataacggccatgtggaggctcaagcagttcatccccaaggagcagcccagccccagcggcctcgagggtcggacggtcgatgttggcaatgtcaaggtgcacgtccgagaggccattgctgagggtgggttctcatctgtctatgctgctcgagacctggtaaacccagcgaagcagtacgccctcaagcgcgtgattgtccaggacgaggagtcgctgaacctggtccagaaggagatcacggtgatgcggtcgctcaaggggcaccctaatgtggtcacactggttgcacacgccatactggacatgggacggatgagggaggcactgctgctcatggagttctgcgggaagtcactggtttctgtgttggagggcagaggagcaggttactttgatgaggagaaggtggcgctgatcttccgggatgtttgcaatgctgtctttgcgatgcattgccagacgccacctcttgctcacaggctcttgggtgtctcttgtatagaatttgctacttcaaatcagcatttgatggagaatcaaagctccaaatacttaacgggaactatcgcatcccagaattgccgaagtacagtgtggttccgtattaatgagttacttccattggagctgcaaaaggatttacctgatggatctccatctggatcagcatttgaatctcacactgccactgatgaagtatcaatgaggccacagcagatgagtggctcttcatcaagagagaatatcaagaatacctctcttagtgattcttccaacataatggtacaaagtcctctgaaagctatagggaacatgggttctatgggtgcattttggtcaactcaacatgctcaggagctatcttttgctgatgacaaggagccagcttttgataaagagcccattgatcaagtcagatcaaagcaatcacaggctaagaaccagaacacagcagctcgcaattcatctcggaagtctctgtctgcatcagttgatagttcccctggggatttcgaaattaggttttctgcaaatggctcggagtctaggttggaggaaaccaaaacggtaataacagagaataaaacaaagatacaaactactgccttcaactcctgtgcgtcagactttgataatatcaaaatgaactcacgaaacactactgacagtataaacataactagcaaattgaaagagcttcaattggaagcagaagtaactttactcaaggaacaattaaagatagcaaacctggagaaggaagaaatttcgttgaagtttgataagttgtctgccatttgctcctctcagaggcgagagatacaagagcttaagcaagctttggctgcagcttatgttacgccaccagctaaacagttcagagaaaattcaagtgttgaagtcaccccacccagcaaaagcctcgacactccgccgagggagaagattgaaggaacccctccagagctccggcaaggcctgtttacttcaagcccaggaacaccaagccctgacctgaaaacatggtcagctttccttgaagagccaaaatctcaagcagctgtgaagagtgtccaccccaggtcagtccgaactctgcgtgcatcaaacagcaacaaagccagctcgttgggacagtcaaatataagttctagcaccgatccatttgcgtttggtcaagatagttttaaggctgctccttctggaactgtacttcccctgttatcaaacatggggaatacttctcagctcagtaatctgaatatagaagaaaagaaagacggatcctaccaaccagatggatggactgggttttgattgtgctatagtaatttatgtgccaaaagagtcaagagttcatatggtcttggtggtgtggtatactgaaggtgcagagaggaatgcctgaactggtgtaggtatgtgtgacaatgctttttgtacaattgttctggtcctgagctagcatcgtgatgcgttcagttgtaactgtagtgcaaatgtaagttgcaacttgcaattaattgctagatattagatataggaagatgtttttttttcttatgtagacaagcttgtggtgtcatgaattttggaggcatgctatatagatatagccatctattataccatatcatgaataaagggttatcatttagtgacaattggccaatatactcactttaatacta

SEQ ID NO: 103901 - DNA, 701 bp, Zea Mays
gcgacgtttgcaggatgcacccacatcacggctgtaaaatccgctgcaagtccgtcgattgttgttttatctttcctctttctctatcgaaaacggagcgcctgatacgatagtagcagcacagctagctctcctccccagaatctcgccggattccgccccccgccgcgccctcgcttccgccgcaggttcgcgtctgtgcccgcgcgtgttgtactaccggcggacggcggtgttggtggtggttggtggagttgccgacgacggtaggctatggactaccggccctccgacagcagcggtgagtgcggggagctcgagcccttgcccgcctccttgactagggttctactcctatggtttcgctttcttcagctccttactagcgaatgccaattccttggctgtgaatatgagtgggctacaaggtcgcgtcctcagtgtggttggatggattttgggggctagggtttgaacttgcctgacgggaggactttagggttagagttatccggaattcacctgttttggggaaatagtcaaacgtcgttggatgttgtggtgaactattgcttaggaatattggtttctgcattagtgaattgagtttctcatggtggatttgggtggtttctgtataattttcagtttttgggatcacgaaaatacaagctgccaaataaaactgcacgatttccttc

SEQ ID NO: 103902 - DNA, 1990 bp, Zea Mays
gcgacgtttgcaggatgcacccacatcacggctgtaaaatccgctgcaagtccgtcgattgttgttttatctttcctctttctctatcgaaaacggagcgcctgatacgatagtagcagcacagctagctctcctccccagaatctcgccggattccgccccccgccgcgccctcgcttccgccgcaggttcgcgtctgtgcccgcgcgtgttgtactaccggcggacggcggtgttggtggtggttggtggagttgccgacgacggtaggctatggactaccggccctccgacagcagcggaactgatgatgatcttccacaatttccacataagagtatcagaggcagcggacgtgtcagtggtaatgggcgagctgttgttcctgctggttcatatgctagggcaccaactgatatggtagcacaagttcaacaacttgagcaagaagcatatcgctcagtccttcgtgcattcaaagcccagtctgatgccattacatgggttgagaccattaaactgtccactgtttatttggtgtctgatgatttagatgtcatttctcaaactctaatcttctcaggagaaggaaggtctcatgactgaacttaggaaggagctaagagtatctgacaaagcacacagggaactgttaaatagagtcaacaacgataatattatatgtagcataagggaatggagatcaacaggagggcttcaggcaagcttgtctaataacccacaactgattcatgactctgttcccagtcctaccacctctggccgtaagaggcaaaagacatctcaatctgttcctgctttacctgcaccgcctcctgcgatgcattcacaacagctggctacaccaacacagccatcatcttcaactgctaggaaagcagtacccccaggccataaaggcaaaaagatgaaaccaggtcagaaggtaccaggtggctctgcagccaagcctataccatcttcagcaggtcctagtggaagaggaccgcacatgaataggggtggttctgctcctgaagctcaagctcagaatgtcgatccattgattggtcgtaaagtgatgagtcggtggcctgaagacaatagtttctatgaagcagtcatatacgaatatgatgctgaaacgggccttcatgcactggtttatgacatcgatacggcagatgaaacctgggagtgggttgatcttaaagagatgggacctgaagacataagatggcaagaggatgactctgggatagaccctgttacatatctgcgcagccggggtggcccaactagtggcgttaggaagccagcaggtcgcggtgggcccatgccaggttctgtaagaggaagaggattacagaaaaacatgcctaagaaagattttccacctccacaaaatggtgttggcaagagaagttccgatgacattgatatccttcataccgagagcctaataaaagaggtggggaaagtttttagcgttagcaatcctgatccacaggaagtagaaaaggcaaagaaagcactgaaggagcaagaacagtcgttgattgacgccatagcaaggcttgctgaggcatcagatggtgaaagtgacgggcacaatcgtgggcgaaggaacttgtatgctgctaaccagcatcaagcaagctacgttggtgccatgcccgtcggtgacagagctggtgccatgtaaacactgcatgaacgcatgcacaacataaaataactgcctgttgtacaatccatcgcctaatatttatcctggatttaggtctctgtaggctcttttgctttgggatgcttttttttttacaattgtaattcagaacgctgaccatgtaaagcttgtagatgcgtgtttctgtctctagctttttgttagtgtggtctcggcttcaatatgcatgataaagggaaaaagaaaaagatcacatttgttaaacaggtgtttcaccattttaatgcagcaatcattcgt

SEQ ID NO: 103903 - DNA, 2020 bp, Zea Mays
gcgacgtttgcaggatgcacccacatcacggctgtaaaatccgctgcaagtccgtcgattgttgttttatctttcctctttctctatcgaaaacggagcgcctgatacgatagtagcagcacagctagctctcctccccagaatctcgccggattccgccccccgccgcgccctcgcttccgccgcaggttcgcgtctgtgcccgcgcgtgttgtactaccggcggacggcggtgttggtggtggttggtggagttgccgacgacggtaggctatggactaccggccctccgacagcagcggaactgatgatgatcttccacaatttccacataagagtatcagaggcagcggacgtgtcagtggtaatgggcgagctgttgttcctgctggttcatatgctagggcaccaactgatatggtagcacaagttcaacaacttgagcaagaagcatatcgctcagtccttcgtgcattcaaagcccagtctgatgccattacatgggagaaggaaggtctcatgactgaacttaggaaggagctaagagtatctgacaaagcacacagggaactgttaaatagagtcaacaacgataatattatatgtagcataagggaatggagatcaacaggagggcttcaggcaagcttgtctaataacccacaactgattcatgactctgttcccagtcctaccacctctggccgtaagaggcaaaagacatctcaatctgttcctgctttacctgcaccgcctcctgcgatgcattcacaacagctggctacaccaacacagccatcatcttcaactgctaggaaagcagtacccccaggccataaaggcaaaaagatgaaaccagtaagtagataatttgaacactttctttttcctgtaagtctttgctgttctttggcagaagttcatgcactttcagggtcagaaggtaccaggtggctctgcagccaagcctataccatcttcagcaggtcctagtggaagaggaccgcacatgaataggggtggttctgctcctgaagctcaagctcagaatgtcgatccattgattggtcgtaaagtgatgagtcggtggcctgaagacaatagtttctatgaagcagtcatatacgaatatgatgctgaaacgggccttcatgcactggtttatgacatcgatacggcagatgaaacctgggagtgggttgatcttaaagagatgggacctgaagacataagatggcaagaggatgactctgggatagaccctgttacatatctgcgcagccggggtggcccaactagtggcgttaggaagccagcaggtcgcggtgggcccatgccaggttctgtaagaggaagaggattacagaaaaacatgcctaagaaagattttccacctccacaaaatggtgttggcaagagaagttccgatgacattgatatccttcataccgagagcctaataaaagaggtggggaaagtttttagcgttagcaatcctgatccacaggaagtagaaaaggcaaagaaagcactgaaggagcaagaacagtcgttgattgacgccatagcaaggcttgctgaggcatcagatggtgaaagtgacgggcacaatcgtgggcgaaggaacttgtatgctgctaaccagcatcaagcaagctacgttggtgccatgcccgtcggtgacagagctggtgccatgtaaacactgcatgaacgcatgcacaacataaaataactgcctgttgtacaatccatcgcctaatatttatcctggatttaggtctctgtaggctcttttgctttgggatgcttttttttttacaattgtaattcagaacgctgaccatgtaaagcttgtagatgcgtgtttctgtctctagctttttgttagtgtggtctcggcttcaatatgcatgataaagggaaaaagaaaaagatcacatttgttaaacaggtgtttcaccattttaatgcagcaatcattcgtcatgaccatgaatgcgcaaaaaaaaaaaaaaaa

SEQ ID NO: 103904 - DNA, 1945 bp, Zea Mays
gcgacgtttgcaggatgcacccacatcacggctgtaaaatccgctgcaagtccgtcgattgttgttttatctttcctctttctctatcgaaaacggagcgcctgatacgatagtagcagcacagctagctctcctccccagaatctcgccggattccgccccccgccgcgccctcgcttccgccgcaggttcgcgtctgtgcccgcgcgtgttgtactaccggcggacggcggtgttggtggtggttggtggagttgccgacgacggtaggctatggactaccggccctccgacagcagcggaactgatgatgatcttccacaatttccacataagagtatcagaggcagcggacgtgtcagtggtaatgggcgagctgttgttcctgctggttcatatgctagggcaccaactgatatggtagcacaagttcaacaacttgagcaagaagcatatcgctcagtccttcgtgcattcaaagcccagtctgatgccattacatgggagaaggaaggtctcatgactgaacttaggaaggagctaagagtatctgacaaagcacacagggaactgttaaatagagtcaacaacgataatattatatgtagcataagggaatggagatcaacaggagggcttcaggcaagcttgtctaataacccacaactgattcatgactctgttcccagtcctaccacctctggccgtaagaggcaaaagacatctcaatctgttcctgctttacctgcaccgcctcctgcgatgcattcacaacagctggctacaccaacacagccatcatcttcaactgctaggaaagcagtacccccaggccataaaggcaaaaagatgaaaccaggtcagaaggtaccaggtggctctgcagccaagcctataccatcttcagcaggtcctagtggaagaggaccgcacatgaataggggtggttctgctcctgaagctcaagctcagaatgtcgatccattgattggtcgtaaagtgatgagtcggtggcctgaagacaatagtttctatgaagcagtcatatacgaatatgatgctgaaacgggccttcatgcactggtttatgacatcgatacggcagatgaaacctgggagtgggttgatcttaaagagatgggacctgaagacataagatggcaagaggatgactctgggatagaccctgttacatatctgcgcagccggggtggcccaactagtggcgttaggaagccagcaggtcgcggtgggcccatgccaggttctgtaagaggaagaggattacagaaaaacatgcctaagaaagattttccacctccacaaaatggtgttggcaagagaagttccgatgacattgatatccttcataccgagagcctaataaaagaggtggggaaagtttttagcgttagcaatcctgatccacaggaagtagaaaaggcaaagaaagcactgaaggagcaagaacagtcgttgattgacgccatagcaaggcttgctgaggcatcagatggtgaaagtgacgggcacaatcgtgggcgaaggaacttgtatgctgctaaccagcatcaagcaagctacgttggtgccatgcccgtcggtgacagagctggtgccatgtaaacactgcatgaacgcatgcacaacataaaataactgcctgttgtacaatccatcgcctaatatttatcctggatttaggtctctgtaggctcttttgctttgggatgcttttttttttacaattgtaattcagaacgctgaccatgtaaagcttgtagatgcgtgtttctgtctctagctttttgttagtgtggtctcggcttcaatatgcatgataaagggaaaaagaaaaagatcacatttgttaaacaggtgtttcaccattttaatgcagcaatcattcgtcatgaccatgaatgcgcaaaaaaaaaaaaaaaaa

SEQ ID NO: 103905 - DNA, 2183 bp, Zea Mays
tgtttggagagcagatagcctaatgccaaaatagcaaatttctcagccgtgacaacacagcctgcgctccccttctttcccgttcggctcacagcgaagaaggaagccggttagggtttccacctcctttcccctcctctccttcagcgacgaccgcgggccacaccctcgatatccttcccctcggacccggaggcgagcagcagcctccagcgcctgccacgcctgcccgtctcgttattgggaggattcgccatgtctgacatggagtccgtcgcagctcttatgaactcgacaagctccaagatacagcagcttcaggaggcatttgctgagcttgagagccagagcacggtttccatgaacctcaagtggaagcagcttgaagaccactttcgtggtcttgaacagtccctcaagaaaaagtttgacgagctaaaagagcaggagaaggagttccaggagactgtcgcaaaatcagagcagattctggagcagcgggaggcagctgttgtggcaaaggaactgacctctttggagaagttgcaggagaagagggaagctgcattagctatgatctttagcaagtccaggctttccttacctgttcctaccatcaacccaatgaacaaggcgctgaataatcttggtgtcaagtggccaaaaccggcatctgaggagagtgtgcacttgcaagttgataatgctgtagtgacgcctcgttctgagcttgttgcactctgtgaggaaatgaatgtgaaggggcttcataagttcatatccgacaacaggaagaacttggctgccatccgcgaggaaattcccagtgcactgaagaaaacatctcatccgtatggcttggtgttggattccctggaagacttctattctggagataatcttgtattagatggcaaaaaggatggggaccttctgggtgttagaaggacgtgcctgatgttgttggagtcactcggacagttgcacactgctggtataacttgtttctctttggagggtcacatgcttacaactaatatcatagagcgagcaaagaagattgcatttgagtggaagtccaagttagataatcttgagattgatgctagtaatgggaactgtcttgaagctcatgcatttcttcaactcctggcaacctttggtatttctgctgaatataatgaagatgacctgtgcaaattgcttccatatgtcagtcgtcgtcgtcagacacctgaactttgtcgattgcttgggttgtcacagaaaatgccaggtgtcattgaagttctggtgaaaagtggaagaactattgatgcaattaatttagcttacgtgtttgagcttactgaacagtttgaaccagtgcaactgcttaaagcatatctgagggatgttaagaaactgtcacatgccaggaatgtcaaaatttctcctggagcacagaatgagatgaatgagcgtgagttgtgtgcactgaaatctgtcattaagtgcattgaagatcataaacttgaggagcagtaccctgtggacccacttcagaaaagggttttgcagctagagaaagcaaaggcagacaagaggagggctgttgaagcagccaagccacagtccaagaggcctcgtgccaatggatcgacctttgcaccccgtgctacaggctttgctgacaagagcttctacccagcaaccccagagaggcatccctccaacccttacgagaggcagtttgtgtatggtgctgaggctcatcttcctccaatgatgagttcagcgtcttacccgatgcaacctgcccatggaccttattacggcaatggctacccagtacagtaccaggtcccgtatatccactaatggagacagccaggtgcaggtgctctttcctaactatctagcttagcctgctgccccttgttgtagtcctatcagttactctgctagtttgcctagatggaaatagttggaccactcaatgtgtgtgctctgagtggctgttgtgaaatctgttaattttatgccctaatgacatgacataaattactcctaatacttagctatcgatgaatctccctatgtactttcattcggcttgtgaaatgaactatggcggttttcgacttccgtgcactacatgtaaatatcatgtcgtcatgtacacctgaactgtcatttgcagc

SEQ ID NO: 103906 - DNA, 2016 bp, Zea Mays
attttccctcccatttattagtattcgggtagccccgtggtggggtagcgaaaccttgattagtttggtccatcgaggaggattcgccatgtctgacatggagtccgtcgcagctcttatgaactcgacaagctccaagatacagcagcttcaggaggcatttgctgagcttgagagccagagcacggtttccatgaacctcaagtggaagcagcttgaagaccactttcgtggtcttgaacagtccctcaagaaaaagtttgacgagctaaaagagcaggagaaggagttccaggagactgtcgcaaaatcagagcagattctggagcagcgggaggcagctgttgtggcaaaggaactgacctctttggagaagttgcaggagaagagggaagctgcattagctatgatctttagcaagtccaggctttccttacctgttcctaccatcaacccaatgaacaaggcgctgaataatcttggtgtcaagtggccaaaaccggcatctgaggagagtgtgcacttgcaagttgataatgctgtagtgacgcctcgttctgagcttgttgcactctgtgaggaaatgaatgtgaaggggcttcataagttcatatccgacaacaggaagaacttggctgccatccgcgaggaaattcccagtgcactgaagaaaacatctcatccgtatggcttggtgttggattccctggaagacttctattctggagataatcttgtattagatggcaaaaaggatggggaccttctgggtgttagaaggacgtgcctgatgttgttggagtcactcggacagttgcacactgctggtataacttgtttctctttggagggtcacatgcttacaactaatatcatagagcgagcaaagaagattgcatttgagtggaagtccaagttagataatcttgagattgatgctagtaatgggaactgtcttgaagctcatgcatttcttcaactcctggcaacctttggtatttctgctgaatataatgaagatgacctgtgcaaattgcttccatatgtcagtcgtcgtcgtcagacacctgaactttgtcgattgcttgggttgtcacagaaaatgccaggtgtcattgaagttctggtgaaaagtggaagaactattgatgcaattaatttagcttacgtgtttgagcttactgaacagtttgaaccagtgcaactgcttaaagcatatctgagggatgttaagaaactgtcacatgccaggaatgtcaaaatttctcctggagcacagaatgagatgaatgagcgtgagttgtgtgcactgaaatctgtcattaagtgcattgaagatcataaacttgaggagcagtaccctgtggacccacttcagaaaagggttttgcagctagagaaagcaaaggcagacaagaggagggctgttgaagcagccaagccacagtccaagaggcctcgtgccaatggatcgacctttgcaccccgtgctacaggctttgctgacaagagcttctacccagcaaccccagagaggcatccctccaacccttacgagaggcagtttgtgtatggtgctgaggctcatcttcctccaatgatgagttcagcgtcttacccgatgcaacctgcccatggaccttattacggcaatggctacccagtacagtaccaggtcccgtatatccactaatggagacagccaggtgcaggtgctctttcctaactatctagcttagcctgctgccccttgttgtagtcctatcagttactctgctagtttgcctagatggaaatagttggaccactcaatgtgtgtgctctgagtggctgttgtgaaatctgttaattttatgccctaatgacatgacataaattactcctaatacttagctatcgatgaatctccctatgtactttcattcggcttgtgaaatgaactatggcggttttcgacttccgtgcactacatgtaaatatcatgtcgtcatgtacacctgaactgtcatttgcagc

SEQ ID NO: 103907 - DNA, 2032 bp, Zea Mays
atctgcgtttgtacatctttctgtggaattctaggaacgccttgtagatgcttgcttgtggtgctgtgttcttaattgtagttgctctttgaggaggattcgccatgtctgacatggagtccgtcgcagctcttatgaactcgacaagctccaagatacagcagcttcaggaggcatttgctgagcttgagagccagagcacggtttccatgaacctcaagtggaagcagcttgaagaccactttcgtggtcttgaacagtccctcaagaaaaagtttgacgagctaaaagagcaggagaaggagttccaggagactgtcgcaaaatcagagcagattctggagcagcgggaggcagctgttgtggcaaaggaactgacctctttggagaagttgcaggagaagagggaagctgcattagctatgatctttagcaagtccaggctttccttacctgttcctaccatcaacccaatgaacaaggcgctgaataatcttggtgtcaagtggccaaaaccggcatctgaggagagtgtgcacttgcaagttgataatgctgtagtgacgcctcgttctgagcttgttgcactctgtgaggaaatgaatgtgaaggggcttcataagttcatatccgacaacaggaagaacttggctgccatccgcgaggaaattcccagtgcactgaagaaaacatctcatccgtatggcttggtgttggattccctggaagacttctattctggagataatcttgtattagatggcaaaaaggatggggaccttctgggtgttagaaggacgtgcctgatgttgttggagtcactcggacagttgcacactgctggtataacttgtttctctttggagggtcacatgcttacaactaatatcatagagcgagcaaagaagattgcatttgagtggaagtccaagttagataatcttgagattgatgctagtaatgggaactgtcttgaagctcatgcatttcttcaactcctggcaacctttggtatttctgctgaatataatgaagatgacctgtgcaaattgcttccatatgtcagtcgtcgtcgtcagacacctgaactttgtcgattgcttgggttgtcacagaaaatgccaggtgtcattgaagttctggtgaaaagtggaagaactattgatgcaattaatttagcttacgtgtttgagcttactgaacagtttgaaccagtgcaactgcttaaagcatatctgagggatgttaagaaactgtcacatgccaggaatgtcaaaatttctcctggagcacagaatgagatgaatgagcgtgagttgtgtgcactgaaatctgtcattaagtgcattgaagatcataaacttgaggagcagtaccctgtggacccacttcagaaaagggttttgcagctagagaaagcaaaggcagacaagaggagggctgttgaagcagccaagccacagtccaagaggcctcgtgccaatggatcgacctttgcaccccgtgctacaggctttgctgacaagagcttctacccagcaaccccagagaggcatccctccaacccttacgagaggcagtttgtgtatggtgctgaggctcatcttcctccaatgatgagttcagcgtcttacccgatgcaacctgcccatggaccttattacggcaatggctacccagtacagtaccaggtcccgtatatccactaatggagacagccaggtgcaggtgctctttcctaactatctagcttagcctgctgccccttgttgtagtcctatcagttactctgctagtttgcctagatggaaatagttggaccactcaatgtgtgtgctctgagtggctgttgtgaaatctgttaattttatgccctaatgacatgacataaattactcctaatacttagctatcgatgaatctccctatgtactttcattcggcttgtgaaatgaactatggcggttttcgacttccgtgcactacatgtaaatatcatgtcgtcatgtacacctgaactgtcatttgcagc

SEQ ID NO: 103908 - DNA, 2062 bp, Zea Mays
gcccgaggcctcccgtcgcggtggtcgctttcggccctggaccccgctgccggaatcgaatctcctcccctcctttctcctccgacctcccccttccccccatccgcggctccgccccgacccgtgacgcctcgcttcgcacccctctcgcatctccgccgcatctccgccgcgatcctcccgactagccgcgactgcctcccctccagcggccaggcagaggatggagggggcaggcaaggatggcaacccgttgaggaattatcggattggcaagactctcggaattggctcattcgggaaggtgaaaattgcggagcatatcagcactggacacaaggtggcaatcaagattctcaaccgccgtaaaatcagaggcatggagatggaagagaaagttaaaagagagattaagatattgaggttatttatgcatccacatattatccgcctctatgaggttatagacacaccggctgatatttatgttgttatggagtatgttaagtgtggggaattatttgattacattgttgagaaaggtaggctgcaggaggaagaggctcgccgtttcttccaacagattatatccggtgttgaatattgccatagaaacatggtggtgcatcgtgatctaaagccagaaaacctcctattggattcaaaatgcaatgttaagattgcagattttggcttaagtaatgttatgcgggatggtcattttctgaagacaagttgtggtagcccaaattatgctgctcctgaggtgatatctggtaaactatatgctggacctgaagttgatgtgtggagctgtggggttattctttatgctcttttatgtggtactctgccatttgatgacgagaacataccaaacctttttaagaaaataaagggtggaatatatacccttcccagccatttgtctggtgcagcaagggatttgattccaagaatgctagttgtcgatcctatgaagcggatcaccattcgtgaaattcgcgaacatgattggttcaaaattcttctcccgcgctatttgactgtgcctcctccagatagtgcgcaacaagtcaaaaaggttgatgaggaaactctccgtgaggttttaggtatgggatatgacaagaacctgttggtggaatcaatccaaaaaaggctgcaaaatgaggcaactgttgcatattacttactcttggacaataggctccgtacaaccagtggctatcttggagctgaatgtcaagaagctatggactcctcattctcaaacatcgcatcatatgaaacaccaagttcagcacgtgggaatagacagcaaatatttatggagtctccagttggcttgagaccacatcttccagctgagaggaaatgggctcttggtcttcagtctcgagcacatccaaaagaaataatgtctgaagtgctgaaagctctgcaagaattaaatgtttactggaaaaagataggtcactataacatgaagtgcagatggagtcctggctttcctgctcaaattcataacaatcataacttcagtgcagggtccattgaaactgatagcctgagtgagaggttaagtttaattaagtttgaaattcagctgtacaaaacaagagacgagaaatacctcctcgatttgcaaagagtcagtgggccacagctcctctttctggacttgtgcgcggcctttctaactcaactgagagttctttgatttctggtgtcagctttccatcagttgcattccttgcgtttcactagaggaatgtctaaatcgctcacaaagctgtaaatagtaatctccagtagattggattttctggagtatgtagatggtaggcatgagaagatgttatgcctggcggcgatcttctgaaccagactgtgtggagtaacttatctcctaattctttacggctggccagctgccggtgaattagatcagtgcttttgctggcataatgtctatctacattaataatttcagctattacaacggttaattaaatgctgtgctgcttacaggccaaatgagattatgttttgaaggcaa

SEQ ID NO: 103909 - DNA, 269 bp, Zea Mays
atagctgctgggcaccatggatttccgtcgttgccatggcagtagaagggagatgcgtgagtccactgccggcgtagctccgcatgtacgtcgccgtcggaccttcgctgtgggcgtcaaacctgttcgtcgaaacaaatagcaacgatatcgggtggtgtagcatgttgacctcttgccggagttcatcgccaacctatcccttaccgtgtgcagaggtcacgactctgtgtgccctatgggaagcatcctccggcgcgtcatcgcgg

SEQ ID NO: 103910 - DNA, 657 bp, Zea Mays
tactcaaaactacctaaaccaagcacaagcaccaaacactcaaacagacaggaagcccgccgaacatcacaaggctgcgaacctcctagaagctcgaggagatgctctcccaagctgtcggcgtggttcgtgaacccgcggaggaatccgctcgcgcgtctccaccggaacgccgtcgcctcccgcctccgcaaatacgggctcaggtatgacgacctctacgacccgtaccacgacctagacatcaaggaggcgctggcgcggctgccgcgggaggtggtggacgcccgtaaccagcgcctcaagcgggccatggacctctccatgaagcaccagtacctacccgacgacgtccaggctatacagacgccattcaggagctacctttttgacatgcttgctcttgtgaaaaaggagagcgcagagcgtgaagcattgggagcgcttccactctaccagagaaccatcccataaagtgcctctttgcatgatccaatcaatagtgcacgcgatgatcagcagaggctgatactgtaatgtgtattgtgttttttcgaggaaatctctactacttattaagacgataagggtagcctgccgttctgacgttatacaaacttagtcatatgttcttgtgcgatctaagctatccgatct

SEQ ID NO: 103911 - DNA, 1789 bp, Zea Mays
aaaacccgatagagatacagaagaaaagagagaaaaaaactaagctcgcctgatcctttttaagagacgggacccctcaccactctgtaggtcccgaaggcccgaaccttaggatcgccggcgaaccaccggagctgagccccacaaacatcactgtaccacacggtttggtggtgtggcgactggcgacgaagcgcacaagaacaaaacaagagggcgagaaacatagggagaaaggaggagaggaacggagagctggaaaaggcaggaaagacccggcttttgaccccaagtaccctgttgagggcaatggcggccacctccgaggaggcaatcaagcagttctcggcgctcatggagcagctagaggagccgctaaagagcacattccagaatgtgcatcaaggaaatctgagagggactttgatgcgttttctgaaggctagagaatggagtgtgcctaaagcttataaaatgctaatggattgcttaaactggagagtacagaatgagattgacatcgtgttagctaaacccattctgccatctgatatatatagagttattcgggacacgttacttgttggattgacagggtactccaagcagggacaacctgtttatgcatttggtgtgggtcttagtactttcgacaaggcctcggtgaactactatgtgcaatcacacatacagatgaatgaatatcgagatcgtgttgtcctgccggctgcatcaaagaagtttgggagacagattaatacctgcttgaaggttatggatatgactggcctcaagctgtctgcactgagccaaataaagatgttgacgatgattactactgttgatgaccttaattatcctgagaaaacggaaacttattacattgtaaatgctccatatgttttttcagcgtgttggaaggttgtgaagccactcttacaagaaagaactaaaaagaagatccaagtcctgtatggctctgggagggatgagttactgaaggtcatggactacgagtcacttccgcacttctgcaagagagaagggtcaggttcatccagcgactcgctggatggagtagattgctactcctacgaccaccctttccaccagcagctgtacaactacatgaagcagcagcaatctctgaatcaggactccgttggtcccagaaaacaaggctcggtccacgtggatgtgccctcgcctggccttgaggaggccaagattgcggagacgatcaaagcagagctccagaatttgaggggaagcggcggtctcgcccattcattcagcagcatccagatcgaaggtccatgagggcgcgcgccagtgacccgaagagaagctcttggtaatggtgcctcctgcttgcagtcactggctgcaggcttgaccggggcgaatagagagcgggattctaataactgtatccgcgattgttgtgatttctaattaaccaagtgggcgtgtatcgccatgcttgtactatccctgtatgtatgtatatataacggccaactggacggagtttatgtaactccctgctaattacttagaatgctcatcttttattttactccaatatagtgaaaatttcgcttagggcccgtttggttccttgaaatggtgacctcgaatgatttctagccactttcaacaatttctagccagattgctttgtgtaaattctagagaggaacgaacgaggccatcttttattgttatcgaatatttgtcgctctaaaatactataaataaaaaagaatggaggaagtataatgtagtg

SEQ ID NO: 103912 - DNA, 336 bp, Zea Mays
atggggaagaaggaggagctccctgctcagccaaaacagagaagggaaggaagtggtgtgtgggagaagggagagggtgggctgccatttatagagccaagctctggacatgccagactgcaccagcagatggcagcacttgaggtgattcgagcactggttagagagataaagacccacgaaaattggtttgtcagtgggttagaaaacagtggaaactcgtgaaaactgaatgtcaaagcatgtcaaacggaatcggatgaatgccatcttttaatatgttgtgcccctattagttattaacaacttttatatttggaaaaacttgagttattc

SEQ ID NO: 103913 - DNA, 620 bp, Zea Mays
accgtctctcacacgctctcatcccttccacgctgccgccgccaaactcagactcgcaagcgggagctccgtctctgccagaaactcgccaccaccgcggcggccacggctccactcgcttcctcgcccaccacctccgcggacaccgagcggaggaagcacgaactgctgcgcgcggttcaggaaatgcggcacggattcgcagcgcgtggggcccgaccaacgcgctgccatcgaggaggccgtcgtggcggtggaggagcgtggtgcggggaagggaacgacgatagatctcgcggcgctcgatggcacctggaggctgtgttacacatcggcatcagacgtgcttgtgctgttcgaggcggctgagaggcttccactcctgcaggtgggccaaatataccagaaatttgagtgcaaagatcgatcagatggtggaattgtgaggaatgttgtaaggtggagcatcgagaacttgctggaggagcaagaaggtgcaacactgatggtctctgcgaagtttgttgtcctgtctaaatgaaatatatttcttcaatttgaggaggtaattctaaatatgactatttgattaaagaaatgcaaagcgaagagttgctaat

SEQ ID NO: 103914 - DNA, 106 bp, Zea Mays
tggccgaatactcacaatgtgcctagaaaatgtatgtactcatccttatatgggacttataatttaggaattggagatcacggattagaacctacaactagttatt

SEQ ID NO: 103915 - DNA, 11581 bp, Zea Mays
acgacacgcgcatctccctacctcgatacgattcttcgtcttctcttccccgcgatcgcgccagcgcccccgaaaaaccctaactacctggagcctcgacggcacctgccgcaggcgacggcgagcgaccccaggcggtggtagacggcgcagcgggttgccccttgtggaggcggacggcacggcgcaggtccttgccttcccggctatgcgaattgcggtatgaagctcaagcggcgacgcgcggtagaagtgcctccaagtataaaatctttcatcaacagtgttaccactgttcctcttgaggatgtagaattgccgctgaaggattttgcatgggaatttgacaagggggattttcatcactggttggaccttttcaatcattttgattctttctttgagagttatatcaaatcaaggaaagatttgcatcttgaagataattttcttgatgtggatcccccatttcctcgagaagcactacttcaaattctccgtgtatcaaaacttatattggaaaattgtacaaatagacacttctctagtttttttgagcagcatctgtctgcccttctagcatcaacagatgcggatattgttgaagcaagcttgcagacattaatggcatttgtagacaagtcagttgggaaaagctcaatacgcagtgcatctctcgcttcaaagttatttgccttatctcaaggctggggtggaaaagaaggtggtcttggattagtagcatgttctctacccagtgtatctgatccagtttccactgaggttggatccacactccattttgagttctatcgtgctgctgataaatcagagaaatcccagtgtctagagaaagagaacaagttggaagtaattcatttatcgaatgtcaattcgtgcaaggaggcagatcttgaaatattggacaggttggtcaaggattacagtgtgccacaagctttaaggtttcttcttcttacaagactgagatttgcaagggcttttgactctttaacatgtcgacaccagtatatctgtatccgcttgtatgcttttattgttcttgtccaagcaggccatgatctggaagttgtatcaacatttttgaacaatgaaccagaattcattgatgagctgttatcactacttagctatgaggatgagatacccgaaaagattcggatactgggagtcctttcattagtcgcactgtgccaagatcgacctcaccagcctactgtattgtcctcggtaacttctggtggtcatcggggtatccttcctattctcatgcagaatacagtggattctatcatcaatggttctatgaaatggtccataatatttgctgaagcacttctttcgcttgtatctatgctggtatcatcaacaccaggttctctagctctacaagaagcaggttttataccaactattttgcctcttctcaaagacacaaacacgcaacatttacatctagttagtaaggcagtgcatgttattgagagcttcctggattatcacaatccttcttcagcagtgttcagagatctaggtggactagatgacactattgctcgtcttaagctagaagtatctcaagttgaggttgattcaaaactaattgaccattctaccaatgaaggaaacgaggttgaaagttatccacctgtgcaagatatacaaccttcatgttctgaatccttgattttgtatcataggaagaacttaataaaagttttattacgtacaatatctctggcaacatatgtgcctggtagttctgctcgtgttgatggttcagaagagaatgtgttacctccatgtttatgtgcgatttttaagagaggcaaggacttcggtggtggtgttttctcacttgctgcaaatgttatgagtgatctcatacataaagatccaacatgctatactgttcttgattcagctggtttgccacaagcatttcttgatgccataatgtgtggtggactttacaactccgatgcagtctcatgtataccacagtgtttggatgcattgtgcctgaacaataatggtcttcaattggtaaaggaccggaatgctttaagatgttttgtgaaaatctttacgtctagatcatatatgaaagctcttagtggtgacacagcgggagctttatcaagtggacttgatgaattaatgcgtcatgcaccatcattacgatcctctggagttagcatgtttattgaaatcttgaacactatttttaaagtgtggtgtggtgtagactctatcccctataaggaatctgataattactctgcagttattcccatggatactgatgtggtggttgctacctcacagagtgagggtgtacctcctgaggtaggatgctcaggcgaaacagttgatgctcctttagatgctgtaacatcatcatccattgagttatttcttcctgagtgcatatgcaatgttgctcgcctgcttgaaactgttctgcaaaatgctgatatatgtaggctatttattgagaaaaaaggcatagaagctgttcttcaactgtttaagttgccatcaatacctgtatctgtctcaattggtcagagtatttctgttgcattcaaaaacttctcacctcagcattctgtttctcttgcacgagcagtgtgctcattctttagagaccaccttaaaataaccaatgaactgttgggttcgatctctggaactatgctggttggtagtgaacctgcaaagcaatcagctcttctgaagccactttctacccttgaagggcttttgtctattgccaattttctcctgaagggaactaccattatggtctcagaactggcttttgctgatgccgagatattgaaggaattggggaaggtttatattgaagtcacatggcagatatctttactcagtgattctaaggtggatacgcaagatgcagatcaagatgatttggctgaggaagcttcaatttctgaaagggatagtgatgatgacacaaatacagcaccactttcaagatatatgaatcctgtttcagcaagggcttctatatcaccgtggagcatggagcaagattttgtatcaactgtgcgatctgtttcccacatgcaccaccatggtcgacactcattatcaaggataagtgggcgcctaaatggagtgttgaatgcaacaagtactgatttggatggtccttgttttccagcagagacatcaaggcgtcatgatgctctaaagagaatccctgatgatgttgtttctgaacttctgaagaaattttgttgtaccatgcgttccttcctttctacccttgtcaaaggattaccggctcatcgtcggcctgactctaaccttaacccaaattcgagaagtcttgtgactgcactagctcaatttttccttagtgctcttggtttctctgggcattctactgctggttttgagatgtctttatctgtgaaatgccgttaccttggaaaggttgtggaagacatggctgtgcttacatttgacagtagacgtcgcttatgcaattctgcactcgttaatagcttctatgttaatggaacattcaaggatgttctaacgacctttgaagcaaccagtcagctactgtggacacttcctttctctgtccttgctgctgccacagatcaaggttcctctattaatgagaaggtgtctcacaattcctggctgctggatacgttacagagttactgtaaatttctggaatattatgtgaactccacgttcttattgtctccatcctcttctcataatcggcttcttgtccagcctattgtaactgagctgtcaattaatctattccctgtgccttcagatccagaatcatttgcgcgcatgctccaatctcaagttcttgatgcagttcttcctgtttggaatcatacaatgtttcctgtgtgcaacccagcttttgttacctccctggtgtcaattatgaacaatatatgctctgttgttggagatatgaagcaaagccgcagtagtgttggagttgccaatcagcgtgttactggcccccctcttgatgaatctgctattgctacaattgttgaaatgggattttcaagggctagggcagaagaatctcttagaagtgtgagaactaacagcgtggagatggcaacagattggttattcaaccatccagaagattctgtccaggaagatgtgcagcttgcacaagcgttagctttgtcacttggaagctccattgaaacacccaaggaggatggaagcaataagaatgatacagtcattgctgaagaaaaaggtgtatttgtgcttcctttggatgacatccttactgtatcgaccaagcttttccagtctagtgattccaccttggctttcccattgactgaccttctagcgacactgtgcaaccggaataagagcgaatactgcaagcgagtagtattgtatctttttgagcagttaagacatttttcgtcagatgccacggatatgggtgctttgtattctgttgctcatgtgctggctttgcttctgagtgaagacagtggcatacgtgaaactagtgctgaaaatggtgtcatctcccaagttcttaacatattaggaagtcttaaatcaaggacagaccagacagatcatacttggaattctatcagtgctctgttgcttatattgtataacatgctacaatttaatccaaaactcagtatggaaacaatggatggtatatccaagtcaatttctgatgcatccagtgctgacagcgaggaaaatccattaccaactgctgaacatagaactgaaattattgattcagcagatgatgcaagtgcaaatgtttttaaaaagattttagggaaatctactggctatttgaatgatcaagagagccaaaaggcactggttttctgctgtgaattcattaagctatgtgtgcctgcaacagttatgcatgctgtgcttcagctcagtgctcgcttgacaaaaacacacgcgcttgctgctctattctttgaaagtggtgggttagcatctctcttaaatctcccaggcacttgcatctttcctggctttgagaccttagcatctgctattgtgcggcacctcattgaggatccccagaccttgcagagtgccatggaattggagatacgacagtcattaagtaaccatggcagtcgtactccaagctcatttcttacaaatatggcaccactgatatctagagatcctgtgatcttcatgaaggctgcaacttcagtctgccaattggattattcaggagggagattgaatgtagtcttgttgaaggacaaggagaaagacagagagaaacagaatgttcctgtaacagaaagtggtgtgccatgtaatgagcctgttcgggtgactgctgaggttaagacggttgatacaccaaacagatgttcacggaaccacaaaaaggttcctgctagtcttcctcaagtgattgatcagcttcttgagatcatcatgagctatccatctgcaagcaaagaacatgggtttgatggttattccctgttgactccaatggatgttgatgaaccaaatacaaagggcaaatctaaagttggtgatggccaagaactggatggtgatgctttctctgagaggtctgccttgctatcaaagtttgcatttgtccttaagttgatgagtgaaatactccttatgtatgtgcatgcagtagggataattctgagacgggatacagagatatcagtgtcacgaagttgcgctcaaggtgctggacacagtggtttactgcatcatatattctatctgctacttcctctaccttcagtcaaaattgctgatacctcagatgattggattggtaatttgtctgagagagcttcctggttcttggtagctttatgctgcagatctgctgaaggtcgtagaagggttgtttctgaaattgtaaaggcacttaaccaattcattggttcagcaagcaacacctccagaggatctttaatacctgacagaaaagttttggctttctctgagcttgtgaattccatattgtcaaggaatagtcagagcaatttgcctgttcttggctgctcacctgatattgcaaaacctatggtagatggtggaatggtgcaatctctttctgttttgctgaaagtaattgatcttgaccacccagatgctgtaagggttgtcaacctgatattgaaggctttggatagcctcactaggactgcttacaccaccgatcaagtcctcaattcagatcgatttaccaagaacagattaccagggtcacatgaacaaacacatgaagctgatgacattgtaatccctgaacaaactacatacgattcacatcatcatactaatgacatcgaatctgcaagtcagcaagctcaagaactgtctcatgttggtggaaataataacgaaaaccttgaccaacctgctgaacaagaaatgggagttgatctagcagacaatagtacttctaatggcaatcctccaacaagagctgtgcagttcatgcgggaagaacctattgaaggtaatgtaatggctcctagtactgatattggtttggctttctcaatgcaacatcaagttgatggaatgggtgtggaagacgaggatcttggggaggaaagtgaggacgaagaagatgaggaaatagcagctgagggagctggtttgatgtccatagctgacacagatatcgaggaccaggagaacaatgcaattggtgatgattacaatgatgaccttatggatgaagaagatgacgactttcttgagaaccatgttatagaagtaagatggagggagagcttaactcgaatggattatgatcatcatctgagattttccaggggtcgtgcagactccagtggttttattgatatatcttctgagtcatttcatggtgtggggacagttgattcatttaatctgcatcgttcgtttggtcttgaacggcggcgccaaatcggaagtaggtcgcttcttgatcgaccaaggaccgatgtgaatgcctttcttcatccactgcttgtcaggccagcacagtctagggagggaactaattcagcgtggccctctggaggaacttcctcaagagattttcacatgctgtcttttgacatcccctcgtacatgttagatgctggcttttcaccagaaactgctcccccagtgtttggtgaacgtgttgtcagtactgctccaccacctttgatagatttctcacttggtatggattcccttagaattaggcggggccctggagataatttgtggaccgatgatggtcaaccacaggcaggtaatcatgcagctgctattgcccaggcagtggaggatcattttgtgtcacagttaactgtggctaataattcaaatagtgctcctcaggtgcggcctgaacagactggcaacggtgcgaatgcgcactcagagttaccagatacaggaaatgctgaacctgttacaaccgatccactttctcaacctgttggtcggcatcagctagtttgtactgttaaccaaggacctgtccctgctaatgatgtcctctgtcctacagatgtgcacgtaaatcagcaccttgttgattccatttatgatagccgcgttgtagaaccggtgcagcaaacagcagccggtgatcctaacactatacctcagagtgatgaaatgatgtgtattgctggtacacagcttggtggtcatcctgaaagagattccttgtctggtaatggaagttatggtaatattatgcaaaatgagattgaagcacctcaacaagttcacttgggtaatgatcctagggaacccccatctgatctggagtcaagttgccatgcacttgtcacttctgcaagtgctgctcctgagctgagtgatgctcatgtagattcttcagcagtcaatgctgatgttgacatgaacatcgttgatattgctgaaaatgaagttgggaactcagctcctgcttctgatggcaatgatttgtcttctaggagatatgaagatgctcttcaagagcctcagacagtgcaaactaatgctattaatgaggcctccagcgctaatgaaattgatcccacatttcttgaagcattgcctgaggatcttcgggcagaagtccttgcttctcagcagaaccgttctgccccagctgcttcctatactcccccagctgcagaagaaatagatcctgagtttttggctgctcttccaccagacatacaggctgaggttctagcccagcagcgagcacagaggattgcccactctcaaccagctggacagccagtagatatggataatgcttcaattatagcaactttccctcctgatttacgtgaagaggtgcttttgacctcatcagaagctgttctgtctgcccttccttcagctttacttgctgaagctcaaatgctacgggacagagagttgagtcgctatcgtgctagagggagcctttttggtggaagctacaggcttggagggaggaggctgccaactgataatcagacagttatagacagagctgttggtgttactgtgggtagaagggttatttctactacatgcagttcaaagggtaaagatgtggaggggaccccacttctagactcagaagctcttcgggcacttattcgccttctgcagcttgctccaccactcagcagaggccttcttcaaaggcttatgtccaatttatgtgcacatagtgtcacacgtgtcaccttggttggccatctgctcaacatgattaaacctgaatatgaggggcttagcgtatctgattgcatggctacatatagattacatggatgtcattggaacattgtttatgcacaatcttgctctgcaaatggtgtaccaccacttgtaacacgccgacttcttgaaatattgacatatcttgcttcagctagtccttctgttgtggatcttttgatctatttcaatccttcagctagtccaaactgtttgacattacagcacaataaagagacatctcaagaaagttcaatgcagaatatgatgccaccatattcaaaggcttatacacctattatattgcttcttaagcttctaaataaacccttatttctgcggagtcgagtataccttgagaaggtgttgtatttgcttgaagtagttattaacaatgctgcatcccaagttgattgtccacctcactctgtacagataactaacaattcagatattgaattcgttgatgggacaccatatcaaacacaggtggaaccatctactttggaacaaggtcatatcccggataataaccaaagtagagatgttgaggtcccaccatcttgtgctaaactggatgttaatgtgcatgcaatccttacccaacttcctgatgctgaattgcataatctgtgcaatattcttgcacttgagggtcttccagataaagtgtactcacttgcggcagaggtggtgaaaaaattggctagtgttgcagcatcgcatcggaaattcttttccattgagttagctggtgttgctcagagtttaagttcttctgccgttgaggagcttgtaaccctgaagaacactcaaatgcttgggctcagtacttgctctatggctggagctgcgattttgcggatactgcaagtcctatctacactaacttcgtgtgtgatggatagtagacatgagcaagatttaggacaggaagagcagtcttttttgtgggatctgaatgctggtcttcaacctttgtggcaagagttaagtgattgtataagtgccacagaggcaaaacttgtacacaattcatcattcgcttcccatgccccatcggtggatgctttagcagttagtgcttcatcatctgtttcttcaccgcttcctccaggcactcagcgcttgttgccgttcatagaatcattctttgtcctatgtgagaagcttcaaacaaatcaaccagttgcacaatcagattacactgttattgcccctgaagtaaaagaatctgctggaagttcatcttcaccttcactgaagactggtggaacttgcaatgttacttttataaggattgctgaaaagcatcgacggctgctcaacgttttcattagacaaaacccaagcatactggagaagtcactttctatgatgttgaaagtgccaaggctgatagattttgacaacaaacgtgcttactttcggtcacgtatcagacagcagcatgatcagcaccttccagctcctctacacattagtgttcgcagggcttatgttttggatgactcatataatcagttgagattacgtcgtacccaggatctcaaaggtcgtttgactgtgcaatttcaaggggaagagggcatagatgcaggaggactaactagggagtggtatcaactgctctctagagttatttttgacaaaggaactcttcttttcactacagttggaaacaatgcgactttccagcctaatccaaactcagattttcaaacggagcacctttcttacttcaagtttgttggtcgagtggttgctaaagcgttatttgatggccaattgttggacgtccacttcacccgttcattttacaaacatatcttaggtgctaaagtaacatatcatgatatagaggctattgatcctgattactacagaaatttgaagtggatgctggagaatgatgtaagtgaccttccctatttaacatttagcatggatcctgatgaggaaaaacatattctctatgagaagaccgaggtattgaaaagccatcacgggttttagccgaaaccttttctgcttgcgtcagctattatcttagctgtgcagtttaacaaattttcaattcaggttaccgattatgagctaaaaccgggtggaagaaacatcagggttactgaggaaacaaaacaagaatatgttgaccttgtagctgaacatatactgaccacagcaattcgtcctcaaatcaatggtttccttgaaggcttcacagagttagttccaagggatctaatatcgctattcaatgataaagaacttgaactgctgatcagtggtcttcctgaaattgacttggatgatctgaaggccaacacggaatatataggatattcagctgcatctcctgttatccagtggttctgggaagttgttagagcattcagcaaggaggacatggcgagactactacagttcgttaccggaacatctaaggtaccattggagggtttcaaagcgctacaaggtatctctggcccccagagatttcagatttacaaggcgtatggatctcctggtcgacttccatctgctcatacctgctttaaccagttggatttaccggaatatacctcaaaggagcaattagaagaacgactgcttcttgccattcatgaagctagtgaaggttttggctttggttgattggttcctcgggaggttgtaaagcgtgcactgggtcattggttttctgcttgacatgtacaggtatggaagtgattatttctttgccactaatattaatcatacaccctatatgttt

SEQ ID NO: 103916 - DNA, 11999 bp, Zea Mays
acgacacgcgcatctccctacctcgatacgattcttcgtcttctcttccccgcgatcgcgccagcgcccccgaaaaaccctaactacctggagcctcgacggcacctgccgcaggcgacggcgagcgaccccaggcggtggtagacggcgcagcgggttgccccttgtggaggcggacggcacggcgcaggtccttgccttcccggctatgcgaattgcggtatgaagctcaagcggcgacgcgcggtagaagtgcctccaagtataaaatctttcatcaacagtgttaccactgttcctcttgaggatgtagaattgccgctgaaggattttgcatgggaatttgacaagggggattttcatcactggttggaccttttcaatcattttgattctttctttgagagttatatcaaatcaaggaaagatttgcatcttgaagataattttcttgatgtggatcccccatttcctcgagaagcactacttcaaattctccgtgtatcaaaacttatattggaaaattgtacaaatagacacttctctagtttttttgagcagcatctgtctgcccttctagcatcaacagatgcggatattgttgaagcaagcttgcagacattaatggcatttgtagacaagtcagttgggaaaagctcaatacgcagtgcatctctcgcttcaaagttatttgccttatctcaaggctggggtggaaaagaaggtggtcttggattagtagcatgttctctacccagtgtatctgatccagtttccactgaggttggatccacactccattttgagttctatcgtgctgctgataaatcagagaaatcccagtgtctagagaaagagaacaagttggaagtaattcatttatcgaatgtcaattcgtgcaaggaggcagatcttgaaatattggacaggttggtcaaggattacagtgtgccacaagctttaaggtttcttcttcttacaagactgagatttgcaagggcttttgactctttaacatgtcgacaccagtatatctgtatccgcttgtatgcttttattgttcttgtccaagcaggccatgatctggaagttgtatcaacatttttgaacaatgaaccagaattcattgatgagctgttatcactacttagctatgaggatgagatacccgaaaagattcggatactgggagtcctttcattagtcgcactgtgccaagatcgacctcaccagcctactgtattgtcctcggtaacttctggtggtcatcggggtatccttcctattctcatgcagaatacagtggattctatcatcaatggttctatgaaatggtccataatatttgctgaagcacttctttcgcttgtatctatgctggtatcatcaacaccaggttctctagctctacaagaagcaggttttataccaactattttgcctcttctcaaagacacaaacacgcaacatttacatctagttagtaaggcagtgcatgttattgagagcttcctggattatcacaatccttcttcagcagtgttcagagatctaggtggactagatgacactattgctcgtcttaagctagaagtatctcaagttgaggttgattcaaaactaattgaccattctaccaatgaaggaaacgaggttgaaagttatccacctgtgcaagatatacaaccttcatgttctgaatccttgattttgtatcataggaagaacttaataaaagttttattacgtacaatatctctggcaacatatgtgcctggtagttctgctcgtgttgatggttcagaagagaatgtgttacctccatgtttatgtgcgatttttaagagaggcaaggacttcggtggtggtgttttctcacttgctgcaaatgttatgagtgatctcatacataaagatccaacatgctatactgttcttgattcagctggtttgccacaagcatttcttgatgccataatgtgtggtggactttacaactccgatgcagtctcatgtataccacagtgtttggatgcattgtgcctgaacaataatggtcttcaattggtaaaggaccggaatgctttaagatgttttgtgaaaatctttacgtctagatcatatatgaaagctcttagtggtgacacagcgggagctttatcaagtggacttgatgaattaatgcgtcatgcaccatcattacgatcctctggagttagcatgtttattgaaatcttgaacactatttttaaagtgtggtgtggtgtagactctatcccctataaggaatctgataattactctgcagttattcccatggatactgatgtggtggttgctacctcacagagtgagggtgtacctcctgaggtaggatgctcaggcgaaacagttgatgctcctttagatgctgtaacatcatcatccattgagttatttcttcctgagtgcatatgcaatgttgctcgcctgcttgaaactgttctgcaaaatgctgatatatgtaggctatttattgagaaaaaaggcatagaagctgttcttcaactgtttaagttgccatcaatacctgtatctgtctcaattggtcagagtatttctgttgcattcaaaaacttctcacctcagcattctgtttctcttgcacgagcagtgtgctcattctttagagaccaccttaaaataaccaatgaactgttgggttcgatctctggaactatgctggttggtagtgaacctgcaaagcaatcagctcttctgaagccactttctacccttgaagggcttttgtctattgccaattttctcctgaagggaactaccattatggtctcagaactggcttttgctgatgccgagatattgaaggaattggggaaggtttatattgaagtcacatggcagatatctttactcagtgattctaaggtggatacgcaagatgcagatcaagatgatttggctgaggaagcttcaatttctgaaagggatagtgatgatgacacaaatacagcaccactttcaagatatatgaatcctgtttcagcaagggcttctatatcaccgtggagcatggagcaagattttgtatcaactgtgcgatctgtttcccacatgcaccaccatggtcgacactcattatcaaggataagtgggcgcctaaatggagtgttgaatgcaacaagtactgatttggatggtccttgttttccagcagagacatcaaggcgtcatgatgctctaaagagaatccctgatgatgttgtttctgaacttctgaagaaattttgttgtaccatgcgttccttcctttctacccttgtcaaaggattaccggctcatcgtcggcctgactctaaccttaacccaaattcgagaagtcttgtgactgcactagctcaatttttccttagtgctcttggtttctctgggcattctactgctggttttgagatgtctttatctgtgaaatgccgttaccttggaaaggttgtggaagacatggctgtgcttacatttgacagtagacgtcgcttatgcaattctgcactcgttaatagcttctatgttaatggaacattcaaggatgttctaacgacctttgaagcaaccagtcagctactgtggacacttcctttctctgtccttgctgctgccacagatcaaggttcctctattaatgagaaggtgtctcacaattcctggctgctggatacgttacagagttactgtaaatttctggaatattatgtgaactccacgttcttattgtctccatcctcttctcataatcggcttcttgtccagcctattgtaactgagctgtcaattaatctattccctgtgccttcagatccagaatcatttgcgcgcatgctccaatctcaagttcttgatgcagttcttcctgtttggaatcatacaatgtttcctgtgtgcaacccagcttttgttacctccctggtgtcaattatgaacaatatatgctctgttgttggagatatgaagcaaagccgcagtagtgttggagttgccaatcagcgtgttactggcccccctcttgatgaatctgctattgctacaattgttgaaatgggattttcaagggctagggcagaagaatctcttagaagtgtgagaactaacagcgtggagatggcaacagattggttattcaaccatccagaagattctgtccaggaagatgtgcagcttgcacaagcgttagctttgtcacttggaagctccattgaaacacccaaggaggatggaagcaataagaatgatacagtcattgctgaagaaaaaggtgtatttgtgcttcctttggatgacatccttactgtatcgaccaagcttttccagtctagtgattccaccttggctttcccattgactgaccttctagcgacactgtgcaaccggaataagagcgaatactgcaagcgagtagtattgtatctttttgagcagttaagacatttttcgtcagatgccacggatatgggtgctttgtattctgttgctcatgtgctggctttgcttctgagtgaagacagtggcatacgtgaaactagtgctgaaaatggtgtcatctcccaagttcttaacatattaggaagtcttaaatcaaggacagaccagacagatcatacttggaattctatcagtgctctgttgcttatattgtataacatgctacaatttaatccaaaactcagtatggaaacaatggatggtatatccaagtcaatttctgatgcatccagtgctgacagcgaggaaaatccattaccaactgctgaacatagaactgaaattattgattcagcagatgatgcaagtgcaaatgtttttaaaaagattttagggaaatctactggctatttgaatgatcaagagagccaaaaggcactggttttctgctgtgaattcattaagctatgtgtgcctgcaacagttatgcatgctgtgcttcagctcagtgctcgcttgacaaaaacacacgcgcttgctgctctattctttgaaagtggtgggttagcatctctcttaaatctcccaggcacttgcatctttcctggctttgagaccttagcatctgctattgtgcggcacctcattgaggatccccagaccttgcagagtgccatggaattggagatacgacagtcattaagtaaccatggcagtcgtactccaagctcatttcttacaaatatggcaccactgatatctagagatcctgtgatcttcatgaaggctgcaacttcagtctgccaattggattattcaggagggagattgaatgtagtcttgttgaaggacaaggagaaagacagagagaaacagaatgttcctgtaacagaaagtggtgtgccatgtaatgagcctgttcgggtgactgctgaggttaagacggttgatacaccaaacagatgttcacggaaccacaaaaaggttcctgctagtcttcctcaagtgattgatcagcttcttgagatcatcatgagctatccatctgcaagcaaagaacatgggtttgatggttattccctgttgactccaatggatgttgatgaaccaaatacaaagggcaaatctaaagttggtgatggccaagaactggatggtgatgctttctctgagaggtctgccttgctatcaaagtttgcatttgtccttaagttgatgagtgaaatactccttatgtatgtgcatgcagtagggataattctgagacgggatacagagatatcagtgtcacgaagttgcgctcaaggtgctggacacagtggtttactgcatcatatattctatctgctacttcctctaccttcagtcaaaattgctgatacctcagatgattggattggtaatttgtctgagagagcttcctggttcttggtagctttatgctgcagatctgctgaaggtcgtagaagggttgtttctgaaattgtaaaggcacttaaccaattcattggttcagcaagcaacacctccagaggatctttaatacctgacagaaaagttttggctttctctgagcttgtgaattccatattgtcaaggaatagtcagagcaatttgcctgttcttggctgctcacctgatattgcaaaacctatggtagatggtggaatggtgcaatctctttctgttttgctgaaagtaattgatcttgaccacccagatgctgtaagggttgtcaacctgatattgaaggctttggatagcctcactaggactgcttacaccaccgatcaagtcctcaattcagatcgatttaccaagaacagattaccagggtcacatgaacaaacacatgaagctgatgacattgtaatccctgaacaaactacatacgattcacatcatcatactaatgacatcgaatctgcaagtcagcaagctcaagaactgtctcatgttggtggaaataataacgaaaaccttgaccaacctgctgaacaagaaatgggagttgatctagcagacaatagtacttctaatggcaatcctccaacaagagctgtgcagttcatgcgggaagaacctattgaaggtaatgtaatggctcctagtactgatattggtttggctttctcaatgcaacatcaagttgatggaatgggtgtggaagacgaggatcttggggaggaaagtgaggacgaagaagatgaggaaatagcagctgagggagctggtttgatgtccatagctgacacagatatcgaggaccaggagaacaatgcaattggtgatgattacaatgatgaccttatggatgaagaagatgacgactttcttgagaaccatgttatagaagtaagatggagggagagcttaactcgaatggattatgatcatcatctgagattttccaggggtcgtgcagactccagtggttttattgatatatcttctgagtcatttcatggtgtggggacagttgattcatttaatctgcatcgttcgtttggtcttgaacggcggcgccaaatcggaagtaggtcgcttcttgatcgaccaaggaccgatgtgaatgcctttcttcatccactgcttgtcaggccagcacagtctagggagggaactaattcagcgtggccctctggaggaacttcctcaagagattttcacatgctgtcttttgacatcccctcgtacatgttagatgctggcttttcaccagaaactgctcccccagtgtttggtgaacgtgttgtcagtactgctccaccacctttgatagatttctcacttggtatggattcccttagaattaggcggggccctggagataatttgtggaccgatgatggtcaaccacaggcaggtaatcatgcagctgctattgcccaggcagtggaggatcattttgtgtcacagttaactgtggctaataattcaaatagtgctcctcaggtgcggcctgaacagactggcaacggtgcgaatgcgcactcagagttaccagatacaggaaatgctgaacctgttacaaccgatccactttctcaacctgttggtcggcatcagctagtttgtactgttaaccaaggacctgtccctgctaatgatgtcctctgtcctacagatgtgcacgtaaatcagcaccttgttgattccatttatgatagccgcgttgtagaaccggtgcagcaaacagcagccggtgatcctaacactatacctcagagtgatgaaatgatgtgtattgctggtacacagcttggtggtcatcctgaaagagattccttgtctggtaatggaagttatggtaatattatgcaaaatgagattgaagcacctcaacaagttcacttgggtaatgatcctagggaacccccatctgatctggagtcaagttgccatgcacttgtcacttctgcaagtgctgctcctgagctgagtgatgctcatgtagattcttcagcagtcaatgctgatgttgacatgaacatcgttgatattgctgaaaatgaagttgggaactcagctcctgcttctgatggcaatgatttgtcttctaggagatatgaagatgctcttcaagagcctcagacagtgcaaactaatgctattaatgaggcctccagcgctaatgaaattgatcccacatttcttgaagcattgcctgaggatcttcgggcagaagtccttgcttctcagcagaaccgttctgccccagctgcttcctatactcccccagctgcagaagaaatagatcctgagtttttggctgctcttccaccagacatacaggctgaggttctagcccagcagcgagcacagaggattgcccactctcaaccagctggacagccagtagatatggataatgcttcaattatagcaactttccctcctgatttacgtgaagaggtgcttttgacctcatcagaagctgttctgtctgcccttccttcagctttacttgctgaagctcaaatgctacgggacagagagttgagtcgctatcgtgctagagggagcctttttggtggaagctacaggcttggagggaggaggctgccaactgataatcagacagttatagacagagctgttggtgttactgtgggtagaagggttatttctactacatgcagttcaaagggtaaagatgtggaggggaccccacttctagactcagaagctcttcgggcacttattcgccttctgcagcttgctccaccactcagcagaggccttcttcaaaggcttatgtccaatttatgtgcacatagtgtcacacgtgtcaccttggttggccatctgctcaacatgattaaacctgaatatgaggggcttagcgtatctgattgcatggctacatatagattacatggatgtcattggaacattgtttatgcacaatcttgctctgcaaatggtgtaccaccacttgtaacacgccgacttcttgaaatattgacatatcttgcttcagctagtccttctgttgtggatcttttgatctatttcaatccttcagctagtccaaactgtttgacattacagcacaataaagagacatctcaagaaagttcaatgcagaatatgatgccaccatattcaaaggcttatacacctattatattgcttcttaagcttctaaataaacccttatttctgcggagtcgagtataccttgagaaggtgttgtatttgcttgaagtagttattaacaatgctgcatcccaagttgattgtccacctcactctgtacagataactaacaattcagatattgaattcgttgatgggacaccatatcaaacacaggtggaaccatctactttggaacaaggtcatatcccggataataaccaaagtagagatgttgaggtcccaccatcttgtgctaaactggatgttaatgtgcatgcaatccttacccaacttcctgatgctgaattgcataatctgtgcaatattcttgcacttgagggtcttccagataaagtgtactcacttgcggcagaggtggtgaaaaaattggctagtgttgcagcatcgcatcggaaattcttttccattgagttagctggtgttgctcagagtttaagttcttctgccgttgaggagcttgtaaccctgaagaacactcaaatgcttgggctcagtacttgctctatggctggagctgcgattttgcggatactgcaagtcctatctacactaacttcgtgtgtgatggatagtagacatgagcaagatttaggacaggaagagcagtcttttttgtgggatctgaatgctggtcttcaacctttgtggcaagagttaagtgattgtataagtgccacagaggcaaaacttgtacacaattcatcattcgcttcccatgccccatcggtggatgctttagcagttagtgcttcatcatctgtttcttcaccgcttcctccaggcactcagcgcttgttgccgttcatagaatcattctttgtcctatgtgagaagcttcaaacaaatcaaccagttgcacaatcagattacactgttattgcccctgaagtaaaagaatctgctggaagttcatcttcaccttcactgaagactggtggaacttgcaatgttacttttataaggattgctgaaaagcatcgacggctgctcaacgttttcattagacaaaacccaagcatactggagaagtcactttctatgatgttgaaagtgccaaggctgatagattttgacaacaaacgtgcttactttcggtcacgtatcagacagcagcatgatcagcaccttccagctcctctacacattagtgttcgcagggcttatgttttggatgactcatataatcagttgagattacgtcgtacccaggatctcaaaggtcgtttgactgtgcaatttcaaggggaagagggcatagatgcaggaggactaactagggagtggtatcaactgctctctagagttatttttgacaaaggaactcttcttttcactacagttggaaacaatgcgactttccagcctaatccaaactcagattttcaaacggagcacctttcttacttcaagtttgttggtcgagtggttgctaaagcgttatttgatggccaattgttggacgtccacttcacccgttcattttacaaacatatcttaggtgctaaagtaacatatcatgatatagaggctattgatcctgattactacagaaatttgaagtggatgctggagaatgatgtaagtgaccttccctatttaacatttagcatggatcctgatgaggaaaaacatattctctatgagaagaccgaggttaccgattatgagctaaaaccgggtggaagaaacatcagggttactgaggaaacaaaacaagaatatgttgaccttgtagctgaacatatactgaccacagcaattcgtcctcaaatcaatggtttccttgaaggcttcacagagttagttccaagggatctaatatcgctattcaatgataaagaacttgaactgctgatcagtggtcttcctgaaattgacttggatgatctgaaggccaacacggaatatataggatattcagctgcatctcctgttatccagtggttctgggaagttgttagagcattcagcaaggaggacatggcgagactactacagttcgttaccggaacatctaaggtaccattggagggtttcaaagcgctacaaggtatctctggcccccagagatttcagatttacaaggcgtatggatctcctggtcgacttccatctgctcatacctgctttaaccagttggatttaccggaatatacctcaaaggagcaattagaagaacgactgcttcttgccattcatgaagctagtgaaggttttggctttggttgattggttcctcgggaggttgtaaagcgtgcactgggtcattggttttctgcttgacatgtacagattttgaaggcaattgagatggtcagtgctatgcataacatagatcgatccattggtctttttaggagtgctcatgctgcagtagggatctaatttattattccggatagtcgatgagtatgtcgatcgggttgggtacagtagtagagctctgcgacaagagcgctgatacaactagcttccttttgccttctaattaaaaggttgaatgtaaattcgtttaatgctgataccagttctgatgatttttgtactggttcctccgattctggaggccagtgcaatttctgcaaataaataagccttctggtgaagcaatggttcttatcggtgcgcgttctcataaagctaaagtgttcagcattttctctttattatcttgggcggaagaggttacggttcgttatgtttgaatcacattatgaattcgtatcctttatttggtattttttttgtcgagaggaactctatttgttgtttattcggcgcttttcttcgaagatgggacatgagatgaaagtaaattggatgcataataaagggtccaagtgagaaatggtaaaaaa

SEQ ID NO: 103917 - DNA, 120 bp, Zea Mays
cttattgtgaaaatatgcattttaaatatgttaataatattatagattttattcaaaatttttggaataattattatgatgtttagaaattttaaatatatttatttatattttaaatag

SEQ ID NO: 103918 - DNA, 1719 bp, Zea Mays
atggcttcgacctccgttcctgagttaaccgcggacaagaaatgcgacaaagccatcgcggatacggcggcaccacttacttctcagggacactccgaagaaccgactgggaaagtcagcacactagtgcctgctttgccggttgtaattgcagcaggcgatggggctgcatccagtggggtgatagaaaacagaaatggcatggacaattctgctgatggttctttgaagcgggatgacagtgaaggtgctgagaagagctcgctgcgggggagcgtcaaggatagctcggtgtcggctaaatgcagtgacagggcgagcagcctgtcgaaagccagtgggagcgccaagatcagcggtcaacctgctgacatgatcgagagtggcaagagtagtctctatcgggccagtggtggaagtgatctgagtgatgagagcacctgcagtagcatatgcagcagtgtcagcaagcctcacaagtcaaacgactcaaagtgggaagcgattcaggttgtccgaaccaaagaaggttctgtaggtctaggtcatttcaggctgctcaagaggctcggttgtggtgatattggcagtgtgtacttatcagaacttagtggcactaaatgctattttgccatgaagatcatggacaaggcgtcattagcaacccgcaaaaagctgcttagagcgcagactgaaagggagatattgcaatgcctggatcatccttttcttccaacattgtacactcactttgagacggataagttctcatgcttggtgatggagttctgccctggaggtgacctacataccctaaggcaaaagcagcctggcaagtatttccctgaacaagctgccaagttttatgtagcagaggtgcttcttgctctggaatacctgcacatgcttggtatcatataccgtgacttaaagccagagaatgttcttgtgagggaagatggacatatcatgctgtcggatttcgatttatccctccgatgtgctgtgagccctactcttctcagatcttctaaccccagtggggataaccaaaagggcaacccagcttactgtgtgcagcctgtgtgcattgagcctgcctgtatgcagccttcttgtgtcacgacaaccacatgcttctctcctcgctttttctcttccaaatccaaggagaaaaaagataaaaaggcaaaggcagacttggcaaatcaggtcagaccacttcctgagcttgttgcagagccgacagatgcaaggtctatgtcttttgttggcacccatgagtacttggcacctgaaattataaagggcgaggggcatggaagtgctgtagactggtggacatttggcatattcttgtatgagcttctcttcggcaagacaccattcaaaggttctgggaatagggcgacattgttcaacgtagttggacaacccttaaggttcccagaatcacctgtagtgagttttgctgcaagggatcttattaggggattgctcatcaaggaacctcagcatcgattagcgtataagcgtggagccacagaaataaaacagcacccgttctttgaaggtgttaattgggcattaatcaggtgtgccactccacctgatatccccaagccagttgagatccctcgttctgtagcttcatcaagccagaaggctacatcagccgctgagaaaggctcagattatcttgaattggagtttttttag

SEQ ID NO: 103919 - DNA, 397 bp, Zea Mays
gggcatgtcctcggatagccatcctcatctatattcaaacttatatgtcattacaactcttatatgtatgatgaaactaccttagtctatctcttacccatcctcatctatattcaaacttcattatgcaaacaatgcagtctacagtacaaaacagtaattttgggtaaatcatggatagactgctgtagacagttttataagaaacaactttgctttttaacaccagccccgcatggatagatgcttgtggttttactccaatttacacccaggtcaggtcaaaagctgcatgattttgataacatgtaatcccctctaaaaatgaaaatgaagtaccgtggagaacttcccacagtttttgccttgaaaaaaaaacttcgacaacaagttccag

SEQ ID NO: 103920 - DNA, 9249 bp, Zea Mays
cagggacatcggtcccggcggtgggtggcctaccctcaccaagaccaactacgtcgagtgggccgcggtgatgagggtacggctccaggttcgccacatgtgggaagcagttcgttacgacgacgtcgactaccacgaggatcggcgggcgctggatgccctcattgctgcagtcccgcccgagatgcagttttcgctttcccagaagcgaactgccaaggaggcctgggacgccatcgctgcgacccgcatcggcagcgatcgtgcccgcaagaccacactgcaggcacttcgcaaggagtgggagaacctggccttcaagccaggtgaggatgttgatgactttgctcttcgcctcaacactctattgcagaagatggtgcagttcggcgacgacacctacgatgaggagagagctgttgagaagctcttccgttgcatccccgagaagtacaggcagattgctcgctcgatcgagtctctgctagacctctccacgatgacgatcgaagaggcgattggtcgcctcaaggtggtcgacggcgacgaaccacaggctctctctgggcctatcactatcggcgggaagctacatctcactcgggagcagtgggaggcctgccagggtgacaagaagggggagtcctcctcgacacgagaccgcaaacgcggcaaaccgcgcaaggcgcgtggaggcgcccaggccggggcgcgaggacatgctgagggtggtgcacgtggaggtgcccaaggcggcgccgtcggcaacaagaagtcggcacgagacgacggctgccacaactgcggcaagcttggccactgggccagggattgtcggcagccacgacgtggccaggccaacgtcgcacaggcggaggcggaggaggagacccagctcctggcacatgcaagcatcgagccatctccagcggcaccggccgcagcggcactcctccaccttgatgagtcgaaagcacgcgctttcctcggcgacggctccaacaaggacatgatcgaaggatggtgcctcgacaccggcgccactcatcacatgaccggccaacgggagttcttcaccgagcttgactctagcgtccgaggctccgtcaagttcggggacgcctccggcgtagagatcaagggcgccggctcagtcgtcttcaccgccgcgtctggtgagcacaggctgctcaccggagtctactacatccccgcgttgaggaactctatcatcagcttgggacacctggatgagaacggttcgcgcgtggaggtcgagaacggagtcatgaggatctgggatccctctcgtcgccttcttgccaaggtacacaggagtccaaatcggctatacatcctcaatgtgaaggtggcacaaccttgctgccttgctgctcgtcgagacgacggggcatggcagtggcacgagcgcttcgggcaccttaacttcgaggccctgaagcggctcggtgccaaggagatggtacgaggcctgccgtgccttgaccatgtggagcaattctgcgatgtctgcgtgttgacaaagcagagacggctcccctttccccagcagtcgagcttccgagccaaggagaggctcgagctcgtgcatggggacttgtgtggcctggtgacaccagccacaccaggaggacgacgctacttcttgtcgctcgtcgacgatctctccctctacatgtgggtgatgatccttggcagcaagggagaggctgtgaacgccatcaggcgtgtgcaggtcgctgcggaggcggagtgcggccgcaagctgcgcgtgctgcgcaccgacaacggcggcgaattcacggcggctgagttcgcgtcgtactgcgcggatgagggcgttcagcgccactactccgcgccatacagcccgcagcagaacggcgtcgtcgagcggcgcaaccagacggttgtggggatggctcgggctctcctcaagcagagaggaatgccagctgtcttctggggagatgcggtggtgacagcggtttacatcctcaaccgctcgcccaccaaggctctcaacgggatgacaccgtacgaggcttggcatgggcgcaagccggcggtctatcacctacgggtcttcggctgcttcgcattcaccaaggagcttggccacatcagcaagctcgacgataggagcaccccggggctgccaatgagtatctccaagatgaaaaccaagaagccaatcggtacccctactagcagcaagctaatggcatctgcattcaaggtcacatcaagcaaggatgaacttatggttttaatgcaaaaatcagctgaagttgtgcaacctgcaattgcaagtgctactgctagtgtaaacgcaagtgcaagttcaagtgtaagggcaagtgcaagtgcaagcataccagcaagtgcccaagcaagtgtcggcaacgatgaaaaacaagtagatggccagattgggaaaaggctcacttcatgggtctggcaacatttcacaaggtatgaaatagatgttgagcaacctgatggttccaatgttaagcaaaagtgggcaaaatgtcttcgatgttcacataaagctaaggttgatgcttcaaatggtacaaaggcttttagtaaccacttaaaattgaaacattgtcttgtgaagggtcaacaacagctaagtcagagtgggaatgacatagcgacatataaatatgatgagaaagccaatgaggatgggagccaacgtaataatgtagaagttctctttccaggatctaggttgtcccagcctcaaggtgatggcacagccacagatcatgctgccacacgtgaatcagttgcatcagcttcgtctgatgtcgcagcagctgctggttctaccataaaagataaagctattgctgcactacccgcagtattagctgagatggctaaggatactaagagaaaggctcgatcttcagacccaggtttgaacctgctgagaggatatggaaggcttgggctccagctaatctgcttatacagatcaatctccagcagcttgcacaacaaaatcatgatggcaacttcatggattggaggtttgtcatggttgtctgaagtgcgggcgaggggtgccgttatgacggtcacgctcccgctcccgccctctggccttccccctcccgacgcctcgtttccaccccccactggcccctcgccggctcctattccgagtccggcgaccacccctctcccctcgccggcgtcgcaggacccttcccctggtgtccagcgcggcggacgtccggaggtgctgcgctacgcgccgtgtcctccttcctctggcctctcgccggctcttactccaagaccggcgaccactcaacttccctccccggcgtcggaggattatccccttggtgttgtgcgcggcggaagatcgaaggaacagcgttggctggaagacggtggagcttgtgcctcctctgctgcgtcactagttcggggtgacgtggggaagaaatcctatagggaggctctgttttctcccaggcctgctgcgtccagggacgttgatggttgggtgacggtggttcgtcggcgtccgaacaccttgaagtcgctccccagacctgtcccggtggatttgcgcggaagatgcttcaattgtttctcgtctgagcaccgtgcggctgtgtgccgtaatcgcgtgcggtgttttttctgccggttgccggggcaccgtgtgggcgtgtgcccgcgccggcggacggaccctcccatccctggacgcactttggtgtggcgacctgtggctatgagaccttcggagaagaatgtctgcgatcgagatatggctgtggctggcgggtctggacctgttacaacgactggtgaaggcgcgaggaagagaactcgccgtggacagaggaagaggaggtcgggcgctggggagcagttgcctcctccgcctgccttcggcctggataagccggtgagctttgtcgggcgctgtggaagaattgatcgggctgaggaggaactccgtcgtgcactgatcgtcagtgttgtaggcagggaggattctggctgcgccgtggaggtgcgtgacgcgatcgcctcgaggttttgccttgaagcagggtcgctccgcatacgtcgtgctgcgcctaattctttcctagtcttcttcccctcggttgccgtggctgatcgggtgattggggaggggcaatctcttcatgtccctccgctcaggttgcatattcgaaggtggtctcgccaggctttcgcttctggaggtggaaagccgcttgtgcccgttggcgtcgaacttcgtggaattcctgcgcatctctgggggattgaggctgttcttggtgctttctgtttgattcaaggttttttgcctggcttggtcatggaggaagacatgtctgttctcagactgaaggtctggtgccggtcacctgtgctgctgccggcggtggtggatctccttgctgaagagccgatggtctgtggagaggatgggagctgggttcctagcacgttggtgttccctgtttctgtggtggtgcttcattctgatgggagttcagcttccggtgtggatcctcctgcgccatccccttcgggctttgtcgacgaagatagtgatcatgagcatcatatggaacggccagggcgccctacgtcttctgttcgggtcccaattcatttgcgtctgggtcagcgcagtcgttctgggctgatggatgatatgtctgttatggctgttcatcaggatttggagcgggaggcgcctggtcaccctccagatttgggatcagttgatgccctggctctcccggaagtttcggttgcagagctggaggcgcctggtcaccctccagtgttagcgttggatctggcagaggatttggagttcagttgtcaggagggctggtcttcacatgttgttatctcgccggctaggccttgcttggacaatcctttggtgggggaccttatgaccggactggcggaggttgtcactgctgggcagcatggttccgggttctcctatttgctgaccgatggtgtttctgctaatgtggaggaggcagtcactgctgggcagcacggttccggggtctccccaattggtggctgttggttctcctgctgttgtctctgccagggtgcggagatggagatcaaagccacccgtgttcaaagtttattccagaagaagattatctcaggctcaggtggtccaggacgaccttttactgcaatctgtggtggaattggttccacctttggaggagttcaagtctgcggttactaagccttctgatggcttgttaccaccccctccccaccgaaggaccaaaagcaggaaaaaggtaatgccaagtgattttcggccacggagaagtaggagggtggccaaattccctccagaacttggatccaatgcggctgcacaagtatgtagacatctgggtttttgtgatgaaatggagaatatgtctcttgatgatgcctgcaattatgcaaagttatttgattctgggctttcgagtgcacatgtggctgctttggcagctttgtttggttgggaggtccctcaggtgggggcgatctgatttgtttccaatggagaatggctgttttcttatttggaatgtgaggggtctaaatgatcgtgccaggagggactcggttaaatctctggtccttgatatcaagccttccattgtttgtctacaggaaaccaaattgtgtgctatctcagactttgacatgctgtctattcttgggactggtttcagtaattttgtgtatagtcccgcccaggggactagaggaggagttctaattgcttggcgtgatgggtcttttgtttctgtggcttcggttgtgaagaatttctctgtctcagtccagtttcaggatgagtctggttcctcctggtggttcacaggtgtgtatggacctcaccaggatagttttaagcaggagtttattcatgaattgagaacggttcgtgatgaatgtgtggggccatggtttttgtgtggggattttaatatgatcatccgggaagaagataagaataattccaacattaataggctattgatgggtcgcttcagggggtttgtcaattctgtggagctgaaagagattcctttgattggcagaagattcacttggtcaaatcagagggaggtgcctactcttgtgaaattagatcatgttttctgcactgcggactgggaggatttttttccagattgttctcttcacagtaatgctactgctgtctcggatcactgtcccctaactcttagatttagagagggggcgtggggaggagaagatttcactttgagagtttttggccaaaaatcccggggtttttggaggtagtggctgcttcgtggagtctccctctgcagaatttttgtccatttgagaagatatctttgaagtttaaaagattagctaagtgtttgcagtcctggggtcacaaagaggtggggaatgtcaatgcccggttgggtcttgcccgtgaggttttgcataggctggagatggcgcaagatatcagatccttatccagggaggagctttggctttgggggcagctgaaacagcattgtctggtattggcgtctttgcaaagaactattgcacgtttgcggtccagaattcaatttttaaaagaaggagatgccaatactaatttctttcaccgacaggctgtctaccgtaaaaaaaggaagttcatttcaaatctagaggaggatggaagggtgtacacaaatcatgaggatattcaaggagttctggaaggtttctttaccaaccttctaggcactgattttccaaggtctgttactattgatttattgggctgtcataggcctgcagcggatctcagtgagctggatagccctttctcggagaaggaggtgagggatgcgattgctgacctgccttctgacaaggctcctgggcctgatgggtttacagggaggttttacaagacctgctggagtattattaaggaagatctgctggctgccctgaattttctgcaccaaggaaatgctcataatcttggactattgaattcagcctatattattcttctccctaagaggtccgatgctatgactgcatgcgattataggcccattagtctcatccacagttttgctaagttggtcaccaagctgctggccaacaggttgggccctcatcttcatgagttggtggcagccaaccagagcgcgtttgtgagaggaagatcaattcatgataattttatgctggttcagcagtctattaagtcgctgcacaagaggaagattgcgggtctattcttaaaattagatatttcaagggcattcgattccgtgtcatgggccttcattattgaaattcttgtccatcttggctttggtccaatctggcggaatcttatttcctccctaatgttcacgtcttctacgcaagtacttcttaatggctcgcctggtgctcgtattgctcatcggcgaggccttcgtcagggtgatcccctttctcctatgctgtttgtgatggtcatggatgttcttaatagtctgttcagggcagctgaaagcagggggctgttacaaggattggaggcagctgggattcggaataggctctcgatctacgctgatgatgtggtgctttttgttaaacctttggtggatgatctgaattgtgttaaattgattttggactgcttcggtgaagcaacggggctggtaacaaatctgcgtaaaagttttgctattccaattagatgtggagggctggagagtcaggctggctgcaatatcttgcaatgcagttcgggatcctttccgtgcagctatttggggctgcctatctctgataaaaagctgaggaaaagggattttatggtgtgggttaataagattgctgaccggcttcccaactggaaggctcgtttgctgagtctggctggtaggacagcattagtgaggcatgtgctttcggcaattccagtttatatccttatggccatgagtgttcctaaatgggtgatcaagtccattgataaactcaggagaggttttctatggaaaggaaggaagaatgttaatggtggaagctgtcttgttccttgggagatagtaactaggcctctaaagtatggtggtcttggagtttctaatttacaattcaaaagttgggctctacaggtgaaatggttatggctgcaaagaaccgatccgtccagaccttggcagggaatgagtcttcctattcaacagcaagtgagacagtttttcaatctttcggtctttcatgtggtcggagatggaactagcactctcttttggtttgataaatggttgaatgggaaggctatctttgatattgctccagaggttgtctgtctggtggacagtagagtcagctcgacccggacggttgctcaagctttggacaactggcgttgggttagggatattgggagtcatctttctatgcttgggctgcagcagtacttaaaattatgggatgagattggacaggtgactctttcacaggaggcggacaggcttgtttggagacacacgacttctgggcagttttcctcaaagtcttgctataatgccttcttcctggggtccattttctttgagccttggaaacgattgtggaagacttgggcccccctaaatgcaaattttttctttggctggctataaggaataaatgttggactgcggacagacttcagaggagagggttacattacccggcgagttgccccttatgtgatcaggagcaggaaacaatccagcatattctatgcaactgcagtttttctagggatttttggcatctcattttgtcgtccatcgggtttggtaacttcactcctattgctgctgaacagtcctttgttgcatggtgggagagggtctctaaaagagtccataggtgcaagaggaggggtttcaatagtgtcattatccttggagcttggtgcttgtggctctctcgtaatagggctgtttttgatggagtgagcccttccattaatttgacaaagaggttgtttctagatgagttgattagttggagtaaggcgggagcgaagcatttagacagtttgggaattattgtcgctttaaatagggtctcgtagggcccgtcaggcttccccttgtgggggaggcttgagggtttggtcttggtgttgtaattcggtccatt

SEQ ID NO: 103921 - DNA, 615 bp, Zea Mays
atggatgacgatcgcgcacatcacgcacaaactgtcgccgccggacggagacctcgactggccaccaccgcaccgaacgctgccgtggaggagcaggccccgtgcccaacgtcgtccgccaggcacgcccccgccacgccgtccaccaggctcatcctcgccgcgccggccgcggggctggccgaggccgcgtcgttcaccgggctccgcgaggaggggatggccgaggacgcgccgaacgccggtctggccaaggtctcgtccgtcgggcttgcctccgtcgcgccgtatgccgggctcgcccccacggcgccattggctgggttggacaccgccgaggccgcgccgaccgccacggtcgacgaggaggtggtagctgaggtcgcgccgaacgccggtctggtcgaggcgtcgtccgccgcgctcgcccccgtcgtgtcgtacgtcgggctcgcccccgccgcgctgttgcctggactggccaccgcggggctggctgaggacgcgctggccagggccacgccgaccgccgcgctccgcgaggaggtgctggccgaggcgtcgtccgccgcaatcgcccccgccgcttatgctggtgctccatttcgtcggtga

SEQ ID NO: 103922 - DNA, 386 bp, Zea Mays
atggctgtgtcccgcgccgtcgtcctgctcctcgtcatcctcacgggggctgccgcgttctcgcccacggattccactcccgaggatgccgataccaagccgagcatcctgactcccattgcgcacagcccgctgggatctttcgaaggcgccgatgggcccgtcgccgacaacgccatcgacgacgatgacgcggcgcccgtgggctcacccatcggcaccaccatgacggagccggagccgcagctcgcgccccccgggctccccgatagcagcgccaccgctgcttccgtaggccacccagtcgctgctgctgctgttgccgcagctatggccaccgccagcgccatctttgccttgtgagaggagggtgcatgtgactgtgt

SEQ ID NO: 103923 - DNA, 381 bp, Zea Mays
atggcttcttgctaccggaaagaaaatcgtcatccatggaagagggctggaggtggcgtgctacaggaaaataaaataaaaaaatgcagggctagggtgagctcactatgggagaagatggagaggggatggaggagaggcagccatgagaggagcaggggaatggggtcgccgacctaccgcaggaggaggagggtgcggcttgtgttgctgctgcgtgcaagaaatgagaacggcagtggatggagagaaagagacgtgagggagaaggggatttgggaggggcggcggctgaaaattccagagagaaggacgcgtgggaattggccaatgccgatcaatggatttttgccaccaatagtagtgttggcgggtgggtga

SEQ ID NO: 103924 - DNA, 339 bp, Zea Mays
atggcagagcggatcatgttgccgaagtggtcgaggactggcgagacatgtgtccaagacgtgggggagatgtatggagtacgctactctcataggttggtgtttgagcctcaaaaccacccagcgctacagatggcaggtttcgctgagtttgggccccaaagcttggcagtgcagtttcgacgggaatcagaggtggcatgtggtgtcatcgtgaagggtgcgtcgaggcaaagcaactttgtgtggagcacgtggccattggatgcatatcctaggagttggtccattttgcccctagttaagtggatgagctctatgtatctagcggtagtttag

SEQ ID NO: 103925 - DNA, 1392 bp, Zea Mays
aagtcattctaagccatcccagaagaagaatacatatggttccatgcatatatagccttttattggcacaacaaagtgcagttgcattgcatgactaccatcgtcggtgatggcaccgcagacggcaacgcgggtcgcctccggccggctcgtgttcggcgcgccaacaacaacagatggcaagctgcaggtaaaaggtggaagcaggctgagtgtgaggagccttgacaataatggcaggcgtgttgcggtggaagccgtcaacggcgctgccaggccgaacggcgcagcggcggtggccgacgtccgccggcaagtgcccgcgccgccgccaccggaaggcgacggcgacggcgtcgccttccggctgggtaagtttgcggaagggaggctcgtgtacaggcagcagtttgtggtcagatcctacgagatcgggcctgaccgaactgccaccatggagaccctcatgaacctcctgcaggagacggcactgaaccatgtgatgtgctctgggctcgccggagacggtttcggcgccacacggcagatgagtctcaggaagctcatttgggtcgtcacaagaatcaacatccaggtcgacgagtacagcagatggggagatgtcgtggagatagacacctgggtcgcgtcgtcagggaagaacggcatgcgcagggactggatcatccgcgaccgcaacaccaagaacatgatcgcaagagccacaagcaactgggtgatgatgaacagggagacccggaggctgtcgaaaatccccgacgaggtcaggcaggaggtgctccccttctacctggacaggagcatcatcgccgccgccactggcggcggccgcaagatcgagaagctcaccgactcgacggcggagcacatacgatcagggctagcacccaggtggagtgacatggacgtcaaccagcacgtgaacaacgtcaagtacatcggttggatcctcgagagcgtgccgctggacgtgctggaggattaccacctgacgagcatcacgctagactaccgccgggagtgccgtcagtcgcagctgctcgagtcgctcaccagcatgacgacctcgtcgtcggcgccggccgagccgccgctgacgtcgagcctgtgcggctctgacctgtacagcacacacctgatacggcagcaggatgacagggccgagattgtcagggcttgtgccgaatggcgtcgcaaggagcatccacggtcgattgaacagctctgacaagcggttgggtatatactctgttttgtatttgcttgtttttgttttaagatttgtgtgtcttcatttgtgctttatgctttacttgattggaaaacagtagacaaagaattggggaaaaaacacttggatattttgatgta

SEQ ID NO: 103926 - DNA, 115 bp, Zea Mays
acatacacctattaattcaacagatataggaaactcggtacaaattctaacaattcaacttggatccttgcaaccgaaaaaaaataaaaccctacaacacaaaatcaaacccttc

SEQ ID NO: 103927 - DNA, 781 bp, Zea Mays
gataaccgatcaacggtcgagatccggccgagttgaataggtacgagcctctaatccaggccgcccaaagccaatcggacgaccaggggtctttcttcctcgctcagctacaggggtacggcggcgctgccccaacgacggtagcctacgtcggtgaacggcgcctcggtgcactggtgtcccatccaaaaaacggatctaatccagacgtacaagggaggacggcgaacatcatgggaggtgtcttaccggcaatcgcagaatgaatacccctggccacggcgcacagcggacatgcggaggagcatgcatttcgtcaacaaattccaagatcttcggccgccaaaccaccgcagaaagttcacctgcccggacctccacgcacggtgagactttccggtatgaatccgtggactatggtgacgagcccacagtgccggacccagcgaccctccagcgcacaggagcagccgcaaacacgcaactgccctaccggcaccgcaacagctgcccaggagcgatcccagtccgtcttcccaaccctgctacgcagggcgcgccgtggttaggcccccagaagcaactgctgcaagcttgagtggccctgaagccccgacgacgaccatggccatgcgtatggcgcaatttctttctctcctcagcgcggcgacgattttttttgttctctcttgaattcgtgctcgccggtgacctcacgctttcagatcgtgcgtggttaaggcttcaggggaaagcggtgtccagccatggcttgctagat

SEQ ID NO: 103928 - DNA, 782 bp, Zea Mays
gataaccgatcaacggtcgagatccggccgagttgaataggtacgagcctctaatccaggccgcccaaagccaatcggacgaccaggggtctttcttcctcgctcagctacaggggtacggcggcgccgccccaacgacggtagcctacgtcggtgaacggcgcctcggtgcactggtgtcccatccaaaaagcggatctaatccagacgtacaagggaggacggcgaacatcatgggaggtgtcttaccggcaatcgcagaatgaatacccctggccacggcgcacatcggacatgcggaggagcatgcatttcgtcaacaaattccaagatcttcggccgccaaaccgccgcagaaagttcacctgcccggacctccacgcacggtgagactttccggtacgaatccgtggactatggtgacgagcccatagtgccggacccagcgaccctccagcgcacaggagcagccgcaaacacgcaactgccctaccggcaccgcaacagctgcccaggagcgatcccagtccgtcttcccaaccctgctacgcagggcgcgccgtggttaggcccccagaagcaactgctgcaagcttgagtggccctgaagccccgacgacgaccatggccatgcgtatggcgcgatttctttctctcctcagcgcggcgacgatttttttttgttctctcttgaattcgtgctcgccggtgacctcacgctttcagatcgtgcgtggttaaggcttcaggggaaagcggtgtccagccatggcttgctagat

SEQ ID NO: 103929 - DNA, 758 bp, Zea Mays
gataaccgatcaacggtcgagatccgaccgagttgaataggtacgagcctctaatccaggccgcccaaagccaatcggacgaccaggggtctttcttcctcgctcagctacaggggtacggcggcgccgccccaacgacggtagcctacgtcggagaacggcgcctcggtgcactggtgtcccatccaaaaaacggatctaatccagacgtacaagggaggacggcgaacatcatgggaggtgtcttaccggcaatcgcagaatgaatacccctggccacggcgcacagcggacatgcggaggagcatgcatttcgtcaacaaattccaagatcttcggccgccaaaccgccgcagaaagttcacctgcccggacctccacgcacggtgagactttccggtacgaatccgtggactatggtgacgagcccacagtgccggacccagcgaccctccagcgcacaggagcagccgcaaacacgcaactgccctaccggcaccgcaacagctgcccaggagcgatcccagtccgtcttcccaaccctgctacgcagggcgcgccgtggttaggcccccagaagcaactgctgcaagcttgagtggccctgaagccccgacgacgaccatggccatgcgtatggcgcgatttctttctctcctcggcgcggcgacgattttttttgttctctcttgaattcgtgctcgccggtgacctcacgctttcagatcgtgcgtggttaaggcttcaggggaaagcgg

SEQ ID NO: 103930 - DNA, 2219 bp, Zea Mays
tgatctagcccgtccgaaggaaccacttcacactactctccgcggctctgccgtccgttctcctctcgccgccgccggccgcgcctccaccctcgcggcactcgcatggcggcgccggctctccgtatcactgcgcggctgggacttgcacttgacggtgccaccgccgcgagacggcgcgaggcctcggcgcctgtggcggtgccggccgcgccgtggctgaagaaggcggcggtccggtgtcagcgagccgtcggtgccgctgttgccgagaagaaggatgcgccggtatcggttgcgcaggatagaagcggcgacgggggcgcggcgccggagctcaccgtcgtgatgaagttcggcgggtcgtcagtggcctcggccgagcggatgcgggaggtggcagacctcatcctcagcttccccgaggagcacccggtcgtcgtgctctcagcgatgggaaagaccaccaacaaactcctcatggctggggaaaaggcagtgggctgtggtgcgaccaacgtctcggagcttgatgagctctcctttgtaaaggaattgcatcttgggacgcttgatcagcttgggctagatagatcaattgtttgtggtttgttggatgaacttgaacaacttcttaagggaattgctatgatgaaagagctgactcttaggacacgagattatctagtttcatttggtgaatgcatgtctacaagaatatttgctgcacttttaaacaaaattggagtaaaagctcggcagtatgatgcatttgatcttggctttataactaccgatgatttcacaaatgcggatattctggaagcaacttatcctgctgttgcaaggaggctacatgtggaatggattaatgatcctgctatacctatagtcactggctttcttggcaagggatggagatctggtgcaataactaccttgggcaggggtggtagtgacttgacagctacaaccattggcaaagccttgggattaagagaaatccaggtttggaaagatgttgatggtgttttaacatgtgacccaaatatccatcctaaggcaaaacctgtgccatacttgacatttgatgaggcagctgaacttgcctattttggagcgcaggttttgcatccacaatcaatgcggccagctagagaaggcgatgtacctgtgagggttaagaattcttataaccgtcgagcccctggtacccttatcactaaagcaagagatatgagtaagactgttttgactagcattgttttgaaatcaaatattacaatgcttgatatagtcagcacacgcatgcttggccagtacgggtttctagctaaggttttttcgatatttgaagacttgggcatctctgttgattgtgtggctaccagtgaagtcagcatatctttgacactggatccatcgaaactatggagttgtgaattggttcagcacaaaaatgaacttgatgatgtcattgaagagcttgagaagatagcagttgttcatctactgcagaacaggtcaataatatctttaattggaaatgtgcagaggtcgtctttgattcttgaaaaggctttcaatgttctacgaagaaacggtgtcaatgtccagatgatatcgcaaggggcgtccaaggtgaacatttccttggtggtccatgacagtgaggcaaaacagtgtgttcaagccctccactccgcgttctttgagaatggtttcttgttggaagctgatgagttggatgttctgcatgatggctttacatcgcattccaatggcacaatccacagccattagccgaggatttgatattcatctgtttggctactgtagtgccacttgtgatcaaatcctgatctttggtcgatatctaatgtttttatgaggctacgaaggattcggctttagagctactacccatcagaagtctaggaatttgttcagagccactacttaggattttggttagagattaatgatactgtttggttttctgtacaattgattgaaagtatatacttagttatcttggccaacctatcaaaccacggaggatgcaagcggatttgtccgtaaacctttaaggttagtttggaaacctcatttttgcaagggaaattagttcatttttttttgtgaaaataggaatcccaaaatggagtttctaaactagccataattgttacatgttactacataagccacaaaaaaaa

SEQ ID NO: 103931 - DNA, 955 bp, Zea Mays
caactattcataggctactttccttgagtttactatttttatttcaatctttggttgtaactttaccaattcaggttttttcgatatttgaagacttgggcatctctgttgattgtgtggctaccagtgaagtcagcatatctttgacactggatccatcgaaactatggagttgtgaattggttcagcacaaaaatgaacttgatgatgtcattgaagagcttgagaagatagcagttgttcatctactgcagaacaggtcaataatatctttaattggaaatgtgcagaggtcgtctttgattcttgaaaaggctttcaatgttctacgaagaaacggtgtcaatgtccagatgatatcgcaaggggcgtccaaggtgaacatttccttggtggtccatgacagtgaggcaaaacagtgtgttcaagccctccactccgcgttctttgagaatggtttcttgttggaagctgatgagttggatgttctgcatgatggctttacatcgcattccaatggcacaatccacagccattagccgaggatttgatattcatctgtttggctactgtagtgccacttgtgatcaaatcctgatctttggtcgatatctaatgtttttatgaggctacgaaggattcggctttagagctactacccatcagaagtctaggaatttgttcagagccactacttaggattttggttagagattaatgatactgtttggttttctgtacaattgattgaaagtatatacttagttatcttggccaacctatcaaaccacggaggatgcaagcggatttgtccgtaaacctttaaggttagtttggaaacctcatttttgcaagggaaattagttcatttttttttgtgaaaataggaatcccaaaatggagtttctaaactagccataattgttacatgttactacataagccacaaaaaaaa

SEQ ID NO: 103932 - DNA, 687 bp, Zea Mays
agtgtgaaatattttcctttgtactcaataagagacatgtttctaagaatttaagtcctttgtaatatggaaaattttcgatattgttaaatgacaattgactgaggccagagttggttcattatagcagatgatgatgatgcatcttggctttcgttcaaaaaaaaatgatgcatcttggcaaatttaattttgacctttctatataccaggaacttgatgatgtcattgaagagcttgagaagatagcagttgttcatctactgcagaacaggtcaataatatctttaattggaaatgtgcagaggtcgtctttgattcttgaaaaggctttcaatgttctacgaagaaacggtgtcaatgtccagatgatatcgcaaggggcgtccaaggtgaacatttccttggtggtccatgacagtgaggcaaaacagtgtgttcaagccctccactccgcgttctttgagaatggtttcttgttggaagctgatgagttggatgttctgcatgatggctttacatcgcattccaatggcacaatccacagccattagccgaggatttgatattcatctgtttggctactgtagtgccacttgtgatcaaatcctgatctttggtcgatatctaatgtttttatgaggctacgaaggattcggctttagagctactacccatcagaagtct

SEQ ID NO: 103933 - DNA, 734 bp, Zea Mays
agctatgaacttacaatttgaggaagtgtggacagaagcgtaaatgatcatgcaatactgtgtttgcaattgacatccactgctgcacggcaggctttcaatgttctacgaagaaacggtgtcaatgtccagatgatatcgcaaggggcgtccaaggtgaacatttccttggtggtccatgacagtgaggcaaaacagtgtgttcaagccctccactccgcgttctttgagaatggtttcttgttggaagctgatgagttggatgttctgcatgatggctttacatcgcattccaatggcacaatccacagccattagccgaggatttgatattcatctgtttggctactgtagtgccacttgtgatcaaatcctgatctttggtcgatatctaatgtttttatgaggctacgaaggattcggctttagagctactacccatcagaagtctaggaatttgttcagagccactacttaggattttggttagagattaatgatactgtttggttttctgtacaattgattgaaagtatatacttagttatcttggccaacctatcaaaccacggaggatgcaagcggatttgtccgtaaacctttaaggttagtttggaaacctcatttttgcaagggaaattagttcatttttttttgtgaaaataggaatcccaaaatggagtttctaaactagccataattgttacatgttactacataagccacaaaaaaaa

SEQ ID NO: 103934 - DNA, 171 bp, Zea Mays
atgagggcacaagaagatgaacaaggtgaggatgatggaaatgattcaagcaatgaagtggtggatccacaagatgacattggtgtgagtgatagtgatgaggcaaacgaggcggaagatgatggagaagagaatactacaccccatgatgagtttgacggtttgtgttga

SEQ ID NO: 103935 - DNA, 710 bp, Zea Mays
tatagagaatgcacccaggccgaacctatgtgccaggtccgagccaaccgtctcacccaggccggtttcgtccctcccgcacgctccggacagaaccttttcattttcccgcccccgcccctttttctccgtgaacggctcctccgcgaacggctcaacctcttcacataagttgcaatcacaccagacttgcagttgcaattataccagacagcagttgcaatcattgtttttgtttaacagatttttggacatagttatatagaagttgcaatcacaccagaccagcagttgcaattacaccaggcagcagttgcaatcattgtttgtttaacagatttttggacatagttatatagaagttgcaatcacaccagatcagaagttgcaattacaccagacagtagttgcaattattgtttgtttaacatatttttggacatagttatatagaagttgcaatcacaacagacccacagttgtaattacaccagaccagtagttgcaatcttgtttgtttaacagatttttggacatagttatatagaagttgcaatcacaccagaccagcagttgcaatcatattttttaacaaaatttttcagagttattcagtacttgcaatcacataagagcaactcagcagttgcatccacactacaccagcagttgcaattacaacacactatcgattgcaatcattttgttta

SEQ ID NO: 103936 - DNA, 930 bp, Zea Mays
aggccaaaatgcttctgaatactgggattctttcttgactagtgaagacaaaaggtacaattcaaccaacaaggagtagggataaagtcaatcatagcattggatcatcaaaaaattatatttatatggatggtcaaatgtgagattgaacatgagagagactgcaaatttgtctgatgcaaaaaaatcattgataagtcaaaccttcggataaagtcagttgtggcattggatcatctaaaaattatatttatgttgaagctgagaaggaggctcatgtcaaagagagagggaccgtctaaaagtattgtgcaagatatagagcatgcactcatcatatctaagtgatcggagtgatattgattggcttattagatggatattggcccagtttatctttcattttttctatagcttttagaaatttaccttgctcatagttcgtactataattaatatgagactcttgttttgtagtacgctagcttgttgtcatgaagaagtcattcaagttccttccagtgagttattagttcatatgtatatttctgtttatatcttatcttgtttatgtttagatttatatgagccagcaacttaatgatgattaaccttgattgcaccagctgaagttggtgcataaggctgcaacaccatctagtggagggtgttctcgacaaagaaagcttgtaccttaaaacaggaggatacaagaagctggagtggttgtctgaaggcttttgaactgcttgaagcattagtgtagctttggtgcttttgtgactgatcagctctggagcagctagagtgatatagttgtgggcttttgaacaatagttggagtgatatgaaacattagtgatctagttgtgaatgatattataattgtgatgcttttgtgaatatataattgtggtgcttttgtgttta

SEQ ID NO: 103937 - DNA, 2156 bp, Zea Mays
ttcgttccaaatcaaagccgatcgcccatggtgtcagctctcactccctcagcagagctgctgcctcacccccgccaccctgcaaaacgagggttactagggttccggagggatcatagccgcgctgctacatcgaaagtaagagttaccatgctcagccagcagaatccgggcggcgagagcgccggcacgcctcctctgtacctcgggatagacttcggcacttccggagcaagatacgccctcatcgacgagcacggggccatccattcggaagggaagcgagcttactgtgcgcctgtcggcgacgccgcgggctgggcgagctcgtggcgagcggcgctcttccagctcctcgccgacgtcccgcctgcccaccgcccgtccgtctcctccatctccatagacggcacctccgccaccgcgctaatcgtcgacagcgagaccggggagctcctgggcgggccgttcctctacaacgaaggcttcccggacgctctgcccgccgtggagtcggtggcgccggcgaaccacaccgtgtgctcccccacctccacgctctgcaagctggtgtcgtggtgggcggcctcgggcggcgcagccgcgggcgcggcggtgctgatgcaccagtccgactggctcctgtggctgctgcacggccggcccggcggcgtctccgactacaacagcgcgctcaaggtgggctacgacccggagctcggcgcctacccgggctggctgacctcgcagccctactcgcgcatgctgccggccgccgtcagaccacctggggctcccgtcgctgcgctcagagacgacgtgcgctcacagtacggtaaacgctcgtactacgtgctagtagtagtaagtaggctacgtaccgacggtttccgagtcttttttggagcaatccgccagttgcgtatcgtttcatcttcggtctcgccttggcacgcgcgcaggattttctgaggactgcgttgtgtgcgctggaaccactgacagcatcgcggcgtttcttgctgcccgcagaagtgaaccaggaacagctgtgagtacccctacttacccctaggaggactgctagtcacgaaccgaaataaagacgattgattacactactgtaaagtaactgtgagcaggtgacgtcgctggggtcaactctggcgatcaagctggtgagcagagtccacgtggccgacgcgaggttcggcgtgtacagccaccgcctggacgacgtgtggctcgtcggcggggcgtccaacaccgggggagccgtgctccggcagctcttcacggacgaccagctcgcggcgctgagcgagcacatcgacccggccgtcccttcccctctcgactactaccccctgccgaagaaaggcgagaggttcccggtctccgacccagacatgatgccaaggttcagtatgttcaataggcgtgcctgtgtgtcttcctccattctgcaacttcaaattcggtctcttcttcttgttgtcgtcgtcgtcgtctctgcaggctgcagccgcgccctgggagcgacgcggagtacctgcacggcatactggaatcgatcgcgcgaatcgaggtccaaaccaaatcaaactccgttgcttttaaatttggcgcatttagatttgaaccaccaagctaactgtgatcggatgaccaggccaaggggtacagcctgctgaaggagctcggcgcgacggcggtggaggaggtgttcacagcggggggaggagcgcagaacgacaggtggacggccatccgggagagggtgctcggcgtggcgtccggaaggcccagcagactgaggcggcctatggagctgcactgctagcactcaagggcgccaagagcttggctggctagtgtgtcttgttgtgcttggtagggctggacgaaaaactcgtagctcgttaactcgctcgactcgactcaatagtggctcggctcgactcgactcgtttataatttgtaacgagttgagcttgtatttcaactcgttacgataacgagccagctcgagctggctcgcgagctgactcgcgagccaaacgagttgaagtaattagtcaaactacaataatcttggatccaaaatagttaatcttgtactctactatagttaatcttgttctttgttgagtgtg

SEQ ID NO: 103938 - DNA, 1810 bp, Zea Mays
ttcgttccaaatcaaagccgatcgcccatggtgtcagctctcactccctcagcagagctgctgcctcacccccgccaccctgcaaaacgagggttactagggttccggagggatcatagccgcgctgctacatcgaaagtaagagttaccatgctcagccagcagaatccgggcggcgagagcgccggcacgcctcctctgtacctcgggatagacttcggcacttccggagcaagatacgccctcatcgacgagcacggggccatccattcggaagggaagcgagcttactgtgcgcctgtcggcgacgccgcgggctgggcgagctcgtggcgagcggcgctcttccagctcctcgccgacgtcccgcctgcccaccgcccgtccgtctcctccatctccatagacggcacctccgccaccgcgctaatcgtcgacagcgagaccggggagctcctgggcgggccgttcctctacaacgaaggcttcccggacgctctgcccgccgtggagtcggtggcgccggcgaaccacaccgtgtgctcccccacctccacgctctgcaagctggtgtcgtggtgggcggcctcgggcggcgcagccgcgggcgcggcggtgctgatgcaccagtccgactggctcctgtggctgctgcacggccggcccggcggcgtctccgactacaacagcgcgctcaaggtgggctacgacccggagctcggcgcctacccgggctggctgacctcgcagccctactcgcgcatgctgccggccgccgtcagaccacctggggctcccgtcgctgcgctcagagacgacgtgcgctcacagtacggattttctgaggactgcgttgtgtgcgctggaaccactgacagcatcgcggcgtttcttgctgcccgcagaagtgaaccaggaacagctgtgacgtcgctggggtcaactctggcgatcaagctggtgagcagagtccacgtggccgacgcgaggttcggcgtgtacagccaccgcctggacgacgtgtggctcgtcggcggggcgtccaacaccgggggagccgtgctccggcagctcttcacggacgaccagctcgcggcgctgagcgagcacatcgacccggccgtcccttcccctctcgactactaccccctgccgaagaaaggcgagaggttcccggtctccgacccagacatgatgccaaggctgcagccgcgccctgggagcgacgcggagtacctgcacggcatactggaatcgatcgcgcgaatcgaggccaaggggtacagcctgctgaaggagctcggcgcgacggcggtggaggaggtgttcacagcggggggaggagcgcagaacgacaggtggacggccatccgggagagggtgctcggcgtggcgtccggaaggcccagcagactgaggcggcctatggagctgcactgctagcactcaagggcgccaagagcttggctggctagtgtgtcttgttgtgcttggtagggctggacgaaaaactcgtagctcgttaactcgctcgactcgactcaatagtggctcggctcgactcgactcgtttataatttgtaacgagttgagcttgtatttcaactcgttacgataacgagccagctcgagctggctcgcgagctgactcgcgagccaaacgagttgaagtaattagtcaaactacaataatcttggatccaaaatagttaatcttgtactctactatagttaatcttgttctttgttgagtgtgaaatcttaagttgcaaactctattctgtttttctaaatagatctccttcttttc

SEQ ID NO: 103939 - DNA, 1479 bp, Zea Mays
atggggcacaccgccgccgctgcggccgcggccgtcgaacccgctctcggactcaccaagcccaacgccgtcgagccgcctcaggtcaccttttttgcgaaagacatcgaattctccgagtggaagggcgatattctcgctgtcaccgtcacggagaaggatctgtccaaagacgcttactccaaatttgagaatgtcgtcttgaagaagctggacggccagctcggcggcctcctgtcggaggctgcggtggaggaagatttcactaggaagacggggcagtcggtggtgctccgcctcgcggggcagggcttcaagagggtgggcctgatcggtcttggtcagagcgccccgtccaccgctgccgctagccgaggcctccgtgagtctgtcgcgtctgttgccaaggccgctcaagctagcagcactgcaatcgttcttgcctcccccagtgggatccaggaagagttcaagctagcagcgctgcagagcagcagttgcttctggtggatggatgctgaaatttctgccggtctgatcacaggaaccgtgctggggttgtatgaggacagcagatacaagtctgaatcgaaaaaggtgcacctgaaacaggttgatattattggactgggttctggtgcggaggtggatcagaaaattaagtatgctaatgatttttcgtcgggtgtgatattcggaagagagcttgtgaactctcctgcaaatgtccttacccctgatttgttgccagtatacttatcgcagtcatcctttgttctttcagctatgcttgcggaggaggcgtcaaagatcacttctactttcagtgatgtgttcactgccacagtactggatgtagagaaatgcaaagaactaaagatgggttcctacttgggagttgttgcagcttctgctaaccctcctcacttcatccatttgtgctacaaacccactgatgggaacgtcaagagaaagctggctattgttgggaagggtttaacttttgacagtggtggatacaacattaagacaagtagaggttttacccaaattagtttatctgttaattctatgttttttcccttctcacaggttcactttatagtcgctgcctgtgaaaatatgatcagtggcacaggcatgagaactggtgacattgtaactgcttccaatgggaagacaattgaggttgctctagactacattggaaaacatggcgcaacagttggtgtcactcgagaaaagagaattaaatatgcaaaagaaatacttcaaaaggaaatgttacgtgttggggaattatgtgaaactaaaaaggcatactattttgggtatattattcaccgcctactgatgtgtgctcttagtcgaagagctgaggatgaccgagatcattatggaaacaaaagactagatcttgctggtccactgcttgcagggctgtttagaatggtttgcctaaatataccagaatattaa

SEQ ID NO: 103940 - DNA, 379 bp, Zea Mays
attgttcgttgcaggtatatctaaaagctatgtttattaatacttctatttaagtgtggtcttggtaatcttggtatgtcaaatattatcatttttttatacaagagtaattctgattttgtttaacacggttgaagcctgtgccggtgattgttcgttgcaggtgctgcggccgagtgaagctaccccacttctattgctgcagtggagaaagaggaaacccaagcgagtcgaactcataaatgttttgttttcctactttgctcactatgctacgtctgaaatctggacatcgtaataccaatgaaataaattgtcaggtcgctcttggtattcaccttgttctccttccaagcattgaatcaatacacacttactc

SEQ ID NO: 103941 - DNA, 3256 bp, Zea Mays
gaacccaccttcggcttcctctgtcgtccggcctccaactccatcgaaggggctagggagaggagggaacccgaaccacagcaggccggcgcaatggcggcgccgccaaaggcgtggaaggcggagtatgccaagtctgggcgggcctcgtgcaagtcatgccggtcccctatcgccaaggaccagctccgtcttggcaagatggttcaggcgtcacagttcgacggcttcatgccgatgtggaaccatgccagcgttgacgatgttgaagggatagatgcacttagatgggatgatcaagagaagatacgaaactacgttgggagtgcctcagctggtacaagttctacagctgctcctcctgagaaatgtacaattgagattgctccatctgcccgtacttcatgtagacgatgcagtgaaaagattacaaaaggatcggtccgtctttcagctaagcttgagagtgaaggtcccaagggtataccatggtatcatgccaactgtttctttgaggtatccccgtctgcaactgttgagaagttctcaggctgggatactttgtccgatgaggataagagaaccatgctcgatcttgttaaaaaagatgttggcaacaatgaacaaaataagggttccaagcgcaagaaaagtgaaaatgatattgatagctacaaatccgccaggttagatgaaagtacatctgaaggtacagtgcgaaacaaagggcaacttgtagacccacgtggttccaatactagttcagctgatatccaactaaagcttaaggagcaaagtgacacactttggaagttaaaggatggacttaagactcatgtatcggctgctgaattaagggatatgcttgaggctaatgggcaggatacatcaggaccagaaaggcacctattggatcgctgtgcggatggaatgctatttggagcgctgggtccttgcccagtctgtgctaatggcatgtactattataatggtcagtaccaatgcagtggtaatgtgtcagagtggtccaagtgtacatactctgccacagaacctgtccgcgttaagaagaagtggcaaattccacatggaacaaagaatgattaccttatgaagtggttcaaatctcaaaaggttaagaaaccagagagggttcttccaccaatgtcacctgagaaatctggaagtaaagcaactcagagaacatcattgctgtcttctaaagggttggataaattaaggttttctgttgtaggacaatcaaaagaagcagcaaatgagtggattgagaagctcaaacttgctggtgccaacttctatgccagggttgtcaaagatattgattgtttaattgcatgtggtgagctcgacaatgaaaatgctgaagtcaggaaagcaaggaggctgaagataccaattgtaagggagggttacattggagaatgtgttaaaaagaacaaaatgctgccatttgatttgtataaactagagaatgccttagagtcctcaaaaggcagtactgtcactgttaaagttaagggccgaagtgctgttcatgagtcctctggtttgcaagatactgctcacattcttgaagatgggaaaagcatatacaatgcaaccttaaacatgtctgacctggcactaggtgtgaacagctactatgtactccagatcattgaacaggatgatgggtctgagtgctacgtatttcgtaagtggggacgggttgggagtgagaaaattggagggcaaaaactggaggagatgtcaaaaactgaggcaatcaaggaattcaaaagattatttcttgagaagactggaaactcatgggaagcttgggaatgtaaaaccaattttcggaagcagcctgggagattttacccacttgatgttgattatggtgttaagaaagcaccaaaacggaaagatatcagtgaaatgaaaagttctcttgctcctcaattgctagaactcatgaagatgcttttcaatgtggagacatatagagctgctatgatggaatttgaaattaatatgtcagaaatgcctcttgggaagctaagcaaggaaaatattgagaaaggatttgaagcattaactgagatacagaatttattgaaggacaccgctgatcaagcactggctgttagagaaagcttaattgttgctgcgagcaatcgctttttcactcttatcccttctattcatcctcatattatacgggatgaggatgatttgatgatcaaagcgaaaatgcttgaagctctgcaggatattgaaattgcttcaaagatagttggcttcgatagcgacagtgatgaatctcttgatgataaatatatgaaacttcactgtgacatcaccccgctggctcacgatagtgaagattacaagttaattgagcagtatctcctcaacacacatgctcctactcacaaggactggtcgctggaactggaggaagttttttcacttgatcgagatggagaacttaataagtactcaagatataaaaataatctgcataacaagatgctattatggcacggttcaaggttgacgaattttgtgggaattcttagtcaagggctaagaattgcacctcctgaggcacctgttactggctatatgttcggcaaaggcctctactttgcagatctagtaagcaagagcgcacaatactgttatgtggataggaataatcctgtaggtttgatgcttctttctgaggttgctttaggagacatgtatgaactaaagaaagccacgtccatggacaaacctccaagagggaagcattcgaccaagggattaggcaaaaccgtgccactggagtcagagtttgtgaagtggagggatgatgtcgtagttccctgcggcaagccggtgccatcatcaattaggagctctgaactcatgtacaatgagtacatcgtctacaacacatcccaggtgaagatgcagttcttgctgaaggtgcgtttccatcacaagaggtagctgggagactaggcaagtagagttggaaggtagagaagcagagttaggcgatgcctcttttggtattattagtaagcctggcatgtatttatgggtgctcgcgcttgatccattttggtaagtgttgcttgggcatcagcgcgaatagcaccaatcacacacttttacctaatgacgttttactgtataaatctaccaggagtgagtaatttatatattagcgggactggacctcttggtcgcgtgctatttt

SEQ ID NO: 103942 - DNA, 3289 bp, Zea Mays
gaacccaccttcggcttcctctgtcgtccggcctccaactccatcgaaggggctagggagaggagggaacccgaaccacagcaggccggcgcaatggcggcgccgccaaaggcgtggaaggcggagtatgccaagtctgggcgggcctcgtgcaagtcatgccggtcccctatcgccaaggaccagctccgtcttggcaagatggttcaggcgtcacagttcgacggcttcatgccgatgtggaaccatgccaggtgcatcttcagcaagaagaaccagataaaatccgttgacgatgttgaagggatagatgcacttagatgggatgatcaagagaagatacgaaactacgttgggagtgcctcagctggtacaagttctacagctgctcctcctgagaaatgtacaattgagattgctccatctgcccgtacttcatgtagacgatgcagtgaaaagattacaaaaggatcggtccgtctttcagctaagcttgagagtgaaggtcccaagggtataccatggtatcatgccaactgtttctttgaggtatccccgtctgcaactgttgagaagttctcaggctgggatactttgtccgatgaggataagagaaccatgctcgatcttgttaaaaaagatgttggcaacaatgaacaaaataagggttccaagcgcaagaaaagtgaaaatgatattgatagctacaaatccgccaggttagatgaaagtacatctgaaggtacagtgcgaaacaaagggcaacttgtagacccacgtggttccaatactagttcagctgatatccaactaaagcttaaggagcaaagtgacacactttggaagttaaaggatggacttaagactcatgtatcggctgctgaattaagggatatgcttgaggctaatgggcaggatacatcaggaccagaaaggcacctattggatcgctgtgcggatggaatgctatttggagcgctgggtccttgcccagtctgtgctaatggcatgtactattataatggtcagtaccaatgcagtggtaatgtgtcagagtggtccaagtgtacatactctgccacagaacctgtccgcgttaagaagaagtggcaaattccacatggaacaaagaatgattaccttatgaagtggttcaaatctcaaaaggttaagaaaccagagagggttcttccaccaatgtcacctgagaaatctggaagtaaagcaactcagagaacatcattgctgtcttctaaagggttggataaattaaggttttctgttgtaggacaatcaaaagaagcagcaaatgagtggattgagaagctcaaacttgctggtgccaacttctatgccagggttgtcaaagatattgattgtttaattgcatgtggtgagctcgacaatgaaaatgctgaagtcaggaaagcaaggaggctgaagataccaattgtaagggagggttacattggagaatgtgttaaaaagaacaaaatgctgccatttgatttgtataaactagagaatgccttagagtcctcaaaaggcagtactgtcactgttaaagttaagggccgaagtgctgttcatgagtcctctggtttgcaagatactgctcacattcttgaagatgggaaaagcatatacaatgcaaccttaaacatgtctgacctggcactaggtgtgaacagctactatgtactccagatcattgaacaggatgatgggtctgagtgctacgtatttcgtaagtggggacgggttgggagtgagaaaattggagggcaaaaactggaggagatgtcaaaaactgaggcaatcaaggaattcaaaagattatttcttgagaagactggaaactcatgggaagcttgggaatgtaaaaccaattttcggaagcagcctgggagattttacccacttgatgttgattatggtgttaagaaagcaccaaaacggaaagatatcagtgaaatgaaaagttctcttgctcctcaattgctagaactcatgaagatgcttttcaatgtggagacatatagagctgctatgatggaatttgaaattaatatgtcagaaatgcctcttgggaagctaagcaaggaaaatattgagaaaggatttgaagcattaactgagatacagaatttattgaaggacaccgctgatcaagcactggctgttagagaaagcttaattgttgctgcgagcaatcgctttttcactcttatcccttctattcatcctcatattatacgggatgaggatgatttgatgatcaaagcgaaaatgcttgaagctctgcaggatattgaaattgcttcaaagatagttggcttcgatagcgacagtgatgaatctcttgatgataaatatatgaaacttcactgtgacatcaccccgctggctcacgatagtgaagattacaagttaattgagcagtatctcctcaacacacatgctcctactcacaaggactggtcgctggaactggaggaagttttttcacttgatcgagatggagaacttaataagtactcaagatataaaaataatctgcataacaagatgctattatggcacggttcaaggttgacgaattttgtgggaattcttagtcaagggctaagaattgcacctcctgaggcacctgttactggctatatgttcggcaaaggcctctactttgcagatctagtaagcaagagcgcacaatactgttatgtggataggaataatcctgtaggtttgatgcttctttctgaggttgctttaggagacatgtatgaactaaagaaagccacgtccatggacaaacctccaagagggaagcattcgaccaagggattaggcaaaaccgtgccactggagtcagagtttgtgaagtggagggatgatgtcgtagttccctgcggcaagccggtgccatcatcaattaggagctctgaactcatgtacaatgagtacatcgtctacaacacatcccaggtgaagatgcagttcttgctgaaggtgcgtttccatcacaagaggtagctgggagactaggcaagtagagttggaaggtagagaagcagagttaggcgatgcctcttttggtattattagtaagcctggcatgtatttatgggtgctcgcgcttgatccattttggtaagtgttgcttgggcatcagcgcgaatagcaccaatcacacacttttacctaatgacgttttactgtataaatctaccaggagtgagtaatttatatattagcgggactggacctcttggtcgcgtgctatttt

SEQ ID NO: 103943 - DNA, 473 bp, Zea Mays
caggtacatcccattactaaaggagacatttatgttcccacaaagcttgggcattttaggtggaaaacctggtacatcaacatacattgctggggtacaggatgatagggctctctacctagatccccatgaagttcagatggtaaacctgcatacattttatatttacttagcatgcatatgcatctatttcataaacgttgtatagttttctaccttgtaacttaagttgagcaccatacttaagaagtatcaaaatcatcaagtttcaagtttgaactgagttccattctcttattcaaagataacagtggcatgtctattctgcagcaattcctattccataagccactagaatctggttatttttgttggagtgaagtgcattgtgagttcctaaaattcgttaggttgtgccattggagtccctgaacttggcagctgaagattcaggtcaaggcatgctcaaacta

SEQ ID NO: 103944 - DNA, 1055 bp, Zea Mays
acacgtgctcaccgaccagccgaccacgcttctctagcttgggcttggcagtgccaatccgatccacacaccccagtttcttccttccttcctcggtctaaagaagcaagcagccatggacggcgacgtcgcgaccggcggcggcgggggcaccagcatccacatcacggcgctggacggcatcgtgaacgtgaattcgctcttcaccctggccgccttcctgggcctggcgtggcggccctcctccgacgggccggggctcgccgacggcgccgaccgcacgggcaacccctgcgccgcgggggaccgcgccgagtcggacctcgtctccttccacgtgctcgccttcgcctgcttcctcttctccagcctcgtcgcgctctgcctcaagcagctcgtccgcacctaccccgcgccccaccgccgccgcgccgcctccgcctccgcctccgcctccgccgccggcggccgcaccgcgcggatcaaccgcgcggcgctccgcgtcgggatcctcgcgtccgccgtggggtccgtcgccggatgcggcttcctgatgatggccctcgtcaacgtggtgcaggtgaagctcgggcgactcgggtgcggcgccggcggggccgccgcctgggccgccgtcgtgccgctcgtcaccctcgtcccttccgccatgctcatctacatcggcaccgtcttctacgccttcacacgctagtcggtggcggatcaaggaacactctgaccaaagcacccgtttttcgatcagatctttatctgtgtgatccctcctcagtctttcttgtgtgtgattggtggtgatggcgtgagagaacttccaggggggaacaatgcagctgacttttgtagatttaagatatgtaaaatccatgcgatattatgattgtgttttggagttttggagcaaagtgaatctgctgtggttttatctgcaattggcctttgtatttgcacttgagaagttggtcagatgtgcctagaatctttaggtccgaagcaatggtgagatggagctcagctgctggttggtctctcaactt

SEQ ID NO: 103945 - DNA, 739 bp, Zea Mays
aaccagactccattctctccccccatcttctcccccaagttcatcttgtgcagttgtgctaacacgcggcgccccaggccctccggcgccgcccacctccaccgcctggaatccaggacatccggcgccgcccacctccgtcccctgtctgctgcctcgactcaactgttttgctgcgatggggttattcaggggcagcttcactctcttggtgggaatgggatgtggtgtctatatagctcagaactacaacgttccgaacgtcaagaagctattcaacacatatgtttttctggcaaagcacatcgaggaaacctaccgtaagccgaagaagaaagacgatgattgatcctttcacatttggtatctctgttatgccctggagcatgtggaaatgtgcatttttgaaattgtgaaggcaattttggttatggacaagttttttaactccagtggaaaatgttagctgtgaaatttccagttgctgtaatagtttttggtcgtattggaccatgggcttctagagcctcccctttttgctcgtgttcctgtgcctgggaaatgcactggactttgttgttgaagtgcggcgatggataatctagcatcatcagtgtgtttttcatgttaacataaggatggggtgatatgtttatttgaacctagatttgccgaaatatatatattgacacaggttcttctgaacgcatgccatttcatgtgctcgtttgtgctattc

SEQ ID NO: 103946 - DNA, 986 bp, Zea Mays
cggggctcaagcgctcctccgacggccacaacatcacatgaacagggcgccaaaacctctccgacagccatgacgcccggagggaggcggagccttccccgggtctcgaagatggcggcgccgccggcgagggcccgggccgactacgactacctcatcaagctgctcctcatcggcgatagcggtgttgggaaaagttgtctccttttgcggttctcagatggctctttcaccactagctttatcaccaccattgggattgacttcaaaataagaacagttgagcttgatggtaagcgcgtaaagttacagatatgggatactgctggtcaagagcggtttcgaactattacaaccgcctactacaggggtgcaatgggaattttgcttgtctatgatgttactgatgagtcatctttcaataatataagaaactggattaggaacatagagcaacatgcttccgacaatgtgaataaaattttggtaggcaacaaagctgacatggatgaaagcaaacgggctgtgccaacttcaagagggcaggctcttgctgatgagtatggcatcaaattttttgaaacgagtgcgaagacgaacctgaatgtggagcaggttttcttctccatagcaagagatatcaagcaaaggcttgctgaatctgattcaaagccagaggatcgcacgatcagtatcaacagacctgagggtggtgaggcttcagcgtcacaaaaatcagcttgctgcggatcgtgacggggttacattgtcacaaggaagataaatagtgcgataccatactttgtaatttacccttctacgtaccttttatctggctgtcatcgttctcgtctagcttttaaatgcaattgcttggattcaggtttctgtgttgtaatgtgaacaattttagttgtacccctggtagaaatgcatgtgctcataagtcattgcaccttgttttgatggaaatgcttgcaaaatcg

SEQ ID NO: 103947 - DNA, 1417 bp, Zea Mays
cgtgcagatactcccgtaaaacacgcatccgctcgtgtgcagttcaatcacaagtttgtggatggttggaacgcagtcacccgtcaccccacggccccacgtggccgtgacacggtcggttcaaagtccacggtgtaccacttccacccgtccccaccccaccatccttctctacttctctcctctctctcccaacggacccgatctcgtacctcacttccgtcccgcccagcttcgcttcacggcgcgccgaccggcttggacgcgccgaccggctcgtgatcagctcggtcggatccgacggtcgctcgctgctgcagcgggcgcttgctgtgcgtcgcgtgggctcggccggagcccggagggaggcggagccttccccgggtctcgaagatggcggcgccgccggcgagggcccgggccgactacgactacctcatcaagctgctcctcatcggcgatagcggcatgtttgagagctatctaaggtaggtcaaataagtagtggcctattctagggcaaggcagcagtgagcacactcaaacagtcgtactcaactcttcatcgggctattactgaaaacgagaaggccaaccctcaagaatttgatatttaggcatggtgttgggaaaagttgtctccttttgcggttctcagatggctctttcaccactagctttatcaccaccattgggattgacttcaaaataagaacagttgagcttgatggtaagcgcgtaaagttacagatatgggatactgctggtcaagagcggtttcgaactattacaaccgcctactacaggggtgcaatgggaattttgcttgtctatgatgttactgatgagtcatctttcaataatataagaaactggattaggaacatagagcaacatgcttccgacaatgtgaataaaattttggtaggcaacaaagctgacatggatgaaagcaaacgggctgtgccaacttcaagagggcaggctcttgctgatgagtatggcatcaaattttttgaaacgagtgcgaagacgaacctgaatgtggagcaggttttcttctccatagcaagagatatcaagcaaaggcttgctgaatctgattcaaagccagaggatcgcacgatcagtatcaacagacctgagggtggtgaggcttcagcgtcacaaaaatcagcttgctgcggatcgtgacggggttacattgtcacaaggaagataaatagtgcgataccatactttgtaatttacccttctacgtaccttttatctggctgtcatcgttctcgtctagcttttaaatgcaattgcttggattcaggtttctgtgttgtaatgtgaacaattttagttgtacccctggtagaaatgcatgtgctcataagtcattgcaccttgttttgatggaaatgcttgc

SEQ ID NO: 103948 - DNA, 1278 bp, Zea Mays
cgtgcagatactcccgtaaaacacgcatccgctcgtgtgcagttcaatcacaagtttgtggatggttggaacgcagtcacccgtcaccccacggccccacgtggccgtgacacggtcggttcaaagtccacggtgtaccacttccacccgtccccaccccaccatccttctctacttctctcctctctctcccaacggacccgatctcgtacctcacttccgtcccgcccagcttcgcttcacggcgcgccgaccggcttggacgcgccgaccggctcgtgatcagctcggtcggatccgacggtcgctcgctgctgcagcgggcgcttgctgtgcgtcgcgtgggctcggccggagcccggagggaggcggagccttccccgggtctcgaagatggcggcgccgccggcgagggcccgggccgactacgactacctcatcaagctgctcctcatcggcgatagcggtgttgggaaaagttgtctccttttgcggttctcagatggctctttcaccactagctttatcaccaccattgggattgacttcaaaataagaacagttgagcttgatggtaagcgcgtaaagttacagatatgggatactgctggtcaagagcggtttcgaactattacaaccgcctactacaggggtgcaatgggaattttgcttgtctatgatgttactgatgagtcatctttcaataatataagaaactggattaggaacatagagcaacatgcttccgacaatgtgaataaaattttggtaggcaacaaagctgacatggatgaaagcaaacgggctgtgccaacttcaagagggcaggctcttgctgatgagtatggcatcaaattttttgaaacgagtgcgaagacgaacctgaatgtggagcaggttttcttctccatagcaagagatatcaagcaaaggcttgctgaatctgattcaaagccagaggatcgcacgatcagtatcaacagacctgagggtggtgaggcttcagcgtcacaaaaatcagcttgctgcggatcgtgacggggttacattgtcacaaggaagataaatagtgcgataccatactttgtaatttacccttctacgtaccttttatctggctgtcatcgttctcgtctagcttttaaatgcaattgcttggattcaggtttctgtgttgtaatgtgaacaattttagttgtacccctggtagaaatgcatgtgctcataagtcattgcaccttgttttgatggaaatgcttgcaaaatcgttcacagttt

SEQ ID NO: 103949 - DNA, 1566 bp, Zea Mays
cgtgcagatactcccgtaaaacacgcatccgctcgtgtgcagttcaatcacaagtttgtggatggttggaacgcagtcacccgtcaccccacggccccacgtggccgtgacacggtcggttcaaagtccacggtgtaccacttccacccgtccccaccccaccatccttctctacttctctcctctctctcccaacggacccgatctcgtacctcacttccgtcccgcccagcttcgcttcacggcgcgccgaccggcttggacgcgccgaccggctcgtgatcagctcggtcggatccgacggtcgctcgctgctgcagcgggcgcttgctgtgcgtcgcgtgggctcggccggagcccggagggaggcggagccttccccgggtctcgaagatggcggcgccgccggcgagggcccgggccgactacgactacctcatcaagctgctcctcatcggcgatagcggtgttgggaaaagttgtctccttttgcggttctcagatggctctttcaccactagctttatcaccaccattgggtaagcactgctagtgtcgaaaatcagttagttttgaatggatcattattttcaaatgaatgctgctattagaaaaaaaggcagacccagtgccagaggctcccacatgagtggggtctggggaagagataaactgagacaagcctcccctcacaaatgcggagaggttgcttccagtcctcgacctggtgactcagtgggacagctctcatcactgcatcaggcctgccctttagaatgctactattagaatatttctaaaatagtttatattttatctttaaaaaggattgacttcaaaataagaacagttgagcttgatggtaagcgcgtaaagttacagatatgggatactgctggtcaagagcggtttcgaactattacaaccgcctactacaggggtgcaatgggaattttgcttgtctatgatgttactgatgagtcatctttcaataatataagaaactggattaggaacatagagcaacatgcttccgacaatgtgaataaaattttggtaggcaacaaagctgacatggatgaaagcaaacgggctgtgccaacttcaagagggcaggctcttgctgatgagtatggcatcaaattttttgaaacgagtgcgaagacgaacctgaatgtggagcaggttttcttctccatagcaagagatatcaagcaaaggcttgctgaatctgattcaaagccagaggatcgcacgatcagtatcaacagacctgagggtggtgaggcttcagcgtcacaaaaatcagcttgctgcggatcgtgacggggttacattgtcacaaggaagataaatagtgcgataccatactttgtaatttacccttctacgtaccttttatctggctgtcatcgttctcgtctagcttttaaatgcaattgcttggattcaggtttctgtgttgtaatgtgaacaattttagttgtacccctggtagaaatgcatgtgctcataagtcattgcaccttgttttgatggaaatgcttgcaaaatcgttcacagttt

SEQ ID NO: 103950 - DNA, 901 bp, Zea Mays
gctggggcgcgcgtaactgctgcaagatggggccaccgcgcgcgcggcgattattttaatcgtttcttgcgaacgagctcagggaaggtgtttttcggatcttcggcgtcccgaagcctagaaggttttttcacggtttatattttatctttaaaaaggattgacttcaaaataagaacagttgagcttgatggtaagcgcgtaaaattacagatatgggatactgctggtcaagagcggtttcgaactattacaaccgcctactacaggggtgcaatgggaattttgcttgtctatgatgttactgatgagtcatctttcaataatataagaaactggattaggaacatagagcaacatgcttccgacaatgtgaataaaattttggtaggcaacaaagctgacatggatgaaagcaaacgggctgtgccaacttcaagagggcaggctcttgctgatgagtatggcatcaaattttttgaaacgagtgcgaagacgaacctgaatgtggagcaggttttcttctccatagcaagagatatcaagcaaaggcttgctgaatctgattcaaagccagaggatcgcacgatcagtattaacagacctgagggtggtgaggcttcagcgtcacaaaaatcagcttgctgcggatcgtgacggggttacatgcgataccatactttgtaatttacccttctacgtaccttttatctggctgtcatcgttctcgtctaacttttaaatgcaattgcttggattcaggtttctgtgttgtaatgtgaacaattttagttgtacccctggtagaaatgcatgtgctcataagtcattgcaccttgttttgatggaaatgcttgcaaaatcgttcacagtttaggcgcggccgtactacctgttgctt

SEQ ID NO: 103951 - DNA, 953 bp, Zea Mays
gttcagtcagtcgttgtgaactcttttctaatcgttcacttcattagccgtgttatacaagacatctgatgaagtaagcaataacatcagttaactaaatcaaaaaatattatatgaaaagcggagacaattaataaaaaatcttgaaaattttttgtaaatagtttacgtgagtattgttgtaagccgtcgtaacgcacagattagtctgaactaaaatgcgacaaataaaaattttagaggaggaaatatatttggggcaagattcacgtattgaagcatcgtgagcgtgggttcattaacaataactctattcttttttacaacaaaaaccctagacgcatccgcaagctgcgactcactcgccctcgtccgcagcgcccacgaaacgcgccgccgccgccgtgacatcgcagcggcgtcggcgtcgtctcggccgctccccgccgtagggccattttcgctcgagctgccggagaccatgtcgagcggtctagacatgtccctggacgacctcatcaagcagtctaagtcccgacccaaggccaaccccgcgtcctcgtcggggcctgcccgccgcgcgcaccccgctcgcgccgcgccctacccaccggtcgctcccaaggcccgtgccaccgccgactcgccttacggggtctactccgagcagatcgccgctatagccgcggccgcgccgctgccggccaaagcaaggtcgctcgagacgggaatgaagctgcacatctccaatcttgactccggcgtcacggtcgaagatgtccaggtgctacccatgctcctgtttcttggcaatccactcagcaatttgtcaataagttcaattctactgtgttatttgaaggacatatgctgcctgtttttgtaatcatatgagtgggctcaaagttgctgtactttcatgtgaatgaatttagcagtactatgtttggtga

SEQ ID NO: 103952 - DNA, 1431 bp, Zea Mays
aacaataactctattcttttttacaacaaaaaccctagacgcatccgcaagctgcgactcactcgccctcgtccgcagcgcccacgaaacgcgccgccgccgccgtgacatcgcagcggcgtcggcgtcgtctcggccgctccccgccgtagggccattttcgctcgagctgccggagaccatgtcgagcggtctagacatgtccctggacgacctcatcaagcagtctaagtcccgacccaaggccaaccccgcgtcctcgtcggggcctgcccgccgcgcgcaccccgctcgcgccgcgccctacccaccggtcgctcccaaggcccgtgccaccgccgactcgccttacggggtctactccgagcagatcgccgctatagccgcggccgcgccgctgccggccaaagcaaggtcgctcgagacgggaatgaagctgcacatctccaatcttgactccggcgtcacggtcgaagatgtccaggaactcttctcagaagttggggagctcaagcgttattcaatgaactatgacaaggatgggagatccaaggttgaatgttgactttattttttttcttttactagtatctgcacttttctcatttcggactcctttgaaaccttcaatcttctaggggactgcggaagttgtttttgcaaggaaagtggatgctttggatgctatcaagagatacaatggtgttctacttgatgggaagccaatgaatttagagctcattggaaacaatgtcgaaccacctcccttgccaccattaatacacaatcgtcctttgcagaactataacgatatccacagcagtgtgcttcaatcccaaagaaatggtcagcgaagagcacctcaagtcaacggtcggggtggacgcagtagtcaaaccagcggtggccgcggacaggggagaggccgagggcaggaccggaaccgcacgcccatttctgcttcagatcttgacgccgaactcgacaagtaccatgcagcggcagcgaaggaggaatgaggctctggcgttctcttctactaatctatttacacaggtggaaaggcgttctcttctgggggcgttcagaagcatgaagtttactatcttagccctagtgttctacgctagaattcttttcgaccaggattctgttttgtgtgtaggatgaacttgtggttctactttgcaggatcttatttgctgctttgtgggcacgaatattgagaacaactggaaaccgactttgttattgtgtccgccctggtcctgggtctgttctgttgtattttaagtagttttgggttgcctaccgaagacatcaggcaaacatattccggagcccaagagtctctgtgttctgtcttgatgttttacaattgtgcctttagtctttctgcggtcctctacttgctttatttttaaattgcaa

SEQ ID NO: 103953 - DNA, 1351 bp, Zea Mays
aacaataactctattcttttttacaacaaaaaccctagacgcatccgcaagctgcgactcactcgccctcgtccgcagcgcccacgaaacgcgccgccgccgccgtgacatcgcagcggcgtcggcgtcgtctcggccgctccccgccgtagggccattttcgctcgagctgccggagaccatgtcgagcggtctagacatgtccctggacgacctcatcaagcagtctaagtcccgacccaaggccaaccccgcgtcctcgtcggggcctgcccgccgcgcgcaccccgctcgcgccgcgccctacccaccggtcgctcccaaggcccgtgccaccgccgactcgccttacggggtctactccgagcagatcgccgctatagccgcggccgcgccgctgccggccaaagcaaggtcgctcgagacgggaatgaagctgcacatctccaatcttgactccggcgtcacggtcgaagatgtccaggaactcttctcagaagttggggagctcaagcgttattcaatgaactatgacaaggatgggagatccaaggggactgcggaagttgtttttgcaaggaaagtggatgctttggatgctatcaagagatacaatggtgttctacttgatgggaagccaatgaatttagagctcattggaaacaatgtcgaaccacctcccttgccaccattaatacacaatcgtcctttgcagaactataacgatatccacagcagtgtgcttcaatcccaaagaaatggtcagcgaagagcacctcaagtcaacggtcggggtggacgcagtagtcaaaccagcggtggccgcggacaggggagaggccgagggcaggaccggaaccgcacgcccatttctgcttcagatcttgacgccgaactcgacaagtaccatgcagcggcagcgaaggaggaatgaggctctggcgttctcttctactaatctatttacacaggtggaaaggcgttctcttctgggggcgttcagaagcatgaagtttactatcttagccctagtgttctacgctagaattcttttcgaccaggattctgttttgtgtgtaggatgaacttgtggttctactttgcaggatcttatttgctgctttgtgggcacgaatattgagaacaactggaaaccgactttgttattgtgtccgccctggtcctgggtctgttctgttgtattttaagtagttttgggttgcctaccgaagacatcaggcaaacatattccggagcccaagagtctctgtgttctgtcttgatgttttacaattgtgcctttagtctttctgcggtcctctacttgctttatttttaaattgcaagtctt

SEQ ID NO: 103954 - DNA, 365 bp, Zea Mays
tttgttttcttttttttaatcagaatctacaatctcataatctgcgtatccaaacatccagattctacccaccagcttctctccacagcagccaaaccaaacacccagattctaaccaccagattttggccctgtttgtttcggcttcttgcagcttctggccaccaaaagctgctgcggactgccaaacgctcagcttttcagccaacttatataaaactaggtatgtacccgtgcgttgctacggtttttatatatcacacatgttgatattgtttaaatgacatcattgttcaaacacattccacacaaggccctataataagctagaaatgtgcaaacatcttaactttgctaggagaagg

SEQ ID NO: 103955 - DNA, 940 bp, Zea Mays
gacggcggaggtgcgccccggaccgtcgaggacatctacaaggactacgccgcccgccgcgccggcctcgtccgcgctctcacatctgatgtcgacgggttctacagcatgtgcgacccagagaaggagaacctgtgcctgtacggtctcccgaacggcggctgggaggtatcgctgccggtggaggaggtgccgccggagatgcccgaaccagcgctcgggatcaacttcgccagggacggcatgaggcgtcgcgactggctctcgctcgtcgccgtacactctgacgcttggctcgtctccgtcgcattcttcttcgccgccaaactcaacggcaacgacaggaagcgattattcaacatgattaatgatcatccatctgtgtatgaaataatggctgaccggaagggaagggagaataatcctggtgttgataacagcagcaaatccaggcactcaacgaagcgatcaaatgatggaaagataaagaactcaagagtggcagttggtgaatgtaggtatgagaatgatgaagaccacagcgaaaccctttgtggttcttgcagtggtctctacaactcaagtgagttctggattggatgcgacatttgtgagcggtggttccacggcaaatgtgtgaggataaccccagcaaaagcagaacagataaagcactacaagtgccctgattgcagctacaaaaagagcaggcaataaaatcttggagctgctggcctcctattactgactcagctgatcaaccaaacaatacttttcaatttggccgtagatgttaactaccctaggcatttctttgttgtggtacatgctggaaaaagacatacaggatagttgatcttacagtctggtcaattgcttttgtgcttgttttaatgacatctgtttacgggttatgtcttcaaggtggatggtaatcctt

SEQ ID NO: 103956 - DNA, 1201 bp, Zea Mays
atgacgggcggtgtcagacctctgaccagaaccagaaccagaacccccccgctgcgcaaccggaggcgtctcccagccccgcgccgccgctgacggagatggccggccccgtctcctcagcgccccggaccgtcgaggacatctacaaggactacgccgcccgccgcgccggcctcgtccgcgctctcacatctgatgtcgacgggttctacagcatgtgcgacccagagaaggagaacctgtgcctgtacggtctcccgaacggcggctgggaggtatcgctgccggtggaggaggtgccgccggagatgcccgaaccagcgctcgggatcaacttcgccagggacggcatgaggcgtcgcgactggctctcgctcgtcgccgtacactctgacgcttggctcgtctccgtcgcattcttcttcgccgccaaactcaacggcaacgacaggaagcgattattcaacatgattaatgatcatccatctgtgtatgaaataatggctgaccggaagggaagggagaataatcctggtgttgataacagcagcaaatccaggcactcaacgaagcgatcaaatgatggaaagataaagaactcaagagtggcagttggtgaatgtaggtatgagaatgatgaagaccacagcgaaaccctttgtggttcttgcagtggtctctacaactcaagtgagttctggattggatgcgacatttgtgagcggtggttccacggcaaatgtgtgaggataaccccagcaaaagcagaacagataaagcactacaagtgccctgattgcagctacaaaaagagcaggcaataaaatcttggagctgctggcctcctattactgactcagctgatcaaccaaacaatacttttcaatttggccgtagatgttaactaccctaggcatttctttgttgtggtacatgctggaaaaagacatacaggatagttgatcttacagtctggtcaattgcttttgtgcttgttttaatgacatctgtttacgggttatgtcttcaaggtggatggtaatcctttgcgttgtgggctctagcaacgtgatgagttatggccattatcgaaatttgagatttgcgcgagtgcgcatctgaaggtagtcaagttgatttgtttcctcaaaattagtaaattaagtaataaaacatagagaaataattaaagaatacaatc

SEQ ID NO: 103957 - DNA, 1008 bp, Zea Mays
gtcaattttgccgtgtcaattgtcagacccgtgtttctgttaattcgtctcgttttctcccttcccctgcgggctggagagcggcggcgaacgagacaaggtcaccggtgacgctcctcacctactccctgccgcctttcgctttccggcccggcctgccgcaagctcgcgcgccgcctacatcgacccctccccgcgccgcaggccgcctcccacagacgcggggcagccacgtcgcccggctcggagggattcggttcggcccgtcgtgctcccctccgcactcttctattggcctggagagcagcggagatccaccagcaatttggattgcttctcctttttcttggatatacttggtctcctcggtgttggctaggcaatccagctttccaaagtgtgatcggacaggtttattttggttctgagatggctgatgaggactcatccgacttcaccttctgcagggttagttctgcagaaaatgacggtcaaccagaatctcctaaagccattcctatggcaagtatgacgctcgaggatgttcgtgttaaaagtgcagatacttcaaagaataatggcatgaaaactgttgactcagaaaaagataggtctggtaacaatgtcagtgtttcaacaaaagacgataacatgaaagcaccagttacacatacaggtagtggagcagaatcaaatgtcccattacaggcaaaacgttcatccaagaaacccgcagcacgggcaaaggttccttttgagaaaggctatagtcaaatggattggctaaaactgacacaaacacatcctgatctagctgggcttaaggggcagtcaaaccgaaggttaatttctttggaagaggttaagcagcacaaagcaggagattgtatttggacagttctcaaaggccgcgtgtacaacattgctccatacatgaaatttcatcctggaggtaaccatagtttcagttcattcagagttgttagtttcagaaccagtgttctcatc

SEQ ID NO: 103958 - DNA, 1429 bp, Zea Mays
gtcaattttgccgtgtcaattgtcagacccgtgtttctgttaattcgtctcgttttctcccttcccctgcgggctggagagcggcggcgaacgagacaaggtcaccggtgacgctcctcacctactccctgccgcctttcgctttccggcccggcctgccgcaagctcgcgcgccgcctacatcgacccctccccgcgccgcaggccgcctcccacagacgcggggcagccacgtcgcccggctcggagggattcggttcggcccgtcgtgctcccctccgcactcttctattggcctggagagcagcggagatccaccagcaatttggattgcttctcctttttcttggatatacttggtctcctcggtgttggctaggcaatccagctttccaaagtgtgatcggacaggtttattttggttctgagatggctgatgaggactcatccgacttcaccttctgcagggttagttctgcagaaaatgacggtcaaccagaatctcctaaagccattcctatggcaagtatgacgctcgaggatgttcgtgttaaaagtgcagatacttcaaagaataatggcatgaaaactgttgactcagaaaaagataggtctggtaacaatgtcagtgtttcaacaaaagacgataacatgaaagcaccagttacacatacaggtagtggagcagaatcaaatgtcccattacaggcaaaacgttcatccaagaaacccgcagcacgggcaaaggttccttttgagaaaggctatagtcaaatggattggctaaaactgacacaaacacatcctgatctagctgggcttaaggggcagtcaaaccgaaggttaatttctttggaagaggttaagcagcacaaagcaggagattgtatttggacagttctcaaaggccgcgtgtacaacattgctccatacatgaaatttcatcctggaggtgttgatatgcttatgaaagccgctgggaaagactgcactgctttgttcaataaataccatgcttgggtaaatgcagagttcctcctggagaagtgccttgtcggattccttgatcccaccgcgtagatatccaggtctcatggcattttatcacacccggactgtttgtagggcaggcacctcagtcgacgaattaaagaatctaaatgtttgtatcacaacgggagtacaacaattaaattctgtttcaaaaagaaaacggaattgttatgacgatgagaaaaaatcagtctaatactggtatgccattacagtgcgaggtgaattacaacacctgatgaaattactgcattgtcaatatgaaaacatgtggttgtttatatatacctggggtataatcctttccaagcgctgtaatatgcatgtatattgtttttttccacatttgtttgaagttttgttattctttctgatt

SEQ ID NO: 103959 - DNA, 1540 bp, Zea Mays
gtcaattttgccgtgtcaattgtcagacccgtgtttctgttaattcgtctcgttttctcccttcccctgcgggctggagagcggcggcgaacgagacaaggtcaccggtgacgctcctcacctactccctgccgcctttcgctttccggcccggcctgccgcaagctcgcgcgccgcctacatcgacccctccccgcgccgcaggccgcctcccacagacgcggggcagccacgtcgcccggctcggagggattcggttcggcccgtcgtgctcccctccgcactcttctattggcctggagagcagcggagatccaccagcaatttggattgcttctcctttttcttggatatacttggtctcctcggtgttggctaggcaatccagctttccaaagtgtgatcggacaggtttattttggttctgagatggctgatgaggactcatccgacttcaccttctgcagggttagttctgcagaaaatgacggtcaaccagaatctcctaaagccattcctatggcaagtatgacgctcgaggatgttcgtgttaaaagtgcagatacttcaaagaataatggcatgaaaactgttgactcagaaaaagataggtctggtaacaatgtcagtgtttcaacaaaagacgataacatgaaagcaccagttacacatacaggtagtggagcagaatcaaatgtcccattacaggcaaaacgttcatccaagaaacccgcagcacgggcaaaggttccttttgagaaaggctatagtcaaatggattggctaaaactgacacaaacacatcctgatctagctggaccttgtgcacgagccctagccactagatgtgacagaactcataggttataccttcgggattggacactgaggccattagggtgatgtagctctacacagagacaacgagggcttaaggggcagtcaaaccgaaggttaatttctttggaagaggttaagcagcacaaagcaggagattgtatttggacagttctcaaaggccgcgtgtacaacattgctccatacatgaaatttcatcctggaggtgttgatatgcttatgaaagccgctgggaaagactgcactgctttgttcaataaataccatgcttgggtaaatgcagagttcctcctggagaagtgccttgtcggattccttgatcccaccgcgtagatatccaggtctcatggcattttatcacacccggactgtttgtagggcaggcacctcagtcgacgaattaaagaatctaaatgtttgtatcacaacgggagtacaacaattaaattctgtttcaaaaagaaaacggaattgttatgacgatgagaaaaaatcagtctaatactggtatgccattacagtgcgaggtgaattacaacacctgatgaaattactgcattgtcaatatgaaaacatgtggttgtttatatatacctggggtataatcctttccaagcgctgtaatatgcatgtatattgtttttttccacatttgtttgaagttttgttattctttctgatt

SEQ ID NO: 103960 - DNA, 1419 bp, Zea Mays
ttttgccgtgtcaattgtcagacccgtgtttctgttaattcgtctcgttttctcccttcccctgcgggctggagagcggcggcgaacgagacaaggtcaccggtgacgctcctcacctactccctgccgcctttcgctttccggcccggcctgccgcaagctcgcgcgccgcctacatcgacccctccccgcgccgcaggccgcctcccacagacgcggggcagccacgtcgcccggctcggagggattcggttcggcccgtcgtgctcccctccgcactcttctattggcctggagagcagcggagatccaccagcaatttggattgcttctcctttttcttggatatacttggtctcctcggtgttggctaggcaatccagctttccaaagtgtgatcggacaggtttattttggttctgagatggctgatgaggactcatccgacttcaccttctgcaggttctgcagaaaatgacggtcaaccagaatctcctaaagccattcctatggcaagtatgacgctcgaggatgttcgtgttaaaagtgcagatacttcaaagaataatggcatgaaaactgttgactcagaaaaagataggtctggtaacaatgtcagtgtttcaacaaaagacgataacatgaaagcaccagttacacatacaggtagtggagcagaatcaaatgtcccattacaggcaaaacgttcatccaagaaacccgcagcacgggcaaaggttccttttgagaaaggctatagtcaaatggattggctaaaactgacacaaacacatcctgatctagctgggcttaaggggcagtcaaaccgaaggttaatttctttggaagaggttaagcagcacaaagcaggagattgtatttggacagttctcaaaggccgcgtgtacaacattgctccatacatgaaatttcatcctggaggtgttgatatgcttatgaaagccgctgggaaagactgcactgctttgttcaataaataccatgcttgggtaaatgcagagttcctcctggagaagtgccttgtcggattccttgatcccaccgcgtagatatccaggtctcatggcattttatcacacccggactgtttgtagggcaggcacctcagtcgacgaattaaagaatctaaatgtttgtatcacaacgggagtacaacaattaaattctgtttcaaaaagaaaacggaattgttatgacgatgagaaaaaatcagtctaatactggtatgccattacagtgcgaggtgaattacaacacctgatgaaattactgcattgtcaatatgaaaacatgtggttgtttatatatacctggggtataatcctttccaagcgctgtaatatgcatgtatattgtttttttccacatttgtttgaagttttgttattctttctgatt

SEQ ID NO: 103961 - DNA, 1894 bp, Zea Mays
cgtgtttctgttaattcgtctcgttttctcccttcccctgcgggctggagagcggcggcgaacgagacaaggtcaccggtgacgctcctcacctactccctgccgcctttcgctttccggcccggcctgccgcaagctcgcgcgccgcctacatcgacccctccccgcgccgcaggccgcctcccacagacgcggggcagccacgtcgcccggctcggagggattcggttcggcccgtcgtgctcccctccgcactcttctattggcctggagagcagcggagatccaccagcaatttggattgcttctcctttttcttggatatacttggtctcctcggtgttggctaggcaatccagctttccaaagtgtgatcggacaggtttattttggttctgagatggctgatgaggactcatccgacttcaccttctgcaggggtgatcagagaaattggcagcagaagcacttcattaccaaaactgttggatgacacctctctctctctctctctctctctttgccataaaacaaaattatggagttgttttaatgagacctccagagacaccaacggagacctccagaggcactagtgcgtagtggtcctaaggcacgatagtaatgagaagagaagaatatgaagatcgaagacttgaaaggatggaatatattcaaagatttagccttcaatacgagtgcatgaaaaataactattcatgtgcctgaacctaaagcaactattcatgtgcctgaaccttgacttgttggtttgttgggttttaactctagtcttccccaacttacttgggactaaaaggctttgttgttgttgttgttgttttaaggagttattgaagatgctcttgctgctcatgccgttggattgagtcaattacttgtgaacaatacaaagctagtgcatctttatgggttagttctgcagaaaatgacggtcaaccagaatctcctaaagccattcctatggcaagtatgacgctcgaggatgttcgtgttaaaagtgcagatacttcaaagaataatggcatgaaaactgttgactcagaaaaagataggtctggtaacaatgtcagtgtttcaacaaaagacgataacatgaaagcaccagttacacatacaggtagtggagcagaatcaaatgtcccattacaggcaaaacgttcatccaagaaacccgcagcacgggcaaaggttccttttgagaaaggctatagtcaaatggattggctaaaactgacacaaacacatcctgatctagctgggcttaaggggcagtcaaaccgaaggttaatttctttggaagaggttaagcagcacaaagcaggagattgtatttggacagttctcaaaggccgcgtgtacaacattgctccatacatgaaatttcatcctggaggtgttgatatgcttatgaaagccgctgggaaagactgcactgctttgttcaataaataccatgcttgggtaaatgcagagttcctcctggagaagtgccttgtcggattccttgatcccaccgcgtagatatccaggtctcatggcattttatcacacccggactgtttgtagggcaggcacctcagtcgacgaattaaagaatctaaatgtttgtatcacaacgggagtacaacaattaaattctgtttcaaaaagaaaacggaattgttatgacgatgagaaaaaatcagtctaatactggtatgccattacagtgcgaggtgaattacaacacctgatgaaattactgcattgtcaatatgaaaacatgtggttgtttatatatacctggggtataatcctttccaagcgctgtaatatgcatgtatattgtttttttccacatttgtttgaagttttgttattctttctgatt

SEQ ID NO: 103962 - DNA, 570 bp, Zea Mays
atgtccagggcgagccccgcggccagcgccctgagcaccatcggcggcgcgccggcgcaggccgccgccagggccagccagcgcagggaaggtagcagcggcgcgaacagggacgccagcagcagggctccgctggcgacggtgtacgggctcggccagcgagcgacgaccccgctgctgccgtacgcgcggacggacgcctccagccccgccttgttgagagccttcacgatgtgggactgggagacggcggcgaggtcgtgctcgacgatcacggtccgggaggggacgacgacggtgaccgccctcacgccgtcgatcggcttcaggagccgctccacgagcgcgacctccgcggagcagcacacgcccagcacgtccaggtacgtcttctcccacttgccactcttcgcgccgccggcgccagcatctgcgctcctggccggcggcggtggcagcagcctctcctcgacactgcccatcgccgccgctgctcctgtcctggccagaatcaaggactgcagctgcaggaacgcgagaggcggagggaaagtcaacaggagaacatag

SEQ ID NO: 103963 - DNA, 1020 bp, Zea Mays
aaacatcaaccccaaccccaacgactccaactccaagtcaaagagagcagcaagagcacgtgccggccgccgatcaaatccaccgagcaatcgcgcgcggccgccgaggtgccaaggcggcggcggtcggtcggtctgcgatatacgatggcggcgccttactacggaggtcctccggcggcgccggcccccgtggcggtggtgtccccgcagttctgtgcgccgtacgtggtgcccctgacggtgaccaagaaggccatcagcctctccgacggcgacttcaccgtcaccgacgccaacggcgccaccgtgctgcaggtcaagggcgccgtcttcagtatccgccaccgccgcgtcctcctcgacgccgccggccagcccatcctcaccatgctggagaaggtattcagcatgcacaacagatgggaggtgttcagaggggacagctcgaacgagagcgacctgctcttcaccgcgaagaaatcctcgatattccagctgaagacggagatggacatcttcctggcctccaacaccgcgcagcaggtgtgcgacttcaagatcaagggcagctacttcgagaggtcgtgcgccttctacctcggcaactccagcagcatgatcgcccagatgaaccgccagtttaccgtcaccaatgtgctgcttggaagggacacgtttggcgtcactgtgttcccgcacgttgactacgtgttcgtcgctgctcttgttgtgatactggatgagattcatagggaacggtccgactgaggaacataccacaccacaccaccaagcttctccaccgttgctcgaccatgctatgctatgtatcatcatcacaggttattcttgtcaattatatactttccatgtatgtatatgtaagtattaatgagttaatacactatctcctgatgtataagtttttcttcatccatttgaatatagacataaaaatcaaatgactattattttgggatgaaatgagtactatttagtgtcgattcaagccacaaa

SEQ ID NO: 103964 - DNA, 2046 bp, Zea Mays
cttcactgtaggcgtccacaggcttggttctgccatcgcgctccgtccgcgatcccctccccgcgcccgatcctccacgctcgatcctcgaatcccgcggcttccttcgatggcacgaccccatccatctcgccagtgtccgtggtcccctccccgcgctccccaccacgacgacacgaccccatccatctcgctgctgtccacgcccagtcgcgcctcccacgatcacgcccacggacgcaacctccctccctccccgtccccgttcatgtcgcccccgtccgtgatcccctccccgccctcctctccgcgaccccatccatcctgtcgccgtccacgcccagcagcgctcaaaagcaaaaaagggtacgaatacgaatcccaatccagggccggagggcgagcgaactcaaaagcaagctgttccagtccaatccgccccagtccaaatctaatcgccgggtttaggcagaaggggtgggacgcggcgaggtttaggcggggtttgttttgtccctttcgtgcgattctgctctccgcgcgggaggcaagtactgacggaagcgaagaccaaggcggaggagggggtccccggcggtggaagtggaacgcgccgatgcgcaagtttcaggactccatcaaggccctccaggccgacatcgatcatgccaatgcgatagcagggtgtcggaattcttgagggactacgatggctcggtcatccagatgcgggtggcgtacagcgccgtcgcgcatttcctcctgcagtggaccgactgcaagctcgccggcgcgctcggcctcctcaaggttatgctatacaaggtgtgcgcggacggctcgtcggcgcttcctgattgggacatggaggccagcatcagggagttttacgcttccgagtggcatcaccgagctggacgacaggaagcagaggaagctctgcctcaagaaattcaggagcagggatgagcagctctgggaggtggacacggagagggagcttgagtgtgggatctgcctcgaggttagccccaaggtcgtgctgcccaactgtgcccacatgctctgcatgcggtgctttgaggattggaaatgacacctactctactccgcagcttaaaacctcaagatatgtcggtaatcaaacaagtacaagtttcaaggaaatgggaatttcatggaaatacagacattgggtccatattacacattgatatgattttggctgacaaagaggttgtcggtttggagcctttttagtgtcagatggtctgtctctatatctctattcatttcactgcagcgctgtctgaggtgcgtggtcaagtcgaggcgaagatgagcaaggaggatgtgctcaaggtgcaggtcttggattcaacatagtactagcagtttggaatcacccgacggggatgctttccatgtaataaatatttttggaacgtttcggatttaacttatgttgtttctattgcaatcaacatggtgtcactatttggattcaccagtaagaatatttgccatttgggcttgttaattagggtgaaattttatataaaacatgcctcgttcacttgctttccagttcttgatttcagatctctgaagccaattacgtacacattttcctaccacgacttttattctgctttccgtttctcaacgtcttggacattgccggcgagcgcggtctcctcgacaacttctactgctaactcgggtgcaagatgcccagcaaacttcccaatccagctgccggcaaggagatgaggttcccgacggcgacaattttccactacacaaccggattcttcagcagcatatggatccgttgaagcgccgtgtgacaatgccaccaaagagcagcaacaaacaagctcaaagtctccgctaaccactaatctcataaagcttgaattttctcattgctatgtttccttctcctagcaaagttaagatgtttgcacatttctagcttattaggtccttgtgtggaatgtgtttgaacaatgatctcatttaaacaatatcaacatgtgtgat

SEQ ID NO: 103965 - DNA, 953 bp, Zea Mays
ccggttcatcgagccggcagccgtgcactataattccgccttctcccattctctctccaaaaccctagcagccacccggttctccctcgctccaggtggcggcgcgctcccctcgttttgttcttactcctcccgtttccctcactagtcgttactgacttctcgcttgcctgctccagatctcccttcgcagccggccagggaccccttcacagcgcgggagatggctgatcaggaggccccagttgcagttgaggcaccaaccccagttcttggagagccaatggacttgatgactgcgctgcagctggtgatgaagaagtcaagtgctcatgatggacttgtgaagggtcttcgcgaggctgccaaggccattgagaagcatgctgctcagctttgcgttcttgctgaggactgtgaccagccagattatgtcaagctggtgaaggcgctctgtgctgaacacaatgttcaccttgtcactgttcctgctgctaagactcttggcgagtgggctgggctttgcaagattgactccgagggcaaggcaaggaaggttgtaggctgctcctgtgtcgttgtcaaggactacggtgaagaatctgagggccttaacatagtgcaggagtatgtcaagtcgcactagatgtaacacgtttcagtaatactctacatttggatctgggcttaatattatgcttgcgtcttgggcttgctaggagattaggacaatttactacaagagcccatgaggatatgagcaatttggaattctaaatgttttgtttatggtgttgtcatctggttttaattcaaatcgataagagatgagattattcttgctttgccattagcccattacctttttatgtttatatccatgttccatggtgtataatgtttatactctctctgttgcggttgctcttatttttcttatttgatttgacaaa

SEQ ID NO: 103966 - DNA, 869 bp, Zea Mays
ccggttcatcgagccggcagccgtgcactataattccgccttctcccattctctctccaaaaccctagcagccacccggttctccctcgctccagatctcccttcgcagccggccagggaccccttcacagcgcgggagatggctgatcaggaggccccagttgcagttgaggcaccaaccccagttcttggagagccaatggacttgatgactgcgctgcagctggtgatgaagaagtcaagtgctcatgatggacttgtgaagggtcttcgcgaggctgccaaggccattgagaagcatgctgctcagctttgcgttcttgctgaggactgtgaccagccagattatgtcaagctggtgaaggcgctctgtgctgaacacaatgttcaccttgtcactgttcctgctgctaagactcttggcgagtgggctgggctttgcaagattgactccgagggcaaggcaaggaaggttgtaggctgctcctgtgtcgttgtcaaggactacggtgaagaatctgagggccttaacatagtgcaggagtatgtcaagtcgcactagatgtaacacgtttcagtaatactctacatttggatctgggcttaatattatgcttgcgtcttgggcttgctaggagattaggacaatttactacaagagcccatgaggatatgagcaatttggaattctaaatgttttgtttatggtgttgtcatctggttttaattcaaatcgataagagatgagattattcttgctttgccattagcccattacctttttatgtttatatccatgttccatggtgtataatgtttatactctctctgttgcggttgctcttatttttcttatttgatttgacaaa

SEQ ID NO: 103967 - DNA, 762 bp, Zea Mays
atggctaaaaatctaggtactactccttcacaaacagttggtacatggtacattgaaccaaccaagtctgatcatgatggatccagattcagtgccttagccaagaaagaagatggtgcaccaccacatgtacaagtggagaataacagcagcaacaaagaagcaaatgtggacctccatgagtacagggtcattgacgtattcctgctggtaagctggttcctgctgtgtcccttttgctgtagaaggcaaggatatgctatatcaactcgctgtttcacttctcgatgctggggcaagttgaaggagcagtcgtccatgcttcatgaaaagctttctcctctgcttggatctgaggttgcagtgctttgcaaacagttggctgacttagaggcctctcatgctacagaaaatgccgcttctacggataaattttctaaactcgaagacactaagattcgctacgagcctgacctccgtcgggttaaaacaactcttgatggcgaccgagaggccaataatgcttcactacgacagaaatttgacatggagaagaaaaatcatgaggatgaaatgcataagcgagaagagaagatccaaagcttgttgagtgaggtgactcagcagaaggaacatatccaaactttgtcctccacaaagtctactctcaaaatactacgtagcttgtcagaagaccaatccaaaaagtatatggctgtgaagtccttgagaacaactgtaaggtgttcaaatttcttatga

SEQ ID NO: 103968 - DNA, 119 bp, Zea Mays
ttttcttgtattttttgcttcgattatactaacccttcagtcttgttgcaaggtccatctacccctaaccaagatctgttgcctgacctagatctgctgcctgacctagattcgctaat

SEQ ID NO: 103969 - DNA, 112 bp, Zea Mays
gtgctgtgacagctgtcaattatggtgaagcaaagttttctttagtaactcggcttttggtcgatatattgtattgctaccataaacttgttaaaatattttacatgttgtt

SEQ ID NO: 103970 - DNA, 1206 bp, Zea Mays
atggctagattacaatcctcaccatctatggcaggcaggaaatcacaacagaaagttgcttgtccaaaggttcaaatgctgaaatctctatcattccagtcatctaataagcggtctgcacagaaggagccaacgtcaaaggtccagcatcatcaacttgaatctgttaggtccaagttcagggagtcacttattgctgcgctgagtttggattcggatcagcagaataggagtcaatctcctgataatgtgcagtctgatggttctacagataaattcaaaccggcagcaggagatgtggtacaggatttagtggcaaacacatcaaaagatgtgtgcacaaccaattcaggtatagccacaactgtagctcctagtagatgtgaggaaaatgagaagttaatcagtgatttagcttcacagatgaccatgagtatcaatgatggcatgcagcaaccgtcaaatcaggtttcttcagaagacgacttattaggtcagtgtatggttgcagaagaacttttgcaaggtcacgggcttagttgggtttctgatcatgttgttgggatttctaaacctaacgcagaacctaatgatttaaaaagtctgcgaacttctgatgtggagtctgagtcaaaaagaatgaagtctgctaatgaattagcaatggatgaggagaaatttaatcaaaggcctgaaagtttggcgtttagaattgaagaggagccgttcaaattgtttcgtggggtaaataagaagtacaaggaaaagggcagatctcttttgtttaatttgaaagacaaaagcaaccctgagctaagagagagggtttcgtctggagatattgcgcctgaacgcctttgttcaatgactacagcctccaaagaactctcagagtggcggctggctaaagttgaggagtttgcacagatggttgtccttccgaatatggaggttgacccaaggagtttggttagaaaaactcacaagggagagttccaagttgaagtcgaagaaccagatggaactgaaatgtacatggatggagagaatgacacaaaccacatgaatcttgacatgctccaaaccattgaaaacaagcttcaaatgtgggtaaataacgttcactgccagaagatgcagatcatctctagggaggtcgagatgctcaggaacaagataattgagcggaatgggattctgaattag

SEQ ID NO: 103971 - DNA, 106 bp, Zea Mays
tggatatttgtttgtgaaaaactgtggataatttttaaatatccactttacagtgatacaagacattgttctgccactgattacagtaagcctatactagattggc

SEQ ID NO: 103972 - DNA, 697 bp, Zea Mays
catctttaaatttagtctcttcaggtctagttctcatggcaggtggactctggtgccttcatatatctatatatatcttttaagttgacgaccctcgtgatgctgaaactgatgaagacctctgatgaaaaaagagacatgctgcacatgcacgagggtacttgcagatagatgtcggctctatggacgaacactcgaccaagtcagatgaggagtatgagggcctagccatgcgcgacgtgatggctactggtccgacgatgagcagcaagctgtgagttaaagatgaactcacctgctctagagagtaacatccataggagtgaggcaaaatggctggtaccaccacaacatggacccgttcctgaagatgtccaaggagatggtagccgacaccataatgtcttgtgtcattgtgtcaccggccggcaacacgctgcgctggtaccggcgggtgttgtgtttcttaggcgtctgcttctgtgctttgagttgtgctatagagtggttgtgccaactactgattttaaaagaaaaagtgagctgagaatcattgttgaaaacaaatatgtaactgttcgttctcatcagttgtgccaactaccaagcatttcattgattagaatctgtcgttgctcatgagaaccaaaagtaagacacttcttaataacattggatgcaaatttctgctagctta

SEQ ID NO: 103973 - DNA, 292 bp, Zea Mays
ggtcattatgcttatattgttggtgttttcacttacatattttgttaaggtcaccatttttgctttagtagcttgttgccagtcagttataagatgcttgctagctgtgtatgcttattgcttggttgtcaattacttctcatgtatcagtttttttatttcttttctcccttctgattaaatgtttgtataccattaagatgtcattgcaatgaataactatgcctactgcctagactgggaagggacacatataggcagtatattgtgcgcaggctttgcttaacttttg

SEQ ID NO: 103974 - DNA, 331 bp, Zea Mays
agaggagggggctcaagagtcttgacgcgtctagccttcgcagaaaagggttcaagcgagaagagggggggagagggcacgggttcagagctggaggagatggagagcccgcgcagccccgaggcggagatcggccaccgggtggaggacctctgggaggtggcggagccgcagctctcgccgtcggagaagctcaactcctgcttcgaggacatccccgtcgcgtccttcccgcgcacgcacccgtcccaaggtgatatcctgtttatcaattacttttgcggttgcctcgccccctcctccttcgtgccttgcttactgtactgctcgc

SEQ ID NO: 103975 - DNA, 100 bp, Zea Mays
actttcacaaatagaaacctccggatgttggaggcatttcatcgaacacactttcggtgtgacaatagcgtcgttcaaatcttgggtcttcaactgcatc

SEQ ID NO: 103976 - DNA, 1084 bp, Zea Mays
accgttcagactctcaaactccctcgattgtaataacagagaaaaaaaccatccgccggaggccggagggcagattctccaccatcgcctccactccaccctcactacgcgaatccgcggcgaacccccctctcggattccttctctcctccccgccccgatcgcgtcgtccagagaccgccaggctccggcgcccccgcccgcccgggctcgccgggggtcgggatgccctgctgctcgccgtcgctgctcggagtcgggccgcgggtgcgctcctttctccgcgactacgacgccctccagtccctcgccctcgcactcatctacctccagggtgataaacaaagtggtagtaatgacagtggttcaacatctgcaggccagacaccacgacttaaatcttttgctaatgatgtggaaggtggactaaaaagaccgttgaactcctagggataaaacaacgggctcatcttgggaacctaaatcctgtagccaccgttctctttgaagcatagaggtttgcacaccgcagcagtttatttctcagaccagcgggaagggggtgtccaacgaaaggagcttggcaaatactgtaacggcgactgcctgtgttgccgagcatccacagcagcatcggtgccattttggagcaccgttcgtactcagcgagcttgagccggatgtttctgcaaatagctgtccaatgttggtgttgcatatcgacctatgccatgcgatatgtttactgcccatcatgtcccatttttcagacctctcttcctgtttcttttaactaccaaggaaaatgaagcaagtagttcgttagttctttagtcacttagttattttctagctgtaggctggcagttgcttctcttctagcattttggtcattgttcatagcatttgtgttgacaaggaacagatctctagatcagtgaaaggaaacaaatgtaagtttcattctgttctagaaagagctgtgatccctattggatgcatgagttttgttagaaatgttgcagggttttcacacgaaattgttctggacccacaagttatacaagtcaaattagtctatata

SEQ ID NO: 103977 - DNA, 989 bp, Zea Mays
cgttcagactctcaaactccctcgattgtaataacagagaaaaaaaccatccgccggaggccggagggcagattctccaccatcgcctccactccaccctcactacgcgaatccgcggcgaacccccctctcggattccttctctcctccccgccccgatcgcgtcgtccagagaccgccaggctccggcgcccccgcccgcccgggctcgccgggggtcgggatgccctgctgctcgccgtcgctgctcggagtcgggccgcgggtgcgctcctttctccgcgactacgacgccctccagtccctcgccctcgcactcatctacctccagattggttgtgcgctgattgggtcacttggggcattgttcaatggggttcttgtgatcaacctagtgattggtctatttgctgttgttgcaatcgagagcagcagccagagacttggccggacatatgctgtccttctcttctttgctgtcgtccttgacgttgcttggtttatactcttctcccatgctatctggactattaatcctgatgagaagtatggtgaactttttgttttctcactcagactagcattgtggatgcaaataattgggttttcagttaggtttttgtcttcattcttatggattcaaatgtatagattaggggcttcttccagcacgccaacatattttgaaaccaaccatgaagcaagaattagtttcttaagccctagatctgattcagttagacggagtcctacggcagatgatatattgggaggttcgatctatgatccttcttactactcgtcactgttcgaggatgtccgaaacaatgcatgcaatcatcaggtattaccttctagtttctgccacatccacactattctttttcattcaatgtttaacttattaggggaaagaataggatgactaaatacctctgtcaaatttgtgtggctttctaactcaataaatttgtcttctctagactacc

SEQ ID NO: 103978 - DNA, 1511 bp, Zea Mays
cgttcagactctcaaactccctcgattgtaataacagagaaaaaaaccatccgccggaggccggagggcagattctccaccatcgcctccactccaccctcactacgcgaatccgcggcgaacccccctctcggattccttctctcctccccgccccgatcgcgtcgtccagagaccgccaggctccggcgcccccgcccgcccgggctcgccgggggtcgggatgccctgctgctcgccgtcgctgctcggagtcgggccgcgggtgcgctcctttctccgcgactacgacgccctccagtccctcgccctcgcactcatctacctccagattggttgtgcgctgattgggtcacttggggcattgttcaatggggttcttgtgatcaacctagtgattggtctatttgctgttgttgcaatcgagagcagcagccagagacttggccggacatatgctgtccttctcttctttgctgtcgtccttgacgttgcttggtttatactcttctcccatgctatctggactattaatcctgatgagaagtatggtgaactttttgttttctcactcagactagcattgtggatgcaaataattgggttttcagttaggtttttgtcttcattcttatggattcaaatgtatagattaggggcttcttccagcacgccaacatattttgaaaccaaccatgaagcaagaattagtttcttaagccctagatctgattcagttagacggagtcctacggcagatgatatattgggaggttcgatctatgatccttcttactactcgtcactgttcgaggatgtccgaaacaatgcatgcaatcatcagggtgataaacaaagtggtagtaatgacagtggttcaacatctgcaggccagacaccacgacttaaatcttttgctaatgatgtggaaggtggactaaaaagaccgttgaactcctagggataaaacaacgggctcatcttgggaacctaaatcctgtagccaccgttctctttgaagcatagaggtttgcacaccgcagcagtttatttctcagaccagcgggaagggggtgtccaacgaaaggagcttggcaaatactgtaacggcgactgcctgtgttgccgagcatccacagcagcatcggtgccattttggagcaccgttcgtactcagcgagcttgagccggatgtttctgcaaatagctgtccaatgttggtgttgcatatcgacctatgccatgcgatatgtttactgcccatcatgtcccatttttcagacctctcttcctgtttcttttaactaccaaggaaaatgaagcaagtagttcgttagttctttagtcacttagttattttctagctgtaggctggcagttgcttctcttctagcattttggtcattgttcatagcatttgtgttgacaaggaacagatctctagatcagtgaaaggaaacaaatgtaagtttcattctgttctagaaagagctgtgatccctattggatgc

SEQ ID NO: 103979 - DNA, 688 bp, Zea Mays
gattctccaccatcgcctccactccaccctcactacgcgaatccgcggcgaacccccctctcggattccttctctcctccccgccccgatcgcgtcgtccagagaccgccaggctccggcgcccccgcccgcccgggctcgccgggggtcgggatgccctgctgctcgccgtcgctgctcggagtcgggccgcggattggttgtgcgctgattgggtcacttggggcattgttcaatggggttcttgtgatcaacctagtgattggtctatttgctgttgttgcaatcgagagcagcagccagagacttggccggacatatgctgtccttctcttctttgctgtcgtccttgacgttgcttggtttatactcttctcccatgctatctggtatgtcttcggtagccaccatctatcagtttagttaccctgatgttttcatttggtacaatgtgaagtttggcacctagaaaggaatgttgtattctctatattcgaatgcttaattgactgattttttgactgggtttctttattcatctttcaccatgacataactaattgttttcaatgttgtataacagttgatctgtcaatgacttgtcatgcaatgactacctatataggttctgagttctaatatatcactagagtcattactatgatcattgaaacttagaactttgaag

SEQ ID NO: 103980 - DNA, 1492 bp, Zea Mays
acgtgctcgtacgcgggctcaaacgccgtgccccgtaccggtgtatcctcgtgctttctgccaactatagttacacatactgccatattatatatgattcatccccataaataaagctccaactcatcattgtcatcgtccaaatttcagttcgagaagactccatcaagcagctcatacgtatatcacttgccatgccagcctagcttcttccgtgtctttctttctcaataaatacatgccactcacatggtgctcctccatcttccaagtcaccaacgcaaattgcaccaagaaatccatcgagaggccgtcgacaggggaattaatggcgtcgtcgtctagcagcagccaccgccgcctcatcctcgcagccgccgtcctgctctccgtgctcgcggctgccagcgccagcgccgggacctcctgcgtgccggggtgggccatcccgcacaacccgctcccgagctgccgctggtacgtgaccagccggacctgcggcatcgggccgcgcctcccgtggccggagctgaagaggagatgctgccgggagctggcggacatcccggcgtactgccggtgcacggcgctgagcatcctcatggacggcgcgatcccgccgggcccggacgcgcagctggagggccgcctagaggacctgccgggctgcccgcgggaggtgcagaggggattcgccgccaccctcgtcacggaggccgagtgcaacctggccaccatcagcggcgtcgccgaatgcccctggattctcggcggcggaacgatgccctccaagtaactgcgaagagcatagtgcatgaggaatgagcttgtagctagctcatatgtctgaataataagcacagcaagaagatgaatgcatttctcggatcgttcatccggaacaataattaaaggggatccggatttgttcttgtgatataattaacgattcctgttatacttggaagtagctaggctcgtccccatccaatgcaagcaaagatctgatctcccaacgtgcatgagaaaatgtgagcgatttacttcaccggtccttcctctaattaaatggaaatgtgaagtggaacataagaaattaaggtgaagccaaaagctgccaattgatgtatatataatgcatttgtgtgctttttgctgaaatggagtcttgtgaaacagaaatctggaggatgcaagctaccagttttgaagatttgtttttttatatatagggccagttgaagatttgtttgaacagaatttgggggtacacaggttgcaaccagtgttttgcttggcagcatgaggggactttgcagccgtcattgctgatcacatatctatcacacctagaattttgttggcgctgattcggtcaccaatcactacgatgcgtacctacggcgatgctctctgcggacacatggatggtccacggccgagggctggaagatcctcgacctggcgcagaggctagggtttctgcctaacg

SEQ ID NO: 103981 - DNA, 181 bp, Zea Mays
cttccagattcagttttcaattcgaattcaaaataatcaaaagccatgctccaatatccaatgcacaacagtaatatatttttgccacattattaatttaggaaaaaatatactaaatgaacaaaagtattcccactccaataattcatttgtgaaatgttatttatacttaaaattatga

SEQ ID NO: 103982 - DNA, 113 bp, Zea Mays
cggtttgaatttcaaacttcactcatagctcaatccaagatccataatgtcaggcaaaatttattttatttatttatccgcctaaataaatgtctctatatgcataatccatg

SEQ ID NO: 103983 - DNA, 702 bp, Zea Mays
tctgttcgctctgttacttccctggtcgccatctttgagtgtcttccatccgttgtcttcctcatctctcctatcggcttcctccgttgttctggcgaaggcagcgtcgacatgctgctccagcctaaagcagtcgcgcccaggccaaagtgttgtcgccccttctgtcgtcgctgcgcgtcaggccgcgccgctcttggccgcggcgctcctccttgtagcggtaccccctggcctgcctactgctatctcaccagcatttgcacaactagtttcagaaggcgcagcgctgttccggaaggcttttattggttgccatgacatgggaggaaacatcctacagccaattgaaatcccgcttccccacatccgcatcccgctcccgcccctccacgcccgcggccgactccaactccttcgctctcctcgccgacgaggaggacgatgatgtggccgccgcgctcgacccgctgctcaccgtcaccaccaccgccaccgagggcgattctctcgccaaccccgacgacgaccgcatcgatgagctcgacatgctggacgaggacgtcacaggcgccgatgaggctgactccgcctccgcctctatggtgggggccacgcccctcgtatgggaccacgtcaccggcaccgctcgcctgccgttccgcctcccagcctccgtcgaatccctacacgcagggttgt

SEQ ID NO: 103984 - DNA, 1347 bp, Zea Mays
acggagcctacataacccttcccttcctcgcttccctcctccccgcgccgccataccctcgaacccgagaggaaccctaacaccaaaacgcccccggaggcagctaggagagctcgaatcaccagccatgtcggagcacgacctcacggcgctgatggcggcgcagctggaccgccacctggtgttccccctgctggagttcctccaggagcggcagctctactcggagtcggagatcctggaggccaagatccgcctcctcagcggcaccaacatggtcgactacgccatggacatccacaagtccctctacggcaccgacgacgtgcccgaggacatggtgaagcgccgcgccgaggtcgtctccaggctcaggtcgctcgaggaggccgcagccccgctcgtcgccttcctccagaacccgcagctcgtgcaggagttcaggcccgacaaacagtacaacatccacatgctccaggagcgataccagatcggtcctgaccagattgaagctctgtatcagtatgccaaatttcagtttgagtgtggtaactactcaggggctgctgattacctttaccagtatcgtgctttgtgcacaaacagtgagcgaaatgtgagtgccctctggggaaagctggcagcagaaatcctaatgcagaactgggacgtagctttggaggaactcaaccgcttgaaggaaataattgattcaaagaacttctcatcacctctgaatcagctccagaacaggatatggctgatgcattgggctctgttcatcttctttaaccatgaaaatggtagaaatgggatcattgatctgttcttccaggacaggtacttgaatgctatacagacaaatgcacaccatcttattaggtatctagctactgcagttgttgtcaacaaaaggagaaggaatatgcttaaagagttgattaaggtcattcaacaggagcaccatagctacaaggatcccgtaactgaatttctggaatgcttatatgttaactatgattttgatggtgctcaacagaaactcatagagtgtgagcaggttatactgaatgatccattcctgggaaagcgcattgaagagggaaattttgtcagtgttcctttgagagatgagttccttgaaaatgctaggctttttattttcgagacatactgccgtatccatcggtgcatcgatatcaggtgtggcaaaatttctctttcagcaatgctttagcaggaggatgatgattgttaagtataagtattgacacattttcagatctctaatttgttttctagttaaactatttcactcttacttattctgtcactacttgctatagt

SEQ ID NO: 103985 - DNA, 1678 bp, Zea Mays
acggagcctacataacccttcccttcctcgcttccctcctccccgcgccgccataccctcgaacccgagaggaaccctaacaccaaaacgcccccggaggcagctaggagagctcgaatcaccagccatgtcggagcacgacctcacggcgctgatggcggcgcagctggaccgccacctggtgttccccctgctggagttcctccaggagcggcagctctactcggagtcggagatcctggaggccaagatccgcctcctcagcggcaccaacatggtcgactacgccatggacatccacaagtccctctacggcaccgacgacgtgcccgaggacatggtgaagcgccgcgccgaggtcgtctccaggctcaggtcgctcgaggaggccgcagccccgctcgtcgccttcctccagaacccgcagctcgtgcaggagttcaggcccgacaaacagtacaacatccacatgctccaggagcgataccagatcggtcctgaccagattgaagctctgtatcagtatgccaaatttcagtttgagtgtggtaactactcaggggctgctgattacctttaccagtatcgtgctttgtgcacaaacagtgagcgaaatgtgagtgccctctggggaaagctggcagcagaaatcctaatgcagaactgggacgtagctttggaggaactcaaccgcttgaaggaaataattgattcaaagaacttctcatcacctctgaatcagctccagaacaggatatggctgatgcattgggctctgttcatcttctttaaccatgaaaatggtagaaatgggatcattgatctgttcttccaggacaggtacttgaatgctatacagacaaatgcacaccatcttattaggtatctagctactgcagttgttgtcaacaaaaggagaaggaatatgcttaaagagttgattaaggtcattcaacaggagcaccatagctacaaggatcccgtaactgaatttctggaatgcttatatgttaactatgattttgatggtgctcaacagaaactcatagagtgtgagcaggttatactgaatgatccattcctgggaaagcgcattgaagagggaaattttgtcagtgttcctttgagagatgagttccttgaaaatgctaggctttttattttcgagacatactgccgtatccatcggtgcatcgatatcagcatgcttgctcagaagttgaacatgagctacgatgaggccgagttgtggatcatgaatttggttagaagctcaaaactggatgccaggatcgattcagtatcaggaactctcatcatgacaaccaatcacgtcaatgtccatgagcagattgttgagagcttgaagggccttaatatgaggacctacatgctcgcaaagaacatcgttgagccagctcagcaggcaactcggtgaggatagcagacttcacagttttgagacgccaaggactagtttagagacaactgtaaacttttcgagctctattgtgtggcattggatttcaacacctggaaggtggcttgccgtttgatacagcttggagtattatgctgacattttcaatattttgtaatcggaacttcgtaacagtggatccttctcaatgtattgctattattttatgctgacattttcaacatctttctctattag

SEQ ID NO: 103986 - DNA, 136 bp, Zea Mays
atgtctaccacatgtactatttacgctaaaactatacgatttatgcttgaacgtggagttcgtatatcagtttactgcatgcatattttttgcatgcacattggaaagacaattccttgatttatgttgttcttaa

SEQ ID NO: 103987 - DNA, 118 bp, Zea Mays
aagaagcacacataatcatctttttttcttctgcactaaataaaagtatactccattatatacttgtctcatggatgatatattttagaatttactgcatatacagctgttgtgctcg

SEQ ID NO: 103988 - DNA, 93 bp, Zea Mays
aacttttctgtgtagtattacaggtgcttgattctcaatggcttgcaaggcgagctagttatatggaattcaatgaggttaagtccacacagg

SEQ ID NO: 103989 - DNA, 1196 bp, Zea Mays
cattccttccccaactctctgcaccagcaccttcccatggcgcagggttcccaggcgtccatcctctctcccttcttcccttgtgcaggcgcccccatctcctccccttttctgcagcaagcagcgcccagctgagccccgtccactcgcccagccctatctccctcacggcgccctcgctggtgctcgccccccctgctggatgccgctcctcaccctggtggccgagctctcccatggacgtcagccctcatcctcaggttgcccctcccaaggcgtttgttcctgcccaaccatggacgcgcccctcccttttgctgctcgtcgtggacaggcttggcgccctaatcctcaggttgcccctcccatgacggtcatggtgtcatctgttatcggaggaaaaatccctaggaatccgaaggtgatgaagtgatgccccagtgcagcgcctggtaggtgtccggtggaacgcctaagccaggactattgtcgttcttatgaacctggtatcgattgaggtacgctagttgatcacgtgatgcagaattcaagaattgagttgatctcaagatgatgaaatgatgaactactccgacaaacgatgtctgtgaatcaatcctactactatacaggttcttagagaaaacgtttattgtgcaataaatgatggaattatcaaccttattgacaaggtacgctagctgaaaaatcgtgcgaagcgaagggtgtggatcaaaacaacccacaagacaatgtgaggtgttcatatgtgtctaactaaaaatttgttgcccaaagtttaatgtattcatttttggctaatattacatgttggccaaacgcttggaacaatggaactattgcaaattcctttttacagactacaacttctatcgaactaggtggtcaaggctcaggattcagagtagaagatgcacataaatactggtgaatgatgccatcgacgatgatgaactgatgaaacgatggatgatgccatcgatgaaagatggaatggaactcaaattttggtggtcgcacaagtgtggagacttgaattcatatatacttagttaggctcaatgttagcacaaacagttgatgagcaagtttttccattagtagtttagtttgaatttagagtacaattatgtatgagttatttgacagtgcttatttatgagatattgaatgat

SEQ ID NO: 103990 - DNA, 749 bp, Zea Mays
aacgttacttacaggatgggcccactacaaactttcactctctcttgcgcttgcgcagcctcttcttctccgatcccgactccaactctccctctctccttcgcctggcacatcctcggcggcgcggcagcctgcttcttcaccggcgcggcggcctgcttcttcgacgacgcggaggcctacggcggcctaccgagcggacgggtccacggacgaacggatctccggcgcctggcagatcttcggcgcgcggcctaccggttgtggacggatctccgctgcctggtgccctggtatatcctcgacgtcgcggcttgcttcttcactggcgccgcggtctgattcttcgaaagcacggcggcctgccggttttgtccaggcaggcagacgcggcagcgtcttctccaggcgggtggatctccagcgctcctcgagctggagcaggcaggcgtgccggtcttctccaggcgggtggatcttcaccggcgcggcggcctaccgggcggacggatccggtcgatctccagctgctccgtgcctctgctgctccgcggcctgagctccgggcggacggatccgcggcccagcgactccgctgcctctgctgctctgtgtctccagcggatccgtgcctctgctgctcggcgtcctgagctccggccgtctcgcgctgttgcttgctccttgaatccgcacacatgtgattggtcaaataaattttctttgtcagaacatatgtcacttacata

SEQ ID NO: 103991 - DNA, 926 bp, Zea Mays
aacgttacttacaggatgggcccactacaaactttcactctctcttgcgcttgcgcagcctcttcttctccgatcccgactccaactctccctctctccttcgcctggcacatcctcggcggcgcggcagcctgcttcttcaccggcgcggcggcctgcttcttcgacgacgcggaggcctacggcggcctaccgagcggacgggtccacggacgaacggatctccggcgcctggcagatcttcggcgcgcggcctaccggttgtggacggatctccgctgcctggtgccctggcagacgcggcagcgtcttctccaggcgggtggatctccagcgctcctcgagctggagcaggcaggcgtgccggtcttctccaggcgggtggatcttcaccggcgcggcggcctaccgggcggacggatccggtcgatctccagctgctccgtgcctctgctgctccgcggcctgagctccgggcggacggatccgcggcccagcgactccgctgcctctgctgctctgtgtctccagcggatccgtgcctctgctgctcggcgtcctgagctccggccgtctcgcgctgttgcttgctccttgaatccgcacacatgtgattggtcaaataaattttctttgtcagaacatatgtcacttacatatggcgcagtggattgtgtcagtggtaaggtgtttgctgtgctgggttcgatccttctagggtctattttttgcattttgtccgattaaactatattcaccgaatcagaggtccgattaaactatataaacttttgcataatccactgaattttttaccttaagcaaataaggccaaaacatgagtccatgccaagtttcactattttttgaccaaattttctatctatttaatttttggctaggaaggcatgtaacccaaaaaaata

SEQ ID NO: 103992 - DNA, 406 bp, Zea Mays
aaactttcgcataatcctctgaattttttaccttaagcaaataaggccaaaacatgagtccatgccaagtttcactattttttttaccaaaattgatatttatttatttattttttggctaggaaggcatttaagccacaaaaattagtaaatattccaaaaaagggacatctatgcatgaagtaagtttgtagaggctagatgaacaaatagtacaaatttcaaggaagaaaacaaataaaactaagaaatgtagctcaaaccatgtagttgtagcccaatgtcatgaaacttagtgagatatgtgtccatttgtgaagcacatatattcaaactttcgcataatcctctgaattttttaccttaagcaaataaggccaaaacatgagtccatgccaagtttcac

SEQ ID NO: 103993 - DNA, 4242 bp, Zea Mays
accccagcatatcctccgtcggtgctcaggaccgacagtgagcactcactgccaagcgggccctgcacggcccccagttcacccttcttccacctcccgcctcactggcacactctccccgacacaactcggcttaaactaatccgaacccatcccaccagacgcgcgcaaattaactagaatcaaaatcgtctcgctgctgcaataatcttttatcaattcttaatccctcgcgtcgaaagcgacagcggaaccaactcacgttgccgcggcttcctccatcggtgcggtgccctgtccttttctctcctccacctccctagtccctcctcccccccgcatacatagctactactagtagcaccacgctcgcagcgggagatgcggtgctgatccgtgcccctgctcggatctcgggagtggtgccgacttgtgtcggctcggctctgcctaggccagctccttgtcggttctgggcgagctcgcctgccatggagggcgacgcggacggcgtgaagtcggggaggcgcgggggagggcaggtgtgccagatctgcggcgatggcgtgggcactacggcggagggagacgtcttcaccgcctgcgacgtctgcgggttcccggtgtgccgcccctgctacgagtacgagcgcaaggacggcacacaagcgtgcccccagtgcaaaaacaagtacaagcgccacaaggggagtccagcgatccgaggggaggaaggagacgatactgatgccgatgatgctagcgacttcaactaccctgcatctggcaatgacgaccagaagcagaagattgctgacaggatgcgcagctggcgcatgaatgctgggggcagcggggatgttggccgccccaagtatgacagtggtgagatcgggcttaccaagtacgacagtggtgagatccctcggggatacatcccgtcagtcactaacagccagatttcgggagaaatccctggtgcttcccctgaccatcatatgatgtctcctactgggaacattggcaggcgcgccccatttccctatatgaatcattcatcaaatccgtcgagggaattctctggtagcgttgggaatgttgcctggaaagagagggttgatggctggaaaatgaagcaggacaagggaacaattcccatgacgaatggcacaagcattgctccctctgagggccggggtgttggtgatattgatgcatcaactgattacaacatggaagatgccttattaaacgatgaaactcgccagcctctatctaggaaagttccacttccttcctccaggataaatccatacaggatggtcattgtgctacgattgattgttctaagcatcttcttgcactaccggatcacaaatcctgtgcgtaatgcatacccactgtggcttctatctgttatatgtgagatctggtttgctctttcctggatattggatcagtttccaaagtggtttccaatcaaccgcgagacttaccttgatagactcgcattaaggtatgaccgggaaggtgagccatctcagttggctgctgttgacatttttgtcagtactgtcgacccaatgaaggagcctcctcttgtcactgccaataccgtgctatccattctcgctgtggactatcctgtggataaggtctcttgctatgtatctgatgatggagctgctatgctgacatttgatgcactagctgagacttcagagtttgctagaaaatgggtgccatttgttaagaagtacaacattgaacctagagctcctgaatggtacttctcccagaaaattgattacttgaaggacaaagtgcacccttcatttgttaaagaccgccgggccatgaagagagaatatgaagaattcaaaattagggtaaatggccttgttgctaaggcacaaaaagtccctgaggaaggatggatcatgcaagatggcacaccatggccaggaaacaataccagggaccatcctggaatgattcaggttttccttggtcacagtggtggtcttgatactgagggtaatgagctaccccgtttggtctatgtttctcgtgaaaaacgtcctggattccagcatcacaagaaagctggtgccatgaatgctcttgtccgcgtctcagctgtgcttaccaatggacaatacatgttgaatcttgattgtgatcactacatcaacaacagtaaggctctcagggaagctatgtgcttccttatggatcctaacctaggaaggagtgtctgctatgttcagtttccccagaggttcgatggtattgataggaatgatcgatatgccaacaggaacaccgtgtttttcgatattaacttgagaggtcttgatggcatccaaggaccagtttatgtgggcactggctgtgttttcaacagaacagctctatatggttatgagcccccaattaagcaaaagaagggtggtttcttgtcatcactatgtggtggcaggaagaagggaagcaaatcaaagaagggctcagacaagaaaaagtcacagaagcatgtggacagttctgtgccagtattcaatcttgaagatatagaggagggagttgaaggcgctggatttgatgatgagaaatcacttcttatgtctcaaatgagcttggagaagagatttggccaatctgcagcttttgttgcgtccactctgatggaatatggtggtgttcctcagtctgcgactccagaatctcttctgaaagaagctatccatgtcataagttgtggctacgaggacaagactgaatggggaactgagattgggtggatctatggttctgtgacggaagatattctcactgggttcaagatgcacgcacgaggctggcggtcgatctactgcatgcctaagcggccggccttcaagggatcggctcccatcaatctctcagaccgtctgaaccaggtgctccggtgggctctcggttcagtggaaatccttttcagccggcattgccccctatggtacggctacggaggacgcctgaagttcttggagagattcgcctacatcaacaccaccatctacccgctcacgtccctcccgctcctcatttactgtatcctgcctgccatctgcctgctcacggggaagttcatcatcccagagatcagcaacttcgctagtatctggttcatctctctcttcatctcgatcttcgccacgggtatcctggagatgaggtggagcggcgtgggcatcgacgagtggtggaggaacgagcagttctgggtcatcggaggcatctccgcccacctcttcgccgtcttccagggcctcctcaaggtgcttgccggcatcgacaccaacttcaccgtcacctccaaggcctcggatgaagacggcgacttcgcggagctgtacatgttcaagtggacgacacttctgatcccgcccaccaccatcctgatcatcaacctggtcggcgttgttgccggcatctcctacgccatcaacagcgggtaccagtcgtggggtccgctcttcggcaagctcttcttcgccttctgggtgatcgttcacctgtacccgttcctcaagggtctcatgggtcggcagaaccgcaccccgaccatcgtggttgtctgggcgatcctgctggcgtcgatcttctccttgctgtgggttcgcatcgatccgttcaccacccgcgtcactggcccggatactcgaacgtgtggcatcaactgctagggaggtggaaggtttgtagaaacagagagataccacgaatgtgccgctgccacaaattgtctgttagtaagttatataggcaggtggcgttatttacagctacgtacacacaaggggatactccgtttatcactggtgtgcattcttttgttgatataagttactatatatacgtattgcttctactttgtggagagtggctgacaggaccagttttgtaatgttatgaacagcaaagaaataagttagtttccattctttcaaatgagcacacacataggacatgtttggttcgacatttttaccaatgattccaatgcataacactattttatgttagtaagttatccagttgcattaccgttcctaaactccttgttgaaacaaacaacaccataatctcattgtaggtgttgatgcaccttgttaaggtagtgtttggtttcggagtatggtgggacggagccgctccgatcctaatttgttgttatttggattggtttcatatagg

SEQ ID NO: 103994 - DNA, 1174 bp, Zea Mays
tcgcgctcacctttgccgcaaaactactcgttatttaaacgcgcgctctgtgagcgtcgatggactcacgaagcagcacactctgcactctcggcaacaactgacggccggaggaagaaggcgcagacgacaagcagaagcttgtgccatcgatcaatggcggcggtgacaaagatctacgtcgtgtactactcgacgtacggccacgtggcgaggctggcggaggagatcaagaagggcgccgactccgtggacggcgtcgaggcaaccatctggcaggtggcggagacgctgccggaggaggcgctggcgaagatgcgcgcgccggcgaggagcgaggagcacccggtgatctcgggcaagcagctggtggacgcggacggcatcctgttcggcttcccggcgcggttcggcatgatggcggcgcagatgaaggcgctgttcgactccacgggcggcctctggcagcggcaggcgctggcgggcaagcccgcggggttcttcttcgcgctgggcacccagggcggcgggcaggaggagacggcgctcacggccgtgtcgcagctcacgcaccacggcatggtgttcgtgcccgtgggctacacgttcggcgccggcatgttcgacatggacgaggtcaggtgctgcagcccgtacggggccggcacgttcgccggcgccgacgggaggagcaggctgcccagcgacgccgagctgcagatggccgcgcaccagggcagctatttcgccgccttcgccaagaagctcaaggcgggagcggccgtcgtggcctgagcctgcctgagtagtgctctctcctctctgcccatcgatgccagctgctcttgtctgcggaaataaaataaagctccattacgtatacaacttttatgcgatagccgataggtggttgatgtgaaatcaggaacgtgtagctttcacttgtactatacttttggagtgccagcgactttctcggaaccttgctcactataaaatgtcaaattaaataagcgggtgattgatttataaggactaatttttagccactttattttattttacttctaaattactaaatacgaaaactaaatgtatctggcgaaacactatgcgtctgattggttgccgtatcagtctaatcaggatgcccgaacggagccataataagtag

SEQ ID NO: 103995 - DNA, 3271 bp, Zea Mays
ctctcctctccactttcttctccccctcacggagtgcaagtgcgagtgggagagtgagcggcggcggcagcggcagcgcagcggcagtacagtagccacggcccctgtcgccgcgtggtgtgccgtgcccgtgccccctctcagcctctctctcccccttccctaccaggctacccacccaaaaccacagagaaaagcaggcctgggcaccaccaccgctgcctcgccccgagccaagaggaagccccaccccaaatgccttcctcttccccctgctaccgccacagcttcctcttcctggcccttctctcggcgtgcttctcgacaccgggggcagcggacggcaccgggggagccggcgacggcggggatgccgcggcaatgcaggcgctgcggcgggacctggcgccgccaggctggggcccgggtgcggaccactgcgcgtggcgcggcgtcacctgcgcagccgcgggggccggtggcgtggtcaccgcgatcgagctgccgcgccgggggctccgtggggacttcgccgccgccgccgcactccgcgcgctggcgcgcctcgacctctccgccaactcgctcagcggcggcctctcgccggcgttcggcgcgctcacccgcctcgagtacctcgacctctcaatgaacgcgctcaccggcgccgtgccggccgcgctcgctggcgcgtccgcgctccggttcctgaacctctccaacaacgcgctctccggcgccatccccgacgatctcaggggcctcaagaagctccaggagctgcagatttcgggcaacaacctcaccggctccctccccggctggctcgcgcggctcccgggcttgcgcgtgctgtccgcctacgagaacgcgctctccggcccgatcccgccggggctcgggctctcgtcggagctccaggttctcaacctccactccaacgccctcgaggggagcatccccagcagcctcttcgagctcggcaacctgcaagttctcatcctcaccatgaaccggctcaacggcaccatccccgacaccatcggccggtgccgcggcctctccaacgtccgcatcggcgacaacctcctctccggcgccatcccggcgtcgatcggggacgccaccggcctcacgtacttcgaggccaacacaaacgacctgtccggcgggatccccacgcagttcgcgcggtgcgccaacctgactctgctcaatctggcgtacaaccgccttgccggcgaggtgccggatgttctcggagagctcaggagcctgcaggagctcatcgtgtctggcaacggcctctgcggcgagttcccgaaatccatcctgcggtgcaggaacctgagcaagctggacttgagctacaatgcgttccgcggtggcctgccggagagcatctgcaacggctcacggatgcagttccttttgctcgaccacaatgagttctctggaggcattccagcaggaatcgggggctgtacccggctgctcgagctgcatctcggtagcaacaacctcagtggtgaaattccagctgagataggcaaggtgaaaagcctgcagattgtgctgaaccttagcttcaatcactttactgggccgctgccccacgagcttgggcggcttgataagctggtcatgctggacttgtcaagcaatgagatgtccggtcagatcccaagtgatatgagagggatgctgagcttgattgaggtcaatttgtcaaacaaccggttcagtggcgccataccggttttcggaccgttccagaagagtgccgcctccagcttctccggcaacgccaagctgtgcggcaacccactgaatgtggactgtggatcaatttatggctccaattatagaatggaccacagggggatatcttacagggtggctttggcagttgttggttcctgtgtgctcatcttctcattggtgtcattggtggtggcgttgttcatgtggcgtgagaagcaggagaaggaggaagatgcgaagaagaaggccgaggcaggggaggtggtggtggcagccccgcaggtcgtggcctcatccgtgttcatcgatagcatgcagcaggccattgatttccagagctgcatgaaggcgacactcaaagatgcgaatgaagtgagcaacggaacattcagcacttcctacaaagctgtcatgccgtctggcatggtggtgtgtgtcaagaaactgaagtctgtcgaccgtgcggtcatccaccagcagacgaagatgatccgagagctcgagcgtcttgcccacatcaaccacaagaacctggtccggcccgttgggtatgtcatctatgacgacgtcgcgctgctgctgcaccaacatatgctgaatggaaccctgcttcagttgctgcacagcagcggcggcgatactgacggcaagaagcagaaacctgactggccgaggctgctctcgattgccattgatgtcgccgaagggctcgcattcctccatcaggttgccaccattcaccttgacatctgttcagggaacgtcttccttgactcgcactacaatgcgcttctcggcgaagtcgaaatctccaagctactggacccttcaaagggcacagccagcatcagcacggttgctggctcatttggttacattcctccagagtatgcctacacgatgcaggtgacggtgcccggcaatgtgtacagctacggcgtggtcctgctggagatcctgacatccaagctacccgtggacgacgtgttcggcgagggcgtggacctcgtcaagtgggtgcacaccgcaccagcaaggggtgagacgccagagcagatcatggacccccggctgagcaccgtgtcgttcgcgtggcgcaggcagatgctcgccgtgctcaaggtcgcgatgctgtgcacggagcgcgccccggccaagcgacccaggatgaggaaggtggtggagatgctgcaagaggccaagaacagctgagttgatgtgtttctctgctgaatcctgaatgctgcggttgcctgcttggaagtcgagccgagcctctagaaaaaaatctggtcattggttcggttcgagtatgaaatccatccagtagtgtttaattctctgtatatattcggtaattagtaccccgattatgcgccatttatggatattggatcttgaagcatcaaactagaaatcttgcttgcagtgctgctacctgcaacttgcaagtgaagaaatgtctcatccataggagtaaatctggatcgtttttagcaagcaaata

SEQ ID NO: 103996 - DNA, 481 bp, Zea Mays
ataataaaacccatggtttctgtatttcttcctgaagttttaaattaaataagaaaactactcaaaactcaatattagaaggaaaaataggaatattgtttgaccagagttagaaaaatttggagaagtttatatctacctactgacccagttaaaaatgctaaacctctctgtcccctccattaagttagcttttaccccttatttcataatatgcttaagggtaagaaaaatagaaaatgcaatttaaacaaagaaccagagagtacctctatttttgttaggatacttattcaatatagttcactggaaagatatatcataccctgttttagtataaaataagaaggatcccttttgttttaataaaacaagtgaaacttaggtaaactctacaaaaataaccccaaggtagaaacaccgccacccttgggataactaatgttttgttattaagaacttaggaaaaataggagatctg

SEQ ID NO: 103997 - DNA, 192 bp, Zea Mays
cttcataaatataggatccctccaacagccatgcagctaaacgcattagaactagtttatgatgtatactgaaacaaattatactacacgctgtagatatttatgcaattccttacactgcgtaaaaaatctggcatgttgttcactggtggacgcatctccgggtggagcgtaaaaaccttaagttttgag

SEQ ID NO: 103998 - DNA, 552 bp, Zea Mays
atgccgtctgggacagtctcgccccgtcttgatgcgccgcccgctgtggcaaccaaagtaacaaccttgaaagtataccgcagacggcagagtgattgtccacgagttttggcaccttcagtggatcaccacattgaattaattccggacctgggatctgatgatgcccccattcagtcctttgtggcttccgttacagagaaggtggagtgtctgctgcctccgccggtgccacagagacgacagtcggctaggctgatgcctcctgattttattccccgacgcagttgtcgcttggcaaaacaaaaaaagttcaacacttccggaaggcagattcaagtggacatcatgaaaaggctgaaaattgtgtcggatcagcaggctcttggctgggaaaccctggaagaatatggaagattgttcagcagtagaccttcggattctcacataaaggcgctggctgctttgttcgggtggactgtcccggatgacccagctccggatgctgaattgcccgctatatctgggttttctccagctgatcttgtgtaa

SEQ ID NO: 103999 - DNA, 180 bp, Zea Mays
cagctgggcgccgcgacggacgggttcagctcgcagaacctgctcggagaaggcggcttcggacgggtgtacaaagggctcctcgaggacaccgaagaggttatcgccgtgaagcatctgaacagggacggtctccagggcaacggcgagttcctcgtcgaggtgctgatgctcagcctc

SEQ ID NO: 104000 - DNA, 710 bp, Zea Mays
ccatccatcgccttccccatctcccccagttcccctcgtcgtcgcttcttccaaaccctagcggcctagcctgcctcctacctcgcccgccgacctatctctgccagtcctattccccgcggcagcgcgggatctcctcgctcccgtcgctccctgcacctacggtacaaccgctccatccaaacgagatccagcggatggaacccccggcggcgaaggaggcgccgccacttcagcctgcggcggaggaggacgcgatgctctctgcgacggcggccatggcgaaggaagccgctgtagcgttccagggctgccgctacgccgactgtgccgcagtgctcacgaggctgctggacaagaaagagggcgatctcaaggtgcacttgtaactactctttgtgtctttcctaaagaggagttaggagctcttgcagtttaagtttgtgtgcggaatctattgttggacactaacatagcaaatcaataggttagacacatctgtggttatgtacaattggtctggtttggctgtttgggttccaatcatgtatgtttgagttccaagttccaactgtgtagttcatagttgtttgagttctcatggttgttttgagttccaactgtactgtctgtttgagatgtctgttaggcgaggggttcaagacaggttcaagtttgcttatgaactttgctgtatggattcatcttca

SEQ ID NO: 104001 - DNA, 2933 bp, Zea Mays
tccccatctcccccagttcccctcgtcgtcgcttcttccaaaccctagcggcctagcctgcctcctacctcgcccgccgacctatctctgccagtcctattccccgcggcagcgcgggatctcctcgctcccgtcgctccctgcacctacggtacaaccgctccatccaaacgagatccagcggatggaacccccggcggcgaaggaggcgccgccacttcagcctgcggcggaggaggacgcgatgctctctgcgacggcggccatggcgaaggaagccgctgtagcgttccagggctgccgctacgccgactgtgccgcagtgctcacgaggctgctggacaagaaagagggcgatctcaaggtacaccataacatggccatcactgaattcttcttggatgattgtcctgattcaaacaggctgcttaaaattcttggtgattttaagagaagaagtgaagagcttgcatgtgcatctagagaacaagctgattctgctaatggggtaggaaacagcgctcattcaggatcaagagggagtggtgctttactacctttttcctctacacataatgcgtcaacttatggggatgaatttgacacgaccataattacattcaacatggctgtcatcctatatcatcttcatgactatgaatctgcactatctgttttggacccactgtaccgaaacattgaaccaatggacgagccaactgctcttcatgtatgctttctattattggatattacattagctttgcaagatgcaacaaaggctgtggatatagtacagtacttggaaaggtcgtttggagtagctaacacaatgaacccgaatgaaaatgcaagcatagctcagcagcaattagctcaagcgaagcctcctgtgaaaattagcatgcctccagattccgattcaaatgcttatgctggtggatatgagaacctttcgtcaggaattttcccagatgagcaaatagaatttgaatctctatgctctagttttgatggacatcagaatgtgggcaggcgtatcttgaatgatttctcaagggcgtctgctgatcttgctgctactgctgctgatttgaaagttagacttcagatttacaaggtccgtcttctactgctcactaggaaccttaaggttgcgaagcgagaactcaaagtactaatgaacatggcacgtggtagggattcatctacagagcttctcttgaaatctcagctggagtatgcccgggggaattataggaaggctgtgaagctattgagcacaccaaataatcggactgaaccagcaatgctagccattttccacaacaacatgggatgtatactccaccaacagagatcgtatcacgcctctatatggtgctttagcaaagcgctgaaatacagcttatcatttcgttcagagaaaccaatgaagttgtctacattatcacaagacaagtcttgccttatttcatacaactgtggtatccaacatttgatgtgtgggaagcctttgttagcagcttcttgttttcgtgaagccatgccgctcttctacaagcgaccccttttctggctccgtttttctgagtgcagcctgctagctctagaaaagggtctcctgtgtgcaaatggtgcttcctcattcaacgatgagattgaaatcaatgttgtggggtcaggacaatggaggcagttgattgtcaacccagtgaactcgagaagtaatttagattctgcaggtgtgactttaggcgaacataaaaatttggtttcacttggatttgctagacagtgtctacaaaatgcgctgctattattggatgctactgagaaggaaaattgggtaatcgcatctgatacagaggattgggaccaaggaaccgtacatggatataaaagctcaggccagaagaatactacaagtacagattctaaaacaccttcaggcccaactctagctaatgtaaatggagaacaaaagggcacaagcttgaatgctaccttgcagagttctcttgctttctatgacgagatccgtagaaaagagtacatcaaaatcagacaggctgtcctggcgaacttggcatttgttgaattgtgccttgataatcccttgaaaactttgacgtatgcaaagtcagtactgcaggtgacagactgttccaggatgtatgcgttcctcagccatgtatacgcagccgaagctctatgtactttgaacagaacagaggatgccgccgagaatctatcagtttatataagagatggtaatcatgtcgagttgccttatagtgtggagaattctgaaaaggccttggttgagaaagacagtgatggtgaagacttggttgctcctgcagtgacaaaactcgccacagaagaacctgagcagctcaggccggaggaggcccgtggtgtcctgtatatcaaccttggcatgattgctgcaaggcagggagaagttgaaaaagccaactacatggtgagccgtggcctggcgatgttgcccaacaacccccgggcagtgctagcatcggtttacgtagaccttttgcaagggaagtcccaggaagctgtcgtgaagttgagacggtgtaggaatgtgagatttagacccgctagcatagcagccagcagtcagcagtcgagcttagaaaagcctcccctttcatgatttctgtagtttacaattaccgttataatcttttttggaccctgaccccaatgtggatgatcaaagatggtaatgcttctcctgtgtaacatatataagaaatgaactctaactccccttctagctccctcccagattcaggggtggaatgtgttggaactgtaccgttttaatttgccctctttggactgaagagagccaagtgatcaaaatagtttcctatgtttattcaagaatttggaaaataatgtgc

SEQ ID NO: 104002 - DNA, 816 bp, Zea Mays
cctcctagctcccttgcacggcctcagctcctaccccacccgccacccgtcgacgccggcctctctcctcacccgctcggagagtcggagcccggcggccggagggcgacgtcgtccctaataaatactaataatttatcactatacataaccaatatataagccatgggcaagcgcagcgtccctcggtaccctgaggacgaggacaaaggcggctgctgcggctgcctgtgctggtgctgctgcttcctgttgttcatcgtggcggcgctggccggcacggccgcctacttcttcttcgtgtacaagcccaaggcgccgtcctactccgtgagcaacatgtccgtctcgcagttcgacttcagcacctccgacctgacgctgtacgtcaagctcaccgcctccgtgcgcgccgagaaccccaacgagatgatcaccatcaggtacggcgagggctcccacaccgtggtctcctaccgcggcacgccgctgtgctccgggaagctcccggccttcttccagggctacaagaacgtcaccgtcatggacatctccatggagggccgccacggcttcgggtcggggctccagcaggcgctagaggagagcgagaaggccggggacatcccgctcgacatcttcgtcagcgtccccgtggagctgcagctcggctccgtcgacctccgccagattaaagtcaacgtgcactgcgcgctcgtcctcgatagcatctcgcccaagaagaaacccaacataaagtccgcaacctaccaggccaacgtagagttttgattcacaattgggtcggagttgatc

SEQ ID NO: 104003 - DNA, 246 bp, Zea Mays
atgacgaggaacaaaggcgcgcactgggaagtcggcgcgcaggggacggccggtgttgagatcttccgcccccatgacccagatagggatgatcacgaggaggcgaagcacgacgaggcgcgtatcgaaagagcttctgagattaaagatgatgacacgcgccatgacgaggcgacatatggtggggggaaaataggaatggacgacgacgagagaacaacacgactgcgtgggacttggcgataa

SEQ ID NO: 104004 - DNA, 2866 bp, Zea Mays
ccgctctcgtcttcctctcccaatgtcaatagccacttccactcccaaagtcacaagggtccgaacccaacaaaaaaactctccaaaccccatttcatttttcaaatctgctcctgccccacctccgccgccggacttccaaacgatcaaaccccacccagtcgctgtctccagccccaaatcctcgagctccctccgtcagtggcgcgatggggttcgtggatccggcggcgccgctgctggcgacgtgcggcggcgacacggttaagcttttcgacgtcacggtggagaccggcgacccctgcgtcctcgcctacacccccgcgcccgcgcaccccgtcaacgccgtcaagtggaaccacaccaatcttattgtagcaagtgctggcgatgataaaaagatctcattgtggcataagaagggtcaaaatgtaggacaactaccaacatcaactgtcgaccgtggtgatgacatagaggagtgcatttattctatcagctttagcaacaaaggttctcgatatctctgttcctgtggaagtggccatattgttaggatatgggatttgcagcgtaagagatgtatcaaatggctaagcggtcacactgacacaattactggcgtaatgtataactgcaaagatgaacatttggcatcgatcagcatgaagggggacctgattcttcataatcttgcttctggagcacgtgtttctgaacttagcgatccaaacggacaggttctgagagtgcttgattattcacgaaatagtaggcatttattggtgacagctggagatgatggttctgtgcatctttgggatacaactgcaaagtctcctaaggtttcatggctgaagcaacattctgcacccacaagtggtgtttgtatttcaccatccagtgataagataattgctacagtgggccttgataagaagttatacactttagattcagggtcaagacggccggcccacactattcctcatgaggccccattctcctcattggcgtataatgatgatggtactataatagcagcgggcactaacagtggacgtgtggtgttctatgatattcgaggaaaaccaaagccattgaccatccttcgtgcatataatacttctgaggctgtgacaggtttatgctggcaacggtcgaagcctgtcgttgttaatgagaacagttcttctgaagttgctcttcttgggggaactaatgaagagtctgttcttatgccagatcccttgccttcagcaacacctacaggccttggttctggggtggccactacaagtcttctctctttgacagcaaacacaagtggctatctttcggcctcaaattcttctactatggaggaaacaccatatagaactcgtccgctgactggtggaccgttatcaaagctacaggctcctcttagtaactataatctgaaggatgatatggatgtattttctccacttgttgatgtccagcctttcacaccatctagtggcaactggtgggatgagcatggaagtgatgatgcaaaaaaggatgataaaccaggagaaaagaaattttcaacaaccaggaagtattcgtatatggaaggcaatgatgagccacatccgattgcagattggcggtctactgcaagacaggatagcatctcatctgtgactactacatccatgccatcatggaagagcgaactgtctgtatcttcgccagagccagcaactggaaatgcattaccagacaggcttactcaacgtcaactgatctcacgctttgggtcttcagcctttccaactggtggcttggcatttacagcctcacaagatccagcttcagcacccagtcactcactgaagggttctcttacaagtaacattttaatgaatctacaaaacaagggcatcttgaacaatgtatcctcttccctggacgcatcctctcctaatcttcagagttcacttccctcatcatatgtttcaaaaactatgccatctgtgattcctgatcaactaggagcagcacaatccacttctttgtggagacccacaacatatactgatagaatgagctcatcatctgtttttagtgatggattagcttcagcatttggctcacccaaatcaaagaagacaggagcagaagcaaaagatgagttgctcagtaacattttgtcaagacaaacagcagctggctcttcatctgcaatccctttagcaagcaatggggtagtgccaccacaactggcgaacacaggttcttcatctgatcaactcggcgcttcttccttctcacttcagtatgtgcagcgcatgcttgaagaatctcttgggtctgtccagaagtccatccatgaggatgtgagaaatctccacattgaacttttaagacagtttcacatgcacgagatggaaatgtcaggcgtgctgaacttggtcctggaaaaggtggaaggcctgacaaaagaagtgcagcaactaagaagggagaaccaacagctcaggcagcagcttctctaatatgtgcctttgggcgcctctctggcaatcttatgctgtggaagagtgcaatttgctcaggagtcctaggtaggcccaaacctatgtagaggcctggcgatggttgattctcatattggttggaagctcgtgtttgactttgacacggttgtacatataatcctcttaatttagaagcatattttgatcgaattattgatttgtctgtttgccgtgcttcttggactggctccatgtatcttggtggaccttgggcgtcctgatggcatatgtgagaggtcaacacaggtttccgatgtagcttttgttaatataattccttgattaggctcaaaatactc

SEQ ID NO: 104005 - DNA, 2804 bp, Zea Mays
ccgctctcgtcttcctctcccaatgtcaatagccacttccactcccaaagtcacaagggtccgaacccaacaaaaaaactctccaaaccccatttcatttttcaaatctgctcctgccccacctccgccgccggacttccaaacgatcaaaccccacccagtcgctgtctccagccccaaatcctcgagctccctccgtcagtggcgcgatggggttcgtggatccggcggcgccgctgctggcgacgtgcggcggcgacacggttaagcttttcgacgtcacggtggagaccggcgacccctgcgtcctcgcctacacccccgcgcccgcgcaccccgtcaacgccgtcaagtggaaccacaccaatcttattgtagcaagtgctggcgatgataaaaagatctcattgtggcataagaagggtcaaaatgtaggacaactaccaacatcaactgtcgaccgtggtgatgacatagaggagtgcatttattctatcagctttagcaacaaaggttctcgatatctctgttcctgtggaagtggccatattgttaggatatgggatttgcagcgtaagagatgtatcaaatggctaagcggtcacactgacacaattactggcgtaatgtataactgcaaagatgaacatttggcatcgatcagcatgaagggggacctgattcttcataatcttgcttctggagcacgtgtttctgaacttagcgatccaaacggacagctggagatgatggttctgtgcatctttgggatacaactgcaaagtctcctaaggtttcatggctgaagcaacattctgcacccacaagtggtgtttgtatttcaccatccagtgataagataattgctacagtgggccttgataagaagttatacactttagattcagggtcaagacggccggcccacactattcctcatgaggccccattctcctcattggcgtataatgatgatggtactataatagcagcgggcactaacagtggacgtgtggtgttctatgatattcgaggaaaaccaaagccattgaccatccttcgtgcatataatacttctgaggtttatgctggcaacggtcgaagcctgtcgttgttaatgagaacagttcttctgaagttgctcttcttgggggaactaatgaagagtctgttcttatgccagatcccttgccttcagcaacacctacaggccttggttctggggtggccactacaagtcttctctctttgacagcaaacacaagtggctatctttcggcctcaaattcttctactatggaggaaacaccatatagaactcgtccgctgactggtggaccgttatcaaagctacaggctcctcttagtaactataatctgaaggatgatatggatgtattttctccacttgttgatgtccagcctttcacaccatctagtggcaactggtgggatgagcatggaagtgatgatgcaaaaaaggatgataaaccaggagaaaagaaattttcaacaaccaggaagtattcgtatatggaaggcaatgatgagccacatccgattgcagattggcggtctactgcaagacaggatagcatctcatctgtgactactacatccatgccatcatggaagagcgaactgtctgtatcttcgccagagccagcaactggaaatgcattaccagacaggcttactcaacgtcaactgatctcacgctttgggtcttcagcctttccaactggtggcttggcatttacagcctcacaagatccagcttcagcacccagtcactcactgaagggttctcttacaagtaacattttaatgaatctacaaaacaagggcatcttgaacaatgtatcctcttccctggacgcatcctctcctaatcttcagagttcacttccctcatcatatgtttcaaaaactatgccatctgtgattcctgatcaactaggagcagcacaatccacttctttgtggagacccacaacatatactgatagaatgagctcatcatctgtttttagtgatggattagcttcagcatttggctcacccaaatcaaagaagacaggagcagaagcaaaagatgagttgctcagtaacattttgtcaagacaaacagcagctggctcttcatctgcaatccctttagcaagcaatggggtagtgccaccacaactggcgaacacaggttcttcatctgatcaactcggcgcttcttccttctcacttcagtatgtgcagcgcatgcttgaagaatctcttgggtctgtccagaagtccatccatgaggatgtgagaaatctccacattgaacttttaagacagtttcacatgcacgagatggaaatgtcaggcgtgctgaacttggtcctggaaaaggtggaaggcctgacaaaagaagtgcagcaactaagaagggagaaccaacagctcaggcagcagcttctctaatatgtgcctttgggcgcctctctggcaatcttatgctgtggaagagtgcaatttgctcaggagtcctaggtaggcccaaacctatgtagaggcctggcgatggttgattctcatattggttggaagctcgtgtttgactttgacacggttgtacatataatcctcttaatttagaagcatattttgatcgaattattgatttgtctgtttgccgtgcttcttggactggctccatgtatcttggtggaccttgggcgtcctgatggcatatgtgagaggtcaacacaggtttccgatgtagcttttgttaatataattccttgattaggctcaaaatactc

SEQ ID NO: 104006 - DNA, 970 bp, Zea Mays
aacattttaatgaatctacaaaacaagggcatcttgaacaatcacaatccacttctttgtggagacccacaacatatactgatagaatgagctcatcatctgtttttagtgatggattagcttcagcatttggctcacccaaatcaaagaagacaggagcagaagcaaaagatgagttgctcagtaacattttgtcaagacaaacagcagctggctcttcatctgcaatccctttagcaagcaatggggtagtgccaccacaactggcgaacacaggttcttcatctgatcaactcggcgcttcttccttctcacttcagtatgtgcagcgcatgcttgaagaatctcttgggtctgtccagaagtccatccatgaggatgtgagaaatctccacattgaacttttaagacagtttcacatgcacgagatggaaatgtcaggcgtgctgaacttggtcctggaaaaggtggaaggcctgacaaaagaagtgcagcaactaagaagggagaaccaacagctcaggcagcagcttctctaatatgtgcctttgggcgcctctctggcaatcttatgctgtggaagagtgcaatttgctcaggagtcctaggtaggcccaaacctatgtagaggcctggcgatggttgattctcatattggttggaagctcgtgtttgactttgacacggttgtacatataatcctcttaatttagaagcatattttgatcgaattattgatttgtctgtttgccgtgcttcttggactggctccatgtatcttggtggaccttgggcgtcctgatggcatatgtgagaggtcaacacaggtttccgatgtagcttttgttaatataattccttgattaggctcaaaatactctcttaacgatggtatatgatattttgtgatgtgagtagattattactctttgtccagtttataaggcgtcttctgaaattggcacaattt

SEQ ID NO: 104007 - DNA, 2305 bp, Zea Mays
caccgcgctctttctctttcctcacgacgccgccgttgggagccctgcttcgggagagccccaacccttatcaaaccctaaatcaaaaactacccaaaaaaatccgcaaaatccagaaaaaaatcccaaaaatcaccacttgattggagatggcgacgcaagggcaagcggcggctggatccgcgtccgagtccggcggctctccggctgccttagctgcagcagccgcggcggcggccgcgttcccggcgacttcgctctacgtgggtgatctgcacgagagcgtgcaggacgcgcagctcttcgacgttttcagccaagtcggcggcgtcgtctccgtgcgcgtctgcagggacatcaactcccgcaagtcgctcgggtacgcctacgtcaactacaacaaccagggcgacgctgcacgagcacttgaactgcttaacttcactcctatcaatggaaagcctatcaggatcatgtattctaaccgtgaccctagctcgcgcaaaagcggcacaggaaatatatttattaagaatcttgataagtcaatagacaacaaagctttatatgacacattctgtgcatttgggaatatactttcatgtaaaattgcaacagacccttcaggagaatcaaggggctatggttttgttcagtttgagaaggatgaatctgcacagtctgctattgataaactcaatgggatgcttatcaatgacaagaaagtgtttgttggaccttttgttcgcaagcaggacagggaaaatgtctcgagtaatatcaaatttagtaatgtatatgtgaagaatctgtcagatactgttactgatgatgagttgaaggagatgtttggaaaatatggaaccataactagtgctgttgttatgcgggatagcgatggaaaatccaggtgttttggatttgtcaattttgaaaatgcagatgctgctgctcaggctgttcaagagttgaatggcaagatattcaatgataaggaactgtatgttggaagagcacagaagaagtctgaaagagagatggagttgaaggagaaatttgaaaagaatgttcaagaggtagctgagaagttccaaaacacaaacttgtatttgaagaacttagaggagaacattgatgatgagaaattgcgtgaactctttgctgagtatggcaatattacttcctgcaaggttatgcgggattcgaatggtgtcagcagaggttctggatttgttgctttcaaatctgctgaagatgctaaccgagctcttacggagatgaatggcaaaatggttggaagcaagcccctttatgtagctcttgcgcagcgtaaagaagacagaaaggcaaagctacaggcacaattttcacaaatgcgtcctgttgcaatggcgccttcagtaggtcctcgcatgcccatgtttccacctggtgtccctggagttggtcagcagctgttctatggtcagccaccaccagccttcatcaaccctcagcaacctctgatgcctggtatgaggcctggtggtccaatgccgaactttatgatgcctatggttcagcaaggacagcaaccacagcgtcctgctggtagacgtgctggtggaatgcagcagcccatgccaatgggtggtcagcaacaggtgttccctagaggtggtcgtggctatcgctatcctactggacgtggaatgcctgatcctggcatgcacagtgttggtgctgtgatgccaccttcatatgagatgggagggatgccaatgagagaagctgccccccaacctgttccaattggggcgctagccactgcacttgctaacgccccaccagatcagcagagacttatgcttggtgagaacctgtatcctcttgttgaacagctggaacgtgagcaggctgccaaggtcactggcatgcttttggagatggatcagacggaggttcttcacctgctggagtcgccagatgctctgaaagccaaggttgctgaagccatggaggtcctccgctctgcccagcatctccagcagagcaatgtttctactgagcagcagctggctaatctatcattgaatgatggcgtcgtctccagctgaacgttaatgtttctgatgtttcggaagtgctgccagtttttgcttgaatactaccctatctagagtgtaatgactttgtttacttggtttgttggagttttagctgctcctattactaggggttggttttgtcttgactttgttattttggttgcatggataatcgtttcgtttggatctattgtccgattgttactcgaattacaaca

SEQ ID NO: 104008 - DNA, 2673 bp, Zea Mays
caccgcgctctttctctttcctcacgacgccgccgttgggagccctgcttcgggagagccccaacccttatcaaaccctaaatcaaaaactacccaaaaaaatccgcaaaatccagaaaaaaatcccaaaaatcaccacttgattggagatggcgacgcaagggcaagcggcggctggatccgcgtccgagtccggcggctctccggctgccttagctgcagcagccgcggcggcggccgcgttcccggcgacttcgctctacgtgggtgatctgcacgagagcgtgcaggacgcgcagctcttcgacgttttcagccaagtcggcggcgtcgtctccgtgcgcgtctgcagggacatcaactcccgcaagtcgctcgggtacgcctacgtcaactacaacaaccagggcgacgctgcacgagcacttgaactgcttaacttcactcctatcaatggaaagcctatcaggatcatgtattctaaccgtgaccctagctcgcgcaaaagcggcacaggaaatatatttattaagaatcttgataagtcaatagacaacaaagctttatatgacacattctgtgcatttgggaatatactttcatgtaaaattgcaacagacccttcaggagaatcaaggggctatggttttgttcagtttgagaaggatgaatctgcacagtctgctattgataaactcaatgggatgcttatcaatgacaagaaagtgtttgttggaccttttgttcgcaagcaggacagggaaaatgtctcgagtaatatcaaatttagtaatgtatatgtgaagaatctgtcagatactgttactgatgatgagttgaaggagatgtttggaaaatatggaaccataactagtgctgttgttatgcgggatagcgatggaaaatccaggtgttttggatttgtcaattttgaaaatgcagatgctgctgctcaggctgttcaagagttgaatggcaagatattcaatgataaggaactgtatgttggaagagcacagaagaagtctgaaagagagatggagttgaaggagaaatttgaaaagaatgttcaagaggtagctgagaagttccaaaacacaaacttgtatttgaagaacttagaggagaacattgatgatgagaaattgcgtgaactctttgctgagtatggcaatattacttcctgcaaggttatgcgggattcgaatggtgtcagcagaggttctggatttgttgctttcaaatctgctgaagatgctaaccgagctcttacggagatgaatggcaaaatggttggaagcaagcccctttatgtagctcttgcgcagcgtaaagaagacagaaaggcaaagctacaggcacaattttcacaaatgcgtcctgttgcaatggcgccttcagtaggtcctcgcatgcccatgtttccacctggtgtccctggagttggtcagcagctgttctatggtcagccaccaccagccttcatcaaccctcaggctggatttgctttccagcaacctctgatgcctggtatgaggcctggtggtccaatgccgaactttatgatgcctatggttcagcaaggacagcaaccacagcgtcctgctggtagacgtgctggtggaatgcagcagcccatgccaatgggtggtcagcaacaggtgttccctagaggtggtcgtggctatcgctatcctactggacgtggaatgcctgatcctggcatgcacagtgttggtgctgtgatgccaccttcatatgagatgggagggatgccaatgagagaagctgccccccaacctgttccaattggggcgctagccactgcacttgctaacgccccaccagatcagcagagacttatgcttggtgagaacctgtatcctcttgttgaacagctggaacgtgagcaggctgccaaggtcactggcatgcttttggagatggatcagacggaggttcttcacctgctggagtcgccagatgctctgaaagccaaggttgctgaagccatggaggtcctccgctctgcccagcatctccagcagagcaatgtttctactgagcagcagctggctaatctatcattgaatgatggcgtcgtctccagctgaacgttaatgtttctgatgtttcggaagtgctgccagtttttgcttgaatactaccctatctagagtgtaatgactttgtttacttggtttgttggagttttagctgctcctattactaggggttggttttgtcttgactttgttattttggttgcatggataatcgtttcgtttggatctattgtccgattgttactcgaattacaacagttgagtttttgggcgtcattggttttctagctgatatttcattaccctatttaccgttaagtgtagcgccacaagcaaattctactacatgggtctgtttggttatatggattaagatgtggaaggagtaaattggatttttttaaggactggtttgactgcaaaaggtgaggaaaaaaactagggaagggttaaacatgcggttgtttggtaaccaagtaaaagaaatagttaaaaattcagaaaaaagcaaaggaaacagatatgattcacatcactaaaaatcgaagaaagaaatatttagacagatcataaacacaatgaaacatcacttaaaatcaaaaaaaaa

SEQ ID NO: 104009 - DNA, 1217 bp, Zea Mays
accgcgctctttctctttcctcacgacgccgccgttgggagccctgcttcgggagagccccaacccttatcaaaccctaaatcaaaaactacccaaaaaaatccgcaaaatccagaaaaaaatcccaaaaatcaccacttgattggagatggcgacgcaagggcaagcggcggctggatccgcgtccgagtccggcggctctccggctgccttagctgcagcagccgcggcggcggccgcgttcccggcgacttcgctctacgtgggtgatctgcacgagagcgtgcaggacgcgcagctcttcgacgttttcagccaagtcggcggcgtcgtctccgtgcgcgtctgcagggacatcaactcccgcaagtcgctcgggtacgcctacgtcaactacaacaaccagggcgacgctgcacgagcacttgaactgcttaacttcactcctatcaatggaaagcctatcaggatcatgtattctaaccgtgaccctagctcgcgcaaaagcggcacaggaaatatatttattaagaatcttgataagtcaatagacaacaaagctttatatgacacattctgtgcatttgggaatatactttcatgtaaaattgcaacagacccttcaggagaatcaaggggctatggttttgttcagtttgagaaggatgaatctgcacagtctgctattgataaactcaatgggatgcttatcaatgacaagaaagtgtttgttggaccttttgttcgcaagcaggacagggaaaatgtctcgagtaatatcaaatttagtaatgtatatgtgaagaatctgtcagatactgttactgatgatgagttgaaggagatgtttggaaaatatggaaccataactagtgctgttgttatgcgggatagcgatggaaaatccaggtgttttggatttgtcaattttgaaaatgcagatgctgctgctcaggctgttcaagagttgaatgatggcgtcgtctccagctgaacgttaatgtttctgatgtttcggaagtgctgccagtttttgcttgaatactaccctatctagagtgtaatgactttgtttacttggtttgttggagttttagctgctcctattactaggggttggttttgtcttgactttgttattttggttgcatggataatcgtttcgtttggatctattgtccgattgttactcgaattacaacagttgagtttttggg

SEQ ID NO: 104010 - DNA, 1081 bp, Zea Mays
aaactcagggaccagaaaatttccccgcattccaaacaggcacaattttcacaaatgcgtcctgttgcaatggcgccttcagtaggtcctcgcatgcccatgtttccacctggtgtccctggagttggtcagcagctgttctatggtcagccaccaccagccttcatcaaccctcaggctggatttgctttccagcaacctctgatgcctggtatgaggcctggtggtccaatgccgaactttatgatgcctatggttcagcaaggacagcaaccacagcgtcctgctggtagacgtgctggtggaatgcagcagcccatgccaatgggtggtcagcaacaggtgttccctagaggtggtcgtggctatcgctatcctactggacgtggaatgcctgatcctggcatgcacagtgttggtgctgtgatgccaccttcatatgagatgggagggatgccaatgagagaagctgccccccaacctgttccaattggggcgctagccactgcacttgctaacgccccaccagatcagcagagacttatgcttggtgagaacctgtatcctcttgttgaacagctggaacgtgagcaggctgccaaggtcactggcatgcttttggagatggatcagacggaggttcttcacctgctggagtcgccagatgctctgaaagccaaggttgctgaagccatggaggtcctccgctctgcccagcatctccagcagagcaatgtttctactgagcagcagctggctaatctatcattgaatgatggcgtcgtctccagctgaacgttaatgtttctgatgtttcggaagtgctgccagtttttgcttgaatactaccctatctagagtgtaatgactttgtttacttggtttgttggagttttagctgctcctattactaggggttggttttgtcttgactttgttattttggttgcatggataatcgtttcgtttggatctattgtccgattgttactcgaattacaacagttgagtttttgggcgtcattggttttctagctgatatttcattaccctatttaccgttaagtgtagcgccacaagc

SEQ ID NO: 104011 - DNA, 457 bp, Zea Mays
ccatcaaacaccaacattagaatcggtgccgaagagttgttaccgacaagagacaagcataactaaggtgatctagatggatgaaattgtcgacaaggccattagcatcatgcaggttacctcaaagcatctcatgtatatccgcaaggagaagctgcactcagggaaggcattgagtgcaatagaggtgaaggaattgcacgaagcccttgaagcgattgatgaaggtttggaccaagattcactcttgtgccagagtttggcgtagtcctcgattataaactgtgtactatgttaatgtaatgacatagtttgtatgatacaaatcgtagtgatgttgtttgaagctgtttgtatgaactgtttcctactatcttgtatgaattatgatgtctgatgtagtttgtatgaactatgtcatattatgttgaatgaagctattgcatgtccttattct

SEQ ID NO: 104012 - DNA, 1233 bp, Zea Mays
gttccttactacaatagcaagtactagcgatctagcgtgcatcgccagcccgtcccactatcgcctctcctctcattctctcgtgctctccacccgtttcccgcaaaaccctagctctgcgacatgcaccgcggcggcgatcgctccggcggcccctcgagcggcggagaccgctctggagcccggttccagcggggtccctcccgctggtctggcagcagcggcggcggattagggggtagcccgcccaatcgctactcctcccgcggcgcggcagatggaggtggtggagggggcggtggcagtggcggtggcgggaggttccacccttaccgtggttcttccgactattctagcggcggtggagggtacagaggcggtagtggcgttggtaacgacttcggcgaccagaggcaacgttacggcggcggcaacagaggcggaggccgtggggatttccaagatcatgatagtagaagtaactatgtcaaactttttgtcggatctgttccgaggacagcgactgaagaagacgttcgtcctttatttgaggaacatggagatgttcttgaagttgctctaattaaggataggaagaccggtgaacaacaaggtatgctatgtctttgtttttcttgtattatcacaattgagtatctcttttgttttcaggtttctgagaggttataggagcaacaaggttgcatcttctctcagttagattggcggttgttgattttcatttcctgcgcttccattctgtccgtctcctgtggattcagtagaagactagaatggacgcgactaactgcccgctgattactggaacctaactagccacaacttcactgctacacaaggcagcaaatttggtaccaacagctgtgtttagatgatattgaccttctggatgtcctgtagttctagaacaatgagcttgtagtttcacctttgcatctgtgtgccttgattttgttgcaagaacttatataatcttataatgaattaatacaaaattctcatcctctgcctttcatggtttaagatttattatccatgtaatcatgaattgcatatgatgtgggattccttaatgtaagcgattgaatccctcgatatgagttattggatgatgcggtatagctgcatattgctgtcacgattgatggcaggtggtgtgtggtgttgatgaccttctactgtttggaaattgtatgttgcgcaccgtcaatc

SEQ ID NO: 104013 - DNA, 2566 bp, Zea Mays
gttccttactacaatagcaagtactagcgatctagcgtgcatcgccagcccgtcccactatcgcctctcctctcattctctcgtgctctccacccgtttcccgcaaaaccctagctctgcgacatgcaccgcggcggcgatcgctccggcggcccctcgagcggcggagaccgctctggagcccggttccagcggggtccctcccgctggtctggcagcagcggcggcggattagggggtagcccgcccaatcgctactcctcccgcggcgcggcagatggaggtggtggagggggcggtggcagtggcggtggcgggaggttccacccttaccgtggttcttccgactattctagcggcggtggagggtacagaggcggtagtggcgttggtaacgacttcggcgaccagaggcaacgttacggcggcggcaacagaggcggaggccgtggggatttccaagatcatgatagtagaagtaactatgtcaaactttttgtcggatctgttccgaggacagcgactgaagaagacgttcgtcctttatttgaggaacatggagatgttcttgaagttgctctaattaaggataggaagaccggtgaacaacaaggttgttgtttcgttaaatatgctacttctgaggaggcggagagggccatcaggggtctgcacaaccactacactttacctggagcaatgggccctattcaagttagatatgctgatggtgaaagggaacgacatggggccatcgagcacaaattatttgttgcgtccctcaataagcaagcaactccaaaggagattgaagagatatttgccccatatggtcatgtggaagatgtttacattatgagagatagcgtgaagcagagccgaggttgtggctttgtcaaattctcatcaaaagaggcagcagtggaagctatgaatgcccttagtgggacttacacaatgagggggtgcgagcaaccattaatcattagatttgctgatcctaagaggcctagacctggagaatcaaggggtcgccctgcatttggaggtcctggtttcagtcctcgatcggatgcagcacttgttatcaggccaacagccaatcttgatgaatctaggggtcagcatatgcttcctgaatcttggcgtccatcaagtccaaggccaatggcacctaaccaatataataattttggatctgacaaccccttggcacttagtggtggcactgtaacatcagcagatactgctacttttcggcctccgatgttccctggaaatggctccttgtcaaatcagacggctgtgccaacttcgtcacacatgggcatgaacactcccatggtacaagaacaccatctacgaggccaacagatcccatccctgcaaaagccacctggtccaccacagaattttgctgtacaactgcagaatgcacagccaggacagcctctgcaggggcatattccacagattgggcagcttcaggccccacaatccacgggacctgtttcatttggccagaatatttcatctatgcaattacctggtcaacctcctgcatcacagccattgatgcaacggaatgcttctctaggtgctttacatgcccctccatctggacaatccaatccaatgcaagctgtccctggccagcagcaacttcccaccagtgttgctccccaaatgcttcagcagtcgatgcagcagatgccttcacaagcgccacagttgctgcttcaacagcaggcagctttgcagtctagttatcagtcttcacagcaggcgatttatcagcttcagcaacagctacaactaatgcagcagcagtctaacctaaatcagcaaccctctgcgcaggttggttcatctgcagtttcttcaacatgtaactggacagagcatacctcccctgaaggttttaagtactactacaatagcattactcgtgagagtaagtgggagaagcctgaagagtatgtgctgtatgagcaacagcagcagaaactgcttttgcttcaacagcaccaacagaatatcgctgtacagcaactgcagtcaccgccacagggtcaatcacttccatccatgcaaccgattcaacagcttccccaggcacaaggacaaacacaaatgcatatgaaacagcaggaattaaattattctcaatttcaggcagctggttccattgatcccaacaggattcaacagggcattccagctgcgcaagaacgtgcttggaaaaattaagtctgcaggtcgcaataataaagcgctagtcaaagactggggaagtgtacaagcccttgtgctgcccaatttcagtgcctgcacagcctttcgccaacgctgatgagtgtaactccggatttagatttagactgatacgtagatggtagatcccgtatgtgtacattgttgcaacttaggtcatgtactcgtgtatatttttcagcgtgctgccgtgctggtgtccgtacctagttggtagatgtcgtcacttgtgttttattttcgactgtggcatgatttgttatgttcggcactacgtgtgacgctctggttc

SEQ ID NO: 104014 - DNA, 2647 bp, Zea Mays
gttccttactacaatagcaagtactagcgatctagcgtgcatcgccagcccgtcccactatcgcctctcctctcattctctcgtgctctccacccgtttcccgcaaaaccctagctctgcgacatgcaccgcggcggcgatcgctccggcggcccctcgagcggcggagaccgctctggagcccggttccagcggggtccctcccgctggtctggcagcagcggcggcggattagggggtagcccgcccaatcgctactcctcccgcggcgcggcagatggaggtggtggagggggcggtggcagtggcggtggcgggaggttccacccttaccgtggttcttccgactattctagcggcggtggagggtacagaggcggtagtggcgttggtaacgacttcggcgaccagaggcaacgttacggcggcggcaacagaggcggaggccgtggggatttccaagatcatgatagtagaagtaactatgtcaaactttttgtcggatctgttccgaggacagcgactgaagaagacgttcgtcctttatttgaggaacatggagatgttcttgaagttgctctaattaaggataggaagaccggtgaacaacaaggttgttgtttcgttaaatatgctacttctgaggaggcggagagggccatcaggggtctgcacaaccactacactttacctggagcaatgggccctattcaagttagatatgctgatggtgaaagggaacgacatggggccatcgagcacaaattatttgttgcgtccctcaataagcaagcaactccaaaggagattgaagagatatttgccccatatggtcatgtggaagatgtttacattatgagagatagcgtgaagcagagccgaggttgtggctttgtcaaattctcatcaaaagaggcagcagtggaagctatgaatgcccttagtgggacttacacaatgagggggtgcgagcaaccattaatcattagatttgctgatcctaagaggcctagacctggagaatcaaggggtcgccctgcatttggaggtcctggtttcagtcctcgatcggatgcagcacttgttatcaggccaacagccaatcttgatgaatctaggggtcagcatatgcttcctgaatcttggcgtccatcaagtccaaggccaatggcacctaaccaatataataattttggatctgacaaccccttggcacttagtggtggcactgtaacatcagcagatactgctacttttcggcctccgatgttccctggaaatggctccttgtcaaatcagacggctgtgccaacttcgtcacacatgggcatgaacactcccatggtacaagaacaccatctacgaggccaacagatcccatccctgcaaaagccacctggtccaccacagaattttgctgtacaactgcagaatgcacagccaggacagcctctgcaggggcatattccacagattgggcagcttcaggccccacaatccacgggacctgtttcatttggccagaatatttcatctatgcaattacctggtcaacctcctgcatcacagccattgatgcaacggaatgcttctctaggtgctttacatgcccctccatctggacaatccaatccaatgcaagctgtccctggccagcagcaacttcccaccagtgttgctccccaaatgcttcagcagtcgatgcagcagatgccttcacaagcgccacagttgctgcttcaacagcaggcagctttgcagtctagttatcagtcttcacagcaggcgatttatcagcttcagcaacagctacaactaatgcagcagcagtctaacctaaatcagcaaccctctgcgcagtctgggcagccagtgcaatccagtaacactggtgatccgggtgccattattccgacaaaaattaatgcaatttcgcagcaggttggttcatctgcagtttcttcaacatgtaactggacagagcatacctcccctgaaggttttaagtactactacaatagcattactcgtgagagtaagtgggagaagcctgaagagtatgtgctgtatgagcaacagcagcagaaactgcttttgcttcaacagcaccaacagaatatcgctgtacagcaactgcagtcaccgccacagggtcaatcacttccatccatgcaaccgattcaacagcttccccaggcacaaggacaaacacaaatgcatatgaaacagcaggaattaaattattctcaatttcaggcagctggttccattgatcccaacaggattcaacagggcattccagctgcgcaagaacgtgcttggaaaaattaagtctgcaggtcgcaataataaagcgctagtcaaagactggggaagtgtacaagcccttgtgctgcccaatttcagtgcctgcacagcctttcgccaacgctgatgagtgtaactccggatttagatttagactgatacgtagatggtagatcccgtatgtgtacattgttgcaacttaggtcatgtactcgtgtatatttttcagcgtgctgccgtgctggtgtccgtacctagttggtagatgtcgtcacttgtgttttattttcgactgtggcatgatttgttatgttcggcactacgtgtgacgctctggttc

SEQ ID NO: 104015 - DNA, 1899 bp, Zea Mays
acactctcccgctcgtccctcccgcattctctctctatctcttcgtcttcctttcctcctctcgaaccccaataaaacctcactttccctccttgccacttcggattctcctcctctgcctttcgcttcgtcactcgccacgccacgccaaagaccaagaaaaaaaaggacgattttttcctagctgcaacttccctcacgccatggaggaggagatgccgctgcagctgctctccgcttcctccgccgccgtcgctgtctgagctcccccttcgctcgatctctccatcgggccgggcctacctctcctagcagtgaatcaaaccatggcagctttcgccgcgctgttcgaccccctgtactgcccggaggagcacctcgatctgtaccgcgacgaacccggcgagggtgcggacgagcagtggccgggccagcacggacagcaggagccggctgtcctcgacgacgagctgccggcgctgttcgaggcacaccgggccaaggagggggtggtgctggcggaggatggcgggtacggcggcgcagctgggcgtgaggccgcggtcggctgggtttcacgcgccgcggcgcggctaggcttctccgcgctcaccgccgcgctcgccgccgcctacctcgaccgctgcttcctccccgggggcgcgctccggctcggcgaccagccctggatggcgcgcctagccgccgtcacctgcttcgcgctcgccgccaaggtcgaggagacgcgcgtgccgccgctcctcgacctccagctctacgccgccgctgacgccgcggatccgtacgtattcgaggccaagacggtgcgccggatggagctgctcgtgctctccgcgcttgggtggcggatgcaccctgtcacgcccttctcctacctccagcccgtcctcgccgacgctgcgacgcgcctgcgtagctgcgagggcgtcctgctcgcggtcatggccgactggaggtggcctcggcaccggccttcggcgtgggccgccgccgcgttgctgatcacagccgccgccggcgacggcggcgacggcgacggcgacacggagctcctggcgctcatcaatgcccccgaggacaagaccgccgagtgtgccaagatcatctccgaggtgacgggcatgagcttcctcgcctgcgatgtcggcgtgagcgccggaaataagcgtaagcacgcggcggcgcagttgtactcgccgccgccgagcccgagcggcgtgatcggcgcgctgtcctgcttcagctgcgagagctcgacgtccgccaccgctatggctgcggcggtcggcccgtgggcgccgtcggcgtccgtgtccgtgtcgtcctctccagagccaccaggtcgggcccccaagcgcgcagcggcggcgtcggcgtcggcgtcggcgtcagccggggtcgcgccaccggtccaggtcccgcatcagctaccccccgacgaggagagccgcgacgcctggccgtccacctgcgccgcgtgacgcaccgtgccggaaacggtgcctatggcgagaccgccgttcggtggcggtggagaatggagaacaaggagcatcattggctcgcgtcggtgagcaggagaacgaactattttgcccattgccgtgacagatggggggcaagagagataagaaaagatgtccttgtttgcatgcttatggcgggagtaatgtttgcatgcttgtggcagcacattttgcaatgatggttctcagagaacttagctggaggtggaagatgattagcggataatttgccgtcgagatcgatggcgatttagtatttgttgcaactgtagtgatgctagttcttgccgtgttcttgttggttcttggcattgcttgcttggaaggggcctccgacctccgttgtcctgtc

SEQ ID NO: 104016 - DNA, 2280 bp, Zea Mays
cgtccctcccgcattctctctctatctcttcgtcttcctttcctcctctcgaaccccaataaaacctcactttccctccttgccacttcggattctcctcctctgcctttcgcttcgtcactcgccacgccacgccaaagaccaagaaaaaaaaggacgattttttcctagctgcaacttccctcacgccatggaggaggagatgccgctgcagctgctctccgcttcctccgccgccgtcgctgtctgagctcccccttcgctcgatctctccatcgggccgggcctacctctcctagcagtgaatcaaaccatggcagctttcgccgcgctgttcgaccccctgtactgcccggaggagcacctcgatctgtaccgcgacgaacccggcgagggtgcggacgagcagtggccgggccagcacggacagcaggagccggctgtcctcgacgacgagctgccggcgctgttcgaggcacaccgggccaaggagggggtggtgctggcggaggatggcgggtacggcggcgcagctgggcgtgaggccgcggtcggctgggtttcacgcgccgcggcgcggctaggcttctccgcgctcaccgccgcgctcgccgccgcctacctcgaccgctgcttcctccccgggggcgcgctccggctcggcgaccagccctggatggcgcgcctagccgccgtcacctgcttcgcgctcgccgccaaggtcgaggagacgcgcgtgccgccgctcctcgacctccagctctacgccgccgctgacgccgcggatccgtacgtattcgaggccaagacggtgcgccggatggagctgctcgtgctctccgcgcttgggtggcggatgcaccctgtcacgcccttctcctacctccagcccgtcctcgccgacgctgcgacgcgcctgcgtagctgcgagggcgtcctgctcgcggtcatggccgactggaggtggcctcggcaccggccttcggcgtgggccgccgccgcgttgctgatcacagccgccgccggcgacggcggcgacggcgacggcgacacggagctcctggcgctcatcaatgcccccgaggtcagcgcagcacaatgccattgcatcagcacaatactgtaggctgttgtgagactgcgttgataaccaaccgctggacgcgtcgcaggacaagaccgccgagtgtgccaagatcatctccgaggtgacgggcatgagcttcctcgcctgcgatgtcggcgtgagcgccggaaataagcgtaagcacgcggcggcgcagttgtactcgccgccgccgagcccgagcggcgtgatcggcgcgctgtcctgcttcagctgcgagagctcgacgtccgccaccgctatggctgcggcggtcggcccgtgggcgccgtcggcgtccgtgtccgtgtcgtcctctccagagccaccaggtcgggcccccaagcgcgcagcggcggcgtcggcgtcggcgtcggcgtcagccggggtcgcgccaccggtccaggtcccgcatcagctaccccccgacgaggagagccgcgacgcctggccgtccacctgcgccgcgtgacgcaccgtgccggaaacggtgcctatggcgagaccgccgttcggtggcggtggagaatggagaacaaggagcatcattggctcgcgtcggtgagcaggagaacgaactattttgcccattgccgtgacagatggggggcaagagagataagaaaagatgtccttgtttgcatgcttatggcgggagtaatgtttgcatgcttgtggcagcacattttgcaatgatggttctcagagaacttagctggaggtggaagatgattagcggataatttgccgtcgagatcgatggcgatttagtatttgttgcaactgtagtgatgctagttcttgccgtgttcttgttggttcttggcattgcttgcttggaaggggcctccgacctccgttgtcctgtctgctgcagcggccactactgtagcagcactgctctcgccctgtggctgcgcctgcctcgcgtttccctccactactgtctcgatttcatttccctcctctctctctctctttatctagacctcccttcgatgcaaatgctgcagctccccgctaccccccacgaaaatgaaatgaaatgcaacgctcgggagatgagcctccatttaatgtcaaccctgcctagttttgtggtactactaccagctcttcaaatcttgtttcattgtaacgataaatcaataaatgtagcaccccacattaaaatc

SEQ ID NO: 104017 - DNA, 2861 bp, Zea Mays
gaaggaaggaggagaaggcaccggaaatcctcccatcccgctagctggaacctggaagggctgaagctggagctggagtgctggacagtgaccgagagtgagagaggcagcagcggtccggtggctgtggcctccttggttgatgctcacccaccctcagggaggcacgagcgttccctctccggcgagccccaccccggaactcctccgagaaatgcggcggggcagccacagatgacaccttcctcttcttcctgacctgctgcagaggagggcagcctcctgcatttccgggttcccttgcgcttgcgcctcctatttcgtctttccacgagagtgggaaggggaagccggaggatgccggccaagtacctcggcccgggggcgttggcggaggacaggcgccaggacctccaccgccaggtgggctgcgtcaccgggatcttgcaggccttcgaccgccgccaccctctcgcctcctcctcccacaagaggctgcttcccccaacaggccatgcagtatccagtaacccaagcaaagagggcgattgcacaagatattcaccccagattgtgctggagaactcgagtaaaacatgggctgatagccaaagagcaccagcaacagaactgtctcaaacctcatattcatcgtcaccctcttcgtcattctcgtccgttgatgacaacaaatcaacacaacaggacctatcatccactgaccgaatgctatttccagagaggccgttcaagagctcgccgaagctcaagagttattttgacagtgacaccgggctcgactaccctgatgacgcgcctacgaagtccaaggacatgcccatagttcaatccagcctgccaactcttggtataagaaatcttgtgaaggattcaatctatatggatagccgtgaattgtcagtcagaatttgcactaaagaagtaacagatcacccatccaactgtggagatcaacctagggaattgaatgggcctccccgtgacagcacacaagaaaaaagcaagggtctcgtggacatcaatgaatcgcttcgagtgctagccaagctcagggaagcctcatggactcctgctgaatctgtccatcatgcaagactttcatatgatgctcctcggttctcatacgatgggaaggaggctgcatcaaaactgagggaggtaccaaggttgtcactggacatcaaggaaagtcaccttcggaatggtgaaattgactctagattgaacccaagcttgagttctacagacagaagcagcaacactgttattgggtccaatgcagcttttgagatccagcagaaacagcctgcctgcaagcggcttcctagcgttgttgcgaagctcatgggtttggaagagttgcctgagcataatcaaagtatagcatcatcacatgcatgcaaaaccgttcaagggagcaagcaagaggccatgttcaaccccttgagcatctcatctcacaacgagcatgctcttcgacaacaaaggaatcatgattcaactgttagaaatttacccaactcaaagtttcctgtcgaaactgcaccatggaagcaacaagaaaggattatccttcctcgcaaactgccaaagggatcaaaaggagcccacggaagagaacaacctgctgcatcagtcatcagtgacatagagaagcggctcaaggatcttgattttcgacaatcgtacaaggaccttagagcgcttaaacatattttggattccatgcaagcaaaaggactattggaaaacaaaaatagggaggaaatatctatgccaaagttatctgatggaaaccacaatggccaagagatagccagtgtgaacatgagagtgaacagtaacaccaacaacgtgtgtatgcctgaagagagcaacgctgaaagctctttcaaatcacctattgtgatcatgaaaccttcaaaatgtgcaaaccttttcaacgaagttgattcttctgtcttccccttagggggttcatctgatcccccacaacaacaaacaagcaatagcacctatagaaggaaagcttcaacgagaaatagaacagctaaagagcaacatgcaaaatttagttcaaaggtgcctacttctcaaccccttgtttcttatgacaggagatcatatggaaggaatgacgatagcagcaacaaccaaaaatctagttcactgctggttactgagagctcatccagaagacagcagctaccaagggacagtagcataagtatgaaaaagaataaacattccactaccccaaggttacaacagagaaaacttggttcagagcggagggctagaccacctattccttgtgctgagtctaacaaaagccaaaatcaatctggagataggaataatgcagaaacagtgtcaccccgaagcaaattcagaaggaaacttttgtgtccacaagaaggtgatgatgacatgccgagtggattgaacaacaggacaaggagcctgaaccagcatggcaatgatatgtccacaaggtcagatggcagtataactgttgcttcagagctggatattataagcaatgacagatctacggaagttgatattcctaattttgatcaaggcattggaactccatccggaaggaacccacaaagagtggtaaataatttccttgcaattttgccttatttctaaagcttcactaactttaacatgatttttttatttccaatacttaactactatggacaaaataataatctgtatttgaaatagtagctggttttggtcttctatcaatctctctccaagaatagttgtagttgggtcaggaaatgagaatgacaaattaaatcatacgacatactattggaaac

SEQ ID NO: 104018 - DNA, 1116 bp, Zea Mays
gcagatgacgagcgtcaaacattaggtgaaccctggaaaccttctgttacaaaggcaacagaggtgggcatgcagtccaagaacaataagctcgctaatgtcgtgagcctgcttcagaagctccagcagcttagcgtgagcaaggatgaggacgcacctccggtcgaccatatggctttcctgtgcgagacagaaagcccggaccaccgttacgtgtctgagatactgctggcctcgggtcttctgatgaaagagctaggttcaggacaggcaggcctccagctccagctccactcctctggctacccgatcaaccctgacttgttccacgtgctggagcaaagaaaggcaggatgggccagcatacctgacggcatccaccagagcaggagcggcgccaagtctgatcccaagagagcgcaccggaagctggtgtttgacaccgcgaacgagcttctcctccagaagtttgagaaggaaaccacagtttacgcggtcagttcctccaccggagcgaaggatcatccacctgcaaaggctcttagcgggcagcaactgctgaagtttgtatcttcagaaatcgaaggcatgggtacggagcgatcgtccacctgccagatggaaggcggcgtgatacctgacgcagagatcctgcagaggctgcagggatggacgagcttcagcagggagctccctgggatggtgctggagatcgagaggtcggtattcaaggagctggtggacgaggtggtgcatggggagtctgccgacggcccggagatgaaggcggcaggcaggcggagaaggcggcggctctttgcttgatatggtttgtgtgaccatcaccatgcaccgggtgggttgtccaagtagatgggcctgatcatgctgtaactttgattgccgtatgaactttttttctctctcaagggagaggtgcacaagttgtactgttgtagtataagcagcgcaggtttgcagaggcatgaaaaatgggcattggtttgtgctgtatagatactctgtataccattgccttttgattccttgtgtttcattggggatgatgctatttcagtaaagaagtgtacaaatggcagggttcatcattttaat

SEQ ID NO: 104019 - DNA, 3186 bp, Zea Mays
atggggagtaggagtagggggtaccgtatccatgtcaagatcctccccctactcccgtctccactccatgacccgatgggacgatacatcattttcctctcattccctttggctcgttttgataccctcaagactggctggctggctgaaagggatgggagggagaggtctctggtgatccagtctccattgtaatcactaatcagttcttattttccttccctgtcctctgttccattccctagtctctctctactctccactccacttgctctggagtatcccgcccggagtcctctccttgctttgccattgttctggtgaaccacaccaccttcccaacaaatccgagctattagctaaagcaatacccgcaccaccatcgccattgccgacccctcctcttcttaacctccatgcatgctgcatgccacggcttcacctcacctccaccgccatggccggcaccaatggcgcccctcgccttctccgcctccctaccactgccactaccagtaccagctcgacgccactgctgcgactactagcgctactacagctactatgcctcgcctcggcgcttaaccaagacggcatactgctgctgtccttcaagcaatccctcgcctccgaccccctcggctccctctccggctgggggtacgccgacgtcacgccctgcgcgtggaacggcgtcgtctgctcgccggactcgcgagtcgtcagcgtcgtcctgcccaacgcgcagctcgtcggccccgtcgccagggagctcgccctcatcgagaacctccgccacctcgacctctccggcaacgcgctcaccgggaccatcccgcccgatctgctccgcgcgccggagctccgcgtgctctcgctcgctggcaacggcattaccggcggcctgccggagcaggtcggccagctgcgcagcctccgcgcgctcaacctagccggcaacgctctctccggggccgtcccgcagaacctcaccctgctgcccaacctcaccgctgtctcgctcgccaacaacttcttctccggcacgctcccccgcgggggcttcccggcgctgcaggtgctcgacgtcagcgccaacctgctgaacggcaccctgccgtcggacttcggcggcgccgcgcttcggtacgtcaacctgtcctccaacggcatcgccggcgccataccgtcggacatggcctcgcgtctgccggccaatgtcaccatcgacctgtcctacaacaacctcaccggcgccatcccgtcggtgccgccgttctcggcgcagaggcccacggcgttcgagggcaacgccgagctctgtggaaggcccctcgacagcctctgcggcttcacgtcctcctcctctgctgccgcggagccccagcccccgaacgctaccgcgaagtcgccgccggccatcgcggcgatacccagggaccctaccgaggcgcttcctggcgatggttccagcagtgccgcaggcgcgtcggcgtccggggagcagcgcggcaggatgcggcttgctaccatcgtcgccatcgccgccggtgacgtggctggcatcgccgtcctgttcgttgtggtcatgtacgtttaccaggtgaggaggaagaggcagcgtcaggaggtggcggcgaagcagaggacgggcgtcgtgttcaagaagccggatcccgacgagtctccggacgctgtcagccggagcctttcctgctgcctgcgcaagaaggccggcgacgacagcgactactcggaggaagtcacggacacgtcgccggcctccttcgcagatcacaagaacggcaaggcggccggagctgaagcggcgagcaataagaagatgggcggggacggcgcggtgctagtgacggtggacggcggcgcggagctggagctggagacgctgctgaaggcctcggcgtacatccttggcgccgccggcagcagcatcgtgtacaaggccgttctggccgacggcgcggcgctggcggtgcgccggatcggcagcgagtgttcgggggtccggcgcttcggcgagctggacgcgcacatgcgcgccgtggcgaagctgcggcacgacaacatcctccgcctgcgcggcttctactggggccctgacgagatgctcatcatccacggcttcgccatcaacggcaatctcgccaaccactccgttaaaaggaagcaggggtcgtcgccgatcaacctcgggtggagcgcgcggctccgcatcgcgcgcggcgtggcgagaggcctggcgtacctccacgacaagaagtgggtgcacggcaacgtgaagccaagcaacatcctgctggacgcggacatggagccgctgctggcggacctcggcgtggaccggctggtccgcagcgcggacggcggcgggctgacgaagccgtcgtcggcggcgctggcgggtcggttcggcgggagcaaacgttcggccaagagcctccccgacctgtcgccgccgcccagccacgtaggcggcacggccgcgcaaccggcgagcccggccgtcgacacggcggcgcactaccgggcgccggaggccgtgaggagccccagggcgagcggcaagtgggacgtgtactcgttcggcgtgctcctgctggagctggtggccgggcgcgcgctgacgagcctggagctgtgccagtgcgctgcggcggaggggaaggcgcaggcgcaggcgctcggggtggtggaccccacgctgcgccgcgaggtggaagggcgggaggaggaggaggaagcggtggcgagctgcctccggctgggcgccgcgtgctgcgccatggtgccgagcaagaggccgtccatcagggacgcgctgcaggccgtggagaggatgatacctgctgcggttgcttcgtcgtcaacatccacggcagcatcacaccgtcattgaaaaaatagaagaagaaaggacacgtcttgcgtcgaaaaaattgcttgccatggatgcatgcatgcttgtagcttctcgtctctgtaccataccatcgtcattcacggttttgtaagtaccagctccgatcctgaaaggaattggtttgcatggttgcattgcatctcactcggattttggaggcgattcttctagttcatacagcaatggccccctcatcgatcaatcctgcctgcaaatacgcccccaatgcgacaaatgttatcttc

SEQ ID NO: 104020 - DNA, 1460 bp, Zea Mays
atcaccatggccgacaatttttcttcccagcccacacctcccatggtgccgctccatcacgtggtaaccattcgtctaaaaaagagcaattatctgctatggcgtgctcaacttctcccctacctgcgaagctctaggttgatcgtgttcctcgatgggaccaagccggcgccagcacggatgatcgctgtgtccactgcgccagatgctgcgcaagttatcaaccctgcgtatataaagtggtatgatcaagaccagcaactcctgggcggattgctatcgtccatgtcggaggactccctccgtgacgtggttatggccacgactgccaaggaagtctgggattccttgcagacgcagtttgcttcctccacgcgagcgcgtactctccagatccgcgtcgagcttgccacggcaaagaaactcgatctgacggcggcggattattttcgcaaaatcaagggcctggcaactgagatggctgctgctggttcctctcttcgcgacgatgaggtgattgcttatctgcttgctggtttgccagccgagtatgacccctttgttacttcaatgacaaccaagggcgactccctctcgcttgatgatgtatatgcctatctcatggcgtttgaggcgaggcaaattaaacatcagatggaccatcagcttgcgtttggatcgtctgccaactacgcaggccgtggtggtcgtggtgaccgcgacaggggtcgtggtgccagtggccgctggcgcggccggtagtgctggactttcgtcccgcatcagcgacaatcatggtcgtgctcaaacgcacgaccgccctgccagatctgtggcaaggagggtcataccgccatccgttgctggcactggaatgacgacagctacaacactgatcctcccatggcggcaatggcggccacctcctcgaccaaaattgatccaaattggtacgtcgacacaggagcaacaaatcacatcactagtgatctcgaccgactgatgcttcgtgaacgctatcatggtggtgagcaagtccaagtcggcaatggtgaccttcagatgaagagaaggctcctggaaggacaatctaagaacggcctctaccctctaccatcttcggctgtcaagcaccttaagcatgccctcttgagccgacccattacttgtgtcgattggcatgcgcggctaggacatccatcaagtcaagtcgtcaactctattttgcacgttaataatatttcttgtcccaaacagctagaatcttccatctgtaatgcgtgtcaacttgctaagagtcatcaattaccctataattcatctgttcatcgctctacttgttctttggaacttattttctctgatgtttggggcctgctccaacatctgttggagggtataaatactacattagtttcatcgatgattttagcaaattttcatgggtttatctcatgcga

SEQ ID NO: 104021 - DNA, 255 bp, Zea Mays
atggaggaagaaagcaacgacaacgcgaggctgcctgcagtcgtccgcggcctaggcgatgtcgccctcccgtcaccactcctcgcttcttcccagggcagaactttccagaggactcaggataggcatactaggagtgggagcagccagatcaaatccaacggtaggttcgcgagaagtcaagaacaaaagaagttcctgttctatggaaaagccaaaagagaggaccatactgcatactgcgccgttggatga

SEQ ID NO: 104022 - DNA, 1873 bp, Zea Mays
ccttcccttcccagttcccatctgtctgtcgtctcgtctccctcttttctgtttatatatcctcctccccctgcctgtctgcaaccttcactcccgactccacctctctccgatcgtctcatcttcttccttctcttccaccacatccttggcatctcatccggatcgaccagtacacgccccagtagtactaaagaaccagtttctgagtaaaacatggcggcgtcgccttccccgtccggcagcggcggcggcaaggccggcgtggaccggatcaagggcccctggagccccgaggaggacgaggccctgcagcgcctcgtgcgccgccacggcgcgcgcaactggtccctcatcagccgctccgtcccgggccggtccggcaagtcgtgccgcctccggtggtgcaaccagctgtcgccgcgggtggagcaccgccccttcacgcccgacgaggacgacgccatcctccgcgcgcacgccaggttcggcaacaagtgggccaccatcgcgcgcctcctctccggacgcacggacaacgccatcaagaaccactggaactccacgctcaagcgcgagcgcgagcgcaagcgcgagtactacgccgatgcgcgccccggccccggcgaccagcgctcgctcaagcgcaccagcagcgacgggccccccggaagcccgtccgggtccgacctcagcgactccagccaccagagccttcccaccgtgatgccgtcagccgcttctaccgccgtcacctcccagcagcagctacaacacgtgtactaccgccccgtgccgcgcgcgggcggcgtggtcctgctcccggtggcgccgccttctccgcaggctcctccagcaacctccttgtcgttgtccctctccctgccagggctggaccagcagcccgaaccatccccgccgccgccgccaacacctcaagcacaagcaagctcgccgttgagcgcggagttcctgttgatgatgcaggagatgatccggatcgaggtccggaactacatgtccgggtcgggcttcgacgcacacgccgtgatgggcatggccgagatcgactagtttcagcggcaggggtccaagaccaagacaacgaatcgccgaccgatcccagattcctttgttaatcagcagagcagaggccttcgttccatgcttgctgctgtgctgcctgctggtggtactcagtaaccagtagagtttagactacagtaccagagagacggacggacggcgagacctccgatatcgtcatgctgttcttgtacaggagacagcacaaaaagggatcgagaagatggatcagggagaagagagaggactcactcgtgtttcttggctcgtgcaaatttgccttttggtttcgagtgcaaaattggaccactaagataaaggggtctcttcgattggcgggctcagaaatttggtcgttcttagattattaggctagatgttgggattttatttcctagatagtaagttttaaaaatatggattaaatcttagtttagtgtgtcctaacacccactgaccaccgtacacacagaaccgtacggacaacactagaatggtctgcctgggagctgaggagctcttttttttttggtagttgtggatcactgctgagctacttcagtacttctagatggtatggtatggatggatggatggatgggcaaggaaaggacgaagagaaaatatatggccatgatggctggcagacagggtagctagccggccgttggcagaagccgcggcagagttgagtgagtgacagctaactggctgcttgtcccagccgtcgatgacgatgaagtgtggtgtttttctttatgattcagcatgtctgtctgttccgttg

SEQ ID NO: 104023 - DNA, 78 bp, Zea Mays
gattactatcagttatcagctcaataggagactttggaaaaccgttctagatatgtcaattctaacgaaggtcctaat

SEQ ID NO: 104024 - DNA, 402 bp, Zea Mays
atggacgaggttgtgtctgccatgatagatgaagagagcagacttcgagtgatgggtagtggtaatcatgtgaagccagcatacgttgcaattgaggatagagaatgctataattgtggggaaaggggacatctgagttacaattgtcccaaccctagaggaaatggtggcaggggaggatctcgtggaggacgagggggtactcgtggtcgtgggagctatggaagaggtcgcggaggtcgtggtagaggtcgtggtggttccagggccaacatagctaccactgaagagagtctctctattactctgtctagggaacaactaagcaatgggagcagtggcagaagggcaagtcttccgagtgcctcacttcccctgatgggcaagccaccaactccttcg

SEQ ID NO: 104025 - DNA, 1725 bp, Zea Mays
ggccaattccctgtatgccactggaaaatatactcattccttgtatgccactggccccacatgtcatagacaccaaaaaatatacctatatgccactcagtggcacacaagggatgagtataaaatctgatggcataccaggaattttctctagtttttagttaataacaacctaaattaatttttggacgtttttagggagatgctctcaaggccacaggatgacaggaccgagtctgccgactagctattagggttttgtttgcaaaccccaattcgattcccaaccacatcagccgccgccgtcccgtcaccaccaccaaccttggtagcagccgccgtccggtcatcaccaccaccttggtagccgccgccgaagcgcgccgcgggcgcgggcgctcgcgatggctaaccgcacggaccccctcgcgaagagcatccatgggacgaacccacaaaacctggtggagaagatcgtgcgctccaagatctatcagagcacctactggaaggagcaatgcttcggcctcaccgcagagacgctagtcgacaaggccatggagctcgaccacaccggcggaacctacggcggcaaccgcaagcccacccctttcctctgcctcgcgctcaagatgctgcagatccaaccagacaaggacatcgtagtcgagttcatcaagaacgaggattacaagtatgttcgtgttctcggggccttctacctgcgtctcactggcacaattgctgacgtctaccagtatcttgagccgctctacaacgactaccgcaagatcaggcacaagctcagcgatggacagttcacacttacccatgttgatgagttcattgatgagttgctgaccaaggattactcctgtgatacagccatgcctcgcatccagaaaagatgggttcttgaagcgtctggaactctggaaccgagaagaagtgcacttgaggacgattttgaggaagaagaggaagacaaggaggaacagcctatggaaattgatgaaccgaatggtcgtgaaaatgataatcatcgtggaaggagccttgccagggaacgggatagggactgggaccatgacaggaaacatgaaaggcataacagggacaaagattatgatagagatcgggattatgatagggactatgggagagggcgggaaagacaccgagatagagatcgtgaaagagacagaaaccgggatagggatagagaccgtcaccgcctgcgagatgatgattacaatcgcaacagggatagggacagggagagggatggtagggaaagggagcgccgagacagagaccgtggcaggcacaggagccgctcaaggagcagagatcgacgggacagagaccgtgaagatggagagtaccgcaggaggcgtggtcgtggcagtgtaagtcctcgaggacgtggtgaagacggtggcccaagagaggaacctaagaggaagaaggaaaagaaagagaagggtgaaggaaatgctccggacccgaatgaccctgagatcatagaaatgaacaagctacgggcctcactggggttgaaaccactaaagtagtttacacgagtaatgttcaacttgacctgcatccaaccttttttgtgctggactttttcagcttgatgtaactaaacttttgtattgatgtggttatatattcatcagggcttccatttctgtctgcatttcaatgcatttgttttgtaat

SEQ ID NO: 104026 - DNA, 220 bp, Zea Mays
caatctgaatgtgtttccctctccctagttccacgacaactgtggaaccttaggattcaaatgcatcgagatgcaagaacataagtctccagagcctgtcgacacatacgacctctatgtcattgtgcacatgatgctacactggtcaggcatgagcgtcgagaaggtgcccaagattggtggaggctacgattatcagcctaagcaactgtttaaaagg

SEQ ID NO: 104027 - DNA, 121 bp, Zea Mays
gaggtactcagaagggcaaagttattaaagttaaaagaaccttttacatggaatttattcgaaagtctagagttaagacggaatgacctaaaaccaatcaaaatacaatcatattggaggc

SEQ ID NO: 104028 - DNA, 2462 bp, Zea Mays
agaaccagaaccagaacaagaccggaggaaccagacgacgcaagggaaaggagagccaccggagcggaccgccaccttcccttctgccggcgacctccagccacggcgcccatggcgtcggcgaagctgctgtacattgtggtggttgacgagaacgcctcctccttccgatacacgcgctccctcctccatagcaccctccagctcatgggatgcaagccacgccacgccttcgagatcagccgcagggtgtttgatgtcatccggggtgaccaccagggccacggcgacacggccacctccgcccgggtacaaaggtacgaggtcgccgaagccaccccgaccgcaagcccccgccagttccagttcgagctatacaagcgccggaccaccgtcctcctcccaagggacctcttcctcgacctcgtcctcgacgccctcgccctctacaagtacgttgcccccaaccagcgcgccgatctcatgctcgcctgcaggattcgtgaacgaaaggaatctatcacggttcttctttgtggaactagtggctgtggcaagtctactctttctacgttgctgggaagcaggttaggaattacaactgtagtttctacagattcaatacgtcacatgatgcgaagctttgttgaagaaaaagaaaaccctcttctctgggcatcaacttaccatgcaggtgaatgtcttgatccagtagcagttgctgaagcaaaagctaggaggaaagcaaaaaaacgctcaggcgtatcaagcagctcaactattgattatgagaaaagtgggtctcttaccgaaaaagttgatgggaaatcaatcgggaagaagcaaatggccgttgaaggttttaaagcacagagcgagatggtgattgatagtttggatcggttaattactgcgtgggaagataggaaagaatcagttgttgtcgagggtgttcacttaagccttaattttgtgatgggtctaatgaggaaacatccttcgatcatacctttcatgatctacatctctaatgagggtaagcacacagagaggtttgctgtacgtgcaaagtacatgacacttgacccaacaaaaaataagtatgttaaatacatcagcaacattagaactatccaggagtatctctgcagcagagctgacaagtacctagttcccaaggtcaacaacactaatgttgatcggagcgtggcttcgatccatgccactgtcttcagttgcctccgtaggcgaagtaatggagatcaattatacgaccctgaaggaaatactattgctattgtaaatgaagagtacaaaaaccaatgtgtggctaattccatgagttccaaggggatgtttaaattgatccaacgtcttggatcctcaagaaagctcatggccatcattaatgtcgacggttctgtttctaaggcctggccagttgagtctagtggagatggaaaatgcagttctgacaacagtaataagaaatctgtggggaatccaatctatggacctctaaatattggaagagcagagtcagtcaatctgcagtttggcacctttggaataagtgcctggcctactgatacaggctgtacaagtcaagctggaaatgctgatgaatcatgggtaaatgctgctgaaggtagtagcagtcatgttcaatcatcatccggttctacgaagaagttggatggacattgtaaagagatcaaagagtcatcagcagcatatggcagtgatgaagaagaggaagaagaagctgatgtccgtcctaattcagggagtgatgaggacctaagtgaagaagacaccatggagatcgatgaggagatggaagggtctgtggacgaggactgcaacaggtctgatgaggaatatgacgacctggccatgcgggacagtttggagaacggctatttaactgacgatggtgttttctgttctggtttaagcaactcgtcaagcggcaagttctttggtggcaatcaactaagccacagcacgccaaagaaaccccaagagaagttcgatgctggtgttcctgagacgtcacgctcttattctgctgcagtccctgctggtacaagtagcaagcggcatgctactaggaagtggaagcgctcgctcagtgaccccttccgttcacggccgcacagtgctccggaattggtgtcaggatgcaagggatcaccgcccgtgcctgtggctccagaggagaggtagccgatgagctacagaagacgtatcgtgttatgttttttagcataaattgcaaatgaattatgaatattgttatctgaggcatcatggatgtgaaaaaagtactatgcaactaactttttaaggtgttgattttgtaagaggatgtttggtgaaaggaccaagatgtccataggaattgaattaggctaatgtaattttttaataattaaattatatcaaatagttcactcgac

SEQ ID NO: 104029 - DNA, 414 bp, Zea Mays
atggatcttgatccggacgccgaggcggcggagcatgagcttgaggatcacaacgagcgtctggatgaattggccttgtttgaaactggcactggctgtaatgcaactgtggccatagatgttgatgtggcgctgccgagcctggccgaaacggtgactggctcctcgagccccactgccactagtagcactgcccgtgacaaccggtggaggaagaggctagcgacatctagggtttgggctgacttcgaggaagtaactgggatcgatgagaaaggtaagaaggtaaggatatctgctatttgcaaacactgcaaaagtaccttgtctgctagatcttcatctggtactggaacttacttaggcaccaagaacattgtaaagctaaaattgaacatgaccaagcaagcatag

SEQ ID NO: 104030 - DNA, 804 bp, Zea Mays
caatctcaaacaagttaaaatctttcataattttttccaatcccatccaatccacatgggataggaataaccgaacaagcccttaccatttttccattcctcaggtgagcatttttccattcctcaggtgaggatctcaaatctcaacatcaaccccgccgcgataaaccacaactgagaaaagaaactgaaggcaggaatagagaacatgatctactatgcgattcatacagcaaacatctaggacagcgagacgaaggtggaggtggatggcaagcgtagcagccgggcaaacgatcggaggatcaggacccatcagtagtcgtcgtcgccgccatagtcgtcgttgccgccatagtcgtcgtagccacccccgtagccgccgtatgcagcggcaggaggagcgccgtacgctgccgctggctgaggcggcggcgcggcgccgtaggtggaagggtaccccgccgggggcgctgcggtgtagggctgcgcggcgccgtaggcgccgccaccgtaggcgccaccaccggaaccgtatccgcctccggagccgtagtagccgccggcagcagcagcggacgagccgtaggggtcacgggtgccgccgcccgtgttggcgtaggccgcgggggccgggtaggggttggggtcgtagtacctggacggctccttgacggcgacgcggacgtcgaggcggccgtgggggcggcccgaggggcgcttgaggcggaggctgcgcgaggccttgcccccgaccccggcgtcgtcgaggacgtcgcggagcgggaggcgcgcggagccgac

SEQ ID NO: 104031 - DNA, 1188 bp, Zea Mays
gagcaaggagggatctcgctttagaccagcgaatccatccacaaagattccgtgcacctccagcgcagcctccgctgtctgtccccgcggccgcggcaaccgagcaggaagaggaggaggatcccgtcctcccagtctagagcagccgcttgcaaagcgcatcggcggcacggccgtggattccgcgaatctgccaccgcttgctgctgcttctgagactgacaccgccatcgcagctgatggggatacccagcgacggcgacgacgtggtgcaaatccggcacgccgacgccgccggcgagcccaccgtcgtcaccgtgagctgccccgacaagacaggactgggctgcgacctgtgccgggccgtcctcctcttcggcctcagcgtcgtcaagggagacatgagcaccgacggccgctggtgctacatcgtgttctggctgttgccgcgcgggcggcggcccgtggccgtgccgtgggacctcctcaaggaccggttgcttcagctctgccccgtcgcgccgccattcggcttcgggtcccacgacgcgtacctcgcggcggcggctggcctgcaggacgttccgcctcccgcgccacagctcttcctgctcaagctatgctgcttcgaccggatgggactcttgcacgatgtgacacgcgttttgtgtgagctagagctcacgatccggagggtgaaggtctctaccacgcctgatgggagtgtgctggaccttttcttcatcacagatgccagggggcttctgcacacaaagagcaggagagaagaaacccaggacagactcgagagcgtcttaggcgactccttgacatgttgcgaaatagatcctgctggcgaagacatggtgtcttgctgcctccagtcctgggcctgggcttcgctgacgcctgctgttatagcacagatgtttagcacagctgatcgcgtggaggagcaaccgatcggcacaaggggtggtggtggtggtaccatcatctccgtgacgatggacaactcgcttagccctgcccacactcttattcagattcagtgtggcgaccataagggcctcctgtatgatgtcatgaggatagtcaaagactgcaacattcaggtaacgacatgattcaactgaatctaattcgtctccctctctctctcttttctttttcaaaaaaataaaaaca

SEQ ID NO: 104032 - DNA, 1826 bp, Zea Mays
gagcaaggagggatctcgctttagaccagcgaatccatccacaaagattccgtgcacctccagcgcagcctccgctgtctgtccccgcggccgcggcaaccgagcaggaagaggaggaggatcccgtcctcccagtctagagcagccgcttgcaaagcgcatcggcggcacggccgtggattccgcgaatctgccaccgcttgctgctgcttctgagactgacaccgccatcgcagctgatggggatacccagcgacggcgacgacgtggtgcaaatccggcacgccgacgccgccggcgagcccaccgtcgtcaccgtgagctgccccgacaagacaggactgggctgcgacctgtgccgggccgtcctcctcttcggcctcagcgtcgtcaagggagacatgagcaccgacggccgctggtgctacatcgtgttctggctgttgccgcgcgggcggcggcccgtggccgtgccgtgggacctcctcaaggaccggttgcttcagctctgccccgtcgcgccgccattcggcttcgggtcccacgacgcgtacctcgcggcggcggctggcctgcaggacgttccgcctcccgcgccacagctcttcctgctcaagctatgctgcttcgaccggatgggactcttgcacgatgtgacacgcgttttgtgtgagctagagctcacgatccggagggtgaaggtctctaccacgcctgatgggagtgtgctggaccttttcttcatcacagatgccagggggcttctgcacacaaagagcaggagagaagaaacccaggacagactcgagagcgtcttaggcgactccttgacatgttgcgaaatagatcctgctggcgaagacatggtgtcttgctgcctccagtcctgggcctgggcttcgctgacgcctgctgttatagcacagatgtttagcacagctgatcgcgtggaggagcaaccgatcggcacaaggggtggtggtggtggtaccatcatctccgtgacgatggacaactcgcttagccctgcccacactcttattcagattcagtgtggcgaccataagggcctcctgtatgatgtcatgaggatagtcaaagactgcaacattcagatttcatatggccgattctacgcgagccaaaacggaaggtgcgagatcgatctgttcgcggtgcagtcggacgggaagaagatccttgatcagcacaggcagagagcactgtgctgtcgcctgaggatggagctccgccgaccactccatgtggcgttggtgaaccgaggtcctgacacggagctgctggtagcgaacccggtcgaggtttctgggaagggtaggccgctggtgttctacgacatcacccttgctctcaagaatcttcagagacgaatcttcttggctgagattgggaggcacgttgtggaaggcagggagtgggaggtctacagattgcacttcggtgaggagcacgagctctcgtctgcgctgcggaagaagattgtggatgcagtcaccaacatgctgatggggtgggactgatggcactgctgctgctgccgtgcctcggtctgaaacattatgcttagtgttcttccagaaactaacctatttggtgcaagcaaagaagaaacaactgatctctatctcttagatgcagcggttttcagctaatgcagagaccatgaaacctttggttatctaaacatgcactaggaaccggggtcctactacttagtgggcaccagacctgatgtatatgcatatactgaagcatgatcaagagtcatgtgtggcatatatataccattttgtctttgtcagaaa

SEQ ID NO: 104033 - DNA, 1041 bp, Zea Mays
atatcgtcgcaagctctccgtgtttctctcgtttcttcactgctgccaactgtgctgtgcagtagttgcaagagctgattggtagctaggtacgctaggcaagtaggcatggctcccaagcggcgcggaaacaaggtggtgggctccgtggtgaagaccaaactagtgcaggagaccgtggaggtcatcgtcgccgacgacgatgggttgcacgcggagaagcagcaggtcccggaggctctggccctggcgcaccccaccgtggacgtctctggctccacggtggtgcatgtcgtcgaggtcactgccaaaagaggccgtggtggtggtggtggtggtggtggtggtggccggcgcaacgaggggaagccgccgccggaggaggattctgcagcagtacccgtgccgcagagccaggagacgcaggaccccaacgaggagctggagtttgagctggaggacgaggaggagaagcagccggagactccgcgcgtggcgtcggagaagaggaagaaagcagcaacaccaacaaagaagacgaagacgcagcagccgcggcggcggcggcagcggctggggcaggccagctccggaggcgacgccgggatgggcggcgtgggagggtacaggcggtacgtgtggcgcgtgctgaagcaggtgcacccggacctgggcgtgtcggggcacgccatgcaggtgctggacatgatgatggccgacatgttcgagcgcctcgcggaggaggcggcgcgcctgtccaaggccacgggcagggcgacgctcacctcccgcgaggtgcagagcgccgtcaggctcgtgctccccggggagctgggcaggcacgccatctctgagggcaccaaagccatctccaagtacatgtcctatgccgcctaggtagctaccgtacatgttttctgtaccttggaagtagtgcgtactgcagctgatgtattttcatgcatgccaactagactagctagtagttactgtacgtatgtagttgatagtgtaatcaggccgggtagcagctagctagac

SEQ ID NO: 104034 - DNA, 1206 bp, Zea Mays
catttccaggatttactagctgggtttaccatagcccgtaggatgtcgagcgatctccactcggcatcggacgtgatcgccggtcgccgcctcctctccaggctgcagcacctgagcgccagcttcatgagcttctcggcctgcacctccggccagggcccggcggacgcgtccagcacgctgtgcacggcgtccatcttcaccgcctcgcgcgcctgctccgcgacgttgagatccagcagccccgtgagcatctgcagaatcaccatgccgaacgcgtacacgtccgactccgttgtgagctcgccggtcatgaagaacacggggtccatgtaccccgccgtgcccatcgggttcgtgcggcggccgatggtctcctcctccagcggtttcacgtgcaccgcccgcgccgtcccgaagtctcccagccggctcgcgttgccggcgtccaggaggatgttggtcagcttcacgtcggcgtggatgatggcgtggggccgcctggagtggaggtacgccagcgcagagcgcagctcgccgaggatcctgacgcggtccttccacaggaggcccttggagagcctgtccttgagcgtgccgttggggaggtgctcgtacaccaggccgcacgactccgggcacacgccaatcagcctcacgatgtgtgggtgctccaatttgctcagcaccaccacctgaggatcagagcacccccagtgcgattatgactgggccataacctcctcctccgatgaaatttcttgagtggaagttgtcggtcgccttttcgatttgcgacatcgagaattgttcaatgttctctggaatctgcagctctggatatctaggctctgatagactctttcgcttcagtgacgcagccatttgtctaggtgacaagctcctctcgtcgtgattacgctcctctccttgcagctgtttcagtttcttttgcagccggtctatttcctcctgatcaaacaaaacaagagttgctgaacacccatgcttatatgatgcactaggtgatttttattttctttttatcgtcagcgttaagtagatccaatactttagtgctatcatgtgagtatgtgaccgacattttaatccatataatctgtatcacttatttctctgaaccctgccacctgatcttctcttacctatcgcaagttgaaaccatctgtgtttgtagttaactaa

SEQ ID NO: 104035 - DNA, 79 bp, Zea Mays
cctgtctcactcgtctcagtgacgttcattcacctaaaagcagtcaacgaggcaagcatacagcattacttatgtatgg

SEQ ID NO: 104036 - DNA, 1581 bp, Zea Mays
atgtcgctggcctgcggcctgccgctgctcgagtgcgtctactgcctcgcttgcgcgcgctgggcatggaagcgctgcctccacagcggcgaggtcgacagcgccacctggggcctcgcctccgccgacgacttcgagcccgtgccgcgcatgtgccgcctcgtcatggccaactacgaacccgatctctccccctccgccccgctcctcttcgcgccgcccggcggctacggcatcgaccccgcctgcgtcctccgccgccggacctacgccgacacacgcggccgcgtcacgccctacctcctctacctcgatcacgcccacgccgacatcgtcctcgcgctccgcgggctcaacctcgtcaaggagtccgactacgcgctccttctcgacaaccgtctcggcaagcgccgcttcgacggcggctacgtccacaacggcctcctcagggccgccggctgggtgctcgatgctgagtgcgacctcctcagggaactcctcgagacgtaccccgactacacgctcaccttcacgggtcattctctgggcgccggcatcgccgccatgctcaccatggtcgtcgtcctcaacctcgacaagattggcaacatcgacaggacccgcacacgctgctacgccatggcgccggccaggtgcatgtcgctcaacctcgccgtcagatatgctgacgttatcaattcggtcgtccttcaggacgacttcttgccccggacggctactcctcttgaagacattttcaagtcgatcctctgcttgccttgcctcctaggtttgagatgtttgagggatacatgtatacctgaagacgctatgcttaaggatccaaggaggctttatgcaccaggccggatttatcacatagtcgaaagaagaacgtgcaggtgcggaagatatccaccggtagtcaaaacagctgtgccggtggatggtagatttgagcacatagttctttcctgcaatgccacagcggaccatgccattatttggattgagagggaggcccagaaggctttggatctgatgctggaggaggagaacacgctggcagtgccgtcggagcagcggatggagcggaacgaaaccctgcagagggagcatgtggaggagcacagggccgctctgcgccgggccgtcacgctgtcggtgccagacgggcggcgaccgtcgccgtacggtacgtttgacgacgtggagcagcatcgccagcagccggagaggagcgagagcttcccgccggcggggcccaggcagcgcatgagctggaacgacctgatcgagcgagtgttcgacaaggacgaggacggccagatcgtgctgcgcagctcggttcttctctgacgggcggctgggccgttgtaaattcctttggtcttgtagctgtgctgcctctccctgtagtacccccatttttcctgtgttattattggttgttcaatgtaattccttcattcattgaagaggattctttttctcatgcgcggttcatttagcgacatcagctccgtgcagacaagttttgtgaataaattatcaaggtagagtagatcaatttttgaaatc

SEQ ID NO: 104037 - DNA, 1681 bp, Zea Mays
gcgtaaggttcagcatgcagtgactgtgtctcgttctgttaaggacgtggtcacgatgaccgagtattcaggcgtcactagtgcacgctccccgcgatcttatcacgatctgttgtactctgatgtaaacttgattgagctataaatagaatacgatcccatcgaggatctgtgcgcctttcatcaaacttttcatggtaccagagccacgatctagacaccgagaaaatcgccatgtccaccacgtccaccgtcgatggcgtcgccgccgcgttcagctcgatgccgatgccggcgttcaaccagatggtgagtatgaagctcaaccatgagaactaccttctctgggtggcacaagtcctcccatatctgcggagccaaggcttgagcggccacatcgatggatcgctcccggtgccaaggcagactgttgccgtcgaccctgcagaaggctccggcggacgaacgatcgccatcaaccccgagttcacgagctggtaccaccaggatcagctcgtcctgagcgtcatcaactcatccctttccgaggaggtcctggccacagtggttgatgccactactgcccgcggtgcatggagcactctggagaggatgtacgcgtcaagttctcgcgcccggatcatgcagatccgaatgcagctcgccaccatacagaagggtgatctcactgccgcagaatacttcagaaaggtaaaaaggcttgctgacactctggtcgttgttggcaatcggcttgaagatgaagagttcatctcatacctccttcgtgggcttcccgccgactacgactccctcgtcaccagcatcactacaaggccggacacctacaccatcagcgacgtctacgctcaccttctcagctttgagaccaggcaagaataccatactgttgttggtcagataccctctgttaacaatgccaacagggtaccaagccatggtggaggagcatttggccggaatggccgtggagggcgtgggcgcggtggacgcagccagcctgagcgaggcaacaacagaccaccagcaaggccaccgagcaacaacagcagttccagtggcacttgccagatctgtggaaaagggaaccacaatgcacttcagtgctggcatcgatttgatcaagcctatcgggcagagagcactgtcaagcaggctgcagcagcaacacatgagtatgcagttgatcctaactggtacatggacagtggggcaactgaccacattacaagtgatttagagaggcttaccaccagggagcgctacactggaggagacaagattcaagtggcaaatggagcaggatcaagccacaaagcatcttcttctcagaggcaaatgtaggaatggcttatacactctaccaaataattgtcaagccttgctagcagccaagacttctcctgatctatggcatcaaagacttggacatcctgcccttccagttactcttagaattttgcagaacaataatattgctgtaaacacagaggttttaccttccttgatatgtaatgcatgtcaactaggaaaatcccatcagcttccttttagcagttcttcacatgtctccactatacctcttgagcttgttcatactgatgtttggggccttgcactttcatcagtaaataattcaaagtactatgtttctttcatt

SEQ ID NO: 104038 - DNA, 627 bp, Zea Mays
atggggaggctcagctgcacctacaccaccgtgctcgtggcgctcgcgctctcagctccactggccgccctcgccggcgacccagacatcctgaccgactacatcgtcccagcggacgcgaaccccgggaccaccaacggcaccttcttcacgttcacggggttccgcgcggccatgaccatgcccatgcccaacttcatgccgaccaaggccacgatggcggagttcccggcgctcaacggccagagcgtctcgtacgtgctgctcatgttcccggcggggggctcggtgaaccccacgcacacccacccgcggtccgccgagcttctgctcctcctcgacggcgcgctctctgtcggcttcgtggacaccgcgggcaatctcttcacccaggacctcgccgccggcgacatgttcgtgttccccaagggcaccgtgcactggcagtacaaccagggcacgcagcctgccaaggcgctctccgccttcgggagtgccgccccagggctcgtgtccctccccagcaccctctttggcgccagcaacatcgacgataacgtcctcgcaacgtccttcaagaccgatgtggccaccatccagaagctcaaggcaggcctccacgcataa

SEQ ID NO: 104039 - DNA, 986 bp, Zea Mays
atggcccgattcgccacccgcgtgactggggatgatgacgcccttgagtgccgttccgttgcctattcattcatcacggtggacgtgggcctcaggcctcagccacggcagctacgcgaggggggccgtacccaacggtgcatccactgggatctgagcggtgggattagtcgatctatcgatgctgtgtggctttgtgacatgtttgccatgcgtcgaggtaggttgcttactatcaggggcggatttggtaccagaagagagtctacactgaagcttggaggaacgggcggatcttggcggtggcggcagcgccatggagtaagctgtgcaagacagggatcacaaattcttgacaaaacagtggaagaagcataccgtggagtcgattgcggtgacggaggtccatttggagcagttgtcgtccgcaatgatgaagtggtagttagctgccataacatggttctgaagcacactgaccctactgcgcatgctgaagtaactgcaattagagaggcttgcaaaaagctcgggaaaatggagctctctgactgcgaaatttacgcgtcctgcgagccatgcccaatgtgctttggtgcaattcatctctcccgaatcaagaggctggtttatggggccaaggcggaagctgccatcgccattgacctgcaatgcactactctcttatgatcatgcatgtactgccacattctgatatgagtactcaactttaaattaatcaatctactgtaagtcacaacttttggataaaatttcttcctagttgataaccatttttatgtcacattccagatgaaccacttccagaattccagttacttactcttaccgggatgggactgggcacaagagagttatccatgttaatttctaacaaatgatgaacatgcttattatttgcttgctcattatttgcttcctcggagttttttatatgtggactgtacaatgaaaacacaacctat

SEQ ID NO: 104040 - DNA, 2302 bp, Zea Mays
ctccattgaagttaacctaaagggcacagttacagattttaatacatacaggagagatataaaaccttacggttgaggtaaaacacatccatcgcataaacgcacaaatccaagatcatcactccatcagattgttccaacaccaaacacttctgtagtaaataggcctgtgaggcatacacgattcgtcatcatctttagcaactatagtcgttgcttgtcatgcacatggtacaagaaataggtttgttcactcaaactaacactgattgatttacaacacaacactgactacaaagaacttaaaaacaccagctccgtgaacagcagctgcacagagatgcctctgcttctaaacctgaccaagaatggtgccacgattgcactaggcaaagcaagaaccagcatcgtcatcatgccacctcagctcaacccggcaagcatcccatgggcaacggggcttaaggctgcatgagattcatctccattactaagtgccaagaggaccaagttttaagcaaaaagaaaagtgagagttgcactaacccacatccctgtcgcctgttcacatactggaccatcccaatctttccccttgccaatcacccgctcactgcgcaatcccattttttttaccaacactatcagtccttcaacaacagagcccattcaacgagggcaagatgtgctcctccagcatctcaatctgtgagaggaagcaaaagcaccgagaatgaagctgaaagaggggcatgcagggccaccaacccccccccccccccccccccagcccacgcatcacctctcagcttcttgtggatcttcttgtggattagtggggttgtccaataaacctagagctgcttctgtttaaaggagaacagtgcccctcctgcatctcagtatgcagggagcaactacaccgagagtgcatacaggctgacaacatcaaacagatggctgactctgccttacgcctctcggtttttttatgcctgctaccatctgccagtaacaaaggataatgtgtttgttgcacactggcaggtgcaggcatgcccgggcccctcaccggggccgggcaaagcgtagactagcatcaggttgttgttggtgaacctgtgcaaatggtcccattgattcctgtggatgtgcaaatgggactccagggcgagaaggtatagcatattgctgtgaagcatgcatgaaaacagacgatctcacaggtgcaccagggctgtaaggtcccatgacaccatctggcccatagccaattgcattagatgcttgagccactgaccatgatgcaggcatgtgctgagctattggacgaggttgctgttcgacagcaacaggtgatcggtgtgctgacccaagctgggggaattcggtgttgtagttaacagcaggggcatagaggggttgaattgtgtatgggcctccactaaatccaaatccaggatcaaatctttgcatatacctgtacaagtcactcatggccagtaaataatttctactgatcaagtatgtctaccacattgaacaagaacacaaaaaaacatcatttaatgatttaacctgaagttctgaactagcttaaccaactgcatagaaaataagtactccctccgttcctaagtctccatcgtataagcaaattggatttattcaaaaatctccatcgtattaggtggtacttccgtctttttagtttctcgagcatgcatgcatatcagcagatggctaatacactcctttgctggtccttccgtatttttagtttctcgagcatgcatgcatgcatgcagatttattcgaaagtgcatggttaaaaagactgcgagtaaaagcatatcggcgctcctttgccgctccttggtcactgtgcagatgactaatacgctggagacttaggaacggagggagtacatcacaagatttagtgtttactataaaaagaaagaatcctcttattgccatgcttcactaggatcccatcattagcaatcaaactgatatttttcagttgacttgaaagttttggacgatagtcaaatgaagaacttcatacaatgcataagaaactacggagcagaagcatggtaaaaatagccataaaagatttcctgtctacggtgtgctaagagtttagcatcaaagagatgtgttacgacaaaagaaactgacctgtcatagcttctgtcataatcaggatccttgcgctctgactcacgatctctgaaaattgcaaccctattgttctgcttgtttctattgactgcaggctccttatcaatcttgc

SEQ ID NO: 104041 - DNA, 1332 bp, Zea Mays
ttctgtagtaaataggcctgtgaggcatacacgattcgtcatcatctttagcaactatagtcgttgcttgtcatgcacatggtacaagaaataggtttgttcactcaaactaacactgattgatttacaacacaacactgactacaaagaacttaaaaacaccagctccgtgaacagcagctgcacagagatgcctctgcttctaaacctgaccaagaatggtgccacgattgcactaggcaaagcaagaaccagcatcgtcatcatgccacctcagctcaacccggcaagcatcccatgggcaacggggcttaaggctgcatgagattcatctccattactaagtgccaagaggaccaagttttaagcaaaaagaaaagtgagagttgcactaacccacatccctgtcgcctgttcacatactggaccatcccaatctttccccttgccaatcacccgctcactgcgcaatcccattttttttaccaacactatcagtccttcaacaacagagcccattcaacgagggcaagatgtgctcctccagcatctcaatctgtgagaggaagcaaaagcaccgagaatgaagctgaaagaggggcatgcagggccaccaacccccccccccccccccccccagcccacgcatcacctctcagcttcttgtggatcttcttgtggattagtggggttgtccaataaacctagagctgcttctgtttaaaggagaacagtgcccctcctgcatctcagtatgcagggagcaactacaccgagagtgcatacaggctgacaacatcaaacagatggctgactctgccttacgcctctcggtttttttatgcctgctaccatctgccagtaacaaaggataatgtgtttgttgcacactggcaggtgcaggcatgcccgggcccctcaccggggccgggcaaagcgtagactagcatcaggttgttgttggtgaacctgtgcaaatggtcccattgattcctgtggatgtgcaaatgggactccagggcgagaaggtatagcatattgctgtgaagcatgcatgaaaacagacgatctcacaggtgcaccagggctgtaaggtcccatgacaccatctggcccatagccaattgcattagatgcttgagccactgaccatgatgcaggcatgtgctgagctattggacgaggttgctgttcgacagcaacaggtgatcggtgtgctgacccaagctgggggaattcggtgttgtagttaacagcaggggcatagaggggttgaattgtgtatgggcctccactaaatccaaatccaggatcaaatctttgcatatacct

SEQ ID NO: 104042 - DNA, 1435 bp, Zea Mays
gtgcttggccagttggccacatgccttgccttgcctttgcctacctgttgatcgagccgagcgagcagggagagacacggcaccgagtgaggccgccgcatcctcctcctctccgatccgtacgtttcctcctccctagcaatcgcaacccgttcagccaatcattgccgtctccaccaactccgttcccctattacctagttagtccagtccgcctgctgcctgcctcaacggatcgacgcgacaggagggagggaggaaggagacggtcgatcagagtctgagacggaggccgatccaccaccgcagcgacgagcgggaggagatgaagatcatcattgacacggatcccggcatcgatgacagcgtggccatcctgatggcattccagatgccgggcgtccaggtcctagggctcaccaccatcttcggaaactgcaccacagagcatgccacacgcaacgccttgatcctgtgcgagaaggcaagccatctagaggtcccagtagctgagggcagccatgagcctctcaagggaggaaagccgcacgttgctgacttcgttcatggacctgatggcctcgggaacgtagatcttcctgatcccactatcaagaaagtggaggaaagtgctaccgacttcttggttgataaggtctcgcgatttcctggagaggtctctgtgctcgccttgggtcctctgacaaacatagcattggccatcaagaaggatccctcattcgtgaaaaacgttaagaagatcgttgtgctgggtggagcgttctttgcggctggaaatgccactccttccgctgaagcaaatatccacagtgatccggaggcagccgacatggttttcacttctggggcggacatctacgtcgttggcctcaacatcacaacgcaagtcagcttcacagataaggatctcctggagctaagaaactcgcaagggaagtacgcacagttcctatgtgatgtatgcaagttctacttggactggcacaccgagtcttatggtgctcctgtgattttcctccacgatccggtcagctttgccgcgctagttcgtccggagctgttcacgttcaagaagggcgtggtgagggtggagacgcagggcatctgcgtcgggcatacttccatggacatgttgctgaagaagtggaactcagagaacccgtggactggctactcaccgatttcggtcgcatggacggtcgatgtgcccaaggtggtcgcgtttgtgaaggagctcgtcaccaagccgtgaaccaagttaactaacgtgttgtggtctcgcgcaccagatgtgcagcaaatttgagatgtcgatatatttactcacattcgaagcactgcaaacactattatctcaatagttggttcctgtggaggattgcaaatcaatttgagatgttttaaattgcagcat

SEQ ID NO: 104043 - DNA, 1259 bp, Zea Mays
gtgcttggccagttggccacatgccttgccttgcctttgcctacctgttgatcgagccgagcgagcagggagagacacggcaccgagtgaggccgccgcatcctcctcctctccgatccgtacgtttcctcctccctagcaatcgcaacccgttcagccaatcattgccgtctccaccaactccgttcccctattacctagttagtccagtccgcctgctgcctgcctcaacggatcgacgcgacaggagggagggaggaaggagacggtcgatcagagtctgagacggaggccgatccaccaccgcagcgacgagcgggaggagatgaagatcatcattgacacggatcccggcatcgggaggaaagccgcacgttgctgacttcgttcatggacctgatggcctcgggaacgtagatcttcctgatcccactatcaagaaagtggaggaaagtgctaccgacttcttggttgataaggtctcgcgatttcctggagaggtctctgtgctcgccttgggtcctctgacaaacatagcattggccatcaagaaggatccctcattcgtgaaaaacgttaagaagatcgttgtgctgggtggagcgttctttgcggctggaaatgccactccttccgctgaagcaaatatccacagtgatccggaggcagccgacatggttttcacttctggggcggacatctacgtcgttggcctcaacatcacaacgcaagtcagcttcacagataaggatctcctggagctaagaaactcgcaagggaagtacgcacagttcctatgtgatgtatgcaagttctacttggactggcacaccgagtcttatggtgctcctgtgattttcctccacgatccggtcagctttgccgcgctagttcgtccggagctgttcacgttcaagaagggcgtggtgagggtggagacgcagggcatctgcgtcgggcatacttccatggacatgttgctgaagaagtggaactcagagaacccgtggactggctactcaccgatttcggtcgcatggacggtcgatgtgcccaaggtggtcgcgtttgtgaaggagctcgtcaccaagccgtgaaccaagttaactaacgtgttgtggtctcgcgcaccagatgtgcagcaaatttgagatgtcgatatatttactcacattcgaagcactgcaaacactattatctcaatagttggttcctgtggaggattgcaaatcaatttgagatgttttaaattgcagcat

SEQ ID NO: 104044 - DNA, 1479 bp, Zea Mays
gtgcttggccagttggccacatgccttgccttgcctttgcctacctgttgatcgagccgagcgagcagggagagacacggcaccgagtgaggccgccgcatcctcctcctctccgatccgtacgtttcctcctccctagcaatcgcaacccgttcagccaatcattgccgtctccaccaactccgttcccctattacctagttagtccagtccgcctgctgcctgcctcaacggatcgacgcgacaggagggagggaggaaggagacggtcgatcagagtctgagacggaggccgatccaccaccgcagcgacgagcgggaggagatgaagatcatcattgacacggatcccggcatcgatgacagcgtggccatcctgatggcattccagatgccgggcgtccaggtcctagggctcaccaccatcttcggaaactgcaccacagagcatgccacacgcaacgccttgatcctgtgcgagaaggcaagccatctagaggtcccagtagctgagggcagccatgagcctctcaagggaggaaagccgcacgttgctgacttcgttcatggacctgatggcctcgggaacgtagatcttcctgatcccactatcaagaaagtggaggaaagtgctaccgacttcttggttgataaggtctcgcgatttcctggagaggtctctgtgctcgccttgggtcctctgacaaacatagcattggccatcaagaaggatccctcattcgtgaaaaacgttaagaagatcgttgtgctgggtggagcgttctttgcggctggaaatgccactccttccgctgaagcaaatatccacagtgatccggaggcagccgacatggttttcacttctggggcggacatctacgtcgttggcctcaacatcacaacgcaagtcagcttcacaggtcctgaagcaagatgaatacgataaggatctcctggagctaagaaactcgcaagggaagtacgcacagttcctatgtgatgtatgcaagttctacttggactggcacaccgagtcttatggtgctcctgtgattttcctccacgatccggtcagctttgccgcgctagttcgtccggagctgttcacgttcaagaagggcgtggtgagggtggagacgcagggcatctgcgtcgggcatacttccatggacatgttgctgaagaagtggaactcagagaacccgtggactggctactcaccgatttcggtcgcatggacggtcgatgtgcccaaggtggtcgcgtttgtgaaggagctcgtcaccaagccgtgaaccaagttaactaacgtgttgtggtctcgcgcaccagatgtgcagcaaatttgagatgtcgatatatttactcacattcgaagcactgcaaacactattatctcaatagttggttcctgtggaggattgcaaatcaatttgagatgttttaaattgcagcatgtgccttcggccattgaatggt

SEQ ID NO: 104045 - DNA, 1335 bp, Zea Mays
cagttggccacatgccttgccttgcctttgcctacctgttgatcgagccgagcgagcagggagagacacggcaccgagtgaggccgccgcatcctcctcctctccgatcctccgcctgctgcctgcctcaacggatcgacgcgacaggagggagggaggaaggagacggtcgatcagagtctgagacggaggccgatccaccaccgcagcgacgagcgggaggagatgaagatcatcattgacacggatcccggcatcgatgacagcgtggccatcctgatggcattccagatgccgggcgtccaggtcctagggctcaccaccatcttcggaaactgcaccacagagcatgccacacgcaacgccttgatcctgtgcgagaaggcaagccatctagaggtcccagtagctgagggcagccatgagcctctcaagggaggaaagccgcacgttgctgacttcgttcatggacctgatggcctcgggaacgtagatcttcctgatcccactatcaagaaagtggaggaaagtgctaccgacttcttggttgataaggtctcgcgatttcctggagaggtctctgtgctcgccttgggtcctctgacaaacatagcattggccatcaagaaggatccctcattcgtgaaaaacgttaagaagatcgttgtgctgggtggagcgttctttgcggctggaaatgccactccttccgctgaagcaaatatccacagtgatccggaggcagccgacatggttttcacttctggggcggacatctacgtcgttggcctcaacatcacaacgcaagtcagcttcacagataaggatctcctggagctaagaaactcgcaagggaagtacgcacagttcctatgtgatgtatgcaagttctacttggactggcacaccgagtcttatggtgctcctgtgattttcctccacgatccggtcagctttgccgcgctagttcgtccggagctgttcacgttcaagaagggcgtggtgagggtggagacgcagggcatctgcgtcgggcatacttccatggacatgttgctgaagaagtggaactcagagaacccgtggactggctactcaccgatttcggtcgcatggacggtcgatgtgcccaaggtggtcgcgtttgtgaaggagctcgtcaccaagccgtgaaccaagttaactaacgtgttgtggtctcgcgcaccagatgtgcagcaaatttgagatgtcgatatatttactcacattcgaagcactgcaaacactattatctcaatagttggttcctgtggaggattgcaaatcaatttgagatgttttaaattgcagcat

SEQ ID NO: 104046 - DNA, 1360 bp, Zea Mays
cagttggccacatgccttgccttgcctttgcctacctgttgatcgagccgagcgagcagggagagacacggcaccgagtgaggccgccgcatcctcctcctctccgatccttagtccagtccgcctgctgcctgcctcaacggatcgacgcgacaggagggagggaggaaggagacggtcgatcagagtctgagacggaggccgatccaccaccgcagcgacgagcgggaggagatgaagatcatcattgacacggatcccggcatcgatgacagcgtggccatcctgatggcattccagatgccgggcgtccaggtcctagggctcaccaccatcttcggaaactgcaccacagagcatgccacacgcaacgccttgatcctgtgcgagaaggcaagccatctagaggtcccagtagctgagggcagccatgagcctctcaagggaggaaagccgcacgttgctgacttcgttcatggacctgatggcctcgggaacgtagatcttcctgatcccactatcaagaaagtggaggaaagtgctaccgacttcttggttgataaggtctcgcgatttcctggagaggtctctgtgctcgccttgggtcctctgacaaacatagcattggccatcaagaaggatccctcattcgtgaaaaacgttaagaagatcgttgtgctgggtggagcgttctttgcggctggaaatgccactccttccgctgaagcaaatatccacagtgatccggaggcagccgacatggttttcacttctggggcggacatctacgtcgttggcctcaacatcacaacgcaagtcagcttcacagataaggatctcctggagctaagaaactcgcaagggaagtacgcacagttcctatgtgatgtatgcaagttctacttggactggcacaccgagtcttatggtgctcctgtgattttcctccacgatccggtcagctttgccgcgctagttcgtccggagctgttcacgttcaagaagggcgtggtgagggtggagacgcagggcatctgcgtcgggcatacttccatggacatgttgctgaagaagtggaactcagagaacccgtggactggctactcaccgatttcggtcgcatggacggtcgatgtgcccaaggtggtcgcgtttgtgaaggagctcgtcaccaagccgtgaaccaagttaactaacgtgttgtggtctcgcgcaccagatgtgcagcaaatttgagatgtcgatatatttactcacattcgaagcactgcaaacactattatctcaatagttggttcctgtggaggattgcaaatcaatttgagatgttttaaattgcagcatgtgccttcggccattg

SEQ ID NO: 104047 - DNA, 381 bp, Zea Mays
atgcacgtaggcgtccaccttatcaaagtccacgatgggctggtcactgcaagcaaaatgcaaatcacagagcagggcaagggcaagtcaatagatcctctttgtatgcatagagcagaaggggacgaagagcgcgtacagcagagcggcgagctcggagatgatcctgtcggcgtcgtcgcagaagagggtgacgacctcggcgacgaagcccggcgtgcccccgtcttcctgcagcatctgcagctgctggaactgctcgtccaccagacccgaggcgaacatggaggagaggagagcgttgagttgctccctcagcgcggcggcagccatggcagcttgctcgaggagccgaggccggagcgggcggtggtggcgtag

SEQ ID NO: 104048 - DNA, 212 bp, Zea Mays
gacggctgtgcttgccgcgaggacggcggcggggactgcgggtgcggggaggggaatcgcgggcgtagcgcgcgatggcagaaccaagtactgtggacgcctacactaaagacataaggagtagtagagatatgtcaaaaaaaagtttatatgaaggccttacatctttaatatcccaacaaaacattagggtctggtttaaacctttggta

SEQ ID NO: 104049 - DNA, 1091 bp, Zea Mays
taattattcttaggtatgtgactttggcctttcaagactgaaagctaacactttcctgtcttccaagtctttggctggaactcctgaatggatggcacctgaagtgcttcgagatgaaccatccaatgagaaatctgatgtctatagcttcggtgttatcctatgggaactaatgacactgcaacaaccatggtgtaacctgaatcctgcccaggtggttgctgctgtaggtttcaaaggaagaaggcttgaaatcccaaaagatctgaatcctctagtagccgtattaattgaatcttgctgggccaatgaaccatggcgaagaccctcgtttgcaaatattatggacactttgaaaccattaataaataaggttccggcacagttgatccgttcagattcgtagcctgttctatacgggtacgggaagatgtattttactgagtggtcctgataacatcaacatgagtgtcctaatactgatctgctataattgaataatccttggatggtattactcattatgataatacaattctcataatctttcaaatgaagtgtgcctggcaatttctttccatggcttaaggtcggcatggacatcaccaggaaatgtgtatgggttttgattgattactaattcagactttcgtttgggttcttatacgaacaggaattgtcctgtgtgatgtcgggcattgtattaaggctatttttgggttcaaactcatctagaggtccttttgtgtttgtacagtatattactgtaggcaaccatgaaaaccaaaggtttaggctgacctacgtttaggcctcatttctgatacggctccggagcgagcaaatgcagtgccgtagaaggtgatatcagtcgtatgcatgcctgtttcttcgtctcttgtactgtaacatgtcttaaatttacctagtgatggcgcatgtacttctgtcgatctgtaccattgttgctgttgaagacaaagtgcgccaaacaaacacgaaccttttccggtctccttccatgcttgtggggagggttcacatggattgccacgtattttgttcctgcagcagatatgtttgatctgttg

SEQ ID NO: 104050 - DNA, 2619 bp, Zea Mays
ttacgaattactgtacctttgatactcgttcaacggagttcgagacctcgtccggtaatgtccgccgcggcggcgcttttaccacggccaccaccgccaaatcctgccgccaccgtccattcactcttcgcctacctatccgacccggccgccctccaccacctacccgccccgctccttgccttctcccaactccgccacctgctgccgcccgccgccgccacccaactcctccttcgccccatcgcctcgctcctccaactccaccgctccgacctccgcataggcctccagcttcacgggctctccctgtccctcggcctctcctgctactcgcacttactgccccgcctcctctccttctactcacaccacccgtcgctcctccccgccgcctcctccctcgccgccggttccacgtgccccgaaccctacaatgtcctcatctccaactgcctcaaccacggcctcccgcaccacgcgctggccgcgtaccatgagatgatcgacaaggatgccgttccccctgatgccttcacttaccccaaagtgctccgtgcctgtgccgagaccgggaacctcgctctcgggcgggcggtgcacgtgcgcgccgtggacgccggcatggacgggcacctgtttttccagaacgcactggtgtccatgtacgccaagtgttgggaccttgcggctgcgcgcacggtgttcgacggaatggaacatagggatgtggtgtcgtggaactcgatgatctctggctacgctgcatctggacagtggagaaaggcagtagagctatttcttcgaatgcaggctgagggtgcggagatgaactcagtgacatggaacacgatcgccggcggttacattcagatgcatgattacagggcagcagttggattaattcgggatatggtgagaggtggtgcgagcattgattttgtgactttggtgattggatcaaacgcatgctcacgggcaggatggttgaggcttgggaaagagatacatgggttggcagtccgaatgcaatgtcacgaaatcgacagtgtgatcaatgcagtgatcacaatgtatgccaggtgcaacgatatggagcgtgctctcatgctgttcaagatgataagatgcccgggtctagtagcatggaatacaacgatagctggttttgcattattggatgatgcagaagcagcttctagacttttccgtgaaatggtggtatgcggtgatgtgcaaccgaattatgttactgtggtcacctaccttgccttgtgtgcccgtgttgctaacctgcagcatgggcgggagcttcacacgcacattgttaagcaaggattcaaagggtatcgtctactgtggaactctcttattgatatgtactcaaaatcagggaggctttcagtggctcaaaatgtatttgatactatggatgaccctgacatgatatccttcacttcaatgatagcaggatatggaatgcaaggaaaaggaattatttctctgcgctttttcaaacagatgattgacagtgggatcatgccagatgccatcatcatggttactgtactctctgcttgtagccactctgggcttgtgggtgaaggggaagagctttttgacaagatggtgaagtcatatggtataaagccccagatggagcactattcttgcatggttgatctatatgcacgtgctggactattggaaaaggcggaagaattgctcaaccagactcccttccctccgacatcaacaatggttgcagcattagtaggagcttgccatgagcaaggtaacataataattggtgaaaggtcagcaagaaggctcttggagatgaagacagagaacgctgggcacttcgttctgattgctaacatgtatgcagctgcaggttgctggaatgagctagcaacagtcagaaaactgatgagagatctgggtgtcatgaaagcacctgggttagcatgggccgaccttggtaacgggtttaccccttttctggttggggataggtcgaaccctctagctccagaaatctatgaggttttggatgaactaactgaacaaatgagtaatatgaataattgcagtgatccggacatactatccatggaggaacacatggagtaatgtgttcatggtaggacaaggacagattgcggctttggtgtaaaatggagttcattaatacaatgtagagatttcaccatgaagcgaaagggttaaaagggaaaaggtgatgtccttcaagaagcagctcatgtaagtgctactgtgcgagaagatgggcttaccaacatacactcaacgtttatgcatgttgaatgtttcctcgaacgtccaggcaatcacaagttgcttcctcatcgatggtgtcttagctgggatgcatgctaggtgatcgctacggtcacgacaagacttgacggctgtaaggtgaaggtagcctcaactcgatgccaggataactgatactgatttttgagggtgtgcattcagtattaaccagctgcctgatttgagatatgtccacaaacgatgtctttttcgccacactctgcaaagtacttcaagcaaatgggttacacagccgtaactcataactcgtagcca

SEQ ID NO: 104051 - DNA, 3709 bp, Zea Mays
atggaggcctccgcttccgcccgcagatccgccgcgggccccgacccccgcgccaagaagccgcgcctcgcgccgccgcctcgggaccccagatcttacgccgccaccgcctcctccaatggcaacacaagcgccgccgagcaagcgctggtcgacgagctgctcggccagtaccggaccgcgctcggggagctcaccttcaactccaagcccatcatcaccaacctcaccatcatcgccggcgagaaccttcaggccgccaagcccatagccgctctcatctgcgccaacatcctcgaggtgacctttgtctttgactcctcttacgctcgtcaaactgccgtcttcccctcctctttctcaattgaccatgtaaaagtaattctaaggcgccatcaagtagtgacaagcacccactggctgtctgttatgctagatatatcacatgtgctcggtggtgcggttccaagtgaacagaaactaccatcactatatctacttgacagtattgtaaaaaatattggaaaagattatgttaaacatttctcagcaagattaccagaggtgttctgcaaggcatataaacaagttgatccttctatacatcatagcatgaggcacctttttggaacatggaaaggagtgtttcctctacctccgctccaaatgattgagaaggaacttggttttcagtcatctgccaatggatcatctagtgctgcaccatcaaggactgattctcaatccccgcgcccatccaatagcatacatgggatacttggaagtggtgctaagacaactgtaattgctgatacaggcggtgatattgagaggcctaataggctaggtactgatagaaatgcggggagacgattagatgcttctaatgctagacctaacatacaacgcactcagagggacccttctagcaattctcttcatgaaaaacaggcagttagagatgtgggaggccttggattctccaacatttcgcagcaggctgttgtgggaactggtcaagttcgctcaaaacctaaagctcaagatggaattggggggccttattatgcctctggtgttgggtcttctgaagaacaatttgacagacgcagcaacttttatgcaagcaaggatgctcgaccatcaggatctgtacgtttggaaagtgcacttcttccaactccatcaatcaatgccgatagagttggtaagccttcatccaacaaaagctggaaacactctgaggaagaagaatatgtctgggatgatgtacattctaaagcagcagaatatggtggtagccataatgtaataaaaggagaatggatgtctgatgatggcaatgctaagtttgcaaacctccaaagggctaaatgggcagatgcaggacctgtggaacgtatagatcccaacacacataaacttgataacgtgtcaagatttggacttggagcaggtcaagaaagaagaatttcagaatacatggatcaggaagagtaccttcttggcaagcgtgaggtggaagcaagaattgataaggaaattaggtctgatggacaacagttcccagcagctcgaggttctcctctctgggtgtcccaggaaaaaacactcctagacattgggttggagcctaggatatcaaggttttcaactcagccagcagagaggtccaccatttatactggcaccatgtcagcaggtatcacttcatctgtacctgttgggttatcaggaaactatgctggaaggtcaagcctagatactgcaaatggtatgccaataagatcaactgaggcttttgggcagcagaagcatagatattggtcatcttcccctccacaagctgacacatcttcatctactgcaccctttgcacgtcagggttctccaaatcctgccgagtctgatttttatccttccagatcactttctcgccaaaatcctcaagaatatagcaaaagagcattgccggtacttgctaaagattctcatgttgtggttcacaatgatggatttactcagggccaacctagtctacaggcaacccggcagacacaaaagtaccctatcttacagtcgaagtcgcatattaagccatctgatcaattgcaggcaagtttttcgcgtgaaaattctccatcattgttcagaccttccatcgaacttggagaagtctctttacccagtgactccacccccataagctcagatctgacaagtgctagtaatttgttggctagtctcgtaaagagtgggttcaaaccaaataaccacagtgatgcacaggctcttggtccaagtggaccacttccagtggcttctttatcacttcaaaatgctgctggtgaaaataccactttgcaggcacatacaccaaacacttctcgtccaccattgccaccacctccatcaacacagagtgcggagaaagctgcgccgctctcaagtcttctcagttccctggttgcaaagggattaatctcttctccagcctatgattcatcgagtgctgtcatttcacagccaaataaagcatcaagcatgaatgttaaagatgccacagcttcagctgtgcctttgctagctctgagaccttcagttggtaaggcgtcatctaattctgattcatctgctccaacaaacgcttcattaaccaaagctatcgaaattaagatgagtgacctcattggcctggagttcaagccagagaaacttcgcaagtaccatgagcacgtgattagcagcctctttgacgacgaccaaagccatcagtgtaaaacatgtggcaataggttcaggcttgaagaactgagcttgcacacatcaagctgtgggcaaaggaagtctgagactatatatactggtatcgcacctaaaagatggtaccctagcaagaacatttacattgatggatcacatgaaattgaggacagcactgaggcttctgatggagatttaggttctgcagaagaagtgtgtgagtttatggtcccttcagacgagaggcaaattatctgtgcactatgtggggaaccatttgatgacatatattcttttgagaagggggactggatgtacaaggatgcagtgtttttggattaccccaagggagaaagcagctgcagaaacagtgttgagggtgaagagcatgtgcccattgtccatgtaagatgtatgccaagaggctcaaacgatggcatggaggttgactagaatgagtattgttcacagcagttatgctcttgaggggccttgaggtggatgagcctaaagctggggtttgcacgaggaactgtgcatcatcaggttgtctgttgcaattggactgatgacatacatgtaggatgattggtggaaggtggcaggcgttatcagaaacaaaactttggcgaagatctggaactgcccgtggatttctcagtgcccattacaaagtgcttacacaaagaataaagctttagaggaacaatttggccatgcaaatcagaattatcaaaatcttcatattttgggtctccatctgagaaggatctttatgttgatggaaagaaagctgtgcaggtgcatgtcaaaagaatgtatgatttctttacgagggaaaaggggtatggtaccccacatgtaactcggatactgctgttttttgacgatacatttctcgtcttttggagtaggaatttttgtgtagttaagaaactgataatag

SEQ ID NO: 104052 - DNA, 2106 bp, Zea Mays
gttgcaaaaaaatagaagtgatggtttggattggttcacttgattgttgctgcaaggtagagagtaggtttgtaaagaagaaagaatacactgtacttaccatacgtattaaacaggagccccttctgcgagtttggtcaccgaattcgaagcaaagaaaaagcatgcaggagagagaagtgtataaaaagaaccaaagcaacgtttcttgtgatgactgactgattaaaaagcaatgaattggctctacgcccaatcactagtactggctggcgcgagaggagagcgcggcgtcccacggcgtcatgtccatggggtagctcccgagcaccctgaggaaggaggtgaactcctggatctccgcgagcgcgttctgcgcgcggacgtcggccatggacgcctggaagtcgatgtagaacatgtactcgaagtgcttggcggtgccgacgttggcgtcgtcgacgaggcggatggggcggtggcggtgcgggcggctctcgatcttggtgagggagatgtcgcggaaggcgaaggcggagagcaccttgaagaggacggaggtgccgtcggtgtcgtgcgcgaacacgatgctggtcttgaacggccggtcggtgcgcgggatgatgggctcccgcgccagcatgacgaagcgggtgacgttgccggcgtcgtcctggatgccggcggcgaggacctggaggccgtagagctcggcggcgcgcgcggacgcgatggcggcggtgtcccggaggccccccgcggcgatgtgctcggcggcgcccgcggtgtcgtcgaaggcctcgcgggccacgttgaggcccatggcgttgagcgtcagctcgcactgcgccagcgcctgcgggtgggagatgacccgggtgagcagctcccgtcgcaccccggggagcgcgaggaggcagtggtggacggggagctggacctccccgacgatgtggaggcggtgccggaggaggaggtcgtagttgcggtggatgctgccgccgagggagttctccacggggagcacggcgcggtcggcgatccagagctcgacggcctgaaaggccacctcgaactggtcgcaggggatggcgtcgcagcctgggtaggccttggcggcggccgcctcgctgtaggcgcccgggacgccctggtacgccacgcggagctgcgacccgtgcatgggcgccggggacaggtcgctgatgctgagcgggcgggggaggttggacacgggcaccagatccagctcgtccggcgtcggcgtcgcctccagggctggcgggggcttctggccgttgacccgcggcgctggctgcgcgttgttgttgctgctggcatcgtggccggcgccgcccgtgctgttgctggcgaggatggcgcaggcggcctgccagtcggcgcgggcgaatggggcggtggcgcggcacgcctgggacgcgaagcgcgtggatctgcaccaggctgccgggcggagctggtggcgcggcgcggcggagaaggcgtcgagcaaagctgcggcgtccatggagacgggcgcgtggattggattggattggcccggcggtttggtcccccccgccccgtgtggccgtgttcccttcccgggtcgtggtggctgcttttttttctcacaccgccagctctggtctggtctggacgtctggtttgttaggtaggtgggaggggttaggtgggggagtgggagggggagcggagcggagccggaggcagcctcgtgccgatgcgttgcgcggcgcggggtggtttttacggggcaggtgccgtgtgtgttcacttctctgcctgcgcggcgacgcgacggacggatggatggatacggcagatggcaaagcaaaacatcgtcgccgactcgccgtggagtgatcaaacactcctccatctctaccaacggcccgtgctcgaagccatccagcaaaagccttgtggcctggcctccgtcttcgccgcgggctataggagcagccaccggccatcgcttcctggtgcacggagctgctacagctctcaagcttatttgtctatcttataggcgctttattttccctcatctcaaaatggatattattgttttgattgcgaaga

SEQ ID NO: 104053 - DNA, 3405 bp, Zea Mays
atgcggcggtgctatgcagtgcgtgcttgcaaggaatctcataccttctcgctggatggctgctggtctgtgccacactgggaagtccgtgaagctgaggtacctcagaggacagaacttgtgccttggagggcgggacaagtgccccgagggccggaagagttgcctgagggtctatgtaggagttgccccgagggtcgacggaagaggtgccttgaggggcggaacaagtgcctcggggggcgaaacgcgaaacaagtgctctggaggtctgaagagttgcctcgagggctgagagagttgtcacgagaggcggcacacgagggaaagccttggggtatggcgcctgctgatgaggatgcttggtggctccccacgtatggaactagaggtggaggcacgatggtggcagaggaaaatgagcttaaactggagagtagtaccatggaattctggaacttatcgcaggtgccagacagttctacaagttcctatgaagtgcaaacttctagattgttaagtcctattttccaggggcaagggcatttagatgcttccttaacttacctaacgggggcatctggaccaacaaaggtgctcaagcttgtgcaagaagttaatgtttgtagtaaggtgaaggcattctgggatgaaggattggagaactccaacgttatttacctgccctgggttcctggagttcaccaggaagttgaaatgatggcaattggagggtgtggtaagacgctggatgactacaagttattttcctctgatgaggatgttgcttctgtgtctgattcccgtatcgtgcgtgcaaaaaagcctggtcaagctgtcatccgagtagtttctgctttcgatttcttgaattttgatgaggtaattgttgaagtttccattccttcagtactgtctatcttgccaatctttcctgtggaggtgcctgttggaacacgacttcattctgctgcagtgttaaaaacatctgctggacacccattctcacaatgtacccattttaatgcttttataaggtggagtctactatccgaggatgaggcctttcacattcttaacaccgctgaggcctcaagcatcgacgacataaaacataattctggttattggggacaaaatggcaatccttgtgcctgggtctctctgagtgcatttgctgctggcagatcaacaatagttgcaacatttgctgttgattcagattcagatattgagacatttggtggacccatttctctggaggcaacttcaaaaatttctgcatattatcctcttgtagttctccaaggggggaatggaaatcattttggtgggtactggtttgacttatctggaattcatagtaggattaagaacatggataacaactctcccaaggagctgtacttagttcctggatcaacaatggatgtccttatcttcggaggacctgagcgttgggaccaagttattgattttgttgaaacagttgatgttattgatccatccaaaaatcatattattagttctaccgctgtgaagaaactatctagtggactatatcgagtatcttgcctaagcaaagtgagctataaattgctgttttcacgtgggaacatggttggtaaagatcatcctgtgcctgcaatttccaaatcagagttcactgttatttgtgacttcccatcagaaataacattgatagcaaatgaaaatgaaaaccgacttgatatattggaagctgctaggaaagctgaccgtggtccagatagattgcaagcatcacccattgtaatctccaacggaagaaatatacgtctagctgctgcgagtatacatgtaaatggaagatttttcgctaattcatcttctcttcgcttgaaatgggaagccactggatgtgaagggcttgcttactttgaagaaaccaaatctgttgaaatgcttgatgagtcagcttgggagagatctcttgtcctacagaattctacaggagtgtgcactgtacgtgctacagttgatgacttttctaccaaatatgctggccaaactcatgaggaagaatacacattccatagtctcacagatgctattcagttgcagattgtttcttctttaagagtcacccctgaatatgtcttattagttttccatcctgaagcacaggttagagttgcaaatgttgactggattaagataacagcagaagagcaaatcagtcttatggaaggaagcacaaaagatttccaaatattagctggcacccaagatggacaaatatttggtgattctcagttcaaatatatggacattgagttgcatcttgacgatgagattctggagcttattggtccaagcgaatcaatggatggacccgaattttcaattaaagctgcaaaaatcggcattacatctctatatgtcagtactaaacaaagctctggacacagagttttaagtcaggttgtcaaggtggaagtgtatggaccattgcaaatacatcctgagtatatttacctcactccaggcgcctcttttgtgctttctgttaaaggtggtccaaaaactggagtttccattgaatactcaagtctgaacatgggaattgtagaagttcaaaataccactgggaaactatctgcaaaatctgtggggaactctactgtacgtgctgctgttttagcaaatggaggtatcttagtctgtgaagcttttggaagagttgaagtggatatcccagtggctatgacattgaatactcaaagtgaacgtctttgtattggctgtagcatgccagtttatccatctctgcctaagggagatctattttccttctatgaaacttgccaaagttacagttggatgatagcagatgagaaggttgtgacattccaatcagctaaatcctggcgatacagacttgaccaaggactatattcagatggaaaaaagagtccatggttttccaatggcagcagcaaattttttatcagtcatatgcttggaaggtctgctggcaaaaccaaaatttccatttcagttgtttgtgatttcttgctacctggcacctctggatctgttgtatcatacaatgcctccaagatcattcttgtggttccagatcctccccttgcacttgcgctaccgatgacttggttattcccacccttctataccactatgagccttttgcctagatcagcaaattcccttggggaaccaaactcacttgacctggagagctccgttgggtattctctgctaaggggcaatggtaggataattgatggaagtaaaattcagactggagaaagcaatacagttgattgtattcaagcaaaagatcactcagctgggagaacggaaatagcagcatgtctacgagttgctcaggttggacgctga

SEQ ID NO: 104054 - DNA, 420 bp, Zea Mays
atggccaaagaaaacacgacaacgcctacaaccaaaaccagcacagaaggaggaagatcgcgacgccgagaatcgaaagcaaccaccgaaggcgaagctggggccgagacaaacttcaatgcgacgccttcagcgagtgacgtcggggacgacaacgtcgcgagtctgagatggactgggcttcgcccaaggaagaatatgctggggaacgcgacgccccaacaggggaagcagtgcccatgggcgtcgccgttgccgtcgccgaggctttcgccgaggctttcgcccaagaagtccccaacaccaacgtcaggccaagagtcaccgtcaccgtcgtcctccttgccacgtgcatcacactggcgcgtgccagagccgcaaccggcagccatcgatggcactggcacacgcggccactga

SEQ ID NO: 104055 - DNA, 2244 bp, Zea Mays
ttgcttcccagttcccaccccgtggtgccaagctcgcggagccggcgacgcagcaagggatacggtaccctcccgtccacgcgacgacaggacagacacccaccccatcaccggaagcaccgccaaagcccaaagccggccaattccgacgccatggccgacgtcgacgacgacgctgtcctctccgacgtcgacgaggacccactcccgcccccctccacctcttccgcctcttcccacaaatcccttccacaagctcaaccccaatcacagtccgatgcccaggcgcagcagcagcggctgctggacctggccgcggagctcgaggaggagcgccgcctccgccgcgcagccgaggcctccctcgcagaggccgagccccgcgtcgcccgcttcaaggccttcgcgcaggaagcgctccgcaagcgcgacgacctcaccgcccaagccgcggcctccgcgcggtccctcgccgcgctccaggccgaggccgccaccgcctcctccatgctctcctctggcttcgagaggatctccgccaaggcctccccttcctcgccccccgcaccgctcccgacctcccagaagtactcctccggcctcccggccctcgcgtacggcgttctcaagcgcgccaacgatatcgtcgacgaactcctcgcccagatcgacgccgctaaccgcgaccgcgatcgcgcgcgggagcagatggaacaccgcaactaccagatcgccatcgaggtctctgagcttgaggcatcgctcgcatccaggtctgccgagggcgaatccctctccaagtccctctcccagcgtgaagccgagatctccgagctccgtgataaaatcacctctctcgaggggaagctcgccgcgcagaggcccgtgctcgcggaacagatcgggtgcacctcgaagctgtatcacgagatgcgggaggtggtcaagctggtcgatgccgaagctgtcagtgccctatcggactcggtttttgtctggaaggagactgacgtcgaggagagcctcaaggtgtctctggaagggacgaaattggcctatgagcttgcggcaatagctctggagaaggttggggcttgtatcgatgacaaggagagcaagcttagacgtttggagaacatggtggatggactgattaaagagaaggagcacattagtgtactgctccggaacgcactgcaggccaccacaagtgaggtgttaaaggttgcagaggatggtctgagagaagctggcattgagattggacttaacgagcgaaaggagcacatgctagggagtgtggagaaggacgaggtttataccctggcaggggctcttgagaataccatgaaggagtctcaggtcaaaattattgagctccaacatcttgtcgaagcactaagggcggagtctggtttacttagaacaaggctagaagggcaagagaaggagattggtcagctaagaaagcaaataaaaaatcttgaagagaaggagaaggtggcaaatgaaagcgttgagggtctgatgatggacgtgacagctgctgaagaggagattaaacggtggaagatggcagcagaggaggaagctgaagctggtagatcaattgaacaagagttccaaattcagatatcatcccttcgcaaggagttggacgaagcaaaccgagctatggtggagctagaaaacaagctgaagttcaaggaagagacagctgctgctgcaatggcggcacgcgatgctgcagagaagtctctaaagctagcagatacgcgatcgtccaggctacgtgagaggctggaggagctcaacaagcagctcgaagaatcagatacgagaaccgagtcggtgaatcgcaatggccataggtacatgtgctggccatggcagtggctgggactgaactacgtgcagttacctctagcggagacagaccagacgtccaacgagatggagctatctgagcccctaataatataggtgctccgacctccatacttgtacagattacagatatatacagatcctgctctttcactagataagggggaacagtagttttttttttgggaggggggttgggttgatgggttcttgtgtagatgttttcgcaatttcttgatgcatgctttgcggaaaacgggcgggtgctggaaggcgccgtgtaattgtaaaaggtaccacttagtgaagatgctgagaagttcattctttgacaagattgttcttgaaacaagtctc

SEQ ID NO: 104056 - DNA, 2216 bp, Zea Mays
cagttcccaccccgtggtgccaagctcgcggagccggcgacgcagcaagggatacggtaccctcccgtccacgcgacgacaggacagacacccaccccatcaccggaagcaccgccaaagcccaaagccggccaattccgacgccatggccgacgtcgacgacgacgctgtcctctccgacgtcgacgaggacccactcccgcccccctccacctcttccgcctcttcccacaaatcccttccacaagctcaaccccaatcacagtccgatgcccaggcgcagcagcagcggctgctggacctggccgcggagctcgaggaggagcgccgcctccgccgcgcagccgaggcctccctcgcagaggccgagccccgcgtcgcccgcttcaaggccttcgcgctccaggccgaggccgccaccgcctcctccatgctctcctctggcttcgagaggatctccgccaaggcctccccttcctcgccccccgcaccgctcccgacctcccagaagtactcctccggcctcccggccctcgcgtacggcgttctcaagcgcgccaacgatatcgtcgacgaactcctcgcccagatcgacgccgctaaccgcgaccgcgatcgcgcgcgggagcagatggaacaccgcaactaccagatcgccatcgaggtctctgagcttgaggcatcgctcgcatccaggtctgccgagggcgaatccctctccaagtccctctcccagcgtgaagccgagatctccgagctccgtgataaaatcacctctctcgaggggaagctcgccgcgcagaggcccgtgctcgcggaacagatcgggtgcacctcgaagctgtatcacgagatgcgggaggtggtcaagctggtcgatgccgaagctgtcagtgccctatcggactcggtttttgtctggaaggagactgacgtcgaggagagcctcaaggtgtctctggaagggacgaaattggcctatgagcttgcggcaatagctctggagaaggttggggcttgtatcgatgacaaggagagcaagcttagacgtttggagaacatggtggatggactgattaaagagaaggagcacattagtgtactgctccggaacgcactgcaggccaccacaagtgaggtgttaaaggttgcagaggatggtctgagagaagctggcattgagattggacttaacgagcgaaaggagcacatgctagggagtgtggagaaggacgaggtttataccctggcaggggctcttgagaataccatgaaggagtctcaggtcaaaattattgagctccaacatcttgtcgaagcactaagggcggagtctggtttacttagaacaaggctagaagggcaagagaaggagattggtcagctaagaaagcaaataaaaaatcttgaagagaaggagaaggtggcaaatgaaagcgttgagggtctgatgatggacgtgacagctgctgaagaggagattaaacggtggaagatggcagcagaggaggaagctgaagctggtagatcaattgaacaagagttccaaattcagatatcatcccttcgcaaggagttggacgaagcaaaccgagctatggtggagctagaaaacaagctgaagttcaaggaagagacagctgctgctgcaatggcggcacgcgatgctgcagagaagtctctaaagctagcagatacgcgatcgtccaggctacgtgagaggctggaggagctcaacaagcagctcgaagaatcagatacgagaaccgagtcggtgaatcgcaatggccataggtacatgtgctggccatggcagtggctgggactgaactacgtgcagttacctctagcggagacagaccagacgtccaacgagatggagctatctgagcccctaataatataggtgctccgacctccatacttgtacagattacagatatatacagatcctgctctttcactagataagggggaacagtagttttttttttgggaggggggttgggttgatgggttcttgtgtagatgttttcgcaatttcttgatgcatgctttgcggaaaacgggcgggtgctggaaggcgccgtgtaattgtaaaaggtaccacttagtgaagatgctgagaagttcattctttgacaagattgttcttgaaacaagtctcgcttgatcttcattgtgataacaatgtgctacactgctactctacttag

SEQ ID NO: 104057 - DNA, 2216 bp, Zea Mays; identical to SEQ ID NO: 104056

SEQ ID NO: 104058 - DNA, 291 bp, Zea Mays
ctagaagaaaggactgttcaggctctcatacatgccagcgattcccctctgtcgattgtgctcgtcggagtaggcaacggaccatgggatgatctgttcatggatttcaccgagatcatgtcgagggaaacgtcacagggcgacaaggagggcaagttcacgttggaagcgctgatgaagataccggcccagcacgatgccataatcagccagaacatcagtgagctgatgacaagggcgccggctacaagagcagcttttcgtccaccgtgctgagccaacgctggcagc

SEQ ID NO: 104059 - DNA, 852 bp, Zea Mays
aaagtgcgcctctttgaccaccaaagttctagcagaaattactcaactgcccagcgcatctcacgacccggcctcgcagctccggcgacgatccctccaatggcctacgccgccgccgttactctccggcgcgtggtgcttgtgtccgctgcgctgcggctcgcactagtggtgttcggggagtggcaggatgcccaccttgaggtgcgctataccgatgtcgactacctcgtcttctccgacgccgctgcctctctggccacaggcggttccccgttcgcccgcgcaacctaccgctactctccaatcctggccttcctgcttgtcccgaactcactcctccatgctgcctggggcaagctcctcttctctgccgcagatttgctcgtagggttgttcataaacaccattctggaactaagaggaattcctgagaaaatgcggatgtggtctgtggtagcttggctgttcaatcccttcacattcaccattggtacaagaggaaactgtgaaccaatagtctgcgcagtcatactctggattctcatatgtttgatgaagggtacccaatgccagaggctgcaaaacaagtcgggtctggggaagggataagctgatgcaagcctttccccgcaaatgcggagaagccgcttcgaacccgcaacctggtgactcagtgagacagttctcgacgttgcactaggcctgtccttcttgtttctccctgaagacgttactaattcatgttcggctttttttgctgtgttcattaaggtctttttttgaatggatgaaatccctggcccatccatgtggatggccccagtttaggccgtgccaaactcatccaaa

SEQ ID NO: 104060 - DNA, 1508 bp, Zea Mays
aaagtgcgcctctttgaccaccaaagttctagcagaaattactcaactgcccagcgcatctcacgacccggcctcgcagctccggcgacgatccctccaatggcctacgccgccgccgttactctccggcgcgtggtgcttgtgtccgctgcgctgcggctcgcactagtggtgttcggggagtggcaggatgcccaccttgaggtgcgctataccgatgtcgactacctcgtcttctccgacgccgctgcctctctggccacaggcggttccccgttcgcccgcgcaacctaccgctactctccaatcctggccttcctgcttgtcccgaactcactcctccatgctgcctggggcaagctcctcttctctgccgcagatttgctcgtagggttgttcataaacaccattctggaactaagaggaattcctgagaaaatgcggatgtggtctgtggtagcttggctgttcaatcccttcacattcaccattggtacaagaggaaactgtgaaccaatagtctgcgcagtcatactctggattctcatatgtttgatgaagggtgtaagctctgaatctcttatgctgtttgttcagttattgctacctttgttaagttgctatggtggaatgtgataggaccattaaacatgttccaacttgtgctctcatgtactaatgtatgcttttgtaactgtgtgtttgtttttaattttttttttatttcaacatggggtatgcatattattgttctatacacagtatataattttttcatatccgtgattttttatgcaatgtctcagatatcttctgtttggttttgatagccaatattttatactacattgttagatcaacctcaccatatatgtagctgaattacaagccctcagtttgtcctgtgctaatagatctcttcacactcatgcatttgccaagttcagttttgctcatacaatgaaatacagtacacacttatgtactcatattcagtgaaatttgtagttagtgatttcttttggccttgaagtgtataaagtactagttatgccacttgttcaaacagatagtttatcagggcttgaccgctgaattttggaatatccatcttcttatatgcattgagtgtagttgtttctcattgaagggcagacccaatgccagaggctgcaaaacaagtcgggtctggggaagggataagctgatgcaagcctttccccgcaaatgcggagaagccgcttcgaacccgcaacctggtgactcagtgagacagttctcgacgttgcactaggcctgtccttcttgtttctccctgaagacgttactaattcatgttcggctttttttgctgtgttcattaaggtctttttttgaatggatgaaatccctggcccatccatgtggatggccccagtttaggccgtgccaaactcatccaaaggtgtctgttgctatttagttcatgaagtcaaatgttaacattatttgaaccatatggtttgatt

SEQ ID NO: 104061 - DNA, 1436 bp, Zea Mays
aaagtgcgcctctttgaccaccaaagttctagcagaaattactcaactgcccagcgcatctcacgacccggcctcgcagctccggcgacgatccctccaatggcctacgccgccgccgttactctccggcgcgtggtgcttgtgtccgctgcgctgcggctcgcactagtggtgttcggggagtggcaggatgcccaccttgaggtgcgctataccgatgtcgactacctcgtcttctccgacgccgctgcctctctggccacaggcggttccccgttcgcccgcgcaacctaccgctactctccaatcctggccttcctgcttgtcccgaactcactcctccatgctgcctggggcaagctcctcttctctgccgcagatttgctcgtagggttgttcataaacaccattctggaactaagaggaattcctgagaaaatgcggatgtggtctgtggtagcttggctgttcaatcccttcacattcaccattggtacaagaggaaactgtgaaccaatagtctgcgcagtcatactctggattctcatatgtttgatgaagggtgtagagtgttgcaggcagctttctggtatgggtttattgtgcacttcagaatatacccaatcatatatgcaattccttttgtaatagttcttggcaagggctatgctggtcctgttggtaggcctactcttacgatgtggaggtccaaacaacagttgcaagatgataaagtcagtcaaatagaagaaccaacatcatttctggccactgtatggggttttctttcaaacttcataagcagaaatgggatcctgtttggattactctctggatccatgttctttgcctggaccggtgttttcttctatctgtatgggtgggacttcctaaatgaagcattactttatcaccttactcgtaccgacccaaggcacaatttctcgatatatttctaccacatatatctacaccatcagcaagggttctcaagtattcagaggctcgcttcgtttcttcctcaactgatcgtgcaactggcactcattctacgcttctctagggatcttccattctgcatgtttctccagacggttgcatttgttgcttttaacaaggtgatgacagcacagtacttcgtgtggttcttctgcttgttgcccctcattctcccttggagcagcatgaaacttaagtggaagggtctggcctgcgcggtagtgtggatggggtcccaactgcattggctcatgtgggcttacctgctggaattcgagggccgaaacgtttttgtgcagctctgggttgcaggcctcatgtttctggctgcgaacacctttgttatgctcatggtgatgaagcaccacaagtacactctgctcttctcaacgccgctgaagtctggcaacaaggttgctaccaagaaggaagaatag

SEQ ID NO: 104062 - DNA, 1634 bp, Zea Mays
aaagtgcgcctctttgaccaccaaagttctagcagaaattactcaactgcccagcgcatctcacgacccggcctcgcagctccggcgacgatccctccaatggcctacgccgccgccgttactctccggcgcgtggtgcttgtgtccgctgcgctgcggctcgcactagtggtgttcggggagtggcaggatgcccaccttgaggtgcgctataccgatgtcgactacctcgtcttctccgacgccgctgcctctctggccacaggcggttccccgttcgcccgcgcaacctaccgctactctccaatcctggccttcctgcttgtcccgaactcactcctccatgctgcctggggcaagctcctcttctctgccgcagatttgctcgtagggttgttcataaacaccattctggaactaagaggaattcctgagaaaatgcggatgtggtctgtggtagcttggctgttcaatcccttcacattcaccattggtacaagaggaaactgtgaaccaatagtctgcgcagtcatactctggattctcatatgtttgatgaagggtagagtgttgcaggcagctttctggtatgggtttattgtgcacttcagaatatacccaatcatatatgcaattccttttgtaatagttcttggcaagggctatgctggtcctgttggtaggcctactcttacgatgtggaggtccaaacaacagttgcaagatgataaagtcagtcaaatagaagaaccaacatcatttctggccactgtatggggttttctttcaaacttcataagcagaaatgggatcctgtttggattactctctggatccatgttctttgcctggaccggtgttttcttctatctgtatgggtgggacttcctaaatgaagcattactttatcaccttactcgtaccgacccaaggcacaatttctcgatatatttctaccacatatatctacaccatcagcaagggttctcaagtattcagaggctcgcttcgtttcttcctcaactgatcgtgcaactggcactcattctacgcttctctagggatcttccattctgcatgtttctccagacggttgcatttgttgcttttaacaaggtgatgacagcacagtacttcgtgtggttcttctgcttgttgcccctcattctcccttggagcagcatgaaacttaagtggaagggtctggcctgcgcggtagtgtggatggggtcccaactgcattggctcatgtgggcttacctgctggaattcgagggccgaaacgtttttgtgcagctctgggttgcaggcctcatgtttctggctgcgaacacctttgttatgctcatggtgatgaagcaccacaagtacactctgctcttctcaacgccgctgaagtctggcaacaaggttgctaccaagaaggaagaatagcagcgtttgggctctttccattttgccgactgatgtatgattaggacatggatcatgtttgtttctctttttttttgtgtttctgtcagatcacatgtgacttgaatcattgtagtttttcccgtacataatgtggtgacattgcatgagaatattttttggttaccagaatttgcaattggttcagattttattacctg

SEQ ID NO: 104063 - DNA, 3397 bp, Zea Mays
gtgataaattacactaaatggttgcaggagcatgaatcactgacttgtgaaccattacctttatgggaaaagaaaaactccataagcagccctctggccgtctgattgaatctctcaaaatggagaggatgaggaacatcctgactcatagatatccatatccgcatgaacactcaagacattttatcattgctgtgtttgcttgttggcttttcttcatttcctcggataatttgcaaaaccttataatgaagttggacaagaattttaaatggtggtccatgtatgcttgtttgattggcttcttctatttcttctcatcgccttttatcaggaagaccatcaaaccaaactattcgaacttcaatcgatggtatattgcatggatattcttggcagcactataccatctgcccagttttcagtcaatgggcttggatttgcggatgaatctttccctcttcctcaccatttatatttcttctctaattttcttgatggtcttccatatcatatttcttggcctttggtatttgggttttgtttctcgtatggcagagaaaaaaccagagatgcttactataatacaaaactgtgcagttataagcatagcttgctgtgtgttttacagccactgtggtaacaggactgtttcaagagacaaatctattgatcgtagaactgctagctggattgtattctcactttggacaaagcatgatgacaacacactgatttcaaggctattgcgtatgcataaatttaaagaacagatttgctcctcctggtttgctccagttggttctgctagtgattaccctcttctctctaaatgggccatttatggagaattgtcttcaaatggatcaggttcctccaatgaaatttcaccagtctactctttgtgggctacattcatgggtctttacattgccaattatgtcatagagcgttcaacgggatgggttttaactcatcctttgacaatttcggagtatgagaaattgaagaaacagttgaaaccagattttgaggacatggttccctggtactctgggacatcaactgatttatttaaaactgtctttgacctcatgatatctgtgactctgtttgttggtcgatttgacatgcgtatgatgcaggctgctatgaataaaactcctgatgaagctaacagccatgaccttttgtatgatcatcttgatggaaaagatgagctttggtttgacttcattgcagatactggtgatggtggcaactctacatatgctgtagcacgattacttgctcaacccttgttagttataaactctgatgactcgaggctaacatttcctcgtgggcaactgcttctcgttggtggtgaccttgcgtatcccaatccatcctcattttcgtatgaacgacgttttttctgtccttttgagtacgctctccagcctcctgcttggtataagcctgaacatatagcactggagaagcctgaacttccccttggggtttctgagcttaggcggtacagaggaccacagtgtttcatgatacccggaaaccatgattggttcgatggattaaacacattcataaggtatatctgtcataagagttgggtgggtgggtggttcctacctcagaagaagagttattttgcattgaagcttcccaatggatggtgggtttttggtcttgaccaagctcttcatggtgacattgatgtttaccagttcaagttttttgctgagttgtgtcaacagaaggtcggagaaagtgattccgtaattattataactcatgaaccaaactggctccttgattggtattggggtgatagcactggcacaaatgttgcatatttgatacgggagtaccttaggggaagatgcaaactgcggatggctggggacctgcaccattatatgcgacattcttgcattgagtcaaaagaaccagttcatgtacaacacttactcgtaaatggctgtggtggggcctttttgcatccaacacatgtcttcgaaaacttcagggtattttatgggaacaagtatgaaacaaaatctacatatccttcttaccacgattctagcaagattgcacttggtaatattttgaagttccgaaggaaaaattggcaatttgatgtaattggtggttttgtgtactttgtcttggttttctcaatgtttccacagtgtgactcatttcacatcttacatgaagactcctgggctggtcgtatcaatggtttcttcactgcaatgtggaatgctgtttttgagattctagagagatcttatgtgtccctaggtggtgttgttactctattgatggtatcgtttttctttgtacccacgaaactgtcccgtaggagacgtgttttgcttggttttcttcatgccgctgctcatcttacttcggcagtgctactgatgctacttatggaattagctattgaaatctgcattcggaaccatctattagcaacatcaggttaccataccctttatgaatggtaccgaaaagtggaaagcgaacattttcctgatcccacaggacttcgcgctcgtctcgagcattggacctttggactttaccctgcatgtattaagtacctcatgtctgcattcgacatcccagaggttatggcagtaactagaagtacaatctgcaaaaaaggaatagagtcccttcccaggggaggtgccatcatctattatgtctgtgttttcctgtacttctgggtcttgtcaacacctgtcgtatcgctggtgtttgggagctacttatatttatgcataaactggttccatatccatttcgatgaggccttctcctcgctgcgcatagcaaactataaggcattcacacggctccacatcaagaaaaacggagaccttgaggtcttcaccctggctgtggacaaggtgccaaaggattggatgctggatccagactgggacatggaacccaagcagccattccagatgagctacaccaggaaattcccaagcaaatggagggctgcgtcgggccttgacccaatcaatgctgtgcgcattgttgaccggtttgtcatcccgcgaacgccctcaagtcctacaacaccaggaggctctgtttcaagtcctacaacaccaggaggctccgtttcaagtcctacaacaccaggaggctttatgagatgatgttcatgctgctgtgaaatataatgtaatgtacacaaggatatcttcgacttctcgggagaaattgtacagtacacaaggtcctctaacataccacgggagaaatagttgggaaaaaaaatagagggcaaatctccacaagatccaaatgttgtacatctggtgttatatcagttgtcctgatcaggtgtaatgataagtttttcaaa

SEQ ID NO: 104064 - DNA, 2601 bp, Zea Mays
agatgattatctttgcttttccttgtaagtttattcttacatttgtctggttcagttgtcttcaaatggatcaggttcctccaatgaaatttcaccagtctactctttgtgggctacattcatgggtctttacattgccaattatgtcatagagcgttcaacgggatgggttttaactcatcctttgacaatttcggagtatgagaaattgaagaaacagttgaaaccagattttgaggacatggttccctggtactctgggacatcaactgatttatttaaaactgtctttgacctcatgatatctgtgactctgtttgttggtcgatttgacatgcgtatgatgcaggctgctatgaataaaactcctgatgaagctaacagccatgaccttttgtatgatcatcttgatggaaaagatgagctttggtttgacttcattgcagatactggtgatggtggcaactctacatatgctgtagcacgattacttgctcaacccttgttagttataaactctgatgactcgaggctaacatttcctcgtgggcaactgcttctcgttggtggtgaccttgcgtatcccaatccatcctcattttcgtatgaacgacgttttttctgtccttttgagtacgctctccagcctcctgcttggtataagcctgaacatatagcactggagaagcctgaacttccccttggggtttctgagcttaggcggtacagaggaccacagtgtttcatgatacccggaaaccatgattggttcgatggattaaacacattcataaggtatatctgtcataagagttgggtgggtgggtggttcctacctcagaagaagagttattttgcattgaagcttcccaatggatggtgggtttttggtcttgaccaagctcttcatggtgacattgatgtttaccagttcaagttttttgctgagttgtgtcaacagaaggtcggagaaagtgattccgtaattattataactcatgaaccaaactggctccttgattggtattggggtgatagcactggcacaaatgttgcatatttgatacgggagtaccttaggggaagatgcaaactgcggatggctggggacctgcaccattatatgcgacattcttgcattgagtcaaaagaaccagttcatgtacaacacttactcgtaaatggctgtggtggggcctttttgcatccaacacatgtcttcgaaaacttcagggtattttatgggaacaagtatgaaacaaaatctacatatccttcttaccacgattctagcaagattgcacttggtaatattttgaagttccgaaggaaaaattggcaatttgatgtaattggtggttttgtgtactttgtcttggttttctcaatgtttccacagtgtgactcatttcacatcttacatgaagactcctgggctggtcgtatcaatggtttcttcactgcaatgtggaatgctgtttttgagattctagagagatcttatgtgtccctaggtggtgttgttactctattgatggtatcgtttttctttgtacccacgaaactgtcccgtaggagacgtgttttgcttggttttcttcatgccgctgctcatcttacttcggcagtgctactgatgctacttatggaattagctattgaaatctgcattcggaaccatctattagcaacatcaggttaccataccctttatgaatggtaccgaaaagtggaaagcgaacattttcctgatcccacaggacttcgcgctcgtctcgagcattggacctttggactttaccctgcatgtattaagtacctcatgtctgcattcgacatcccagaggttatggcagtaactagaagtacaatctgcaaaaaaggaatagagtcccttcccaggggaggtgccatcatctattatgtctgtgttttcctgtacttctgggtcttgtcaacacctgtcgtatcgctggtgtttgggagctacttatatttatgcataaactggttccatatccatttcgatgaggccttctcctcgctgcgcatagcaaactataaggcattcacacggctccacatcaagaaaaacggagaccttgaggtcttcaccctggctgtggacaaggtgccaaaggattggatgctggatccagactgggacatggaacccaagcagccattccagatgagctacaccaggaaattcccaagcaaatggagggctgcgtcgggccttgacccaatcaatgctgtgcgcattgttgaccggtttgtcatcccgcgaacgccctcaagtcctacaacaccaggaggctctgtttcaagtcctacaacaccaggaggctccgtttcaagtcctacaacaccaggaggctttatgagatgatgttcatgctgctgtgaaatataatgtaatgtacacaaggatatcttcgacttctcgggagaaattgtacagtacacaaggtcctctaacataccacgggagaaatagttgggaaaaaaaatagagggcaaatctccacaagatccaaatgttgtacatctggtgttatatcagttgtcctgatcaggtgtaatgataagtttttcaaa

SEQ ID NO: 104065 - DNA, 104 bp, Zea Mays
ctacttttgtcagcactactgacgttgggaaggtagggtcgatcaaggtgcagcagcacttaacttgtccgtcccctctccaatcacagttaggctgtccgcac

SEQ ID NO: 104066 - DNA, 1333 bp, Zea Mays
ctaccacagggctgggccaaccagtcccgatcgatcagccagcatggcgtcctccttcaaacggtcgctgccatgcgtgctcctcctcctcctcctcctcctcctcgctgtcttccaccacggctgctcgtcggcgagggcccacagacgcgccggcgacatggaggggagcatgagcaccgacgacagctcgatgatagagcggttccagcggtggaaggcggcgtacaacaagtcctacgccacggtcgccgaggagcggcggcggttccgggtgtacgcgcgcaacatggcgtacatcgaggccaccaacgccgaggccgaggcggcggggctacgtacgagctcggcgagacggcctacaccgacctcaccaaccaggagttcatggccatgtacacggcgcccgcgccggcgcagctgcccgcggacgagtcggtgatcaccacacgcgcggggccggttgacgccgtcgggggcgcgccgagccagctgccggtgtacgtgaacctgtccgcctccgcgccggcgagcgtggactggcgagccagcggcgccgtgacgccggtgaagaaccaaggccgatgtgggtcgtgctgggccttctcgacggtggcggtggtcgaaggcatctaccagatccggacggggaagctggtgtccctgtcggagcaggagctggtggactgcgacacgctggacgacggctgcgacggcggcatcagctaccgcgcgctgcggtggatcgcctccaacggcggcatcaccacggaggccgactacccgtacacgggcaccacggacgcctgcaacagggccaagctctcccacaacgcggtcagcatcgccgggctccggcgcgtggccacccggcgaggcgtcgctggccaacgccgtggcggggcagcccgtgtccgtgtccatcgaggccggcggcgacaacttccagcactacaagaagggagtgtacaacgggccctgcgggaccaacctcaaccacggcgtcaccgtcgtcggctacggccaggaggcggccggcggcgacaggtactggatcgtcaagaactcgtgggggcaggggtggggcgacggcggatacatcaggatgaagaaagacgtcgccggcaagccggaggggctctgcggcatcgccatccgcccgtcctatccactaatgtgacatggtggtgtgcatctgttttcgttttaattatcattttattttattaattaaacaataaataagtagtcaacatatggatcgactcaaacttttgcagttacgtgtaccagtacacttgttgtaaataataatccatggcatctcgcgtgt

SEQ ID NO: 104067 - DNA, 148 bp, Zea Mays
tttgagttcatgtgacttattttagaaacttgaactcacaaactttctcttatttggtctctgtatggtggaattatgttattttataatctctatttgttcagtcagtcgttgtgaactctcttctaatcgctcacttcattggccg

SEQ ID NO: 104068 - DNA, 669 bp, Zea Mays
cccggcctgtctaataccgacagtgtccctttggccctgtctcgcgtctatatatgacaacccgtcggctctaaaactaagccatcacaccaaagatcatccatggctagttctctacttcagcagctgctgtctctctgctgctgctcctgctgccctctcctcttcgtctccgggagcatctatcaggaaacaatgctgtcagcgccaacaacttccaccccatctttctggtagctgggatgagctgcagcgacctggaggcacgtctcaccgaggagtaccggccgtcggtgccgcattgcggcgccatgaagggcaagcggtggttcggtctgtggaagaacagttcggagctgctgtctcgtgactacatgcagtgcttcgaggagcagatgagcctcgtctacgaccctgacatcaacgagtaccggaacctcgccggcgtcgagacacgagtgcccaacttcggctccacaagagccttcagctacaagaaccctctcaagtcgtgagtcgtcgtcctcctcagagatcaatgtgtgtgtgtgatctccatgtttgacaaactaactgcttgttctctttccgttgtgcacagagactggtgcctcggaaagctgagagccgcactggaagacatgggataccgagacggagacaccatgt

SEQ ID NO: 104069 - DNA, 1274 bp, Zea Mays
ccataagcgtagacctaccacagggctgggccaaccagtcccgatcgatcagccagcatggcgtcctcctccaaacggtcgctgccatgcgtgctcctcctcctcctcgctgtcttccaccacggctgctcgtcggcgagggcccacagacgcgccggcgacatggaggggagcatgagcaccgacgacagctcgatgatagagcggttccagcggtggaaggcggcgtacaacaagtcctacgccacggtcgccgaggagcggcggcggttccgggtgtacgcgcgcaacatggcgtacatcgaggccaccaacgccgaggccgaggcggcggggctcacgtacgagctcggcgagacggcctacaccgacctcaccaaccaggagttcatggccatgtacacggcgcccgcgccggcgcagctgcccgcggacgagtcggtgatcaccacgcgcgcggggccggttgacgccgtcgggggcgcgccgggccagctgccggtgtacgtgaacctgtccacctccgcgccggcgagcgtggactggcgagccagcggcgccgtgacgccggcgaagaaccaaggccgatgtggtacgcacaatccgtaactgacaccatcatcattctgtccttcctggcacctgtcatttgccaccagttgttgctcttgcctgtcccacatgcatgcatgcttgtcactgcgcaaaacacacatgcttttgtcctggatggacgggttcacccggagcgaggcgtcgctggccaacgccgtggccacccggagcgaggcgtcgctggccaacgccgtggcggggcagcccgtggccgtgtccatcgaggccggcggcgacaacttccagcactacaagaagggagtgtacaacgggccctgcgggaccaacctcaaccacggcgtcaccgtcgtcggctacggccaggaggcggccggcggcgacaggtactgaatcgtcaagaactcgtgggggcaggggtggggcgacggcggatacatcaggatgaagaaagacgtcgccggcaagccggaggggctctgcggcatcgccatccgcccgtcctatccactaatgtgacatggtggtgtgcatctgttttcgttttaattattattttattttattaattaaacaataaataagtagtcaacatatggatcgactcaaacttttgcagttacgtgtaccagtacacttgttgtatccatggcatctcgcgtgtaaactttattctggtgcaaaaacgacttctgcaaatg

SEQ ID NO: 104070 - DNA, 613 bp, Zea Mays
tcctgtagctccatcgcgcgagtggccgcctctgcccatggctcctcaccgtctcctcctcctcctccgcccgcgtgctgctcctccacctccacgcctccgcctccgcgtcctcgctcgaggtcgtcgcgctgcccctacccacgcgctgcggcggcgccacgttcgcgcacgcgcgcgccgtggcgatggggcggcacgtgtacctggtcgaatatggcagctgtggctccggcggcttgcaagggaaaacgaaagcggcacctctccgaggacgacgtctggctcctcctccacaggtaccatccagggacgatcctgacagcgctgcaaaaggtggcgcggcacgcggatggccggcgcatcgactggagggcggtggtggcgaactcgaccatggggatcacctccgtccgcaagtaccagatgctctagcgccacttcgcctatcatcacgacatagacgagagcgtcgatgccgatgaccagcctctggacgatgacagtgacctagaactggagcttgaacccgatcccaacttgaccaaggaaactttatgtgaggcctctgcattagccaaggtatcacttgtttggaaagcatatgtgagag

SEQ ID NO: 104071 - DNA, 1882 bp, Zea Mays
cgcatcgcacgtcccaggggcgtcgggcttgggtgccacctccgacggacgccgacgcttttgcagctactcattgctactacacaggacagtactggggcgtataggaggatagggatgaactgcgtggcgtgatgaactgctcgtgctccagaagaagacgtgcctcgcgtgcccctggaatagccgtgaacagtgacgtttccaagtgcattccatctgcccaactcgcagcaagccgccgccaggtcgtcaagaagctgctggtcgtcggggtcccagaatgctccataattccaattgagggtgccagatcgagtgagaagttgcgcgtgtgaagccatcacaccaattaaagatcgagatcatccatggctagttctctacttcagcagctgctgtctctgctgctgctcctgctgccctctcctcttcgtctccgggagcatctatcaggaaaccatgctgtcagcgccaacaacttccaccccatctttctggtagctggggtgagctgcagcgacctggaggcacgcctcaccgaggagtaccggccgtcggtgccgcactgcggcgccatgaaggggaaggggtggttcggtctgtggaagaacagttcggagctgctgtctcgtgactacgtgcagtgcttcgaggagcagatgagcctcgtctacgaccctgccatcaacgagtaccggaacctcgccggcgtcgagacgcgagtgcccaacttcggctccacaagagccttcagccacaagaaccccctcaagtcagactggtgcctcggaaagctgagagccgcactggaagacatgggataccgagacggagacaccatgttcggagccccctacgacttccgctacgcgccgccgtcccccggccagacgtccgaggtgtactcccgctacttcaaggagctgatggagctggtcgaggccgcgagcgagaggacccggaagaaggccgtcatcctcggccacagcttcggcggcatggtcgcgctcgagttcgtccggaacactccgccggcgtggcggcgcgagcacatcgagcgcctcgtcctggtcgcgccgacgctccccggcgggttcctggagccggtgcgcaacttcgcgtccgggacggacatcctctacgtgccagcgacgacgccgctggccacgcgagccatgtggaggagcttcgagagcgccatcgtgaacttcccgtcgccggccgtgttcgggcgcctgcaggcgccgctcgtggtcaccagggagcggaactactccgcgtccgcgcacgacatggagcgcttcctcgccgccgtcggctccggcgaggccgcggagcccttcaggagacgggccgtccccaagatgggcagcttcgcggcgccgatggtgcccatgacgtacatcagcggggtcggcaacaggacgccgctgcggctggtgttctggggcgaagacttcgacgcggccccggaggtggcggcgtacggggacggagatggcaagatcaatttgatcagcgtcttggcgtttgagaaggagatgcgtcggcagccggagcagaagaagcagttcaaatccatcaagatcaataaggcccagcattctacgatcgtcacggatgattttgccctgcacagggtcattcaagaaattgttgaggccaataatcagaagattccatcctaaattattcatgtcatgtatgcattaccgagctgtgggggccaatagtgggttgggaagtgatggtttagacatcggtcgtggtgtggtcgcaattcaatcgattagttatttgttaacgtcaattgcttgcctcatgaacttgctgtgataaggaaagaccacaattattttccgcttgtcgtgtgcgttgt

SEQ ID NO: 104072 - DNA, 1765 bp, Zea Mays
ctgcgtggcgtgatgaactgctcgtgctccagaagaagacgtgcctcgcgtgcccctggaatagccgtgaacagtgacgtttccaagtgcattccatctgcccaactcgcagcaagccgccgccaggtcgtcaagaagctgctggtcgtcggggtcccagaatgctccataattccaattgagggtgccagagaagatcgagtgagaagttgcgcgtgtgaagccatcacaccaattaaagatcgagatcatccatggctagttctctacttcagcagctgctgtctctgctgctgctcctgctgccctctcctcttcgtctccgggagcatctatcaggaaaccatgctgtcagcgccaacaacttccaccccatctttctggtagctggggtgagctgcagcgacctggaggcacgcctcaccgaggagtaccggccgtcggtgccgcactgcggcgccatgaaggggaaggggtggttcggtctgtggaagaacagttcggagctgctgtctcgtgactacgtgcagtgcttcgaggagcagatgagcctcgtctacgaccctgccatcaacgagtaccggaacctcgccggcgtcgagacgcgagtgcccaacttcggctccacaagagccttcagccacaagaaccccctcaagtcagactggtgcctcggaaagctgagagccgcactggaagacatgggataccgagacggagacaccatgttcggagccccctacgacttccgctacgcgccgccgtcccccggccagacgtccgaggtgtactcccgctacttcaaggagctgatggagctggtcgaggccgcgagcgagaggacccggaagaaggccgtcatcctcggccacagcttcggcggcatggtcgcgctcgagttcgtccggaacactccgccggcgtggcggcgcgagcacatcgagcgcctcgtcctggtcgcgccgacgctccccggcgggttcctggagccggtgcgcaacttcgcgtccgggacggacatcctctacgtgccagcgacgacgccgctggccacgcgagccatgtggaggagcttcgagagcgccatcgtgaacttcccgtcgccggccgtgttcgggcgcctgcaggcgccgctcgtggtcaccagggagcggaactactccgcgtccgcgcacgacatggagcgcttcctcgccgccgtcggctccggcgaggccgcggagcccttcaggagacgggccgtccccaagatgggcagcttcgcggcgccgatggtgcccatgacgtacatcagcggggtcggcaacaggacgccgctgcggctggtgttctggggcgaagacttcgacgcggccccggaggtggcggcgtacggggacggagatggcaagatcaatttgatcagcgtcttggcgtttgagaaggagatgcgtcggcagccggagcagaagaagcagttcaaatccatcaagatcaataaggcccagcattctacgatcgtcacggatgattttgccctgcacagggtcattcaagaaattgttgaggccaataatcagaagattccatcctaaattattcatgtcatgtatgcattaccgagctgtgggggccaatagtgggttgggaagtgatggtttagacatcggtcgtggtgtggtcgcaattcaatcgattagttatttgttaacgtcaattgcttgcctcatgaacttgctgtgataaggaaagaccacaattattttccgcttgtcgtgtgcgttgt

SEQ ID NO: 104073 - DNA, 1860 bp, Zea Mays
cgcgtgcccctggaatagccgtgaacagtgacgtttccaagtgcattccatctgcccaactcgcagcaagccgccgccaggtcgtcaagaagctgctggtcgtcggggtcccagaatgctccataattccaattgagggtgccagtgtccctttggccctgtctcgcgtctatatatgacaacccggcggctctaaaactaatcgatgagatttatcttgggatcggctagagaagatcgagtgagaagttgcgcgtgtgaagccatcacaccaattaaagatcgagatcatccatggctagttctctacttcagcagctgctgtctctgctgctgctcctgctgccctctcctcttcgtctccgggagcatctatcaggaaaccatgctgtcagcgccaacaacttccaccccatctttctggtagctggggtgagctgcagcgacctggaggcacgcctcaccgaggagtaccggccgtcggtgccgcactgcggcgccatgaaggggaaggggtggttcggtctgtggaagaacagttcggagctgctgtctcgtgactacgtgcagtgcttcgaggagcagatgagcctcgtctacgaccctgccatcaacgagtaccggaacctcgccggcgtcgagacgcgagtgcccaacttcggctccacaagagccttcagccacaagaaccccctcaagtcagactggtgcctcggaaagctgagagccgcactggaagacatgggataccgagacggagacaccatgttcggagccccctacgacttccgctacgcgccgccgtcccccggccagacgtccgaggtgtactcccgctacttcaaggagctgatggagctggtcgaggccgcgagcgagaggacccggaagaaggccgtcatcctcggccacagcttcggcggcatggtcgcgctcgagttcgtccggaacactccgccggcgtggcggcgcgagcacatcgagcgcctcgtcctggtcgcgccgacgctccccggcgggttcctggagccggtgcgcaacttcgcgtccgggacggacatcctctacgtgccagcgacgacgccgctggccacgcgagccatgtggaggagcttcgagagcgccatcgtgaacttcccgtcgccggccgtgttcgggcgcctgcaggcgccgctcgtggtcaccagggagcggaactactccgcgtccgcgcacgacatggagcgcttcctcgccgccgtcggctccggcgaggccgcggagcccttcaggagacgggccgtccccaagatgggcagcttcgcggcgccgatggtgcccatgacgtacatcagcggggtcggcaacaggacgccgctgcggctggtgttctggggcgaagacttcgacgcggccccggaggtggcggcgtacggggacggagatggcaagatcaatttgatcagcgtcttggcgtttgagaaggagatgcgtcggcagccggagcagaagaagcagttcaaatccatcaagatcaataaggcccagcattctacgatcgtcacggatgattttgccctgcacagggtcattcaagaaattgttgaggccaataatcagaagattccatcctaaattattcatgtcatgtatgcattaccgagctgtgggggccaatagtgggttgggaagtgatggtttagacatcggtcgtggtgtggtcgcaattcaatcgattagttatttgttaacgtcaattgcttgcctcatgaacttgctgtgataaggaaagaccacaattattttccgcttgtcgtgtgcgttgtaccgtataatgttaataaaaacaagagtaaaatatagtagcagtcatcaaactta

SEQ ID NO: 104074 - DNA, 1656 bp, Zea Mays
aatcgatgagatttatcttgggatcggctagagaagatcgagtgagaagttgcgcgtgtgaagccatcacaccaattaaagatcgagatcatccatggctagttctctacttcagcagctgctgtctctgctgctgctcctgctgccctctcctcttcgtctccgggagcatctatcaggaaaccatgctgtcagcgccaacaacttccaccccatctttctggtagctggggtgagctgcagcgacctggaggcacgcctcaccgaggagtaccggccgtcggtgccgcactgcggcgccatgaaggggaaggggtggttcggtctgtggaagaacagttcggagctgctgtctcgtgactacgtgcagtgcttcgaggagcagatgagcctcgtctacgaccctgccatcaacgagtaccggaacctcgccggcgtcgagacgcgagtgcccaacttcggctccacaagagccttcagccacaagaaccccctcaaagactggtgcctcggaaagctgagagccgcactggaagacatgggataccgagacggagacaccatgttcggagccccctacgacttccgctacgcgccgccgtcccccggccagacgtccgaggtgtactcccgctacttcaaggagctgatggagctggtcgaggccgcgagcgagaggacccggaagaaggccgtcatcctcggccacagcttcggcggcatggtcgcgctcgagttcgtccggaacactccgccggcgtggcggcgcgagcacatcgagcgcctcgtcctggtcgcgccgacgctccccggcgggttcctggagccggtgcgcaacttcgcgtccgggacggacatcctctacgtgccagcgacgacgccgctggccacgcgagccatgtggaggagcttcgagagcgccatcgtgaacttcccgtcgccggccgtgttcgggcgcctgcaggcgccgctcgtggtcaccagggagcggaactactccgcgtccgcgcacgacatggagcgcttcctcgccgccgtcggctccggcgaggccgcggagcccttcaggagacgggccgtccccaagatgggcagcttcgcggcgccgatggtgcccatgacgtacatcagcggggtcggcaacaggacgccgctgcggctggtgttctggggcgaagacttcgacgcggccccggaggtggcggcgtacggggacggagatggcaagatcaatttgatcagcgtcttggcgtttgagaaggagatgcgtcggcagccggagcagaagaagcagttcaaatccatcaagatcaataaggcccagcattctacgatcgtcacggatgattttgccctgcacagggtcattcaagaaattgttgaggccaataatcagaagattccatcctaaattattcatgtcatgtatgcattaccgagctgtgggggccaatagtgggttgggaagtgatggtttagacatcggtcgtggtgtggtcgcaattcaatcgattagttatttgttaacgtcaattgcttgcctcatgaacttgctgtgataaggaaagaccacaattattttccgcttgtcgtgtgcgttgtaccgtataatgttaataaaaacaagagtaaaatatagtagcagtcatcaaactt

SEQ ID NO: 104075 - DNA, 1568 bp, Zea Mays
ggctagttctctacttcagcagctgctgtctctgctgctgctcctgctgccctctcctcttcgtctccgggagcatctatcaggaaaccatgctgtcagcgccaacaacttccaccccatctttctggggtggttcggtctgtggaagaacagttcggagctgctgtctcgtgactacgtgcagtgcttcgaggagcagatgagcctcgtctacgaccctgccatcaacgagtaccggaacctcgccggcgtcgagacgcgagtgcccaacttcggctccacaagagccttcagccacaagaaccccctcaagtcgtgagtcgtcgtcctcctcagagatcaatgtgtgtgtgtcggtgatctccatgtttgacaaactaactgcttgttctctttccgttgtccacagagactggtgcctcggaaagctgagagccgcactggaagacatgggataccgagacggagacaccatgttcggagccccctacgacttccgctacgcgccgccgtcccccggccagacgtccgaggtgtactcccgctacttcaaggagctgatggagctggtcgaggccgcgagcgagaggacccggaagaaggccgtcatcctcggccacagcttcggcggcatggtcgcgctcgagttcgtccggaacactccgccggcgtggcggcgcgagcacatcgagcgcctcgtcctggtcgcgccgacgctccccggcgggttcctggagccggtgcgcaacttcgcgtccgggacggacatcctctacgtgccagcgacgacgccgctggccacgcgagccatgtggaggagcttcgagagcgccatcgtgaacttcccgtcgccggccgtgttcgggcgcctgcaggcgccgctcgtggtcaccagggagcggaactactccgcgtccgcgcacgacatggagcgcttcctcgccgccgtcggctccggcgaggccgcggagcccttcaggagacgggccgtccccaagatgggcagcttcgcggcgccgatggtgcccatgacgtacatcagcggggtcggcaacaggacgccgctgcggctggtgttctggggcgaagacttcgacgcggccccggaggtggcggcgtacggggacggagatggcaagatcaatttgatcagcgtcttggcgtttgagaaggagatgcgtcggcagccggagcagaagaagcagttcaaatccatcaagatcaataaggcccagcattctacgatcgtcacggatgattttgccctgcacagggtcattcaagaaattgttgaggccaataatcagaagattccatcctaaattattcatgtcatgtatgcattaccgagctgtgggggccaatagtgggttgggaagtgatggtttagacatcggtcgtggtgtggtcgcaattcaatcgattagttatttgttaacgtcaattgcttgcctcatgaacttgctgtgataaggaaagaccacaattattttccgcttgtcgtgtgcgttgtaccgtataatgttaataaaaacaagagtaaaatatagtagcagtcatcaaactta

SEQ ID NO: 104076 - DNA, 5453 bp, Zea Mays
atggtctatatggtttgaagcaagcacgtagagcagagcatgataagagacaagagatagagaggatttggctaatagcagcctgcatactagcctccgattcatgaatcattttacaaatgactgactgctttcatgatccaacatggtcacgtgttcatgtacaaataaatcgcaatgcaatcagatcgagcagaacgagaatgtacagcccctgcagcaaactgttacaaggaatattcacgagaaccgacattgcaaccacctgcgcatcaccagtgacttttatgacttgactacaagacagattgctcttgacgatgttgaacttgcacaatgggcatgtagcatttatgtgaagccacttgtctatacagctgcagtgaaaatggtggttgcaagggagctcacgcagttccacgccatcttcgtacgggcataggcagatacagcactcctgcgttaaaaatgagatgatcaaattgagtctggtagagtagcactctgactagtaataagagtgtaaaaatgcagggtaactcaagtgtatgtgactacagtactccgtattgactcaagtagcaaaaaacaggagctcaacataataactcttccccagaagataacaaaggtttaagccagcccaaaacattcagaattgaacatcacctccataaggactggtacctacacaaaaggtgaatggcacagtccaagatgcagtaattccaagttgccaactgaccagttgaatgctcacacatgagcaaatcggaaacattgatcttgcagacactgagaacactactgagcctatcattgattgagttcagctgcttgtcacatgtctacaagatttatgacaccgaacttgattgcttaaagaaaagcatgggttttgcccattgtgtacaattttggcatatttgttccgaaaaaatcatatagtagaggttgcatgccagcgagctggcacgagaatattacaattttattaattatttccatatcaccatattctatcatataaattgaccgttgccgtggaattcaaatgagactccctactctagaagtatgttgcaaacgtgcctggaaaaataaagcagtgtggttttggatctactgccatttttcttcatttgtacatactagtgataatggacattatattatatcctaaactaaatcatcactgtcaaaatttggaaagatctcactgttttgaaaggtcatagaaaggtaaaacgtttttataggaaaaggaatgatgaaagagaaatcactcaattacttccaaatatgcaatcttacatctgaaatcatatgcaggttactttttacttaatccaaaattggtaaaaatatcagaggtggtgtaagctcatttctcatagatgtagtttcccctttaaacttaaagttgaattttaaatctaaaagtaaaccatttggaatcaatgtatcaactttgtttaccattaatttggattcaagttgcagatatggaacttttcagacaagacagaacggatcgagttcagaacttctcagatatgcggaaacgtgtatgttgagttagatttgtggccatataagaaaggataagagaccaggatgatgctatacatgataagctagggataacaccaattgaaaaaaaaacttgttcaacatcgttaagatggcttagaaatgtccaacggagacctccaaaggcaccagtgcatagtgggatcataaggcacgatagcaataggaagagagacatgggaaggccgaaagttgacatagggcaaggtagtaaaaggagatttgagaggataaaatatatccaaagttttagctttgaatagtgttgaagtgtataaatgaattgcctatcttcttccaacatcttaaacttctgggttgaactggttaatgtgtccgctcttacatggtatcagagccataagtcttaagtttaaatcctggcagaggcttcatttgtgcctccaccccatttgcgcctttctctctggctgcacgtgagtgggggcgttgaagtatataagtggattgccctcttctaacaagttaagattttaaggcgaactggttagtgcgtccattctaacaaataggagtgcacaaaaaacagttatccatgttacttgtgatttctgttggatttcaactctagcatcccctaacttgttgagagttgttgtattttctctaaactctaaatcttaagtgacaaaaggcattcaacctgtagattcaaattttaaaagaaaaggtaaatggattagtcatttccaaaaactaaatcagatgtttatccacaaagctccctagtttcaaagttaaatggattagtcattctgaaaactacatcagatgtttatccataaagctccctagtttcaaaggtgcatacaacaaatccaaagagaaaaggatggtgagatgctgaaacccttctacactcacagaagtccaagatatatatttcaacagacaggagagcatttatatacagacacctagaatcacaacttcagaaccatgggaaggaaatagaactgcctatggctacaagaaggcattgacatgacaagaggcagagtttgagtaaatctgaggcgaagttagagtaaatctgaggggaggggggtgtgcttgccttgtgggtgcaaatttagtctatatcgctgtcttattatttttgtgtgggtgtggccaatgaaaaaatgaacaaattattgttgtgacatggatatcaaaattcatccccacgctgcagccatgtttgcctgttcagtggtctccttggtggggatggatctcaaacctgcttctggactgatcattggcttcatgacaggcgttgtctggtatggcgcctgccctcatttctcgagtgccaaaaaaaaatcttaataccagaactgtgagagatccgctggttcagaatggttgggtgaatgatattactggatgtctggaacttagtgcaaggctttcagctacaaccaggagtcccagaccagcatcgttggacccactctgcttctagtcaatattcatcaagatctgcatatggccgcttcttcagtgggaatgtcctgtttgaaccagcacaaaggatttggaagacctgggcacctccaagatgcaaatccttcatttggctagcttctctaaatcgctgttggacagcagaccgtttggcccgccgagcagtgtttacaagtcgtccgactaatcgcgattagtcgggctggtcgcctggaagagggcgattaggaggacgacgcgattagggtttctagtcgtcctagtcgtccgactagtcgtcgacctgggcgattagtcgtctggtcgaacacttcctggtcgtttttggtcgttgcagttttggtactgggcttcactctggtttttggcccatctacagtagcccgcccctccaaaaaccctcccagccaccaggacccctcccggccgccagaaacccgccggaacccttcccagccgctagaaaccctactcctctcctctgtcctctctggtttctgccgacgtctctgctccagcctccaagtgctccagccagcaggtaatgcagtttggatgctctagcgcgattttgtttggatgctgatctgctctaggtagcagccagcaggttcctactgtactttttactgaattactgcaagtaattatgccaatattactttcagtttggactttggatggattctgttttacacttttactgaattactgctagtctgctactaattatgcctatattattgcagaaatacaatgtttatatagttaatatatagttatatacatatacatatgtccttaaatctataggacgactaacggacgaccagaggtcgaccaggaccgattaggtcgactaatcgtcgccctaatcgcgattagtcgcctggtcgcccctctcactcgaccagctggtcgcccgacttgtaaacattgccgccgaggtatggaccatcctgaaaagtgcctcctttgcgatcaagaagcggaaacaattcaccacatcttattacaatgtgtttttgctagagaagtttgacatcacatcctttctcttattgggctgcagcacctcaccctgaggaatgatgaaattcagttccaagattggtggaataattcagagatagcagtccctaagccccaaagaagagtttcaattcagttgtgaacttagtggcttggtggctttggaaacaccggaacacctgtgtttttgaaaaggctcctccacacatcaccaaggttattcaggacataaaggaggatgctagactttggtgttcagcaggggctgcaggccttagaggcatgtggccatagttcctagtgggaaggagaaggtcatgtaattgcctgttggtttttctttcttgaccgcctatttcttggcggtttgtacgggtctttctgaacattttcttcttcttaatataattattaagttgcatgcaccaaccaattcaactcaaaagcttaagctaataagaggggtgggcaattcacttatattatattccaacactctccctcacatcgagcctctcttgggtctaaggcgtggaataagagcgagcaacaattattttatttaattgcgctaaccaggattcgaaatcgagacctctggctttgataccatattcagttgcatgcaccaaccaattcaacccaaaagcttaagctgataggaggggtgggcaattcacttatattatattccaacaataatgatgtgcagttctcctgcacgttcaagaaaaaaacattctacaaaaacttaagcatactcctctgattgtttcgatattctgtaggccttgggcgaaaatattctaccatgtttgtccatttatggtatgagggtgtaattattgcaatatttctactttatacccctgattcaatgctctaatagtagagaaatggttgctatgtaagtattgtgcaaaagaaggaaacaacttccaaaataaaatctccgccaatgtccatgcaaactaaccgtttgcaaatctagggaatatcctactacaatttcaaatttgtgaaatgcaaactcagtctaggaaatggttaactattctacaaataatagatcttaggtctcaagcaatgtaaaattaacatgatgtaaacagtttgctgcaattaccctaatatcacacaattattcaaatgaaatggtatttctaacgcattcaacgtcaatcataaatatctagagaaggagaatgataacataatgatgtcattgaaaattctcaaaataaacttgaaaatcttactgcatcctcagccgaaagaatatgttcgacaggaggattggtaccgcactctgtcatcactccacccacaggtgctgcaatgccggcagctagctt

SEQ ID NO: 104077 - DNA, 255 bp, Zea Mays
atcgagcagaacgagaatgtacagcccctgcagcaaactgttacaaggaatattcacgagaaccgacattgcaaccacctgcgcatcaccagtgacttttatgacttgactacaagacagattgctcttgacgatgttgaacttgcacaatgggcatgtagcatttatgtgaagccacttgtctatacagctgcagtgaaaatggtggttgcaagggagctcacgcagttccacgccatcttcgtacgggcatag

SEQ ID NO: 104078 - DNA, 560 bp, Zea Mays
ctctgcactccacaccgacacgcgaccggcacggcctttaactacaccttcctaccacacaccacgggctactagctcaccccacacccccagcgcagcagccctgcctagccgcgcgagctagaggcccgaccagaccgaccgacggtcgctcgctcgctcgcaaatccgcaatggcgtccatcatcgtgcaggcggtggtgatcctcctggacgtgatcgccttcggcctgggcgtcgccgccgagcagcgccggagccgggccaccgtcaccccggacgccgccaaggagtacgactactgcgtctacgactccgacatcgccacggggtacggcgtcggcgcgctgctcctcctcgccgccgcgcaggtggtgctcatggtcgccagccgctgcttctgctgcggccgcgggctcaagccggggggctcccgcgcctgcgccctcatcctcttcctcttcacatggtaaacgagcaaatctccagcccctctctctctctctctctctgtctctctctctctccctgttcacagtcatgcatggaaatagccagat

SEQ ID NO: 104079 - DNA, 812 bp, Zea Mays
actagctcaccccacacccccagcgcagcagccctgcctagccgcgcgagctagaggcccgaccagaccgaccgacggtcgctcgctcgctcgcaaatccgcaatggcgtccatcatcgtgcaggcggtggtgatcctcctggacgtgatcgccttcggcctgggcgtcgccgccgagcagcgccggagccgggccaccgtcaccccggacgccgccaaggagtacgactactgcgtctacgactccgacatcgccacggggtacggcgtcggcgcgctgctcctcctcgccgccgcgcaggtggtgctcatggtcgccagccgctgcttctgctgcggccgcgggctcaagccggggggctcccgcgcctgcgccctcatcctcttcctcttcacatgggtggcattcctcatcgcggaggcgtgcctgctggcaggatcagtgcgcaacgcgtaccacacccggtacaggggcatattctacggcgactcgctctcatgtgagacggtgcggaagggcgtgttcgcggctggtgcggccttcaccttcttcacggccatcctgggcgaggtgtactacctcagctactccaagtcccgggacgccgccggtggtgccccctacggcggctccagcattggcatgggcccttacaactaactaaaggccggccccggtcgcttcatgctggaggaatgcagcagtgttctttttgacgttaccttagtagggacacggtgtaattggttattggatccgctgctttttgtttaggttcttgtatgaagttactacttggttgggctgtata

SEQ ID NO: 104080 - DNA, 2267 bp, Zea Mays
agattctccgctccccggccgcaaatcccccactggccagtggccaccaccaccgcctcgattcgccacgtttggttctgctgaggtcgggatttggtgtgccgagctattccttgctcaattggatctcctccgcgcgattcgattcgattcgattcggttcggttcgttccaatcggggttttgctacttccgctgccaccggtgtgctccgagctgctcaagctgcgcgccggatacctggctgctcgatctgattcggtctccaacaccagccccctccgcggccgccgctccccgctgaccccggcgccatttcgacccgcgcggccgatccttggatggttccgatcaatcgggaccaagagacccaaggcttcatcagctcacccggcccccggcggcggtcgatccatggccggggagaaagcgccgcgcgcgttccccatcgaggagcttccaggccacctcatcggggaggtcctgacctcgggcgggctcgcggccgccgacctcgccaggctcgaggccacctgccgcgcgctcaggccgctcgccgaatacgccgcgtccaagctctgcgccgcgcgggcggcgttcgcggctatggggcccgccgcgcgtggggggctgctagagaggtgcgggggaagctggaagaaggtgctcaggttcctgcagtccgtcgagcagtcgtcaggcacggtcgagaccacatcgggcagcatgcaagtagccacaggaagatatcacacacttttggtccatgactcttctgtctattcttgtgggtccagcttgtgtggtgtgctaggtcatggcccagatactacacagtgtgcggcattcagtcgggtttccttcccatcactttcttgtgttataaacatctctgcttcacacaaccatgctgcttttgttttggaatctggggaggttttcacctgtggtgataactcatcattatgctgtggtcatggcgaagtgggaagaactatatttcgaccaatgcaagtagaagcgcttaaagggattccctgcaagcaggttgctactggtctaagttttactgtgattcttactagggatggacaagtatatacttgtggaagtaatacgcatggccaacttggtcatggtgacaccatagacagggccactccaaagcttattgaattgtttgaaggctccactccggtggtgcagattgcagccggtgcaagctacacgtttgctgtaacagatgatggaacagttcattcctttgggtcttgtactaatttctgccttggacatggggatcagcatgatgaacttcttccacgtgcaatccaatcatttaagtggagaaacattcatgtagtccgtgtttctgctggagatgagcatgccgtggctcttgatgcactaggatatgtctggtgcagtggcgagaggtatctcactgagtcaccagtcgtgggtttttcgaagcagtctctccacatttgcgggtttatacatggggcaaaggatactgtggagccttaggccatggtgatgagaatgataaaactagcccagaattgatcagcagcttgaagggccaagttgctgtgcaggtatgtgcaaggaagagaaagacatttgttctcacggacaagggctcagttgttgcatttggatggatgggctttgggagcttagggtttcccgaccgaggaccgttggacaaagtaatgaggccccgcgctcttgagagcctgcaggatcactacgtctcccaaataagcaccggactgtaccacactgttgcagtgacaagtaagggcattgtgttcgggtttggggacaatgagagagcccaacttgggcaggagtacattcgtgggtgcttaaaacctactgagataatgttccaaaagagcatggaagacataccgattgcggcgcctagtggttgacttgaatgccatcattttggacactgttgcctacatgtgttgtatttatatcggaattcttgtcggcaagtgtattttatacttcgtgctttgtgagtaatctgggtgaacgggggaaagacggaagtggttggaattggaggacagtgttgtgtagccaaagaagcatatagtttagtaacgtgtaatgtatcgaataattcaacccaccatttttcttctgtacaaaatttattggtgtgtttgtatttttttctctcttgtccccttcatgttttcttggttctgtgctagcaactgttgagtaaatagcgtttgctcccc

SEQ ID NO: 104081 - DNA, 886 bp, Zea Mays
tccagatccattcaaccaaatcctagtcgtgatgatgcctacatcgaccctcgcctactatccccaagcatgggagattttggcatggatgatcgtgatatagatggtgaacatgagttgtttgaatatgctgtattggttggcaatgtctcaaccccaactgctgatatgagccatgttcatggtcatggggaggtagaagatggacctgctgataacaatgtaccaataacaccaagtggtggaacttctaaagcagagtgttggaagcatatgcagaagaaaaaaaattgttgagaacggtataactcgttatgttgctatgtgtaactattgtaattctgagttgactacagctccaactggtggcactgggcatttgaatcgacactacaaagcctgcttggcaaggctaggacaaactcaaggaggaggtgtgcaaactaaactcaactttgcggccgacggcactgtaacaattgccaaacatatccttgaagtagttcctgattttaatatggaaggaaaaattctctctataactcttgataatgctttagcaaataccactgctattcaaattctcacccctaagcttcaatcattcataaatggttacattatccatcaaaggtgtgtgtgtcacattataaatctagttgttcaggatggtataatagttattaataaatatcttgacaatattcgtgctgctattcgcttcatgacaagcacccctcaaatgatttgtaagtttgctgaatattgcaaggcacaaggtgagaaaccaaagaaatttggtttggacatgaaaataagatggaattcgacatacctaatgcttaagaaattagaaggatatgaagatctcattactgtctttgtg

SEQ ID NO: 104082 - DNA, 1277 bp, Zea Mays
acagaattttttgccccttcggccccacctcgtgatcacccgttccgtgctgctccgcctgccccacagcctacagttgggagttcaaacttcgagagccgaagcgaagcggggccatggggagatcacgagcgactgccgccgccgccacctccaggcccaggcgcaaccccaagccaaagccggactcccccttcctctccccgctcgcgtcgctgtctgccacaccgcgcatccgcacccgcaagggcgccatccgccgcggcggcccctcccacgcgtcgtcgtcgccgggttcttcccccaccggtctcaacgtcagattcctttcctcgccgggctccgcctccccgtcgaagcccaagccgaagctaaggtccagtgccaagcccaagtcgcgcccctccttcgtctccccgctctcgtcgccgtcacccgcaccacgtacccgcaaacgcaccgtccgcggcgtcggctcctcacctgcgtcgtcgtcgccggggtcctctccagccgaactcaacatcagcttgccctcctcgccgggcttctccgcctccccgccgaagcccagtgccagggccaatctcgccgcgcgcgcccccttcgtcgctagcccccgcaccgccacaccttcccccgccgcgtctccccagcctgcttcggtgtcggcgaaggggttatccagcgtcggagacctcaggaccgccgtcgcctcacagatggagaacctcaagcgccgactcgacgcgctccattcccgcgctcacgacgacctcgatgcgtccttctcccgcatctccaagcgaatcaagacccaaaaccaagcctgtcagcatctggcagatgaagttgacaaggagcacaagaagatgtctgataatataaaagaaagttctgagattgccagggcaaagtacaagcagatcatcgcagaggcacaagcttccacaactcgtgtgtgcaaggtgactatccctgagatgacaaaatctgtggagaaagctattgatggtctgtgtacccgatataatatctcaatgccagtttaattaccaagtacaagttctactcactacacttctgaatagccttcacatcaatctgagatggtgtgatcgttatttcgacatccgtagataatcagtagagtacagggacatataaatatcgaataaagttcatgagcattggaaagtatgtaatatcgagagcttatcatcatctgtatgactatcccatttttccgccgacttcaatccgtagcaaagcaggcc

SEQ ID NO: 104083 - DNA, 1361 bp, Zea Mays
caaacttcgagagccgaagcgaagcggggccatggggagatcacgagcgactgccgccgccgccacctccaggcccaggcgcaaccccaagccaaagccggactcccccttcctctccccgctcgcgtcgctgtctgccacaccgcgcatccgcacccgcaagggcgccatccgccgcggcggcccctcccacgcgtcgtcgtcgccgggttcttcccccaccggtctcaacgtcagattcctttcctcgccgggctccgcctccccgtcgaagcccaagccgaagctaaggtccagtgccaagcccaagtcgcgcccctccttcgtctccccgctctcgtcgccgtcacccgcaccacgtacccgcaaacgcaccgtccgcggcgtcggctcctcacctgcgtcgtcgtcgccggggtcctctccagccgaactcaacatcagcttgccctcctcgccgggcttctccgcctccccgccgaagcccagtgccagggccaatctcgccgcgcgcgcccccttcgtcgctagcccccgcaccgccacaccttcccccgccgcgtctccccagcctgcttcggtgtcggcgaaggggttatccagcgtcggagacctcaggaccgccgtcgcctcacagatggagaacctcaagcgccgactcgacgcgctccattcccgcgctcacgacgacctcgatgcgtccttctcccgcatctccaagcgaatcaagagggtaaacaaataaggcctctatcggcggagatagttgatatatgttgggacaagtcgaaattctggaaagaataacaacaagacaacatcattattttcgaaatgctccttccctccgaaggtttcaaaggaagaagacccaaaaccaagcctgtcagcatctggcagatgaagttgacaaggagcacaagaagatgtctgataatataaaagaaagttctgagattgccagggcaaagtacaagcagatcatcgcagaggcacaagcttccacaactcgtgtgtgcaaggtgactatccctgagatgacaaaatctgtggagaaagctattgatggtctgtgtacccgatataatatctcaatgccagtttaattaccaagtacaagttctactcactacacttctgaatagccttcacatcaatctgagatggtgtgatcgttatttcgacatccgtagataatcagtagagtacagggacatataaatatcgaataaagttcatgagcattggaaagtatgtaatatcgagagcttatcatcatctgtatgactatcccatttttccgccgacttcaatccgtagcaaagcaggccatggaatactaaactgctgtttcgtctgag

SEQ ID NO: 104084 - DNA, 2389 bp, Zea Mays
gacagaccccacggcaccgcacctgctcggcacgtcccgctatataaccgcttgaagttcttccgccgccacgtgctcgctgccgtcgccgcgccgcattcgcatcaccgcatcgcgccgccgaggctgcttactagacggacgaggagtggactggagtaacttgcagcaaccctatcccggcaggccccatcgcgaaaccctagacttcgccgccggcggtcgccggagatggcctcctcgccgccgcgcgccccgcagctattccctttcgaccttaacgtcgcgcaggaggaggtagatgaggagccgattgaggttcttgaggaggatgtcgatgaggagggagccccgttggcgcagccccaggaggttgtcgtcgaggaggttgttgagaaattggtcgagcacgcggtgcctatcacggaggatgaacctgcggaagacgtgatcatggaggagccttcggaggaggtgatcatggaggacgaggagcctacgccgtcgccggcggaggaggtggttggggaggggaagaggaggaaaaagagggtggactatgaggtcttcgtgtccgggctgccgcaggacgccgctgaggaggacgtggcgcaggcgctggcggatgccggagatatcgaggaggtgcgcctcgtgcgggatccggcggaccagcggctcaacaagggattcgcttttgtccgcttcgcggctgcatggcaggcccggtgggcggccaacgacctccgcgaggctacgattaagggaaaagcttgtggaatatgcaagaacagtgaaactgaaacccttcatctccgaaatatatgctttgattggtcaaaggatgatttagctgaaaaactgaaacccttcaagttggaaaacttggatagaattaatctaattgagcacccagacagaaagggtaaaaacagaggctatgcgtttcttgacttcaggactcatgtagatgctgtggaggcttttgtgaaactacaaaaaatagatctgtatcttggtactgactctagagcaaacatatcattttcaaacactctttcacaagatgatgagatcatggaaaaggtgaaatctgttttcttggatggcgtaccacctcactgggatgaagacaaagtgagagaaattttcgggaaatttggtgaaattgatagcatacaacttgctagaaatatgttcacggcagcacgaaaagattttggtttcattggctttacagcaagacagtcagctttagactgcattaagatggtcaataaagatggtgttggtgaaggtagtggaaaggttcccataaaagctagtttacaaaggccaaggcatgctttcaagaagtattcccggcaaggctcaagttccttgctaggcgtcagaagaggatttgtagataaaagttctagtggtagaggacaccactcggacagatataggcattttagtcctgtaaggcgttcgtattcagataatcattctcgccgtcactctattgatgttgaagagaggcatacttctgtgcgaggatacagagcttactatagaagagactctccagtgcatgccccaagctataaatatggaaggacacatctggagaccagaatcagcgaagaatatactgagggaagatacactagtaaatatccaaaacacagacacacgatgcatggaaccatggagcgagatgcaaaccgcaggatcaagtatggacattcataccaggagagggcacatagaacttgcccaggttgtaagctgtgtggtcaaaattacaattaccccaatggtgaggaattttctgcaatcagcggttgtcaggaggcatactaccagacagaccatgatctgattccttcaacttctcaagtagcatctcattgcgagggttcttgctgcaagggccagcagttgaaaccgaaaagttattctgtgatgcgtgattatgactatatcaatcaagagtcaacacctagttcaagtgaccatgccagaacaagatctaatcttccagcgccgcctcatcattggcatgttaaacattctaatgagcatcggaggtatgtatcatgaaagaaaggaaagccgaagctggtatctatcttccaaagatgctccaagtactcactccaggaagcaccataggccagcaagataagctgtaactgcaagatagagaaaatctagtagcagctcgcttctgatactgatggatagcatttgttaccggggccctgcttacgtggctgacaccctgttgcggggaggaatctgttccaaggacagcagtataccgtcccaatttataaccaaatactttgccttttctcggttctttgtattcgcgttcgatttctcgaaatgtggtgctgac

SEQ ID NO: 104085 - DNA, 480 bp, Zea Mays
atgacgcggtcggagctggcccggaccttgtcccagtgcagcggcttcagcttcggccgtggcgtcatgtcctccgatttgtcgccttggtcggagctctcgggcggatggcttgggaacacatcggtgggtgcagggacgctcttaaagttggcagcttgtggtggtgacgacagtgcggtgaacgggtttctttggacgagttgggcttccggacacggctctcccagtagcccaccagcggcggcggtggcggaggaggcggacctgcaaccggaggtggccgtggcgggtgtgtgctcgtcggtagggatggtggctgggagaggaatgagtttgtttcaatggtgttggtgctggatctgggagctggtttgtcgtttagtggagagcacggtggcgatggggacagcggtttttgacgaggaggtggcggtggtggcagtgtcggtgcgaagggaggcggcgggggcggagtaa

SEQ ID NO: 104086 - DNA, 173 bp, Zea Mays
gtaggaacacaaacatattgtaggttacaatacgataatataatacatatggcgcggacgcaggttccacaactgtctctaaaagacagcgtacatgcagttgttaaacggtgattagtacaacaacacagaactctaacagtttgcagctccatagactatacatgtacggt

SEQ ID NO: 104087 - DNA, 397 bp, Zea Mays
tttcaaataattctgtgatatattcttttccatattcacgcctccctttgtattcgaagtaaagaatgattaagttttcttttgtttgtttcaatcttctgtgttattcatctgttttggtaccattatctgtgtatactgttcctggtatgtttttctgtgatggttgttgttggtgtttaacattctcaagaacaaacaaacctatttcacagggtcaagacggtttcatctgcaaaaaaggagggcatatggtgaaggattgccctgataagcacaagaggaatgatcatcaatccacattctgtataagatgtggagaaacaggtcatgatatgtttggatgtgccaatgattacccaccagatgatatcgaggtagcgcttctttgccttgt

SEQ ID NO: 104088 - DNA, 208 bp, Zea Mays
gttagaggcacaaagccatctatgttgttccgacttctttgacaattctctggaacaagttagctgttataactgtgcccaatctggccattcttgcctgggatgtgctaagcaacgcagggtagctagtgctgtcacaaccccaaccttatgcttcaaatgtggtgaggaaggtcacttcgcacgcggctgcacgaagaatgccaag

SEQ ID NO: 104089 - DNA, 574 bp, Zea Mays
agattttgtccaccaaactttttgtggtatgttcctacactatgtagacctacatgtatcatttgtggacaattataacagagttttcaatcgttattagatttagttcgtttatttaaatttcttcgaaaaatttagatttgaactggaggtcactcgaaacttgaaaaaccgtgcatgcaaaaatgatatccatgttacttagcataagttatgaccgattccaagagcggaccggaaacttcgagcaacatgctcactaaacatggtcgtgaacttgccattcacatgtttaaaaattgtataaaacacaaacaaagtcagaaaatcatgaaacttgtccacgtgtcatgatatcatatgtagatgctgtgataaaaatttgaaaaagtttcgagaaaactgtggcgcactatgtgtagaaacctaagagatccacattgaaactgaaagcgaaataggctcacaccttttcctaaatgattttggtggttgaattgcccaacacaaataattggactaactagtttgctctagattatacattctacaggtgccaaaggttcaacacaaa

SEQ ID NO: 104090 - DNA, 549 bp, Zea Mays
atgctccaaatcgtcgacctctccttcaactgcttcgacggcaccatccccaatgagcttgccaacctcacccaccttgttgcgctcgatctcttcaatagctcgttgtccgtttgcttttcggacctcggcctccccgcgctctggttcctcaacctctccaacaaatgcctcgacgagactgtgtcggcgtccctcctccggttcaccgacaccgccttcgtcggcaacaacctcgcacgcccggctccggcgccaccgtccctctgccttctgacctcgccacaccttacgttgcgaggaggcgggctaggttcagtgaggcaggccaggctcagagaggcagccatcctcgccgttgccgtgggcgggtgcgtcattgggttcgccgtcgctgtgctgctgctcctcgccttctgcaacagcaccagggagagggctatactgatgatgcagacagcagcgggctgtaggaaggttcctccggagttgcccgagccgacattcgacatcaactttgcgtgtgatggcatacaacaccgcggctag

SEQ ID NO: 104091 - DNA, 717 bp, Zea Mays
atgatgctcatgacatttcccaatgcaacaaaatatctgaaaaaggtggggggctatcgcgtcggctacgacatcaagctctctggcaccgagtcccctaggtcggtcacggggctcgagggcgtccgcgtccgtgtgctatttgcctgggtgctcatcaccggcgtcgaggcgaccgacggagaggtcactgtccacatcgagccaatcaggaagtcgttccccgccattgggttcaaatccagccctcggtgcatcatcggattggcgacgggggtggagactaaggatccaagccactatcacggaccacaacatcaagtgtatgaggcagggcaaagaggccaacaggtgcaggttttcctcatttttattagatcctttcttagcgatcttggatctccactctccaggactccaggtcttgtgatatgtgtgttctcgtggcatgctgccttttcagtattggacaatgctaatggagttacaactccaaggacaggaaggtttaagcaagtcaaggatggactgctttctgcagtttcggaaatgcaatactgcgctagagagatgaggaagattattaactcgctatggacaatgaatttgaatgaagtgtcgtcgagacttcaagagatggctgtgtttctcgaaggtgcagctgatcgtggtcatatggctgctgaggagcttagtcctccccgcctcaatttctaa

SEQ ID NO: 104092 - DNA, 527 bp, Zea Mays
ctcccatccgtgcggtcaactgctcctgctggtttctgttaccgaagattgggataggtgggacatcaaacaaatcctaacaaactcaccgctaccacctgtagtcttggccatgagtttatctgctgccggattctccgtgccatggccggtcttccttttctcccctgccgaactcaaggtctgctatctcctgcgcatccggcggggattccgggagcaacaagaacaccgcaacaaccgcgaggaatccatcctttctccccccgtgctataaaaaccgggcgtcgtgtttcccctgcccaccaaaaccaaatccagaactctccctgggaatttggtggccgatttgccaccgcgtgggtgtggtggggcatgcgccgaacgacttctgcgttggagctccagcgccaggggggaaactgtcgcgccatcgctgggccgcggctcagattgctggggtggccggagtcaccggatcggaattcagaacactagcgtcgacgacacggggcgctcaaggttag

SEQ ID NO: 104093 - DNA, 168 bp, Zea Mays
atggccgactacttttggagccttaatagtagtagagatattggaaccatcttcttcggtccacgtctatctcatggcatgccttactccacttgggctccaccagaagctgaccacgccaatgcttcggcatcgtcggtgcaggagcaggagtgtgccggcgcgtga

SEQ ID NO: 104094 - DNA, 1158 bp, Zea Mays
cccccacctcacgcactcatccattcggccattccttaacatccttgttgcaagcggcgccagcttgctcgcgctctctcgcagctgctacgctaaagcaagtctagtctctagaggaggaggcggagggggaggccatgggcaaggacgacgtggtccagagcggcgcgggcggcggggagttcgccgccaaggactacacggacccgccgccggcgccgctggtggacgcggcggagctgggttcgtggtcgctgtaccgcgcggtgatcgcggagttcatcgcgacgctgctgttcctgtacgtgacggtggcgacggtgatcgggtacaagcaccagacggacgcgtctgcgtcgggggccggggcggacgcggcgtgcggcggcgtgggcgtgctgggcatcgcgtgggccttcggcggcatgatcttcgtgctggtctactgcaccgccggcatctcggggggccacatcaacccggccgtcaccttcggcctcttcctggcgcgcaaggtgtcgctggtgcgcgcgctgctgtacatggtggcgcagtgcctcggcgccgtctgcggcgtcggcctcgtcaaggcgttccagagcgcctacttcgaccggtacggcggcggcgccaactcgctcgcgtccggctactcccgcggcgcggggctcggcgccgagatcgtcggcaccttcgtgctcgtgtacaccgtcttctccgccaccgaccccaagcgcaacgcccgcgactcccacgtcccggtgagcacaccacgccaccacccggccccgaccaacgccaccgcctctcttagcttcccttctcttttatttatgtttctactactttttgtgcctcgatcttactgcgcgcagcgcgcatactcgtcgtactacacactgtagctcagtagctgtttgtttgttggagttcaaggggaggaggttagctagagctgaagtcatggtagcaaatagtagtagtaaatagcacaacacgtcattaagggcttcatagtcgtgataatggccgttattaaagagtcccgtactctcatccacagaggacatccatcttcggagccggacatagctccgaccttatccaccccccatcgaccatcgtgtaaaaagctgagctgggggtctggtccggccc

SEQ ID NO: 104095 - DNA, 1470 bp, Zea Mays
cccccacctcacgcactcatccattcggccattccttaacatccttgttgcaagcggcgccagcttgctcgcgctctctcgcagctgctacgctaaagcaagtctagtctctagaggaggaggcggagggggaggccatgggcaaggacgacgtggtccagagcggcgcgggcggcggggagttcgccgccaaggactacacggacccgccgccggcgccgctggtggacgcggcggagctgggttcgtggtcgctgtaccgcgcggtgatcgcggagttcatcgcgacgctgctgttcctgtacgtgacggtggcgacggtgatcgggtacaagcaccagacggacgcgtctgcgtcgggggccggggcggacgcggcgtgcggcggcgtgggcgtgctgggcatcgcgtgggccttcggcggcatgatcttcgtgctggtctactgcaccgccggcatctcggggggccacatcaacccggccgtcaccttcggcctcttcctggcgcgcaaggtgtcgctggtgcgcgcgctgctgtacatggtggcgcagtgcctcggcgccgtctgcggcgtcggcctcgtcaaggcgttccagagcgcctacttcgaccggtacggcggcggcgccaactcgctcgcgtccggctactcccgcggcgcggggctcggcgccgagatcgtcggcaccttcgtgctcgtgtacaccgtcttctccgccaccgaccccaagcgcaacgcccgcgactcccacgtcccggttctggctcccctccccatcggcttcgccgtgttcatggtccacctggccaccatccccgtcaccggcaccggcatcaacccggccaggagcctgggcgccgccgtcgtctacaacaaggacaagccatgggatgaccactggattttctgggtgggcccgctcctgggcgctgccatcgcggccttctaccaccagtacatcctccgggcgggcgccatcaaggctctcggctccttcaggagcaacgcgtgatgagcagagctaaagaaaggccttcgctggactgcgtgctggagcaacggcgatcgatcgatctagcgtggggagaggcggataggcgggcgcgcgagggaggagaataagtttgtgccggtggcccggtctcgtcggtcgcttttgttccagcatgcagctgcgtcgcgttcgtgtgcgtgcgtgggggtctccttaatttccccggcccctgtaatcatcaatcaccatgtgtgcgtataatatctgctgccaagggatcgattattcccccccccccccctctctctctctctgctcttgtagctccttctgttttatcgttattatgtagcgacaacaacgacgacgaccaccatcatcagtgagaaacctcttgcctctgtctaactcaaccgacatgtggagtcttcatcatctgctgttctcttcttgctcgttcgtacgttgtctc

SEQ ID NO: 104096 - DNA, 843 bp, Zea Mays
gctgcttataaaagcaaaaaaaatctactcctaggtcggtcaagactcaagaccagggcggcggccgcgttccattctgcgcaaggcgacgactgcggttgggaagggaagacgcctacaaacccctctctacctctcctctgcgaaccacctgccgccggaagccctagagggctcgacccatggatccgccgcagcagccggagcctgtcacctacgtctgcggagattgcggagctgagaacaccgtgaagctagtagacgtcgtccagtgccgtgaatgtggccaccgcatcctctacaagaagcggacccgccggattgtccaatttgaagcacgctgaggagtgacgacaggggaaaaacactggagatggttgatctattactcgccactcacctatgtaaagagtcttgtgagggaaatgaaagtgtcagacataatgtttgaatgaatgtcgtgtgcctcttttgggcttgaaaactttaatatgtaaggcttgaactagggtcggatttgagcattgagatactgcagtaatatgttgatgggtcctcctaagtaccgaatctaatgcgtgcctgttatgcctgcgttattatttatttattggccatttgtttggtgttcagtggaaatatcgatttagggggtgtttggtttgtagggactaatttttagtccctacattttattccactttagttacaaaatcatcaaatatagaaattaaaactctattttagtttctatatatatcaatttatatactaaaatggaataaaatgaagggactaaacattagtccctagaaaccaaacacctccttatacggctggaat

SEQ ID NO: 104097 - DNA, 984 bp, Zea Mays
atggatccgccgcagcagccggagcctgtcacctacgtctgcggagattgcggagctgagaacaccgtgaagctagtagacgtcgtccagtgccgtgaatgtggccaccgcatcctctacaagaagcggacccgccggaatgtatgcggtctgcttgtagtgtccagcttgggcagcgtaattacgcatatacggtctacttccgtactcccaatttcgtatacgccgttcactacgaatacaccgtacgccgccgcttccacagttccacgtaaaaacgcgcaggccaggccccgcggctccatcgtgctcccatttcgcttcctttcccctaccgcatcgatggaccacgcgccagcgccccctttcgccgtgcacctcgtcaccggcggcggatcctcgtcggggatcgccctcctactgcgctccctcgccgccgcccgtgtcgtcgctcttgacgcagagtggaagccgcgccgccgcggtagccctgccgctgccgaccctgcggccctgggcgacgacacgacgccggcgtccgagacatctccagcgccgccgaagttcccgacggtgacgctgctccaggtggcctgccgcttcagcgatggtggtggaggtgagggcgagcgcagcgaggtgtttgtcgtcgacctgctttccgtgccgctcgccgacctgtgggcaccgctgcgagagctgttcgagcggcctgagacgctcaagctggggttcaggtttaagcaggacctggtgtacctctcctccaccttctccgccgccctcgggtgcgattccggattcgatagggtaagggcgtgttgaccaaatgtcgtggcaagctgcacattcatttcctggtggcaacgtcgatgtaaagtttcaagtcgggattaggttagtgattcccacgtaattggtactcatgtgctgggatatgcttaaccattgaactgattgttaaaatttagaaccaaattctgc

SEQ ID NO: 104098 - DNA, 2090 bp, Zea Mays
atggatccgccgcagcagccggagcctgtcacctacgtctgcggagattgcggagctgagaacaccgtgaagctagtagacgtcgtccagtgccgtgaatgtggccaccgcatcctctacaagaagcggacccgccggaatgtatgcggtctgcttgtagtgtccagcttgggcagcgtaattacgcatatacggtctacttccgtactcccaatttcgtatacgccgttcactacgaatacaccgtacgccgccgcttccacagttccacgtaaaaacgcgcaggccaggccccgcggctccatcgtgctcccatttcgcttcctttcccctaccgcatcgatggaccacgcgccagcgccccctttcgccgtgcacctcgtcaccggcggcggatcctcgtcggggatcgccctcctactgcgctccctcgccgccgcccgtgtcgtcgctcttgacgcagagtggaagccgcgccgccgcggtagccctgccgctgccgaccctgcggccctgggcgacgacacgacgccggcgtccgagacatctccagcgccgccgaagttcccgacggtgacgctgctccaggtggcctgccgcttcagcgatggtggtggaggtgagggcgagcgcagcgaggtgtttgtcgtcgacctgctttccgtgccgctcgccgacctgtgggcaccgctgcgagagctgttcgagcggcctgagacgctcaagctggggttcaggtttaagcaggacctggtgtacctctcctccaccttctccgccgccctcgggtgcgattccggattcgatagggtggagcctttcttggatgtcaccaacatttattactatctcaagggccatgataggcagaagaagcttccaaaggagaccaagagtttggcaactatttgtgaggagctgcttggtatccttttgtccaaggaactccagtgtagtgattggtcatgccgccccttaagtgaagggcaaatacaatatgctgcgtcggatgcctactacttgctagacatatttgatttgttccaaaaaaggatcacaatggaaggaaaatgttcatctacaacagaacttacttcagacaggcattgctcatcagtggtgatagaatgctcttcttctggatatggcatttgctcgggtagttgtttgatgtccatagtaaccaagtacagtgagaagataatattgacagaatctgatgcaaaaccgcgtacctccagacgaaaagaaaaactgaagattcctgccaatgccaaacgcaaagataatgtggattgcagtagtgaatggcagggtccccctccatgggatccttccattggtggggatgggtacccaaagttcttgtgtgatgtgatgattgagggcctagctaagcacttgcgatgtgttggaatagatgctgcaattccatcttcaaagaaacctgaaccaagggatctattaaatcaaacatacaaggaaggaagaatattattaacacgggatgccaagctcttgaaatatcaatatttagctggtaaccaggtatacagagtgaaaagcctgctcaaacatgatcaactagctgaggtcattaatatcttccaattaaagatttctgaggaccaacttatgtcgaggtgcacaaaatgcaatggtagctttattcagaaaccacttaccctagaggaagctgttgaagcctcaaaaggtttccagattattcccacgtgcttgttcaaccgaaatctggagttctggaagtgcaccgattgcaaccaactctactgggaggggactcagtaccacaatgcagtccaaaggttcttgtcagtgtgcaacattagtgactaagcagcacgtacggccttggtactcatttgtaaaattgtaaggtactgagataccatcacctccgaaagatcgaaaataatctgatctttggcatccactcgtgcacgatgaggcatgccatccatttttagtggtttgctgttcgtcactgagatgctgttgtaaggaaaatagaccttgacttatttgattaatggactttgctccatgcacatccaagaggaaaggttcta

SEQ ID NO: 104099 - DNA, 1334 bp, Zea Mays
tagcctctttttatttttatattcagagagtgtttctaggattgtacccattttatttgtttttcatgaattttggatgcacattgtttgctctatattaagataaccatgctggtattcctttgtgcaaggtggagcctttcttggatgtcaccaacatttattactatctcaagggccatgataggcagaagaagcttccaaaggagaccaagagtttggcaactatttgtgaggagctgcttggtatccttttgtccaaggaactccagtgtagtgattggtcatgccgccccttaagtgaagggcaaatacaatatgctgcgtcggatgcctactacttgctagacatatttgatttgttccaaaaaaggatcacaatggaaggaaaatgttcatctacaacagaacttacttcagacaggcattgctcatcagtggtgatagaatgctcttcttctggatatggcatttgctcgggtagttgtttgatgtccatagtaaccaagtacagtgagaagataatattgacagaatctgatgcaaaaccgcgtacctccagacgaaaagaaaaactgaagattcctgccaatgccaaacgcaaagataatgtggattgcagtagtgaatggcagggtccccctccatgggatccttccattggtggggatgggtacccaaagttcttgtgtgatgtgatgggatctattaaatcaaacatacaaggaaggaagaatattattaacacgggatgccaagctcttgaaatatcaatatttagctggtaaccaggtatacagagtgaaaagcctgctcaaacatgatcaactagctgaggtcattaatatcttccaattaaagatttctgaggaccaacttatgtcgaggtgcacaaaatgcaatggtagctttattcagaaaccacttaccctagaggaagctgttgaagcctcaaaaggtttccagattattcccacgtgcttgttcaaccgaaatctggagttctggaagtgcaccgattgcaaccaactctactgggaggggactcagtaccacaatgcagtccaaaggttcttgtcagtgtgcaacattagtgactaagcagcacgtacggccttggtactcatttgtaaaattgtaaggtactgagataccatcacctccgaaagatcgaaaataatctgatctttggcatccactcgtgcacgatgaggcatgccatccatttttagtggtttgctgttcgtcactgagatgctgttgtaaggaaaatagaccttgacttatttgattaatggactttgctccatgcacatccaagaggaaaggttcta

SEQ ID NO: 104100 - DNA, 769 bp, Zea Mays
cgttacctagacatattgtgtattgcatgtcatctacaatactgcatcaaatgaaactttccgctgtgagagactgttttaaccaagatttcatttctttcatgtttacgtggcatcttggaaacacaaatatgaaacctaccactgtgaatgaccttatgacatgaaggtaccagttatcacctgtgaactggtagcacatatcaggagtctctgactgagaattgtattgttacgcaggaagctctttaaaggcaccatacttgttttctaatgtttctatttgagtaggctgaggaactgaggagattttggggctaactgatcagtttattaacttgcttgttctaggtcattaatatcttccaattaaagatttctgaggaccaacttatgtcgagattattcccacgtgcttgttcaaccgaaatctggagttctggaagtgcaccgattgcaaccaactctactgggaggggactcagtaccacaatgcagtccaaaggttcttgtcagtgtgcaacattagtgactaagcagcacgtacggccttggtactcatttgtaaaattgtaaggtactgagataccatcacctccgaaagatcgaaaataatctgatctttggcatccactcgtgcacgatgaggcatgccatccatttttagtggtttgctgttcgtcactgagatgctgttgtaaggaaaatagaccttgacttatttgattaatggactttgctccatgcacatccaagaggaaaggttcta

SEQ ID NO: 104101 - DNA, 99 bp, Zea Mays
ttacactcatcacacacaatgagaaagtacgaccttcgtcgctcatgaagcccatagaaggtcgaggacttgggcacagacgtcatctactctataccc

SEQ ID NO: 104102 - DNA, 2200 bp, Zea Mays
aattctataggaggactttcacatcattctggggatcatgtaaatgagccattcgtagggaaaaatggagtttctggtgttcttctacatcacaagacagccaataataatcctcctgtaacatttgcaattgcggcatgtgaaaatcaaaatgtaaatgtcacagtattgcctgtttttgggctttctggagaaagttctgttactgctaggggaatgtggggcacaatggttcaggatggttcctttgatcaagataatctcaatactggtcctagcatgccttctttgctgggcgatacagtttgtgcagcagtttctgcttccacctgggttgaaccacatggaagatgtgcagttgtatttgcattggcttggtcttctcctcaggttaaatttaaaaaggggagtacatactacaggagatatacaaagttttatggaacttctccaagatcagcagtaaatttggtagaggacgctttgatgaagtataaacattgggaagaagagattgataagtggcagaccccggttctccaagatgagaggcttccagaatggtacaagattacactctttaatgagctgtacttcctagttgctggtggaaccgtttggattgatagtggatctttggtgtctgatgctgataacaagtcgaatccagaggaaagtaatttgtcacatgagatcgatgacaaagaaaatgttgggaaatttttgtaccttgaaggaatagaatacttcatgtggtgcacctatgatgtacacttctatgcctcctttgctcttttggatctgtttcctaagattgaattgagcattcaacgtgattttgctagagctgttttgcgggaagataacagaagagtcagatttcttgctgatggtacctggggtattcgtaaagtaatcggtgctgtcgcccatgatcttggagcacatgatccttggcatgaattgaatgcttacaacatacatgacacaagtagatggaaagatcttaatcccaagttcgttcttcagatttacagggattttgctgcaacaggtgacaagtcatttggcaaggatgtctggcctgcagtctgtactgctatggaatacatggaacaattcgatcatgatggtgatggtatgattgaaaatgatggatttcctgatcaaacttacgatgcttggacagttcaaggagtaagtgcatattgtggttgcctctggcttgctgcccttcaagctgcggcagcactggccggaagccttggacatgatgactatgctgagaggtgcatgacaagatttgtgaaagctaaaactgtatttgaagccaggttatggaatggttcacacttcaattatgacagtggtacaagttatagtagccgttccatccaggcagatcagctggctggacaatggtatactgcatcgtcaggtttgcctcctctatttgatgaggataggataaaatgcacgcttcagaaaatatttgactacaatgtgatgagggtgaaaggaggacgtatgggagccgtgaatggtatgcatccaaatgggaaggtagatgaaacctgtatgcagtcaagagaaatctggacaggagtaacatatagtttagcagcaacgatgctgctccatggaatggagcatcaggccttcactactgcagaaggcatttatactgcaggatggtctgaagagggctatgggtactggttccaaactccagaagcatggacaattgatggccattacaggtcactaatttatatgcgcccccttgcaatctgggcaatgcagtgggccttgtcgcctccaaggtcgatactggaggcgccgaaggtaaatacaatggacagagctcacatttctccaggcaccttccaatttctccaggatagcgttagaaagatgacaccaaaaaacggttgttttggaaacactgtaattaacttggattgctgatgtgacggtagcacttgtatctcgcactgtccaatgtatgtttacggagcacctcatttagaaaatgttgagtgtgaaacgggtgctatattctgttcagcctttgcagttatgtggtgtacctctctgatgtaaattgcatctcacagtgggccggactttgtaaattgttgtacagaaaacgtacatatgataatgccgtgttaccctgatattcatgacaccgtttacc

SEQ ID NO: 104103 - DNA, 806 bp, Zea Mays
acaatggaatagttggtaatagttttgcatgaactattggtgttggctatctaaaaggacataaaggcagacatgagcaacagatcccgctccatgggctgaaactgggattcgtgatggtagaaagtgctactactgctcttaactgtagcgctgtggtactaggatccttgccaataagggtgagcccgtccaagacgcctgtgcgtccccgcgcccctcgccagctgatgtcgtcctaggctaggggattgaagaagcacttgaagaggctcaatgcgcccaagcattggatgctcgacaagcttggcggagcttttttcatgctctgcaaggtgaggtctgttcagtttggtctgaaaggcatcccctacctgaacacctacgacgaccgcaccatccgctaccccgacccgctcatcaaggccaacgacaccatcaagatcgatctggagaccaacaagatcatggacttcatcaagtttgatgtcggcaacgtggtcatggtgaccggcgggaggaacaccgggcgtgtaggagtgatcaagaatagggagaagcacaagggcagcttcgagaccatccacgtgctgcttggagcttttttgctatgtctagttttctcctatttgttgtacagaaaaacatagaatggaattcgactttggtggccgcaaaagtgtagagacttgatttcatataaagttaggcttaacattagtgcaaatagttgtattttagtttaaatttagagcccacttctggatgtgttatttgacaatgcttatttatgatatactgaatgg

SEQ ID NO: 104104 - DNA, 360 bp, Zea Mays
atggctgggcgcttggctgggctggccgctcggaggcgacggtcgctggccacgacatgggcactggtgccgctgcgccgtgctgggcgcctaggagcgaggttatggtcacgtggggcatgccgatcaacggcgagtgctcgctggccgcatggggctgggcacctaggctccgagcctccgatggcggcgcggcgctccggggaaggggcacaggggtgcgacgacactccagggaaggagcgcgggagtgtgagggtgctccggggcgggggctcaggggcttggcagtgtcgagcggcgctccagctggggcgtgacggcggcggcggggtgggtagagtgggcacgagagattga

SEQ ID NO: 104105 - DNA, 1506 bp, Zea Mays
ccattccagcgccagccccctcccctatttaaaccccatgagtgcaacccctcctcctacacgacccgcgcccattgcattgcatcgcattgcatccgtctctctcatctcacactccaccgatccatccatcgcatatccacaaagctcgcccagagtactactagtcgtgtagagtgctagactgatcggtccatggcggcggcggcgagcaggacggtgtgggtgaacggccccatcgtggtgggggcggggccggcggggctgtcagtggcggcgtgcctgcgggagcgcggggtgccgtccgtcgttctggaccgggccgactgcatcgcctcgctctggcagcgccgcacctacgaccgcctccgcctgcacctgccgcgccgcttctgcgagctccccgggatgcccttccccgcccactacccggagtaccccaccaagcgccagttcgtggagtacctgcaggcctacgcggaccgcgccggcgtggagccgcgcttcaaccaggccgtcacgtccgcgcgctacgacgaagccgcggggctctggcgggtgcgcgcggaggacgtcctcgcctccacttccaccaccgagtacataggccgctggctcgtggtcgccacgggcgagaacgccgagcgcgtcgtcccggagttcgagggcgcccgggacttcgcggggcccgtctcccacgtcgccgagtacaagtgcggcgaggcgtaccgcggcaagcgcgtgctggtcgtcggctgcggcaactccggcatggaggtctgcctcgacctctgcgaccacggtgcgctcccgtccatggtggtcaggggatcggtgcacgtcctgccgcgggagatgttgggcgtggccaccttctccgtcgccgtgttcctcctccgcttcctgccgctgcggctggtggacgccgtcctcgtcctcctcgcgcgcctcttcctcggcgacctggagaggctcggcatccggcgccccgcgtgcggcgggccgctccagctcaagaacgccaggggcaggacccccgtgctcgacatcggcgccctcgccaggatccgctccggccacgtgcgggtcgtgccggggatcaggaggctcttccgcggcggcgccgagctccaagacggccgccgcgtcgccgccgacgccgtcatactggccaccggataccacagcaacgtcccacagtggctcaagggaagcgatttcttcaccgaggaagggtacccaagggtggcgttcccgcacggctggaagggggagtcggggctctactcagtcggattcaccaggagaggcctctccggcgtctcctccgacgccgtcaaggtcgcgcaggacatcgccgtggaatgggagaagcagacctccaagagatgatgaacaactgaagatgatggatgcccatcatcagcttaccgactgatgatgacctctcgttgatggacgacctggtaactccacgtatcttgccatcacgcatgtgtgtccaga

SEQ ID NO: 104106 - DNA, 988 bp, Zea Mays
atggtggccggtggtgcggtgaaaggagatgacgatgtgcagcttccatgcgggcgcggggaagatgacgtggtgaagaccgccagcctctacaccgtctccagcaaatgtcgatgccctggccatggtgaacaaggtgatccttgggcaagcaaggtgtcttctactgaaggtaaaggacaacagaatgattcttggtcaagtaagatgacttctcgtggtgctgaggataccagaggtggctgggacagcaaggtgaaaggctcttcctgcaatgatggggtttgttgcaatcaatgccacctgtggttggtgtttctttagttgctgatgcaactgaggagctcgagcacgacacgattaactcaggaattttatgtaatgttgatgcaaggacattgacttttatcatcagaaagacttcctactgttgatggcattagcataaatcatatgaaggaagtagattcacatgcacccgtgaagcagaagctacaattatttccaataaatgaagctactcttaagccatttgagaaggttgatttattagacagccctattgccagactacctgacatagagaccacaacacttggagccacatatgttgctagcttagatgcaggagtttggaccaaggaacaagtatttgcaggttagcacaaggagaacgcgacaatctttcgcccaaaactggatgaggtgcacaagaagagggctgattcatggtacaagacggtttcaagatcattcgatttggctgacctttctctgtaaatgtttcttgtcggcattgatctatctgtttttggaagatgcaaatgaataaattggtctttgctggtactattcttaactacttgttatttacggtctttacaaaagcgagtacaagaatatcctcaaattttcggcaggaagtatttttctagaatatttatgtgtgcttccatagatttgaatggtttgcatagactatcccatc

SEQ ID NO: 104107 - DNA, 663 bp, Zea Mays
atggtggccggtggtgcggtgaaaggagatgacgatgtgcagcttccatgcgggcgcggggaagatgacgtggtgaagaccgccagcctctacaccgtctccagcaaatgtcgatgccctggccatggtgaacaaggtgatccttgggcaagcaaggtgtcttctactgaaggtaaaggacaacagaatgattcttggtcaagtaagatgacttctcgtggtgctgaggataccagaggtggctgggacagcaaggtgaaaggctcttcctgcaatgatgggggcattagcataaatcatatgaaggaagtagattcacatgcacccgtgaagcagaagctacaattatttccaataaatgaagctactcttaagccatttgagaaggttgatttattagacagccctattgccagactacctgacatagagaccacaacacttggagccacatatgttgctagcttagatgcaggagtttggaccaaggaacaagtatttgcagatttgaatggtttgcatagactatcccatcaacatagacaattggagaagctcaatttccgatctgcagctttgctagagaattttgcgtatgcattagttattgcatccgagaaaaaagacttagggtacataagccttgtactttgtcaatattaa

SEQ ID NO: 104108 - DNA, 2544 bp, Zea Mays
caagagggggagaagtggagaagaaaacaaaagttcttccctcttccaaatccgcgtattgcgcacttttcaatctctcatcacatcgccccgttgcaaggctgcttctgccttctggtgtctctctcgctttccctctctagattccaatactttcccctgttcctgggcaagcccatcgtgacgggagggcgggagacgctgcccagtctactctagcctgggtttggagagagatgggcagatgagggtgggagtgggagtaatacaacagagccaaaccgagggaggagagagagggccagagaacacaaagaggcaaggcaaggaagcagggacagactccaagattgggggcgactggtaggcaagaaaggaagctcttctttttcgagtatcactgggcgattgatttccgccgccatcctttccgctcaattcttagctgccgcagataagagcgaggagcagaggcgctgttttctctctccgattccctcagcttcctgtggcgtggtggggtgtgtggcgacgaagggaggctcgccggggcgcggacggacgcccgcgatggccggcgtcgacgttgccaggcacgcgcacagcccggcgcaccacgccgtggcggcgcgggaccacgtcgcgctgcgccgcgtgctggaagcgctcccgccggcccgccggcccgaggagatccggacggaggcggactccgtcgccgaggaggcccgcgccgaggccgtctcggcggtcatcgaccgccgcgacgtgccagggcgggagacgccgctccacctcgccgtgcgcctttgtgacgccacggcgaccgagatgctcatggcggccggcgccgactggagcctgcagaacgagcagggctggagcgcactgcaggaggccatctgcgcgcgcgaggaggctctggcgcgcgtcatcgtgcgccactaccagcccctcgcctgggccaagtggtgccgccgcctgccccgcgtcgtcgccgccatgcgccggatgcgggacttctacatggagatcaccttccacttcgagagctctgtcatcccattcatttcccgcgtcgccccctccgacacctacagggtatggaagcgcggcgccaacctccgcgccgacatgaccctcgccggtttcgatggcttcaagatccaacgctccgaccagaccatactcttcctcggggaagggtcggaggatggaaaggtgccgcctggttcactgtgcatgatcaaccacaaggacaaggagattatgaacgcgctcgagggggcaggcgccccggcctcggaggcagaggtccagcaggaggtcgctgcaatgtcacagaccaacatcttccgtccggggatcgacgtcacccaagcggtgctgctcccacagctcacatggcggcggcaggaacggacagaggccgttggcccgtggaaggccaaggtgtatgacatgaatcatgtgctggtcagtgtcaagtcaaggagggtcccgggagcgatgacggatgaggaattcttctcatctagcaacgacaatgatacagagagcgaggggtttgacgatgttctgacagaggaggagaagaaacagctggaggctgcgctaaaaatggattctccggatgccggtggagaagaccagtcggactcatttgctggccctcgacatagttgctttgagccaagggagagggagatacccatcgagggcatgagtgtttctggaaatgtggagagtaagcatgacaagaaaggttggttcagtaattggggaaagagagctcaagttagcaagccagaaagggtgaagaagatggcacctccaaggagctcgctctgtgtagatgagaaggtgagtgacctcctctttgaatcaccctcaaatgcacaaacaagaccaggaaggcattcagtagatgtagtcagagcagatgacaacagaaggatcagggaaagggatagtaggaggtatgttccttctgcagagaatgggcataggcgcaaagaaggttccaaagaaagtgagtataaaaaaggcctaaggccggttctctggctctctccaaatttccctctgcggactgaggaactgctgccgttgcttgatattcttgcaaacaaggtgaaggcaattcgtcgtttgagggatctacttacaacaaaactccctccagatacatttcctgtcaaggttgccatcccagtcgtgcctacgatcagagtgcttgtgacattcacgaaattcgaggagctacagccgctagaggagttcggcacaccaccttcaagccctgacaaaagcaagagcccagcagtgcagcctccttcgagctcctggattcaatggatcaaggcgccttattaccgccagatgaacttgtctacggcgccaggcccgagcagccgcgtggaggacatccaccaccaggacccgttcgccatcccttcggattacgtgtggaccacacccgaggagaagaaaaagaagacacaggaaaacaagaacaggtccaagaaaggcaggaacgggtga

SEQ ID NO: 104109 - DNA, 2712 bp, Zea Mays
ggctgcttctgccttctggtgtctctctcgctttccctctctagattccaatactttcccctgttcctgggcaagcccatcgtgacgggagggcgggagacgctgcccagtctactctagcctgggtttggagagagatgggcagatgagggtgggagtgggagtaatacaacagagccaaaccgagggaggagagagagggccagagaacacaaagaggcaaggcaaggaagcagggacagactccaagattgggggcgactgataagagcgaggagcagaggcgctgttttctctctccgattccctcagcttcctgtggcgtggtggggtgtgtggcgacgaagggaggctcgccggggcgcggacggacgcccgcgatggccggcgtcgacgttgccaggcacgcgcacagcccggcgcaccacgccgtggcggcgcgggaccacgtcgcgctgcgccgcgtgctggaagcgctcccgccggcccgccggcccgaggagatccggacggaggcggactccgtcgccgaggaggcccgcgccgaggccgtctcggcggtcatcgaccgccgcgacgtgccagggcgggagacgccgctccacctcgccgtgcgcctttgtgacgccacggcgaccgagatgctcatggcggccggcgccgactggagcctgcagaacgagcagggctggagcgcactgcaggaggccatctgcgcgcgcgaggaggctctggcgcgcgtcatcgtgcgccactaccagcccctcgcctgggccaagtggtgccgccgcctgccccgcgtcgtcgccgccatgcgccggatgcgggacttctacatggagatcaccttccacttcgagagctctgtcatcccattcatttcccgcgtcgccccctccgacacctacagggtatggaagcgcggcgccaacctccgcgccgacatgaccctcgccggtttcgatggcttcaagatccaacgctccgaccagaccatactcttcctcggggaagggtcggaggatggaaaggtgccgcctggttcactgtgcatgatcaaccacaaggacaaggagattatgaacgcgctcgagggggcaggcgccccggcctcggaggcagaggtccagcaggaggtcgctgcaatgtcacagaccaacatcttccgtccggggatcgacgtcacccaagcggtgctgctcccacagctcacatggcggcggcaggaacggacagaggccgttggcccgtggaaggccaaggtgtatgacatgaatcatgtgctggtcagtgtcaagtcaaggagggtcccgggagcgatgacggatgaggaattcttctcatctagcaacgacaatgatacagagagcgaggggtttgacgatgttctgacagaggaggagaagaaacagctggaggctgcgctaaaaatggattctccggatgccggtggagaagaccagtcggactcatttgctggccctcgacatagttgctttgagccaagggagagggagatacccatcgagggcatgagtgtttctggaaatgtggagagtaagcatgacaagaaaggttggttcagtaattggggaaagagagctcaagttagcaagccagaaagggtgaagaagatggcacctccaaggagctcgctctgtgtagatgagaaggtgagtgacctcctctttgaatcaccctcaaatgcacaaacaagaccaggaaggcattcagtagatgtagtcagagcagatgacaacagaaggatcagggaaagggatagtaggaggtatgttccttctgcagagaatgggcataggcgcaaagaaggttccaaagaaagtgagtataaaaaaggcctaaggccggttctctggctctctccaaatttccctctgcggactgaggaactgctgccgttgcttgatattcttgcaaacaaggtgaaggcaattcgtcgtttgagggatctacttacaacaaaactccctccagatacatttcctgtcaaggttgccatcccagtcgtgcctacgatcagagtgcttgtgacattcacgaaattcgaggagctacagccgctagaggagttcggcacaccaccttcaagccctgacaaaagcaagagcccagcagtgcagcctccttcgagctcctggattcaatggatcaaggcgccttattaccgccagatgaacttgtctacggcgccaggcccgagcagccgcgtggaggacatccaccaccaggacccgttcgccatcccttcggattacgtgtggaccacacccgaggagaagaaaaagaagacacaggaaaacaagaacaggtccaagaaaggcaggaacgggtgatagagcattggtgggatgggatctaacaggagggacgagtggaagggaaggtttggagatttcggctgtgctggtctgagtctgacgtcgaatattgggaagcgaccgcttgtcttcttttttatttgtgttaacggatttgctgccaacattctttcgtttaacccaaatcgtttcggtcctgattactgttgcaatctgttggtagattttgagatgtggtggcttctatacaaccagtgatgcacatccctatctcctccgtagtgtctaggtacatcgcatttctttgttcctgcatctccaatagttgccaaaatgcattctatatttcggtttagaagaatattaacaaaaa

SEQ ID NO: 104110 - DNA, 2504 bp, Zea Mays
gcgcccatcccatcccatcccatcagatccgcccgcccttcgccaacaggatgggagtagatacgatacgatacgagctcatttgtcgctgcttccttcatttcatctcttcttctccgctgctaggctcgtcctggccctgtcctagccggctagcccatgcctggaagatgatcggcgacggcaacaagcgcgatgcaaggcagttccggcgggggcgaactgagaacacatgagaataatgagatgagattgctcgcctcgcggtcgcccccgcagggccttccttgctgctgttccgcagggtggcggtctgggtggccgcccgtcgtccaggggagtatcgagacacgtacgcacgaattcaccaccacgcgatccagcatgttttgctgctgcagtgctcttcgtcacggttatatatatatatatatgtgatcgaactgccatgcatggtaagaaatcactgcgcgcttgctattaaaaaatatatctgtgtgttagcgataactttattaagctgtactcctctcaattccatattgcaagctattttagcttttcttacgcacatgcatagtttttgttagacgtctagatttgtatacattgtgtctatgggtattttttggttctcgatctactttcctactacaacttacttaaggttagtcagccaaattaaagaactaatcttattgtacagaaaaatagataaattatgtcaagttatcaaacaaagcttaaatacatgcatagttaaaaaaatatatgcatctataaaaatagtgttaactttttttatatatatacatgtatgtagttatgtattatgtctaaatatatgtatctaaaagaactaggataataggttacagtttaaaaatagagataataagcatgtttggttcggcttttttctgaagggttttttctaagaatctagcttcctagataatctatggtcacaagaatctatatatcgtgaggcttgcacgtagaggaagatgaagggatcggtttagaatttaggaggtggcggattcgtctcgtcagggtcccgactcagaggattctacattcatgttgatttgagtgatcacaaaggccttaagttgatccaatttttccactgcaagatcatcatgttttgattctttcttaaattcttcattttatatggtatcaattctagcatttaatagctttttatagtaggggattattttttcgtttcctctcaagctttctaggatcatattcaacatatgtacgggcaatattctttaccatctgggaggttttgggctgccgattcgataaagaaggcccaacgtaagaatgatccggtgcttcactagttgggctggctcatctgatggcgtgtgtttatttgtttcatgtatagactactacaatatatagaaacgtgtgttcctagaggggaaaaaaggtcgatttgtaccttcctaaatcatatcattatagtctgatttgtttcatgtatagactaccaccgcagggttcaagagtgtttggcttacacatagacttcagcttccacaatacaattaatttgtgtgagttttctaaattacctttgatgattagcgggtggagaaagagacatcaattagtaggtcattgtcacacacggatttaaagacaaatccaggcgcgaatcaaatgtgtgctaggatcaagtctcacacatatgatgactcgtgttacagaaacgaatgtcacatcttgactatataataggagttctgtacaaaatagctaaataatacatcatatgaagacaatgatccagcaaccataattgactggaagacaacgacctagacctcttatgaactcatcacgacatccttcatgctccttatcttgtggtacatgtccttgacctcggaggatgtgagtacaacatgagtgagctcacatacgttcatcgctcaacaagttgtggagaataatgtgcatgagctcacttacggtgggggctaatgtgaagtgtaaggcttactaaagaagatggttaaatctgagcattgcttttaaagttggtcaaagttttattagcagttattaagtataagtaaataccaacccaattaaataagatatcacaactaataataacacccacaatgcaatgaatatgacagattaaatttagttccataagttaatcatgcgagagtcatgagtcactcttgatcatgagcacggctgatatattagttttacactctgcagaggttgtgcatctttacccacaatacgtgttttccgattagccagggttagctaaacccttagacactttcaaggtgaatagctagggatccactgcaaggccttttcaaagtttcactagttcgagaaaatccgctatggattcaggaagaaggaagcatagaaatccctgttcgaaaagctttacggacagtccgacttgaggacctcactatactctgcagggaagcctcccctcttgc

SEQ ID NO: 104111 - DNA, 1539 bp, Zea Mays
tcccatcccatcagatccgcccgcccttcgccaacaggatgggagtagatacgatacgatacgagctcatttgtcgctgcttccttcatttcatctcttcttctccgctgctaggctcgtcctggccctgtcctagccggctagcccatgcctggaagatgatcggcgacggcaacaagcgcgatgcaaggcagttccggcgggggcgaactgagaacacatgagaataatgagatgagattgctcgcctcgcggtcgcccccgcagggccttccttgctgctgttccgcagggtggcggtctgggtggccgcccgtcgtccaggggagtatcgagacacgtacgcacgaattcaccaccacgcgatccagcatgttttgctgctgcagtgctcttcgtcacggttatatatatatatatatgtgatcgaactgccatgcatggtaagaaatcactgcgcgcttgctattaaaaaatatatctgtgtgttagcgataactttattaagctgtactcctctcaattccatattgcaagctattttagcttttcttacgcacatgcatagtttttgttagacgtctagatttgtatacattgtgtctatgggtattttttggttctcgatctactttcctactacaacttacttaaggttagtcagccaaattaaagaactaatcttattgtacagaaaaatagataaattatgtcaagttatcaaacaaagcttaaatacatgcatagttaaaaaaatatatgcatctataaaaatagtgttaactttttttatatatatacatgtatgtagttatgtattatgtctaaatatatgtatctaaaagaactaggataataggttacagtttaaaaatagagataataagcatgtttggttcggcttttttctgaagggttttttctaagaatctagcttcctagataatctatggtcacaagaatctatatatcgtgaggcttgcacgtagaggaagatgaagggatcggtttagaatttaggaggtggcggattcgtctcgtcagggtcccgactcagaggattctacattcatgttgatttgagtgatcacaaaggccttaagttgatccaatttttccactgcaagatcatcatgttttgattctttcttaaattcttcattttatatggtatcaattctagcatttaatagctttttatagtaggggattattttttcgtttcctctcaagctttctaggatcatattcaacatatgtacgggcaatattctttaccatctgggaggttttgggctgccgattcgataaagaaggcccaacgtaagaatgatccggtgcttcactagttgggctggctcatctgatggcgtgtgtttatttgtttcatgtatagactactacaatatatagaaacgtgtgttcctagaggggaaaaaaggtcgatttgtaccttcctaaatcatatcattatagtctgatttgtttcatgtatagactaccaccgcagggttcaagagtgtttggcttacacataga

SEQ ID NO: 104112 - DNA, 2696 bp, Zea Mays
cgccgccggggccgcatctctccccgttagggcccagctgaacactgtcgtcgcctccacctccgcgtttgggccaccgcaagagttcagggctcctctagggttcgagatcaaatccggccagcagagcagcatcctcagcaccacgctcaccatccccctctacctcggcaccggcgtcttcaccctcgggtacacaccacgccttttctcaccatctgagcattgccaaggagctcctctccatccccgatggcaccctcgccccaccaccgacgacgaatgggcgcttcagattcctgatcagcaggagagtcgttgaggctgagacgacgacacgaatgcggcaaggagcttcagattcactgccattagaaacttgcaggtgaggaaggagagggtccaagttcctgacctctgcatcgattgagagggtccaagttcctgacccctgcattgactaattatctttgagtttcatcattatgttgaaattagtatgcgttcaaaatactcaattgattctcacggctaccgtgcctcctagcgaaacttgcttttcgttggagtatctggcgtagtaatggaaaaaattaccttctccctttgagggttccagtccatttcgttctctataattgtcacctacccttcccgagcctacttttgttgctactataagaataagaatgaaaaaagcttcatctctatttgtttctgatatgaattgtgtagcttagagttgtctcttaacttacaatcttacattggtgtaaaacagtgaccacactaaaagcacaaatgcaaggttttacagaccagttgtgatgctgctaccactaacatgtacaaataggaaaggcaagaaaatggcttagagcaagtatttttaaagaaaaagtgatccatttaagaaacctttttattaagttacttctgataccagctcctcaatccgcgagtgtcttcagcttcactttctctatctgttgtacgcgggtgtctcttcgtcttgtgtgtgagttggatgagaactagacaactggtaggaaccactctctgtttcagtttctgtttgtgtttcacttcagttcaggttgtctgcgctcttctcttagggatcgagaatcatagggaggttcctcgcttctataagaaatatgtgcctttttgtttcattttccttgtggagttgtagttcagttcagttcatcttcgtgcatggggagtgcttggttcgattgttcacagccataggtgctacagattcgtctatggcgaagacagaagtttttgttttcatgatgttttcatggaagatggcgagaagctctccacccttatcatagttaactcttttgattaagtgattaaccaatttggtaacacatatttaatgttttagcttgtttggtttagatatggaggtccgtcagtaattttgtattttttttgtattatctttatctggaaactaagttgtatgtagtgacaggtaagaaatactgtggtggtttggacctcagttattggccagatgaagggcggaggccattatcagatcctcgtccacctttgggctactgctgataagaggacgagtgtcgtacacctctccaattccccccttcaatgtggtcagtgttgaatcatctacgtcatacagtgaacaagggcatactgatgagagaagggatgacatggatttttctcattcgagcatcaggttttgtgcgctgattatggtgtggtcgttggtgagactgcaacgtcctctgtaatcatctctctgacaagttagattatgtgctgaaatttctgttatttttgttggattgtattgttgtgaaagggggcatagtacgatgaattggggactgaaagagcatagcagagcagagggcctatgtaatataattttttatgtataaattgtgcaaaaacaaattacctcttttgggtttcaatcatttgacaacccttggaccctgacattatattagtttacttaccttgaccttgtgatgagttttggaatatttggaggaggttcacatggactgaacagcctgtttagtagctttgcttcagcacagtaaactatatttagaacatttggatggtaaactatttcaatcattgttgttacatggtatcagaggatttggcagtcaagtcaatgccacaattgtgagatattgaaatcgatgataatatatgtcagctccggcgaacgagaaggcgtaccgcagggccatgaagcgcgcctgcctagccgctgtggccgttctccgcgaggtccggtcactgagcgtttaccattttatggcccgctatctccctccttgtcatggcttggtatggcgtggcgcctggattttagccgctgatcggaattgtcgagtgcgtagggtacaattgggatcgggagattggggcacactgtccatttgcgttagtgagacgtggtgcattataaactgagtcgaccatggcctacttgttttcagtcctataaatttggggtttctgggtgactaattttattaccgtagcttcaggaggttgttgctgttcaaaggataacttcaggttgtgctggaccattcacgtttgcaccatgagcactgggacagtacgatgtgtcgatgtgatattttgatcatgtggaaatgcaatcttcagatccgtccttg

SEQ ID NO: 104113 - DNA, 93 bp, Zea Mays
gcaccgctgctggcctcggtcctgctctcgtcgctcctcatctccgcgtcgctcttcttctcctcctcccgcgtgctgctcctctccttctcg

SEQ ID NO: 104114 - DNA, 1845 bp, Zea Mays
tccaaagacagaaaaaaaagaaagggaaaaaagggggtctgctgtggactgtgtggtcccgcagggcgcaccattcacccgtcttccgccgagacaccctgcacggctcgccgagacttcagtttactggagcacgcaccgcagcgtctcccccttctgctcatcctccgtccctccgtcggaagggctggcgctaagggacgatccctccgtccgcccgtccgttcgacgggacctcggttggtttcgtcggtcgctgggaggacaggtgacggaacggtgatatgaggcggtggttatgttgtaactgccactatgacgtcgaggaagatgaccacgccaaggaacaggccaaagctcagagcaataagaccgactccaagcagaagtcttcaaagcctcctggtagtcaacctgagccagagttctcccctcctacaattgatgtccctgaattgtctttggatgatttgaaactaaagactgatgattttggatcaagtgctctgattggtgaaggttcttatggacgagtatatcatgccactttggacgatgggagacaagcagcagttaaaaaacttgatgcatctgaaaatgagcctaatgatgagtttctcaaacaggtctcactggcatcaaagctaaaacatgaaaatcttgttgagatgttgggttactgtgtcgatgggaattaccgtatactcgcatatgaatttgcaaccatgggttcgcttcatgatgttttacatggaagaaaaggcgttcaaggtgcgcagcctggacctgtacttgactggatgcagagggtcaaaattgctattgaggctgcaaaaggtatagaatatctgcatgaaaaggttcagccttcaatcatccatcgggacatcagatcaagcaatgtactgctgtttgaggatttcaaggcaaaaattgcagactttaatcttttgaaccaagcaccagatatggcagctcgtctccattcaactcgtgtattggggacttttggatatcatgctcctgagtatgctatgactggccagctgacacaaaaaagtgatgtctacagctttggtgtggttcttttggaacttttgactggaaggaaaccagtagatcacacaatgcctcgaggtcaacaaagtttagtcacatgggctactccaaggttaagtgaagacaaggtgaagcaatgtgtagatcccaggttgaagggagaatatcctccaaagggagtcgctaagcttgctgcagtggcagctctatgtgcacagtacgaagcagagttcaggcccaacatgagcatcgttgttaaggcgctttcgcctctccttcaacaaagacctgcaccaaccaccgaagagccagctccacaacctgggagctgaaaccagtcacatgtgatgggacccctaggcataagccatctccgcaaccattcaatcagcacattctataaatcattgagagtattttgggtatttgttctgtagcgttctcagttgggtatagcatacatgaacttgcccctgctgtttgtggccacctagttcgtggcttgatgttggcgccgcacaatggtatatgaagttggttcgaagtttttttttaccttctctataccaataccaagtgaccaactgtttgtaggttttcataattcgcggcttgaagaatagatgcaggatggtctggatttttttttgtccgtggcgtggtgttgctgcctgacctacgtgatgtacttcctctcttccaaatcccaattcaccttttcttgttctaagctagaattatcaaactttgacttgtttatataaatatatttatggacgtctacaa

SEQ ID NO: 104115 - DNA, 4227 bp, Zea Mays
ccgacactcctctccttctccctgaatttctctttaaaaccccccgctcgctgatcccctccccctcccactcccacccccaccgacgctgccgccgctggcacgcattcctgcttcctctcctcctcttcttcatcggcgcggcgcggcgcagcgctgggggagaatcactcggatggaaatctgctgctagagtgagaggagctaccggacagtatcctgcgcgccttcgtcggcggcggaggggggaaggaagcgatggaggcgagcgccgggctggtggccggctcccacaaccgcaacgagctcgtcgtcatacgtcgcgacggcgatcccgggccgaagccgccgccgcgggagcagaacgggcaggtgtgccagatttgcggcgacgacgtcggccttgcccccggcggggagcccttcgtggcgtgcaacgagtgcgccttccccgtctgccgggactgctacgagtacgagcgccgggagggcacgcagaactgcccccagtgcaggacccggtacaagcgcctcaagggctgccagcgtgtgaccggtgatgaggaggaggacggcgtcgatgacctggacaacgagttcaactggaacggccatgactcgcggtctgtggccgactccatgctctacggccgtggaggtgaccctaatggcgcgccacaacctttccagctcaaccccaatgttccactcctcaccaacgggcagatggtcgatgacatcccaccggagcagcacgcgctggtgccttctttcatgggcggtgggggaaagagaatccatcccctcccttatgcggatcccagcttacctgtgcaacccaggtctatggacccatccaaggatcttgctgcatatgggtatggtagtgttgcttggaaggagcgggtggagaattggaagcagaggcaggagaggatgcaccagacaaggaatgatggtggtggtgatgacggtgatgatgctgatttaccactaatggatgaatcaagacaaccgctgtccaggaaaattccgcttccatcaagccagatcaatccatataggatgattatcattattcggcttgtggttttggggttcttcttccactaccgagtgatgcatccggtgaatgatgcatttgctttgtggctcatatctgttatctgtgaaatctggtttgccatgtcttggattcttgatcaattcccaaagtggttccctatagagagagagacttacctagaccggctgtcactgaggttcgataaggaaggccagccgtctcaacttgccccaatcgatttctttgtcagtacagttgaccccttaaaggaacctcctttggtcacagcaaatactgttctatctatcctttcagtggactatccagttgataaggtttcttgctatgtttctgatgatggtgctgcaatgctaacatttgaagcattatctgaaacatctgaatttgcaaagaaatgggctccattctgcaaaaggtacaatattgaacctcgtgctccagagtggtacttccaacagaagatagactacttgaaagacaaggtggcagcaaactttgttagggagaggagagcaatgaagagagagtacgaggaattcaaggtcagaatcaatgccttggttgctaaagcccagaaagttcctgaagaaggatggacaatgcaagatggaaccccctggcctggaaacaatgttcgtgatcatcctggaatgattcaggtcttccttggccaaagtggaggtcttgactgtgagggaaatgagctgccgcggttggtttatgtttcaagagagaaacgaccaggctataaccatcataagaaagctggtgctatgaatgcattggtccgagtctctgctgtactatcaaatgctccttatttgttaaacttggattgtgatcactacatcaacaacagcaaagctataaaggaagcaatgtgttttatgatggacccactactaggaaagaaggtttgctatgtacagttccctcaaagatttgatgggattgatcgccatgaccgatatgctaacaggaatgttgtctttttcgatatcaacatgaaaggtttggatggtattcagggtccgatttatgttggtactggatgtgtgtttagaaggcaggcattatatggttatgatgcccccaaaacaaagaagccaccatcaaggacttgcaactgctggcccaagtggtgtttttgctgttgctgctgtggtaataggaaacacaagaagaagactacgaaacccaaaacagagaagaaaaagttattatttttcaagaaagaagaaaatcaatcccctgcatatgctcttggtgaaattgatgaagctgctccaggagctgagaatgaaaaagctggtattgtaaatcaacaaaaattagaaaagaaatttggtcagtcttctgtctttgcaacatccacacttctcgaaaatggtggaaccttgaagagtgcaagtcctgcttctcttctgaaagaagctatacatgtcattagttgtggttatgaagacaagactgattggggaaaagagattggctggatctatggatcagttacagaggatattctaactggtttcaagatgcattgtcatggttggcggtcaatttactgcatacctaaacggcctgcattcaaaggttctgcacctctgaatctttcagatcgtcttcaccaggtgcttcggtgggctcttgggtctattgagatcttcttcagcaatcattgccctctttggtatgggtatggtggtggtctgaaatttttggaaagattttcctacatcaactccatcgtgtatccttggacatctatccccctcttggcttactgtacattgcctgccatctgtttattgacggggaaatttatcactccagagctgaacaatgttgccagcctgtggttcatgtcactttttatctgcatttttgctacaagcatcctagaaatgagatggagtggtgttgggattgatgattggtggaggaatgagcagttctgggtcattggaggtgtgtcctcgcacctcttcgctgtgtttcagggacttctcaaggtcatagctggtgttgatacaagcttcactgtgacatcaaagggtggagatgatgacgaattctcagagctgtacacatttaaatggactaccttattgatacctcctaccactttgctcctattgaacttcattggtgtggtcgctggtgtttccaatgcaatcaataatggatacgagtcatggggccccctcttcgggaagctcttctttgcattttgggtgattgtccatctgtatcccttcctcaaaggtttggttgggaggcaaaacaggacaccgacaattgtcatcgtctggtccatcctgctggcttcaatcttctcactcctttgggttcggattgaccctttccttgcaaaggatgatggtccacttcttgaggagtgtggtttggattgcaactaggggatgtcagcacatcagctcccccaatcagcgtatgattgaagtatttttgccggcgtttgtccccatatttacagtgccccctctgtaggtaagagacaagaaatgtctcccgttccttttgatccatggtgaacctcgacctaatatctgggatacactggagggaaaatggaggctgcggcaatccttgtgcagatgggccgtggaatacagcatatgcaagtgtttgattgtgcagcattctttattacttgggcgcaaaactgatcgtctgagccgagcagcaaggtattttgatcctgcactgctcccgtgtacaaacttggttctcaataaggcaggcaggaatgtgcatctgccagtggaacagaggaacctgcacagtatttatgtacaaacttcattacatgttcgtctatactaggaaaaacagaatatttgtaccaatctatacttgattaaagtatgtaaaggagtccctttttttttcttgtgtactgtaatcgtcggagtaggttttgtgagattttcgtagaaaggttgaatgtgatataatatattttatggtcccatactagtgtattgagcaactctagcaaggcaactcttttggttacctattcttctatcctatttataaggataggggagaaaaaccaccagatctcttgttccttctcccctatgattagtagatacaatcagttataaaga

SEQ ID NO: 104116 - DNA, 3254 bp, Zea Mays
ttctctttaaaaccccccgctcgctgatcccctccccctcccactcccacccccaccgacgctgccgccgctggcacgcattcctgcttcctctcctcctcttcttcatcggcgcggcgcggcgcagcgctgggggagaatcactcggatggaaatctgctgctagagtgagaggagctaccggacagtatcctgcgcgccttcgtcggcggcggaggggggaaggaagcgatggaggcgagcgccgggctggtggccggctcccacaaccgcaacgagctcgtcgtcatacgtcgcgacggcgatcccgggccgaagccgccgccgcgggagcagaacgggcaggtgtgccagatttgcggcgacgacgtcggccttgcccccggcggggagcccttcgtggcgtgcaacgagtgcgccttccccgtctgccgggactgctacgagtacgagcgccgggagggcacgcagaactgcccccagtgcaggacccggtacaagcgcctcaagggctgccagcgtgtgaccggtgatgaggaggaggacggcgtcgatgacctggacaacgagttcaactggaacggccatgactcgcggtctgtggccgactccatgctctacggccgtggaggtgaccctaatggcgcgccacaacctttccagctcaaccccaatgttccactcctcaccaacgggcagatggtcgatgacatcccaccggagcagcacgcgctggtgccttctttcatgggcggtgggggaaagagaatccatcccctcccttatgcggatcccagcttacctgtgcaacccaggtctatggacccatccaaggatcttgctgcatatgggtatggtagtgttgcttggaaggagcgggtggagaattggaagcagaggcaggagaggatgcaccagacaaggaatgatggtggtggtgatgacggtgatgatgctgatttaccactaatggatgaatcaagacaaccgctgtccaggaaaattccgcttccatcaagccagatcaatccatataggatgattatcattattcggcttgtggttttggggttcttcttccactaccgagtgatgcatccggtgaatgatgcatttgctttgtggctcatatctgttatctgtgaaatctggtttgccatgtcttggattcttgatcaattcccaaagtggttccctatagagagagagacttacctagaccggctgtcactgaggttcgataaggaaggccagccgtctcaacttgccccaatcgatttctttgtcagtacagttgaccccttaaaggaacctcctttggtcacagcaaatactgttctatctatcctttcagtggactatccagttgataaggtttcttgctatgtttctgatgatggtgctgcaatgctaacatttgaagcattatctgaaacatctgaatttgcaaagaaatgggctccattctgcaaaaggtacaatattgaacctcgtgctccagagtggtacttccaacagaagatagactacttgaaagacaaggtggcagcaaactttgttagggagaggagagcaatgaagagagagtacgaggaattcaaggtcagaatcaatgccttggttgctaaagcccagaaagttcctgaagaaggatggacaatgcaagatggaaccccctggcctggaaacaatgttcgtgatcatcctggaatgattcaggtcttccttggccaaagtggaggtcttgactgtgagggaaatgagctgccgcggttggtttatgtttcaagagagaaacgaccaggctataaccatcataagaaagctggtgctatgaatgcattggtccgagtctctgctgtactatcaaatgctccttatttgttaaacttggattgtgatcactacatcaacaacagcaaagctataaaggaagcaatgtgttttatgatggacccactactaggaaagaaggtttgctatgtacagttccctcaaagatttgatgggattgatcgccatgaccgatatgctaacaggaatgttgtctttttcgatatcaacatgaaaggtttggatggtattcagggtccgatttatgttggtactggatgtgtgtttagaaggcaggcattatatggttatgatgcccccaaaacaaagaagccaccatcaaggacttgcaactgctggcccaagtggtgtttttgctgttgctgctgtggtaataggaaacacaagaagaagactacgaaacccaaaacagagaagaaaaagttattatttttcaagaaagaagaaaatcaatcccctgcatatgctcttggtgaaattgatgaagctgctccaggagctgagaatgaaaaagctggtattgtaaatcaacaaaaattagaaaagaaatttggtcagtcttctgtctttgcaacatccacacttctcgaaaatggtggaaccttgaagagtgcaagtcctgcttctcttctgaaagaagctatacatgtcattagttgtggttatgaagacaagactgattggggaaaagagattggctggatctatggatcagttacagaggatattctaactggtttcaagatgcattgtcatggttggcggtcaatttactgcatacctaaacggcctgcattcaaaggttctgcacctctgaatctttcagatcgtcttcaccaggtgcttcggtgggctcttgggtctattgagatcttcttcagcaatcattgccctctttggtatgggtatggtggtggtctgaaatttttggaaagattttcctacatcaactccatcgtgtatccttggacatctatccccctcttggcttactgtacattgcctgccatctgtttattgacggggaaatttatcactccagaggtaaagcttaatcaactatagttttgttgtttgagaaaaaacaaaactatagttttgtttgttgtggaatgtctgaaccttatgttcactgtttcatctgctgcagctgaacaatgttgccagcctgtggttcatgtcactttttatctgcatttttgctacaagcatcctagaaatgagatggagtggtgttgggattgatgattggtggaggaatgagcagttctgggtcattggaggtgtgtcctcgcacctcttcgctgtgtttcagggacttctcaaggtcatagctggtgttgatacaagcttcactgtgacatcaaagggtggagatgatgacgaattctcagagctgt

SEQ ID NO: 104117 - DNA, 919 bp, Zea Mays
gacggttctatttcggctttcttccacctcgggatagaacagagagaatggaggaagggtaggagaggatggccatggccatggccctgctcgaccgagccaagggagtcgtgcgaaggtggggttgcgcgcgttgaggaagctcgttggcgggcgagatctgcaggggctcaccggggaagagcagaggaggccggacgagcgagcgtggctggaaagctgagggcggacgtgcaaggagcagctctacagtgcggccccgagcgcagcggctgctcccaacctccatgccggaccgagcagggaagagcatggctggacgagggcgcgcggggggggggggggtctgcaagccgaggcgctcagcggctccaggccgcgctgccgcgccggccaggagcttggccatggactcgcctgcgcgggcgctggccaccggtgtgggctccgccggagacgggactagggacgcgtgggagaggcccagtcaccatgcctgtcgtgggcagcaccggccaacgagcctgtgagctgtgtaaacacgcaagcagggcctgcacgtggaggattgtacctgagcaatcgtcgatcgcgcgcatcgcttcaggaacgggcaccagggggcttcggaggacgtcactatgtgcttcagggacggtgattgccgacggcggttttggtcgatctggttgccgggtatagcggagggagagaggaaaggaagattggctgcgattgagaaagggggaggctggtaactgaaggggatcccgctcgcttgattcggatatagatatagggaattacatatctgcgtagagggcgagggaattttgtgagggaataggaaaactgcaagtgacactggggtggacgaggtaattgtgttaagcgaataagatgttttgcggagcttagg

SEQ ID NO: 104118 - DNA, 210 bp, Zea Mays
atggggaagaagcgggcgttcgtggcctgcatcgaagatgagcaggcgaacgcggaatcgggcacggcggcggcgattccaggcggctgtgtgtccgtgctcagtagagccgaacaatgcctgaacgaccaagttgaagagtgctggcgatggggcccatatgtcaatgaaaagagggagatgagaataagtggggaggggctgagctga

SEQ ID NO: 104119 - DNA, 201 bp, Zea Mays
atggaggcggcgagcaacactctggccatggtgaaggagcatgggaggccagcagcaggctgtgagaggccaccagcgatagaaaagaagcccgagggcacggtgggcgctgaggccggcgaggcggagcagaaggccggcacaagcatggggaagaacatcacaaccgtcgagatgaggcagggggccgacgcgggctga

SEQ ID NO: 104120 - DNA, 993 bp, Zea Mays
gttagtgcttctgcatctcatcacagatcctgaatacttcctttgtcaaagctttcacttgtttgaaggaagacgtcggcctataaatcgttatcatgcagcctgctggaatgccacagcgggacaggagcatggggatgagcaggcgcaagatgacagcaagtggcgccggatcccgacgttcggcgactggaacctgcgggacgacatgcctgtcacccaatacttgcaagcagggacttcttcatcgttgtgtcgccggcagagaaggacgacaacgaggatctgttcaaggtgccccagtgttccctgccaagccctacaactacaagaaggtgaaacaaaataggacgttgcattagtttctctcgccaattaattacactcaggggggaaaagtttctttcaccagctctgaagatagtatcagttaacactgtttcatatctccatttccatatacattatacccaatcagcactagcgagcgatgagaaagatactgaacaattctatgatctaagcatggaattataatcattgaaactctgctgctactgttacttggttcatatgctgatatatacatccaagctcgcccgcactgccacctccacagtttatcatggtgcttttgaccctgcttgacagaaccagtagtgatgtatatataggtcattttacctattttgcatgaatatggcaatgtttagttgtaaggctgtataaatgggatttatgattgtgacgaaaactaagaactcatgaatttgttttagttctaggagctagctcaggcttacgaggtccttagtgatcctgaaaatcaagagatctatgatggtagtgttcttaatcacttttatgctttttcttagtgatgaactgaagttttttaatctttggacatgtctttcccagatagagacaacataatcctacacctgttttattattggagtaatgcggtgctacatgtatggttctcttctt

SEQ ID NO: 104121 - DNA, 962 bp, Zea Mays
atttttagacgacacccctacccgacccgatcggcgggagagcacgagacgccagcgccatccatcgcggcaaaagccgagacgacccaggaatctcggcaccgtcgcccccctttctctctcgctcaaaagttgctgctggagccctctcccctctctccgaccaccaaccatggatgaggcgcaagttgtggagtcaaaggatggaaccatctcggttgcttctgcatttgctggttatcaggaagctgtgcaagacagggatcacaaattcttgacaaaagcagtggaagaagcatatcgaggagtcgattgcggtgacggaggtccattcggagcagttgtcgtctgtaatgacgaagtagtagtcagctgccataacatggttctgaagcacactgaccctactgcgcatgctgaagtaactgcaattagagaggcttgcaaaaagcttgggaaaattgagctctcagactgcgaaatttacgcgtcctgcgagccatgcccaatgtgctttggtgcagttcatctctcccgaatcaagaggctggtttatggggccaaggcagaggctgccatcgccattggatttgatgacttcattgcagatgctctgagaggcactgggttctaccagaaggccaacttggagatcaagaaagctgacggcaatggtgcattgatcgctgagcaagtctttgaaaagactaaagagaagttccagatgtactgatgctgagcagaagagagatctcagatttgtacaatgcttactcataaggacaagaaataatacagtgcccaaatgtccattgtttcgggaaaaaaatctcaattccactgttcaacattttgatgatgcctgaatttcttgttaacagacacaagattgttatttgctgtaaaatgtgcagttgatggaatatactttctccctgtctgatggtgccatttagcacatt

SEQ ID NO: 104122 - DNA, 760 bp, Zea Mays
gcagtaataataattattagtctaattcccttgtcgttgcacagctttacctgctggcagaagttcaacattgccattgaccaatgacctctaaggtcacagtttcaccatttggtaaaatttgcttttatgtaacagcagcaagaaaactgatctaagacacgcattttggtgaattttgcagctgtgcaagacagggatcacaaattcttgacaaaagcagtggaagaagcatatcgaggagtcgattgcggtgacggaggtccattcggagcagttgtcgtctgtaatgacgaagtagtagtcagctgccataacatggttctgaagcacactgaccctactgcgcatgctgaagtaactgcaattagagaggcttgcaaaaagcttgggaaaattgagctctcagactgcgaaatttacgcgtcctgcgagccatgcccaatgtgctttggtgcagttcatctctcccgaatcaagatgctctgagaggcactgggttctaccagaaggccaacttggagatcaagaaagctgacggcaatggtgcattgatcgctgagcaagtctttgaaaagactaaagagaagttccagatgtactgatgctgagcagaagagagatctcagatttgtacaatgcttactcataaggacaagaaataatacagtgcccaaatgtccattgtttcgggaaaaaaatctcaattccactgttcaacattttgatgatgcctgaatttcttgttaacagacacaag

SEQ ID NO: 104123 - DNA, 601 bp, Zea Mays
gttctgtaatcttcctggcagttaattccattatttgctgtgtggtttgatggttgatgtatgtccatattttaggcttgcaaaaagcttgggaaaattgagctctcagactgcgaaatttacgcgtcctgcgagccatgcccaatgtgctttggtgcagttcatctctcccgaatcaagaggctggtttatggggccaaggcagaggctgccatcgccattggatttgatgacttcattgcagatgctctgagaggcactgggttctaccagaaggccaacttggagatcaagaaagctgacggcaatggtgcattgatcgctgagcaagtctttgaaaagactaaagagaagttccagatgtactgatgctgagcagaagagagatctcagatttgtacaatgcttactcataaggacaagaaataatacagtgcccaaatgtccattgtttcgggaaaaaaatctcaattccactgttcaacattttgatgatgcctgaatttcttgttaacagacacaagattgttatttgctgtaaaatgtgcagttgatggaatatactttctccctgtctgatggtgccatttagcacattaaa

SEQ ID NO: 104124 - DNA, 535 bp, Zea Mays
actttactgttctgactgattgcctaaaatgattaagcatagctggagcttattgagtgttgtctaaacatgcctactcctcttgcaacagaggctggtttatggggccaaggcagaggctgccatcgccattggatttgatgacttcattgcagatgctctgagaggcactgggttctaccagaaggccaacttggagatcaagaaagctgacggcaatggtgcattgatcgctgagcaagtctttgaaaagactaaagagaagttccagatgtactgatgctgagcagaagagagatctcagatttgtacaatgcttactcataaggacaagaaataatacagtgcccaaatgtccattgtttcgggaaaaaaatctcaattccactgttcaacattttgatgatgcctgaatttcttgttaacagacacaagattgttatttgctgtaaaatgtgcagttgatggaatatactttctccctgtctgatggtgccatttagcacattaaattcgagtatgaggtccctttcct

SEQ ID NO: 104125 - DNA, 135 bp, Zea Mays
atgtcatctcaatgctgtgttgtaatgggtaagaaagaatcggaagtctgggtggtacacttggcgatggcgaagccagtcatctgctgtctgcatcaacgaagctacgagctgatgctcctcaggcctatttga

SEQ ID NO: 104126 - DNA, 1534 bp, Zea Mays
ctcatcaccatcgcctggaaccacagaccacaaaggaggggacacacacacacacacaccgtctccgcccgcccgccgcgacgcgccatggctatggctcgctccgtcgcgcacctcttctttcccatcctccttatctccaccgcgcccgccgtgcgggccatcaccgacgccgccggcggccccggatacctccaggaggcgtgcaacaagacgctgttccccaaggtgtgcatgcacgcgctcaaggacaacccagagtgccaggcggagacggcggtcacgccgcgccggctggccgagctgctcgtgtacgtgtcggccgaggtgggcatgaccgtggccgcgttcgcgcaccacgagctcaacgccatcaaggacgacgacgtcctgtacaagtgcatcgacacctgctccgaggacatcgaggaagccgtggcgcacctcagcgccctctcccgcgacttctccgacgccaggttcctcgaggtcaagtcctggctcacctccacgctcggcggcaccgccacctgcgaggacgcctgcaaggacgcccccgtcagcgacatcaagaacgtctgcataaccaagagcttcgagtttgagaagctgctgcgcgtcacgctggacctcatcaccgaggcttccggctccatgtcggccgaggtcgcactgccgccgtcggatgcgtcggcgccgtccggagggtacggctcgtcggctggcgcccccgcctacggcgccccgtctcctgatgccccagcttatggcgccagcgtaccagcgccagcgccgacctcggggcagagcactgcttcgactgcatgagtgatgatatcgtggcggcacacacgcatcttggtcactcctatgctatgcatgcatgcttcgaattaccgaccgaaaagtctggttcctcggccaatttctcgttcctggtcagctaggggaaccatttctcggcccggtatcacattttaaaaatatgaaagtcaaattttttttgttcaaaacgaaatttcggaacagtgaagcctgctccttactatgttccaagtattttgctctctcctccatcccacaattttcgagcagtatgtcagcttagaattaggattttttggtgctgcatcattgatgcaaatgaatataatgaggccagaaaatggcacagcatgttacttttgacatgttgcagcgataagccatcatcagttgtcccccccccccccccctaaaaattacaatacacttccattccgaattaaaactttaactgttacttacatagttacatttgtaatttattcaaacacttaaaatcatacttatatcatcaaactttatacttttgttcatagggaaaccattggttcaagattatgatcaaatttaaaatgtgtgtgtgtctctcgcctccggtgactttgtgaatctcgagatctgtcggttcagtccttcgaagatgttcatagggatatggtttatatgcatagtatgtttataggggtcagtgtatgtgtacgtgttatgg

SEQ ID NO: 104127 - DNA, 645 bp, Zea Mays
aataaagcgctacttatgaaatgcctccataaattctataatagagtcaacatcccgtgggtcaacatcatctgggacactcactacaacaattctctaccttcagctaaaccagttggttcgttttggtggaaagatattctcaaaattcatgatttatttaaggaaattgcccgagtggaggttggaaatgggaaaactactctcctctggcatgatcgatggaatggacagcgcacatctgaaagattcccggagctctggtcttttgcatctgtcagggagattaacattcatcaagctcggttggcttccccgaatgaattgttccacactcccctatctgctgaagcgtttggccagttactttcatttcaggacattcttgctgatttccaattgcatgatcacaatgatatttggcgttgcagtggctcttccaatctgttttcatctcagaaggtctatgctcacttgattggcgcccagcagtcgcaccctctcttctcttggttatggaaatctaaatgtcaacctaagcacaaagtgttcttctggttattgctcaaagacagattgaatacctgctccctcctcaggcgtcgttcaatgcccttggattccttcacctgcgataactgcatc

SEQ ID NO: 104128 - DNA, 420 bp, Zea Mays
actcaccacaattaatcgcaccgccacctttaccaccgagagaggaacgcgaacaaccaacgatcgcctcatcgccatggcacgctctgtccccatcgcgcctctgctcctgctccccctcctcctcctcctcgtctccactgcgtccgctgcacggaccgtgggcgacaccgtgcaggacgcgtgcagcaagacacaattccccaagatctgcgtggacagcctcaccgcaaagccagagagccagaaggcgaccccgcgccggctggcggagctgttcgtgacatcgcggccgagagggatccgggatggccacgttcgtgcacggaagtacacacgcaggacagcacgtgtcagtgctacgacagctgctcgacgacgtcgagagtcgtcgcccacctcaacggcctcgttcgggag

SEQ ID NO: 104129 - DNA, 442 bp, Zea Mays
tattacattggaacaatgtggcacaatgctttttgttgcagaacagctgcggttttcagatgcacagatggaaagcttccggattcattttggaagaatagaggaaggcgcggacgaagaaggattcgaggaactctagtcagttctatgacgaccattgatgtaactaaggtttgatcgcggtttgggctagaatccctgccagtttttattgttggaacgtagaacaatcgcctatcgtttatttttcatttagcttgttctgtaacgtttttttttggccttttgtttatgttggagcaaatgggtgaccgaactgaacatacgcatggtgctttactgcttattgtatttgtattcattgacagagaacttattgtatttgtattgatgtaaaaagaaaacataagcatgtcagtcgaagtatttaacgaagaaagca

SEQ ID NO: 104130 - DNA, 1341 bp, Zea Mays
gtcttgagcacgagagtgcaaaagagcgaccagaaaagctggccggtcgctggcaacagcacgcattcctactctactccggcactgcacactcacgagctgtggatagctgatactctcccccggcgccaagaaaccacgaaatcgccccccacacacaccttcccttcggtccatcccgatcttaccaagaatccgagatccgcctgcgacagctagcggtcctatcttgatccgatggtgtcaccggcgccgggatgtagggattcgggggaggatggcggcaaggcggagtggctgatctacgcctttgtcgcgcgcggcatcgcggtgctggcggagtacacggaattcaccggcaacttccccgccatcgccgcacagtgcctgcagcgtctacccgccgggtcgtcctccgccagcaccgggcctgacggccgcggcggcgcgccggtacggttcagctatgcatgcgacgggcacacattcaacttcctcctgcaccgaggctacgcctattgtgtagttgcgaaggaatccgttccaaagaatgtctcagtggcatttcttgagaggttaaaggatgacttcatgaagagatatggtggcggtaaagctgatacagctcttgcaaaaagtctaaataaagaatatggaccagttataaagcagcacattcagtatgttcttgatcattcacaggaactagataaaacgttaaaagtgcaggcccaagtttcagaagttaaaaatatcatgttaaacaacatagaaaagactttggaccgcggagaaaagttgagtgaactccaagacaagacttctgatctacatagtcaggcccaggagttcaagaaacagggggtgaagattcgtcggaagacatggctgcagaacgtgaaaattaagttggtgattcttggaatccttttgctccttgtgatcatagtctgggtatctgtttgtcaaggctttgactgcaccaagcatgaaacatagtagtaataagaatggtgcagcacgactgtggcagagctgcgatggatgcgagtttgtgctggtgaggtcaagtgtgtacccacatatgctttggctctcaagttcgattccaccagacaagtatcacggtacaaatgtaagtccgagctggtctttgttgcacgccggaggtaggtgtacttgcaatgcaagactagcatgatataaagtgatagcatggttccttctgtactagctgaattcgctagaatctagcataaaatgcatttcaattaccacttatttttgctcaacctattaacatatatagggcggactgagttcaagatatttagtgttagc

SEQ ID NO: 104131 - DNA, 164 bp, Zea Mays
cttaccttctgattctcacaagtcaaatctcaccacccaactatctaaacaagtatatgtgataaaaagtatgtccacccacacttggtctcgatcccaatgcaaatggatgcatgaagtgagagttcaagcccagtaggatggatgacaactcaatttgcatg

SEQ ID NO: 104132 - DNA, 969 bp, Zea Mays
aggagctgcccttcctcgtcttcctcgctcgtcaagtcatcagcatctcagcacccaaagtcgacaaaattgaaggacacctagccggcaaaacatgagggggaaggtcgacgagtgctgggacgagtgctgctacaactggggcgagtggaaatactgcctgctgtgcctcggcatcgtggtggccatcgtcctcatcgtggtgttcgtcgccgccttcggtttcgtgcgccacatcgacgtctccgtggacgacgcttcgctgacgcggttcgagctggcgacgtcgccggtgacgtcgctgtcgtacaacctgtccgtgaccctggtgatccgcaacccgaactgggccatgagcctcaagaacaccaagccgctggaggcgcagtacaagttcgacgaccagatgttcgaccgcttccagctggccgacaagggcgacaagcaccccgccggcaagaccagagtgtaccacatcgcgcccccgggcacgacgagtagcgtcatgctcgggaacgccggcgaggccgagttccggaaggagaacgccacggggacgttccaggtggaggtggccgtcgccggggaggtgcgctacacggcgcgctacaccaagtgcaagatccaggcgtcgtgcccgctcaagctgcagctggcgccgccgggcaccgccgccgtcgtgttccagaaggtcacgtgcaagctcgccaaggcggagaagaactgctagatctagcttgcatatatagctggtggcatggcatggcacacaagccttattgcattgcgttcgtgttgcgcggttttgtgttcgtcgatcggtggtggcgacgatttgattatgtttgttgacttttgttctgattgctgtgtgtggtgtgctccgttaatcaggatttctgctgtctgcacccgtgtgattgcaaatttgcgcggaatgtgatctgtttcagctcagtttgtctgata

SEQ ID NO: 104133 - DNA, 1438 bp, Zea Mays
gggacacagcacaagaacactcctagctgaagatctcgagtgcaacgcaacgttggcgcttggcggccagtagtagcagcaaacttagcgtcgctccttcctactagacgagagatcgagaaaccatggccaagctccaagtcactcctggcgccgcgttcaccgagtgcaatgaactcaacttccagggcctgtacatgtaccacacgcccctgggtcccaaggccaaccaagctgcgatcctagagagcaaggccaagatcggcatcggtgccaccgtggttaacaactgggcagtgtatgacgggccagggccaggcgccaagctcgtcggccgtgcgcagggcttgcacatcctagccggaaactgggtcaactcattcaccctggtgttcgaggatgaaaggttcagtgggtccacgcttgaagtgaggggcataacggttgaaactggcgagtgggctgttgttgggggcaccggccagtttgctatggcgaacggcatcatctccaagaagttacacgagcagagaagcgacgggaacgtcatagagcttagtgtccatgctttctgcccgctgctcaaagggaaaaggggcggtgctgtgacaaaggttgggccatggggcggaagcggagggtctccaatggagctgacagagacggagacgcccatgcgtctggagagcatcaccgtcagcagcggcgtggccgtcaactccatctcattctcctacgtcgactctgccggccacaagcgctctgctggtccctggggtggttccggtggacagcctgatcaggtccagctcgccgagtctgaggtggtcacacaagtgtccggaacatacggcaccatcgacgacgacgaccgcaccgtgataacctccattaagttcgtcacgaaccttgacaagacctacgggcctttcggagcgtacggggacggcgacgacacctccttcaccgtccccgtgcagccggggagtggcgccatcgtgggcttcttcgcccgcgttggcggggccggggactacctggacgccattggcgtctacgtgcgccccctctaaaaaagctttgtttctgatgtgaatcaagcagctgcatgcatgctgctctactccacacagagtccatcaccacctgctgcttgaaatgcgtgcgtgcgtgcggcttccagttgctttatttcgtacctgagtgttgtgttgtggtgtgtttgctcatgtacttcggtacgttaattgcttggtaaactctggtcagtgatgtgtgtttgcctttgtcatggatttcgacggaataataaagacctcgagtagaagaggtcagggttttttcactcatgctcctggtattattattcaactctgttatccctttaatttctatttttatatattaaccgcgggagcaattcttgcctcctgttcga

SEQ ID NO: 104134 - DNA, 1432 bp, Zea Mays
gggacacagcacaagaacactcctagctgaagatctcgagtgcaacgcaacgttggcgcttggcggccagtagtagcagcaaacttagcgtcgctccttcctactagacgagagatcgagaaaccatggccaagctccaagtcactcctggcgccgcgttcaccgagtgcaatgaactcaacttccagggcctgtacatgtaccacacgcccctgggtcccaaggccaaccaagctgcgatcctagagagcaaggccaagatcggcatcggtgccaccgtggttaacaactgggcagtgtatgacgggccagggccaggcgccaagctcgtcggccgtgcgcagggcttgcacatcctagccggaaactgggtcaactcattcaccctggtgttcgaggatgaaagtgggtccacgcttgaagtgaggggcataacggttgaaactggcgagtgggctgttgttgggggcaccggccagtttgctatggcgaacggcatcatctccaagaagttacacgagcagagaagcgacgggaacgtcatagagcttagtgtccatgctttctgcccgctgctcaaagggaaaaggggcggtgctgtgacaaaggttgggccatggggcggaagcggagggtctccaatggagctgacagagacggagacgcccatgcgtctggagagcatcaccgtcagcagcggcgtggccgtcaactccatctcattctcctacgtcgactctgccggccacaagcgctctgctggtccctggggtggttccggtggacagcctgatcaggtccagctcgccgagtctgaggtggtcacacaagtgtccggaacatacggcaccatcgacgacgacgaccgcaccgtgataacctccattaagttcgtcacgaaccttgacaagacctacgggcctttcggagcgtacggggacggcgacgacacctccttcaccgtccccgtgcagccggggagtggcgccatcgtgggcttcttcgcccgcgttggcggggccggggactacctggacgccattggcgtctacgtgcgccccctctaaaaaagctttgtttctgatgtgaatcaagcagctgcatgcatgctgctctactccacacagagtccatcaccacctgctgcttgaaatgcgtgcgtgcgtgcggcttccagttgctttatttcgtacctgagtgttgtgttgtggtgtgtttgctcatgtacttcggtacgttaattgcttggtaaactctggtcagtgatgtgtgtttgcctttgtcatggatttcgacggaataataaagacctcgagtagaagaggtcagggttttttcactcatgctcctggtattattattcaactctgttatccctttaatttctatttttatatattaaccgcgggagcaattcttgcctcctgttcga

SEQ ID NO: 104135 - DNA, 630 bp, Zea Mays
gcgtaaacgcgtccctcctccgcctgggatcgcactcgcaccatcgccccctcctctgcctccacgccgacgtcgtgatgcctcagccctcctccgcctgacccgacctgttggctcgaaaacgcatccaccactcggagcatcttggcctcccgcaggggcggagccagacccatgaccgccagggcatggcctggggtgtgtgtctcattacctccttctccctgctacacccgctggctgcggctccacgtcgccagcctgctggtggtgcggcaagaggtcagctcccttctggttttggcttcccacaatcccacggcttaggggctaccagtaccaggtagcagcggactgtagcaccttgaaaggatcgatgcaaagcttgcgttgttgaacaacaaatatctggtctgatgcggtgatgcctcatacatcaatgctaggagactggtctaggcatttacagagcataccgtggtttcgaatccccttgattccttgaacattacaggttcaggctaattctccccttcatgttgaggccttagcctttttcctcgatctccatcttattgttctttcaactatattcataatttattctttgtcactaaccagttgaccaaa

SEQ ID NO: 104136 - DNA, 2501 bp, Zea Mays
cagcacctccacgcccccagctgcctgcacatgtgagcggccgcggagggcgagagctaggtacatttcgttgtgccgccgctgcggggtccgtgcgcgaccgagatccggtggggcggtggacagagatggaggcgagcgcggggctggtggccggctcgcacaaccggaacgagctggtggtgatccgccgcgagtcaggagcgggcggcggcggaggaggcggcgcggcgcggcgggcggaggcgccgtgccagatatgcggcgacgaggttggggtgggcttcgacggggagcccttcgtggcgtgcaacgagtgcgccttccccgtctgccgcgcctgctacgagtacgagcgccgcgagggctcgcaggcgtgcccgcagtgcaggacccgctacaagcgcctcaagggttgcccgcgggtggctggggacgaggaggaggacggcgtcgacgacctggagggcgagttcggcctgcaggacggcgccggccacgaggacgacccgcagtacgtcgccgagtccatgctgcgggcgcagatgagctacggccgcggcggcgacgcgcacccggacttcaaccccgtccccaacgtgccgctcctcaccaacggccagatggttgatgacatcccgccggagcagcacgcgctcgtgccgtcctacatgggcagcggcggcggcggcaagaggatccacccgctccccttcgcagattccaaccttccagtgcaaccgagatccatggacccgtccaaggatttggccgcctacggctacggcagcgtggcttggaaggaaaggatggagggctggaagcagaagcaggagcgcctgcagcatgtcaggagcgagggtggcggtgattgggatggcgacaatgcagatctgccactaatggatgaagctcggcagccattgtccagaaaagttccaatatcgtcaagccgaataaatccctacaggatgattatcgttatccggttggtggtgttgggtttcttcttccattaccgagtgatgcatccagcgaaagatgcatttgcgttatggctcatatctgtaatctgtgaaatttggtttgccatgtcctggattcttgatcagttcccaaagtggcttccaattgagagagagacttacctggaccgtttgtcgctaaggtttgacaaggaaggtcaaccctctcagcttgctccaattgacttctttgtcagtacggttgatcccacaaaggaacctcccttggtcacagcgaacactgtcctttccatcctttccgtggattatccggttgagaaggtctcctgctatgtttctgatgatggtgctgcaatgcttacgtttgaagcattgtctgaaacatctgaatttgcaaagaaatgggttcctttctccaaaaagtttaatattgagcctcgtgctcctgagtggtacttccaacagaagatagactacctgaaagacaaggttgccgcttcatttgttagggagaggagggcgatgaagagagaatatgaggaattcaaggtaaggatcaatgccttggttgcaaaagcccaaaaggtacccgaggaaggatggacaatgcaagatggaagcctctggcctggaaacaatgtacgcgatcatcctggaatgattcaggtattccttggccaaagtggtggtcgcgatgtggaaggaaatgagttgcctcgccttgtttatgtctcgagagaaaagaggccaggttataaccatcacaagaaggctggtgccatgaatgcactggtccgtgtctctgctgtcttatcaaatgctccatacctattgaacttggactgcgatcactacatcaacaatagcaaggccataaaagaggctatgtgtttcatgatggatcctttggtggggaagaaagtgtgctatgtacagttccctcagaggttcgatggtattgaccgtcatgatcgatatgctaacaggaacgtcgtcttttttgatatcaacatgaaaggtttggatggtattcaagggcccatctatgtgggtactggatgtgttttcagacggcaggcactatatggttatgatgctcctaaaacaaagaagccaccatcaagaacttgcaactgctggcccaagtggtgcctctcttgctgctgcagcaggaacaagaataaaaagaagactacgaaaccaaagacggagaagaagaaaagattatttttcaagaaagcagaaaacccatctcctgcatatgctttgggtgaaattgaggaaggcgctccaggtgcagatattgagaaggctggaattgtaaatcaacagaaactagaaaagaaatttgggcagtcttctgtttttgttgcatcgacacttcttgagaatggtgggaccctgaagagtgcaagcccagcttctcttctaaaggaagctatacatgttatcagctgcggctatgaagacaagactgactggggaaaagaggtctatataccatatataacctga

SEQ ID NO: 104137 - DNA, 1611 bp, Zea Mays
atggacgccgcgcaggtgcccgcggcagtggtggtcgacgtcggggcgctcaccggaccgatagggagcgaggcccccgctgcgccgaagttccgtggccagcattcagcaaaactgggacgtgcgctccgcatgtttgtggaaatgcctacggccattgcacatagtagcagaattccgattgcagggtacatgaacatgtatgatgctaagggcccagcatggaaaaggttcttgtaccacgttggaccagggtttatgctcctctgggtgaccttgattggcctcatcttcgcgctaattattcagtcactatctgctaatcttggagtagtgacagggcggcatcttgccgagctatgcaagacggaatatccagcatgggtgagaatctgcctatggctgctagcagagttagctgtgattgctgcagatatcccagaagttatagggacagcttttgctttcaacatcttgttccacgtgcctttgtgggtgggggttcttatcactggctcaagcacacttcttctccttggactgcaaaaatatggggttaggaagctggaacttttggtcggcctattggtgttcgttatggcagcatgcttcttcatagagatgagcatagtgaagcctcctgcagaagaggtcatccacgggctattcatccccagtctgagtgggccgggcgccactggagacactatagcccttcttggggctcttgtgatgccgcacaatctattcttgcactctgccctggtactgtcaaggaacactccgtcatcagtaagaggaatcaatgatgcttgcaggttcttccttcttgaaagtggtgtagcgatgttcgtggcactaatcatcaacatatgcatcatctctgtctctggaactgtctgtaactccagcaacgtctcaccagatgactctgcaaaatgcagtgacatcaccttggactcctcgtccttcctcctgaggaatgtgctaggcaacagcagtgcggttgtgtatggtgtggctctcttggcttgtggaataagctcttccatcactggtacttacgctgggcaatacatcatgcagggtttcttggacatcaagatgagacagtggctgaggaacctgatgactcgcagcattgccattataccaagcttaatcgtcgccatcatcggcggatccagcggtgcgggccgcctcgtcatcattgcatcgatgatactgtcttttgagctgccatttgctctcatccctctcctcaagtttagcagtagtagcagcacgatgggccaacataaaaactctatatttattattgggttctcatggattctcggttttgttattattgggataaacatctacttcctcagctcaaaatttgttggctggatcctccacaattcactgcaaatctatgctaacattctcattggcattgtcgtgttccctcttatgctgatctacgtttgtgctgtgatctacctcacgttaaggaaggagaccatcaagttcgtggcttgcggtgagctgcagaccattgagaccgacaaatcaaagcttgccaatggcagcaacatggaggaaaagaaggatcagcttgtttag

SEQ ID NO: 104138 - DNA, 260 bp, Zea Mays
ttttattgttttttgagacatcactttgactacttacttttgatcactatattattatatacgcaaataaatctaaacttttgaaagtattattgaagacaaacctaaccataagccatatcattctcatattatgcatattaatattttcagacctatcacctatcaatggtcaaattttataaagtttgacaccaagtctaggacatcaaataagaaactgggagtaaaaaagagcaaattatcaaggcccaacaacc

SEQ ID NO: 104139 - DNA, 1118 bp, Zea Mays
atttcctttccagcgaccggcgagcgcacagccacacgcacagaggggtgttgccgtgtagcagagcagctcgcgccatgtccctgtccgtcggcggcgcgcggacctctctcctcccttcttcgttcaccgcctcttcatcccgcccgcgcttcctcgcgctccctctccaccgccgctcgcacggctccctcacctcgctgccggccgcgtgcaggcggcggctccgggtgcgcatggcccggacggagtccaccggcgtcaccatcggcttccgcgcgccggatttcgagctccctgagccactgactggaaagctctggacgttggatgacttcgagggcaactctgcactgcttgttatgttcatatgcaaccactgtccatttgtaaaacatctgaaaaaggacatcagcaagctcgcctctttctatgtggagaaaggacttggtgctgttgccatatcgtccaactcagttaggacgcatccccaggatggcccagatcgcatggctgaagaagcagagctgttcaaatatcctttcccatatctttacgatgagtctcaagaggtagccaaggcttttggagcggtctgcacgccagagttctacttgttcaaaaaggatggccggaggccttttgaacttttctaccatggacagttcgatgactcaagacccagtaacaacgtgcctgtaaccggaagggacctaagccgcgcgattgactgtgcgctcagtggccaagaactgccctttgtgcaaaagccaagtgtcggctgcagcatcaaatggcacccatgaggtgcccaccttgttcggcatttgattcggcccaggctcacaggggctgaagatgagacagatctgtgggggagaaacagaaacatgggaacttctcttgtgtgacggcgaaatagtgtagcgctagcgcagcaaccagcaaaaggctcatgtaaagaattgttcacgaaacagaagagcttcacttctaccttctgtaggacatggtcatcgcaaaaggcgttggtattgtttcctgctggaagtaatttctgccgggatggatattcattttcaggatgaattttttttaaaaaaaaataaggtcaaaaa

SEQ ID NO: 104140 - DNA, 1268 bp, Zea Mays
atttcctttccagcgaccggcgagcgcacagccacacgcacagaggggtgttgccgtgtagcagagcagctcgcgccatgtccctgtccgtcggcggcgcgcggacctctctcctcccttcttcgttcaccgcctcttcatcccgcccgcgcttcctcgcgctccctctccaccgccgctcgcacggctccctcacctcgctgccggccgcgtgcaggcggcggctccgggtgcgcatggcccggacggagtccaccggcgtcaccatcggcttccgcgcgccggatttcgagctccctgagccactgactggaaagctctggacgttggatgacttcgagggcaactctgcactgcttgttatgttcatatgcaaccactgtccatttgtaaaacatctgaaaaaggacatcagcaagctcgcctctttctatgtggagaaaggacttggtgctgttgccatatcgtccaactcagttaggacgcatccccaggatggcccagatcgcatggctgaagaagcagagctgttcaaatatcctttcccatatctttacgatgaggtctggccgcaccgtgccttggattcagagatttttcagcgaccatgaagatgcttttttaggccgagtgatatcctatcctttttcagcattgaagttcttcctcgtgactaattttgtttatttttttgttaccaccgcaacctacagtctcaagaggtagccaaggcttttggagcggtctgcacgccagagttctacttgttcaaaaaggatggccggaggccttttgaacttttctaccatggacagttcgatgactcaagacccagtaacaacgtgcctgtaaccggaagggacctaagccgcgcgattgactgtgcgctcagtggccaagaactgccctttgtgcaaaagccaagtgtcggctgcagcatcaaatggcacccatgaggtgcccaccttgttcggcatttgattcggcccaggctcacaggggctgaagatgagacagatctgtgggggagaaacagaaacatgggaacttctcttgtgtgacggcgaaatagtgtagcgctagcgcagcaaccagcaaaaggctcatgtaaagaattgttcacgaaacagaagagcttcacttctaccttctgtaggacatggtcatcgcaaaaggcgttggtattgtttcctgctggaagtaatttctgccgggatggatattcattttcaggatgaattttttttaaaaaaaaataaggtcaaaaa

SEQ ID NO: 104141 - DNA, 1349 bp, Zea Mays
agcgaccggcgagcgcacagccacacgcacagaggggtgttgccgtgtagcagagcagctcgcgccatgtccctgtccgtcggcggcgcgcggacctctctcctcccttcttcgttcaccgcctcttcatcccgcccgcgcttcctcgcgctccctctccaccgccgctcgcacggctccctcacctcgctgccggccgcgtgcaggcggcggctccgggtgcgcatggcccggacggagtccaccggcgtcaccatcggcttccgcgcgccggatttcgagctccctgagccactgactggaaagctctggacgttggatgacttcgagggcaactctgcactgcttgttatgttcatatgcaaccactgtccatttgtaaaacatctgaaaaaggacatcagcaagctcgcctctttctatgtggagaaaggacttggtgctgttgccatatcgtccaactcagttaggacgcatccccaggatggcccagatcgcatggctgaagaagcagagctgttcaaatatcctttcccatatctttacgatgaggtctggccgcaccgtgccttggattcagagatttttcagcgaccatgaagatgcttttttaggccgagtgatatcctatcctttttcagcattgaagttcttcctcgtgactaattttgtttatttttttgttaccaccgcaacctacagtctcaagaggtagccaaggcttttggagcggtctgcacgccagagttctacttgttcaaaaaggatggccggaggccttttgaacttttctaccatggacagttcgatgactcaagacccagtaacaacgtgcctgtaaccggaaggtaaacttttgtgacgtctgtgttagcgcttgcttgcttgaactctgcagtgccccctcccctgtgctcaagctcttcccccagttttgcagggacctaagccgcgcgattgactgtgcgctcagtggccaagaactgccctttgtgcaaaagccaagtgtcggctgcagcatcaaatggcacccatgaggtgcccaccttgttcggcatttgattcggcccaggctcacaggggctgaagatgagacagatctgtgggggagaaacagaaacatgggaacttctcttgtgtgacggcgaaatagtgtagcgctagcgcagcaaccagcaaaaggctcatgtaaagaattgttcacgaaacagaagagcttcacttctaccttctgtaggacatggtcatcgcaaaaggcgttggtattgtttcctgctggaagtaatttctgccgggatggatattcattttcaggatgaattttttttaaaaaaaaataaggtcaaaaa

SEQ ID NO: 104142 - DNA, 650 bp, Zea Mays
atccgcacctccgtatccacgcctcgcacttcataagattcggagccaacagtgctggagttggtctgagcatccctatttgtaggacgctccccctctagtcatctcctcaaacaaaaaccctagccgccgcgccgccccgctccctagtggtcctccctcccccaccactgcagctccgtcccggcggccccaagagttgcggcgaggatgaacgtgaagggcggcagccggattccggtaccccctccgggggccagcgcgctggtcaaggtggccgtgttcggcggcgccgccgtgtacgctgccgtgaacagcctctacaacgtcgagggtgggcaccgcgccatcgtcttcaaccgcatccaggggatcaaggacaaggtctggtccccgcgggcgcgcctcccgttctccctgcccacattttctatccacttcgttgcgcggtagttgttcgtttccgggcgtaagcgttttggttgggtagtttttgcgggtgggaggggtgagaaatgctgctatgcacgctgtgatgtggtgaacttaatcctagctttgtgtcccttataagattcctttatatttctagttatatcccagtaaatctgagataaccatttgtgttactttggtaaaaaaatctggga

SEQ ID NO: 104143 - DNA, 516 bp, Zea Mays
atgtctgggttattacatggtttgcctactgtcagccttgcatggcagggcctgaaagctaggaacaaaaaacaaaggtatgaaaagatcagcgaaaggaaaattgctacttcaactgaggctctctgctgtggatatcctaccggatttgcttcttacttccattactatagctcactgcgttttgaagatgcaccggactatcagtacctaaagagattgttcagagacctttttattcgggaaggttttcagtttgattatgtttttgactggaccattctaaagtaccaacaggcacagatgaccactgctccacctcgtgcaattgtttgtacaaggattaaacttaccctcctaccttaagtagtagtagagattgtattgggtatagaaatgtacttcttttgttatgttatatttcattgccccctctctattttggttcctggccttgatttttgtttcttgtatttttttcaggttgtctagctgcatgttgaagtataattccgg

SEQ ID NO: 104144 - DNA, 139 bp, Zea Mays
ccttgttcagttaccacacatgctgccatctgaaaaggcattttcagctgttgtatctgctcttggcatctacaacaaagacgggatagtagtttatgatggaaaggggttgttcagtgctgctcgtgtttggtggtaa

SEQ ID NO: 104145 - DNA, 1530 bp, Zea Mays
ctaaaaattagtccttaccaaacactgcctaaccgcctaaggattccgccgccggcaccttgccagctgacgccaccaatcaacgcttccctttatggccggagcaatagttggcagactcggccgccatcccacctccttgctcctcctaacactgccccgtcacgccgccgcacaccaccggctgcactctccttcctcctcccaagttgcaagagccggattgccaggtgcttgtttcgtttcgggctgtgtcagtattcaaaaatgggtgatccaagtgagaggaatggacacggcgctcttacccgggtgctattctgtggtccatattggcctgcttctactaactacaccagggagtatttgcaggactatccattcattcaggttgatgaagtaggtcttgagcaggtacctgatgttattcacagctatcatatatgtgtagtaaaaaataagcgtatagattcagatattattgccaaggcaactcagatgaagattataatgcagtatggtgttgggttagaaggtgttgatgtaaatgctgctacagaacacaaaatcaaagttgcacgaatacctggaagtacgacaggaaatgctgtctcttgcgcagaaatggcaatctatcttactctaggcattctgcgtaagcaaaaggagatggatactgctgtgaaccggaaagaccttggtgttccagttggagatacattatttggcaaaacaatccttatccttggatttggggccattggcatcgaggttgccaagaggctaagaccctttggggtaaaaattcttgctaccaaaagaaattggtcatcggacacattgccatcttatgttgatgagctagttgacaagaaaggtgggccggaagatatgtatgagtttgctggtgaagctaacattgttatagcatgcatgaccttaaccagcgagacaattggaattgtggatcataagtttgtttcatcaatgaaaaaggggtcatatctggtcaacattgctcggggacgcctgctggactacaaggctgtgtttgatcacctggaatcgggccatctagctggtctggggattgatgttgcttggatggagccatttgatcctgaggaccctgttctgaaattcccaaacgtcattctaacgccccatgtggccggcgtcaccgagtattcctacagaactatggcaaagtctgttggtgacaccgcccttcagcttcatttaggcgaggcgttcacggaggtagagttcgtcaactaaaaaaccgtccaggcggcagccgtagacgcatgccattcgtgggctatcggaaccgctgatgcgatcatttgtagagaataatggatccgcgacttgtaagaataaacatgtagccagatgtttgatggtgatctccatgagaactctgccactggctgccttagctggtagtggtagcaagtcattttctcaaacattgccttctctttctctgtatcactgttgtcgtcatgatcacaactttctttgtta

SEQ ID NO: 104146 - DNA, 1483 bp, Zea Mays
ctaaaaattagtccttaccaaacactgcctaaccgcctaaggattccgccgccggcaccttgccagctgacgccaccaatcaacgcttccctttatggccggagcaatagttggcagactcggccgccatcccacctccttgctcctcctaacactgccccgtcacgccgccgcacaccaccggctgcactctccttcctcctcccaaggtcagtattcaaaaatgggtgatccaagtgagaggaatggacacggcgctcttacccgggtgctattctgtggtccatattggcctgcttctactaactacaccagggagtatttgcaggactatccattcattcaggttgatgaagtaggtcttgagcaggtacctgatgttattcacagctatcatatatgtgtagtaaaaaataagcgtatagattcagatattattgccaaggcaactcagatgaagattataatgcagtatggtgttgggttagaaggtgttgatgtaaatgctgctacagaacacaaaatcaaagttgcacgaatacctggaagtacgacaggaaatgctgtctcttgcgcagaaatggcaatctatcttactctaggcattctgcgtaagcaagagatggatactgctgtgaaccggaaagaccttggtgttccagttggagatacattatttggcaaaacaatccttatccttggatttggggccattggcatcgaggttgccaagaggctaagaccctttggggtaaaaattcttgctaccaaaagaaattggtcatcggacacattgccatcttatgttgatgagctagttgacaagaaaggtgggccggaagatatgtatgagtttgctggtgaagctaacattgttatagcatgcatgaccttaaccagcgagacaattggaattgtggatcataagtttgtttcatcaatgaaaaaggggtcatatctggtcaacattgctcggggacgcctgctggactacaaggctgtgtttgatcacctggaatcgggccatctagctggtctggggattgatgttgcttggatggagccatttgatcctgaggaccctgttctgaaattcccaaacgtcattctaacgccccatgtggccggcgtcaccgagtattcctacagaactatggcaaagtctgttggtgacaccgcccttcagcttcatttaggcgaggcgttcacggaggtagagttcgtcaactaaaaaaccgtccaggcggcagccgtagacgcatgccattcgtgggctatcggaaccgctgatgcgatcatttgtagagaataatggatccgcgacttgtaagaataaacatgtagccagatgtttgatggtgatctccatgagaactctgccactggctgccttagctggtagtggtagcaagtcattttctcaaacattgccttctctttctctgtatcactgttgtcgtcatgatcacaactttctttgtta

SEQ ID NO: 104147 - DNA, 1324 bp, Zea Mays
ctaaaaattagtccttaccaaacactgcctaaccgcctaaggattccgccgccggcaccttgccagctgacgccaccaatcaacgcttccctttatggccggagcaatagttggcagactcggccgccatcccacctccttgctcctcctaacactgccccgtcacgccgccgcacaccaccggctgcactctccttcctcctcccaaggtcagtattcaaaaatgggtgatccaagtgagaggaatggacacggcgctcttacccgggtgctattctgtggtccatattggcctgcttctactaactacaccagggagtatttgcaggactatccattcattcaggttgatgaagtaggtcttgagcagaaggagatggatactgctgtgaaccggaaagaccttggtgttccagttggagatacattatttggcaaaacaatccttatccttggatttggggccattggcatcgaggttgccaagaggctaagaccctttggggtaaaaattcttgctaccaaaagaaattggtcatcggacacattgccatcttatgttgatgagctagttgacaagaaaggtgggccggaagatatgtatgagtttgctggtgaagctaacattgttatagcatgcatgaccttaaccagcgagacaattggaattgtggatcataagtttgtttcatcaatgaaaaaggggtcatatctggtcaacattgctcggggacgcctgctggactacaaggctgtgtttgatcacctggaatcgggccatctagctggtctggggattgatgttgcttggatggagccatttgatcctgaggaccctgttctgaaattcccaaacgtcattctaacgccccatgtggccggcgtcaccgagtattcctacagaactatggcaaagtctgttggtgacaccgcccttcagcttcatttaggcgaggcgttcacggaggtagagttcgtcaactaaaaaaccgtccaggcggcagccgtagacgcatgccattcgtgggctatcggaaccgctgatgcgatcatttgtagagaataatggatccgcgacttgtaagaataaacatgtagccagatgtttgatggtgatctccatgagaactctgccactggctgccttagctggtagtggtagcaagtcattttctcaaacattgccttctctttctctgtatcactgttgtcgtcatgatcacaactttctttgttagccgggttggttaggtgctctaggtaacactccttaagtttgagttcagttcaattcttaattcgactgaatttcaggctgagtttt

SEQ ID NO: 104148 - DNA, 1633 bp, Zea Mays
ctaaaaattagtccttaccaaacactgcctaaccgcctaaggattccgccgccggcaccttgccagctgacgccaccaatcaacgcttccctttatggccggagcaatagttggcagactcggccgccatcccacctccttgctcctcctaacactgccccgtcacgccgccgcacaccaccggctgcactctccttcctcctcccaagttgcaagagccggattgccaggtgcttgtttcgtttcgggctgtgtaggtcagtattcaaaaatgggtgatccaagtgagaggaatggacacggcgctcttacccgggtgctattctgtggtccatattggcctgcttctactaactacaccagggagtatttgcaggactatccattcattcaggttgatgaagtaggtcttgagcaggtacctgatgttattcacagctatcatatatgtgtagtaaaaaataagcgtatagattcagatattattgccaaggcaactcagatgaagattataatgcagtatggtgttgggttagaaggtgttgatgtaaatgctgctacagaacacaaaatcaaagttgcacgaatacctggaagtacgacaggaaatgctgtctcttgcgcagaaatggcaatctatcttactctaggcattctgcgtaagcaaaaggagatggatactgctgtgaaccggaaagaccttggtgttccagttggagatacattatttggcaaaacaatccttatccttggatttggggccattggcatcgaggttgccaagaggctaagaccctttggggtaaaaattcttgctaccaaaagaaattggtcatcggacacattgccatcttatgttgatgagctagttgacaagaaaggtgggccggaagatatgtatgagtttgctggtgaagctaacattgttatagcatgcatgaccttaaccagcgagacaattggaattgtggatcataagtttgtttcatcaatgaaaaaggggtcatatctggtcaacattgctcggggacgcctgctggactacaaggctgtgtttgatcacctggaatcgggccatctagctggtctggggattgatgttgcttggatggagccatttgatcctgaggaccctgttctgaaattcccaaacgtcattctaacgccccatgtggccggcgtcaccgagtattcctacagaactatggcaaagtctgttggtgacaccgcccttcagcttcatttaggcgaggcgttcacggaggtagagttcgtcaactaaaaaaccgtccaggcggcagccgtagacgcatgccattcgtgggctatcggaaccgctgatgcgatcatttgtagagaataatggatccgcgacttgtaagaataaacatgtagccagatgtttgatggtgatctccatgagaactctgccactggctgccttagctggtagtggtagcaagtcattttctcaaacattgccttctctttctctgtatcactgttgtcgtcatgatcacaactttctttgttagccgggttggttaggtgctctaggtaacactccttaagtttgagttcagttcaattcttaattcgactgaatttcaggctgagttttaaaaataatacc

SEQ ID NO: 104149 - DNA, 1707 bp, Zea Mays
ctaaaaattagtccttaccaaacactgcctaaccgcctaaggattccgccgccggcaccttgccagctgacgccaccaatcaacgcttccctttatggccggagcaatagttggcagactcggccgccatcccacctccttgctcctcctaacactgccccgtcacgccgccgcacaccaccggctgcactctccttcctcctcccaaggtcagtattcaaaaatgggtgatccaagtgagaggaatggacacggcgctcttacccgggtgctattctgtggtccatattggcctgcttctactaactacaccagggagtatttgcaggactatccattcattcaggttgatgaagtaggtcttgagcaggtacctgatgttattcacagctatcatatatgtgtagtaaaaaataagcgtatagattcagatattattgccaaggcaactcagatgaagattataatgcagtatggtgttgggttagaaggtgttgatgtaaatgctgctacagaacacaaaatcaaagttgcacgaatacctggaagtacgacaggaaatgctgtctcttgcgcagaaatggcaatctatcttactctaggcattctgcgtaagcaaaaggagatggatactgctgtgaaccggaaagaccttggtgttccagttggagatacattatttggcaaaacaatccttatccttggatttggggccattggcatcgaggttgccaagaggctaagaccctttggggtaaaaattcttgctaccaaaagaaattggtcatcggacacattgccatcttatgttgatgagctagttgacaagaaaggtgggccggaagatatgtatgagtttgctggtgaagctaacattgttatagcatgcatgaccttaaccagcgagacaattggaattgtggatcataagtttgtttcatcaatgaaaaaggggtcatatctggtcaacattgctcggggacgcctgctggactacaaggctgtgtttgatcacctggaatcgggccatctagctggtctggggattgatgttgcttggatggagccatttgatcctgaggaccctgttctgaaattcccaaacgtcattctaacgccccatgtggccggcgtcaccgagtattcctacagaactatggcaaagtctgttggtgacaccgcccttcagcttcatttaggcgaggcgttcacggaggtagagttcgtcaactaaaaaaccgtccaggcggcagccgtagacgcatgccattcgtgggctatcggaaccgctgatgcgatcatttgtagagaataatggatccgcgacttgtaagaataaacatgtagccagatgtttgatggtgatctccatgagaactctgccactggctgccttagctggtagtggtagcaagtcattttctcaaacattgccttctctttctctgtatcactgttgtcgtcatgatcacaactttctttgttagccgggttggttaggtgctctaggtaacactccttaagtttgagttcagttcaattcttaattcgactgaatttcaggctgagttttaaaaataatacctttttttttggtgttgttcacgcactagcctcagctagccgtcgtagtctcggacggcgattaggaggtcagatcgtgaacactgtcatttccatcatgtacgacgaatgaggttttcgcga

SEQ ID NO: 104150 - DNA, 214 bp, Zea Mays
ttatttatttattttgtacagaactcctattatatagtaaagatatgacattcgatactgtgccacgattcatcatatgtgtgagacttggtcccagcatacctggtgattatgttcgcgcccgggtcttggtgtccctgaaacccgggtgtgacagcaatgaatggagaaattaaaccaggggcattacggggagtttagaagacgatgaaaa

SEQ ID NO: 104151 - DNA, 241 bp, Zea Mays
atctcagccgtccattctaccgttctacaatctcagtcgtccaatcccgcacaccagttttccgcgtgcagaaaaaaaatcaaaccgtggctgcctagggatcgaaccttggatctattgagcagaatgcctagccttccaccctctagccaacatgactcatgttgaattgtgtacaacttcaactaaaacgtcttttgtgtttaacccaccgtccactctgtatgctcactgagtctag

SEQ ID NO: 104152 - DNA, 94 bp, Zea Mays
atgatcagtatctgtactctcaaagttggatatttaagatgtcgatatccatttaaatcttatcagacacaatttgataatatatgtatccgac

SEQ ID NO: 104153 - DNA, 2602 bp, Zea Mays
aaaataatcgtactgtagaagccgagcgcaggagatccaacaacgaaactccccttcgttccttcctcgtgttcttctccctcctgccgccgcggcccgctccgctcccgagccccgttgcacctccacccgccgcttccgtcccgtctcctgccaccttcctctcaccgcaatcgagtcgctgcgcctcctcccgcccgccacctcccgcagccgcagcaggacgagctcgtcgccgccgtgtactagaagaacgggaggtcgctgtcggtctcccgcacaatcctgattcctggacctgcgccgcgtggtttcgcctcaggttggagtgtctcgatttgtcaggatagcttgtataactgaagctttcctttgtatgatgatgggggcatgccatggatcacaagtgagggggctagggtttagtatgtggtagtagctcctgcttcagcaaaagaagcaaggatcactacttttgctgtttgttccgtggaggatctgaatcctatcggcattgattcgggtggcgtcagctgttctgggtggggtagtatgatgaaacagatatttggacggcgcaaggcgtccaaaactgcaggcaaggagtgtggcgggaggacgttcaaccagctgctgtcaggttctggatttgctgacctgagtggccagctgccaattctgtctagtactggggacatctatgggaatggaaaccgtacggggttccaagactcgaggataaatgatactttgttctcttccaacttccgactgttgccgagctttaaggatgtgccaaatacagagaaacagaatctgctcatcaaaaagttgaacatgtgctgcactctgtttgactttgaggatgcggcaaagaacataaaggagaaggagataaagacgctaatgttgttggagatagatgaatatgttaggactgctaacgcgaagttccctgagatcattgtggaggcaatcacaaaaatgatttcagtgaacttgttcaggacactaatttccccacccagggagaagaaggtgcttcaagcttttgatctagaagaggatgaaccattgatggaccctgcgtggccacacttgtaccatgtgtatgagttgctcttgacatttgttcagtctccagaaaatgatgctaaactggctaagaagtatattgaccattcctttattctaaggctgcttgagctctttgactctgaggatgctagggagagggatcgccttaagacggtacttcaccgtatctatgggaagttcatggtgtaccggccatttatccggaaagctataaataacatattctaccagttcatatatgaaactgaaaagcacaatggaattgcagagctcttggagatttttggaagtattatcaacgggtttgctttgccactcaaggaagagcacaaactgttccttggaaggaccttaattccacttcacaagccaaggtgtacttcaatgtaccatcggcagttgtcttactgcattacacagtttgttgaaaaagattgcaaacttgcggatactgttattaggggcctcataaaatattggcctatcaccaacagcacaaaggaggtgctgttcttgggtgagctggaagaggtactagatgcaacacagcctgctgaatttcaaaaatgtatggttcctctttcccaccagatcgctcactgcttgaacagctctcacttccaggttgctgagagagtattatttttctggaacaatattcacttcgagaatttcgttaagcaaaacagtaaggtgatcctgcctatcatcctccctgcattggagaaaaatataaatgggcactggaatcaagtcgtgcaaagcctcagtctgaatgtccgaaagttactctccgatcgtgaccctcaaatgtttactgaatgcttgcgaaaatacgaggaagacaagggcagggagaaggaatttaaactgaagcaagagttggcatggaaacgtctggatgagattgcatcagcaaaagtcacaagtggtgaggctgtccttgtgtctccaaccttgcctcgtcaaccttcattcttgtagcaacctgcactgaatgagtggtccttgcagagtcgttagacattgtacaggattgggttgtagataaaagggggtatatgaagccttcaaggctggtgagcgaaattgaagaaagagatctgagaagccaattgtgcatcatttctgtaaatcccatgccatggcttcttttggcattctggtggttcagtctgcttctgtagtccgttgtttgggacaatgtattttttttcttgtaatggaaaatgttgagatgtcctgcaggcggcttaaatgataaaagttattaattttcatcacagagtgccatggcacgacagatggatacaggggcaccacaccacgtaagactttgttcgtttacaccaatcccgctctggattagtatggattggaattaaatccatgcctcaatccatgccccaaaataatccatgactacttaattttttttattcggttaaacccatcatggaatataacccaaatgtttgggaattttttaaactatggaagacat

SEQ ID NO: 104154 - DNA, 4047 bp, Zea Mays
tctccgtcgccgagggagtccaatcccaacacggcgacgacgacaaacaaacaaggaaatcgcctcctcctcctcctcctcctcttcctctttccctcgctctgccatctgcccccaaattcccctccccactcgctcgcgtcgcgatagcaagcaacgcgcaggtgctgaaactcgtgtactgttgatggatgatgactgttcccatggatagtgctagcgcagccccatcctccacgcgggaccttgccgagcgtctccttactaggaataatgaacttgaagaccagcttcgtaagtccgcacaatccaaagtcccatcagatcccaacatatggcttcagatgcgtgacaactttgagaagataattctcatagatcacgacctctctgaacagagagatgtagagtatctcctatggcagttgcattacaaaagaattgaggacttcaggaggaacattagtgcagctagctcacttgcatctcagagtgggaagagcaacactaacccagatcgagtcaagagaattaaatcagccttcaaaagcttcctttcagaagcaactggcttctatcatgacttgatgttaaagatcaaatcaaattggggccttccactcaattactttccagacagccttgacaatgcaaacaactctgtgcgagatgacatgaaaacagttcaattgaagaaaggtttgatttcatgccatcggtgtctgatatatttgggagatcttgctcgttacaagagtttgaatggtgatggtgattctgctagtcgtgaatacacagcggcttctagttactacaaggaggcagcttctatctatccttccagtggcaaccctcatcatcagcttgctatactagcttcttactccggcaacgaggtggtggctgtttataggtacttccgaagcttagctgcagacactccttttgccactgcacgggacaacttgattattctttttgaaaagaatcgccaaagctatggacagctgccagacaacagcaaagttcctagcactaagacattacccccacggccatctgggtggggccgaggacggggagaagtaaggtttcaaccaaaagatgttaatgcagaaacagctgaaagggaacgcgagtgcaataatggtgatacattgaagaccttctatataagattcgtcaggctcaatggaattcttttcacgaggaccagtttggaaacattcggggagctgttttcttcagttagcaatgatttgcagattcttctttcttctggtcttgaagaggaccttaatttcggttctgatgctgcagaaaatgcattggctgctgttagacttactgtcatccttatattcacagtgcacaatgtaaataaagagcctgataggcagtcttatgctgaaattgtgcaacgcagagtactgctccaaagtgcgtttacggctgcttttgactttgttggacgaattctcagaaggtgttcagagctccatgatattgcatcaagcttctatctgccagccattttggtctatattgaatggctggcgtcccatccagagttggctgttgattcagagatggaggaaaagcatgcaaatgccaggtctttcttctggagccaatgcatctcatttatgaataagttgatccttaccaaccttgcatctgtgaatgatgatgatgacgaggcttgcttttctaatatgagcatttatgaggagggtgaaactggcaacaggtttgccctttgggaagatcttgaattgagaggttttctgcccttgcttcctgcacataccattttggatttctcaagcaaacacacatttggaagcaccaaggagaagaaagcacgggttcagcgaatttttgctgcaggaaagtcactgcttaactttgttcagattgatcagttgagaatttattttgattcatcatcgaagaagtttgttatggccaagaaccctcctgtttctaaaactaacacccctcttcacgaatctcctgatgcacttaaaacaagtggcactgaaatggattatgaggctgctagaagatttgattcagtttcttctaatatgggcacactgcagtctaaagtgcagttttgtcctgatggtgacgatgatgaagaaattgttttcaagccaacagcttccgaaaagtttccgaaagctccttcagatctgttggttaatggatacactcatcctgtacctatgtctactgctggctggccaaccaatgctagtttagtgcctgttcagagcactggatcaatgactgcaactggttggccacccaatggtgggtcaaatgcttttccaagtactgcatctctatcagctgctggtaattacaacattaaccagtcgcttcccaggtcttccgttggttgggctgtcaatggtgagcaaagtgttattcctagcattgctccaagatttgaactcgtgcagcctgttgaagagcctgtttccagctggacaagcagtggtgcacagcatgttggtactcagcacaagcacacaggtttaactttcccagatgttgtgtctgaaccacttgtatctgcatcaatggttcaacgtttcagtagcactgattattcgaaatttctcagtgaacaagaaatgctcttagtgaatggactgaatactgtcaacttaactggaaatggctatttaaagcagagactgcagcctggattgagtggtttacagtctatggggtattcatctcagacacctattgaacctggtggtaccactgcaaactcgatgcataatcatctgaaaattactggagagaatgtgccctctacacttgattcagttgtaccttcaatagctccattaggtggcatgccaatgaaattcacagaagcgccactaactgcttcaaagaagaaccctgttagtcgtccatcaaagcctgttgggccacctccaggatttgatcatgtagccccaaagcgccaagatgattctattccagttgaaaaactgcagatcccacaggttgatgattacagctggctagatggttatcagcaatcgattgatcatgttcacaacttaagaactgtttattctggtgtcagtgacagcactgcatttgccactccattccccttccctgggaaacaacagttatctgggatgcatgcacaaggggctacaaatgaaaagacatggcaagatttccgtctttttgagccttcaaaacagaacatgctccaaaattaccaccaaagaaatcagcaaaatggtcaaatagctgaacaagagccagcaaattctgtctggtctagcagttaccatgtgtgattcagtaacttgtaccaggatgattgctggagttgctggggactattggattaagtggcacagcctgatctattgagcttggcccgtacctgcagcactctgttaaatttcttttgagcatggtggtctttgaagcatgacaatggctgctcttaggtttgggattgccaccatcttctgggacaaagagggagtggaggatgattgatctgtcggcagtctgatggggatgaattatacgaggtcttcaacgctgacacaaagggttaatgaaacaaactcgaatccagtgattataggcgctccgcacggaccatatgattcatctctcgttggacatgtagctacaagaatggtgtcagtgggcggttgctgccgcaactaaaagtccattcagtgtggatgtcagttgggctacgctatctaagaataaaaagtttgaggaacaacgagcatgttgccaagtagtttcttaagtataagttactgcgtctagttatattgttcctttcctttcggaaacaatgtgtcatgttgctgtcgcgctagttgcaagttgcaattaaacgtttggaacagtttgtcatgttatttgtgtggcttctatatggctatatgtttgctggaactgtatggaccaaccctcggtgctacctacaaaagtctatgatttgactgaatatcttgtatgtttctattatgctca

SEQ ID NO: 104155 - DNA, 900 bp, Zea Mays
atacgttccctttttacatatctcgacggctcgccacctctcttctctcctcggccctcgccactctcactccgccacgccggagcacgtcgctgcggcgcgcctgcgcccgccacacacgaggggactatggacacggtggctccccgcctgagtcgctcctcgacgcgatacgggcccatcagcagcagtgctgcctccttcagtgggcccgtccggaagtggcgcaaggcctgggtgcccctcaccggtaccggcaccggcaccgccgggtccgggggagggagctcacgaggagacaacaaggtggttctgtttagatggacgccggtgaatggttgctcaggaggagggggaggcaccgacgggggcatggagctcgctgctgcgggggcctccacctgcaggcggcgctacgtcccggctgcaggggaggcgcaaagcaccaccaaaaagggcaccagcagcgagctcaacttgaacctcgagctggaagacccagacgacgacactgatgccgacatgagcaccgacgagccacgcgatgtagaagataacagcgcccgtctagaaagccgcttgaagcggaaagcattttagccgctggtcacctagagatgcggatcggcctgaatcgtctgccctagctaggcggattttgtgtaacataatgtagcagcatgtaacttgtatccgccacctcgtcgtccttcgtctgttccagtttagaacaatggcattgtccatgactgttcaagtccaagtgctcatgttatatttcatagctgttggttatgacttgccactttgtcctgtacgaaatattgtcatggactttgttctagtgtgtaatgctacatggcaacgtctcaagcaagatgttataagttgtggtaaaga

SEQ ID NO: 104156 - DNA, 1272 bp, Zea Mays
aaacactccgtctgttgaatgttgatcccttcaacatttcccctattttaacatttattattattattaaccaatcgaatcaactgcacctcttgaccgcttctactccaccgcctgctgctccgctagtcttcttcaaccttgtgatgcttcagcccccccgcccctggtattgatcgctcagcacaaagcatcgtacttggataggagaaaacaattctagacagtcgtcagagagagagagagagaaaccaaattagagaactgagagatcggggacaaagggggagaggagatgtctcggggcggtagccacggggagctgggccagaggatcgattacgtcttcaaggtggtgctcatcggtgactccgctgtgggcaagtcgcagctgctcgcgcgcttcgcccgcaaccagttcaacctcgactccaaggccaccatcggagtcgagttccagacccgcaccctcaacatcgacgcccgcaacgtcaaggcacagatctgggacaccgcaggccaggaaaggtaccgagcagtaacaagtgcctactacaggggtgcagttggagctatgttagtatatgacataaccaagcgccagtcctttgatcatgtggctaggtggcttgaggaactacgtggccatgctgataagaacattgttatcatgcttatgggtaacaaatctgatctgggcacacttcgtgccgtcccaattgaggatgcgaaggagtttgctgagcgcgagaacctcttcttcatggagacctctgcacttgaggctatcaacgttgaaaacgctttcatgactgtactgactgagatttaccggaccgtcagcaagaaaaaccttgttgccaatgaggagcctgattctagcggaaactcgagtttactgaaaggaacaaagattgttgtccctggtcaagagccaccctctacattgaaagcaacatgttgtatgtcctcttaagcatgatattgtaccataataccatgttctttctggtcgtcggggtttctgattacccctgacatatctgcgtgatgaatggctgtgaatcttggaggtaaagatgagaaggtctacaggaacagttaactcatatacgctaactatctggaaacagccttctttttgtatctgattttgtgatatagtacagtcattaagaagccttctcttcaaactcttaaaaaggtttgttccaagtattgtttgcaagaacatgaaccaccgaccttgtttggaccaaaacctaggaaaca

SEQ ID NO: 104157 - DNA, 1491 bp, Zea Mays
ctctgctcttgtctcccctccatttcctcacgcgccaccggcagcgccaagagccagtcgtcgagctctgctcatgctcatgccgagcgaccatccggagccgccggccctggcgccgttggatctcgaagcccacccggcgccgcccccggccaagggtggcgggggcaagatgcaaaggctgctcaggtcggccttcaagcgcggggaggagacggaccagctgagccggtcggcttccgagtcgtcgtcttcggcggggagcatcggccgcacgccgtctggaaggcgggccggccggcgcggcggcgacgtcgacggcgaccgctccagtcgcgagagtttcgaggcccaaggttctaagaacggcaagctgctctctgcgctgcgcgacgccaagatcggccacgcgtacgagccgttcccgtgggagaagaagatgagggagctgctgccggtgccggaggcgagcagcttcctctcgctgctgctgctgcccaaggcgacggacgggtccaacacgcggtacaacgcgctggaggacaccctggcgcgcgcggacgcgtggctgctgtcgtcgcaggcctcgggcgtgcccgtggtgttcatgaacgtgcagacggaggcgctgctgaccaagatctccggcgagacggcggtgtcgaccgtgaacatggcgtcgctgtcggacctggccggcatggcgaacgcgagcctgtacggcttcgaggactaccacggcgtggacatcggcgtggtgcgggccgtgcggctgtggtacacggcggcggcgggcgaggcggcgctggagctgcggctgtgcccgggagacacgcggctggggttcgccatcagccgcaccgaggaagggttcatctacgtctcgtcggtggcggaggagggcacgccgggcgtggcgtcggcgcggtcgggcctgctggagctgcaccgcgcggcgcgcggggcgtccaagctgctggtcgtgtcccgcgtcggcggcgagaaggtgctgccctggatggtgtccaccgccgggaacgtcaagtgcttcgacaccgtgtcgctgagccagaagctgtcgctgcaccgccacgcgctccgccccatcacgctgcatttcctcatgtgggaccgcgacctggccgcggcgctggctaaggatgccgacgtcgagaagccgccacctgtggtcctgcttccatccgtggcggcggcggacgagctcgacggcgacagcagcggcgggccggggctcgatggcaaggactcgagggactcgtcgttcaggttccagaacatcgacctcccggacagctggttgtgacttgtgaattgtgtaaccaaccatttccttacctttttcccccttctttttttatgataagaagttgaagcctgttcttctttctatgctaaaaagttgagaacggttaattatgtaagcatgatggcagtaattaaaggggtatcataccaaggtgtgttgttagc

SEQ ID NO: 104158 - DNA, 426 bp, Zea Mays
atggctgataggtttcaaaaaatacatgaggaaggaaaaaactttgatcctttgattttagaagactttgattgggacaatgaatgggttgatccattagctaattcttctcatgttagcaatgcttttggagatgatttcaatttatcatgggaccaagttgatgaagctattggtgcatctgcacatctcagaggtcgtaattttcctaggagagctggtggtgggtgtgtgagaaggaatgaagaccttgaggaagaggagactaatttagcaaatgaagatgatgaggaatatattcttgatgatcttgatgtggaagatgaaattgaaggaagcaatagtggaaaagatggtgacgatcaaggcgctatgctcatggtcttaatatcgatgagttcgatgatggttactaatcatgcataa

SEQ ID NO: 104159 - DNA, 82 bp, Zea Mays
agtgggtcacacacaagcacacaaacatcaatcattgaagcacaaagcaagcacaccaatcatagttttaatacaacagggg

SEQ ID NO: 104160 - DNA, 1165 bp, Zea Mays
ttttttgttaaagttgataacccattgcttcgttcgggtctccatacatctaattaaataagtactaatttaatttaccagatcgaaaatttttaggttgaaaaggaaaattagagatccaatgtcacattctgtaaaaatttatgatacatgtataggatgcactcaatgtgtacgagcttgcccaacagatgtattagaaatgataccttgggatggatgtaaagccaagcaaattgcttccgcgccgagaaccgaagattgtgtgggttgtaagagatgcgaatccgcctgtccaacggattttttaagtgtccgcatttatttagggcctgaaacaacccgcagcatggctctatcttattgatacgttacaaaaaactccacttgaatcgtctgattcctctttaccgaagaagcctgtgctcgaaataatcgagcatgggcttttctggtcaaaacgtatcttgtctttattactttatcatgagttattttccttggttaacaatacttgttgttttgccgatatttgcaggttcattaattttatttttacctcataaaggaaataaaatcgttaggtggtatactatagctatttgtttattagaattccttctatgacttatgcattctgttatcatttccaattggaggatcctttaatccaattaaaggaggattctaaatggatagatgttttcgatttccactggagattgggaatcgatggactttcattaggatctattttattgacaggatttatcactactttagctactttagcggcttggccggttactcggaattcgcaattattctatttcctgatgctagcaatgtatagcggtcaaatatgattattttcttcacgagaccttttactttttttatcatgtgggagttagaattaattcctgtttacttacttttatccatgtgggggggaaagaggcgtttgtattcagctaccaagtttattttgtatactgcaggcggttccatttttttcttaattggagttctgggtatgggattatatggttccaatgaacccggattagatttagaaagattgattaatcaatcataccgtacaacattggaaatactactgtatttggcttccttattgcttacgaattcaaagctgaataat

SEQ ID NO: 104161 - DNA, 3932 bp, Zea Mays
gggacggagtatttctctctatatatacggaaacaggtttggaaataaatacacctctctctctataaataaagcagtaagtatcgtgggaatcgttttaaaaaatcctatagtatcgcaatcggtttttattttgttaccgtgaacccatggctaccggggaggatgagaaggcggcggggcgcgtggcgttgcaccggctgttcgtgttcgcggacaggacggacgcggcgctcatggccgtgggcgccgtcgccgcggtggcgaacgggatggtgcagccgatcatggccttcatcttcggcgacgtcattgacgccttcggctccggagccaccgacggcgtcgtacgcagggtcgtccaggtatcatgttggacaatcgccggagaaagacaggcggcacgaatcagagccatgtatctcaaggcaattctgaggcaggacattgcgttctttgacatggaaatgagtgctgggcaggcagttgagaggatggcaggggacacattcctcatccaagacgccattggagaaaaggttgggaaggccatacaactcctttctactttcattggtggattcatcattgcattcacgagaggatggctcctggcccttgtcatgctttcaagcgtccctccgattgccattgccggtgcaattgtttcaaagttgatgacagggctctccacccgaatgcaagcaaactacagtgatgctggaaacgtggtggagcaaactcttggtgccattaggacggttgtttcattcaatggcgagaatcaggctataacaaaatataacatgttcataagaaaggcgtaccggtcttctctgcaagaaggtgctgtaaatgcccttggattcggttctgtgatagcaatcttattttcaagttatggcttggctgtttggtatggatctaagctgatagtcgagcgaggttacaatggtggcatggtcatttctgttatcatgtctgtcatgatcggagcaatgtaagatttctgttatcatttaaaattttcttaaacgaacaatgacaatgacaataagcgagctatatatgtttctgtccttaggccaggcaacacgatcagtgacagcttttgcagaaggccaaggagcagcacatagaatgttcaagataattgaacgcaagccagatattgacatagatgataacacaggtatcatattggaggatgtcaagggtgatgttcaactgaaggacgtgtacttcagctatcccaccaggcctgaacatttgattttcgatggattctcgttgcaagtacaaagtggaacaacaatggccctggttggtgacagcggcagtgggaaatcgaccgtgatcagtttggtagaaaggttctatgacccacaggctggagaagtcttgattgacggggtcgacattagaggaatgaagcttggatggatgagaggaaaaattggtcttgtcaaccaagagccggtgctattctcaactacaatcagggaaaacattgcctatggaacagaaaagccaacacttgaagatatcaatagagcgatacagctcgctaatgctgctatattcatcgacaagttaccaaatggtcttgacacaatggtgggggaacatggaactcagctgtctggagggcagaaacagagaatagcaattgctagagcaatcataaagaaccctaagatcttgctactggatgaagcaaccagtgcgttggatatggaatcggagcgggtggttcaggaagcattggttaggataatggttgaaaggacaacaattgttgttgctcatcgcctaagcacggtgaggaatgctgatgtgatatctgtcctacaacacgggaagatggtggaacaaggttcacacgttgacctgatgaagctacctggaggagcttacactcagctgattcgtctacacgagactcaacaagaggcagaagatgtccaccctgacatggaaatttccaggagatcaacaagtaaaggctcctcctcttttgggcagtctatccctgctccacttggctcacccgatccaacggaagtcagtggtgctcctgacacagaggaaggagctacagacagagtgaaagtgggtaggtctcagaagaaagcttcgatcgccagactcttcaagctcaacaagccagagactcttgtccttgcacttggttctatagctgccgtagcgcatggcactatatttcctatctacggcacgctgatttccactgcgataaaggtgttctatgaaccgccacaagagctactgaagggctccagattctgggcaggcatgtttgctctgctaggcgcttgcgcgtttgttctgattccagtgcagtacttcctgttcggactagcaggcgggaagctcgtggagcgcgtacgctcgatgacgttccgaagtatcatgcgccaagaaatcagttggtttgataaaccagaacactcaagcggatcaatttgcgcgaggctgtctaccgatgctctgaatgtgaagcgactagtcggggacaatctagcactgaatgtccagaccgcatcgaccatcatgtcaggcttcaccatagcaatggtggcgaactggaagctggcgctggtcatcacagtcgtgatcccttttgtggctttccaagcctacgctcaaatgctgttcctgaaaggtcttaacagaaacgcaaagctgaggtacgaggaagcaagtcaggtagcaacggacgcggtcggtggcatcaggaccgtggcgtcgttctgcgccgagagtaaggtgatggacgcctacgagaacaagtgcgagtcgccgaggaggcaagggatgaaggaaggcgtcgttggtggcttggggttcggcttctcgttcgtcgtcttctacctgacgtacgctctgtgcttctacgttggcgcaaggttcgtccaccaagggacagcaacgttcccagaagtgtttagggttttcttcgtgctggctttggccacaagtggggtctcgcagacgagtgcggctggggcagacagtgccaaggccaacgactcggccgtctccatctttgcaatccttgaccgtgaatccaagatcgactacagcagcgaggagggcgtgaccatcgcgagcgtgaggggcgacgtcgacttccagaaagtctgcttcaagtacccgttgagaccgaacgtccagatcttcaaggatttttcactgaggattccttccggaaagactgtcgcgctggtcggagagagtggaagcggcaagtcgacggtgatcgccctgctcgaaaggttctacgacccggaatccggcaagatcttcatcgacggcgtggagcttgggaccctcaaggtgagctggcttcggcagcaggctgggctcgtcgcgcaagagccggtgctgttcaacgacacgatccgcgccaacatagcctacgggaagcaaggcggggtggtgtcggaggaagaggtcgtggctgccgccgaagcagccaacgcgcacgggttcatcgccgcgctgcccgacggctacgacaccgtcgtgggcgagagagggagccggctgtcgggcgggcagaagcagcgcgtcgccatcgcacgggccgtcgttaaggaccccaggctgctgctgctggacgaggccacgagcgcgctggacgtggagtcggagcgcgtggttcaggaggccctagaccgggtgatggttgggaggaccaccgtggtggtggcgcatcgcctgtccacgatcagaggcgcggatgtcatcgccgtcttgaaggacggggcggttttggagaagggcaggcacgaagaactgatgcaggtgaaggacggagcctatgcttcgcttcttgagctcagttctagttctgcatgatcagaggggtagttggcagaatggaggcgtgtctgcattttttagat

SEQ ID NO: 104162 - DNA, 1201 bp, Zea Mays
accagccgccgccgcctctatctctcccttccctcttctctctcccctcacctctctcctcgagccatggacgtcgtcgagccgcccgtgaccgcgcgtccgccggcgcaacgaacaccaggccgtgaccccgcgtccgccggcaacagtggtgcgggcgcgacagcggacgccgcggcgcgtagcgagggcgcgacgcctcctgaggcgcgaccgcctccgttcgcgcggttcttccggtacccgcagtacgcgtggcgccacgcggtggcgcgggaggacggcgtcgtggccgtggaggacgaggcgagctgcgcctccgcggtggcgaacgtggaggtgggcctggtggtggacgcgcacgccagcctccgcgtgatggcgccgcggcggcccaggcagctgctgaggctggtggccggggtgcaggcgctcggcctcgccgtgctgcacctcaacgtggccaccgcgcccgacgcgacgacgctctacacgctcagccggcaacagtggcgctctacacactcatcagcatcattccctggctcgttttgttgcgctgcctgaaacggtgcatcaccgttcgaacatgcacttttgtcacaaagtcaccagtgccactatgcaagcacacatggccaaatccggctagggtttcctttcgagtcagtgggtacgggccatatctggcttcgtctgatgtgctaatcgcgcgatggctggtacagggcgcaggagaggctcgacttcctctacgagtcggggttggccgtcggcaagagctccgatgggttccaggcgctgcagcaatctgcaccgggggcagctgccgcgtccacttctgcacaggagagtgcggctgattcttccaaggcagctacaccgggagctttatttgaggataaaccccaatctgcaaatgatacatggagaaaactccactctgatcctctactcctaataaggcagcgagggcaggatgcgatttcaaggattaaaaacaatccaatcaagatggccgagataaagaaatctgttaaacatgcatatagaggagtgtggtgatcagggcaccatgagaactcattatgggcatgaacaagatttgaacagctacagaactttatagctggggcaaccactgccatatgatcaagatctggggcaaccactgccatatgaacaagttttgaagagagaa

SEQ ID NO: 104163 - DNA, 419 bp, Zea Mays
cacgagaggagcacggatggcaggggtggcggatccgagcatcgccaccgcgttggaagaacagtccaagtcgttgaaagctcaggccaaatcgctcgactccacccaaaaaatcctgcagcgcatctgcgaccgcttcgacgccaggatgcgcgctaccgcgtcctggaagcatccgtggccagccaggcggcggatctggcggcactccgcgccggggaaggcgacgccgtgtccaacctgcgggcggatctggagcatcaagtggcgtcgcgggtgacggagatcgagtcctccgtgtgggaccgcgtcgacgccatcgccgcggacgccagcacccgggtggcggcgctggagaacgtccacgcggtgttcgaaagctggcggcccaggatcgagaactccgttgactcgttgcg

SEQ ID NO: 104164 - DNA, 755 bp, Zea Mays
gagggtactgttggtgaccatttacccactccttcctccctgggtcacctgcccaagctcaacttccctccattcgacggagacaaccccaaattatggcaggctaggtgtgtcgactacttttacatgtatgctgtccaccctagtgtatggattactgtttctaccatgaccttttctggccccgcagcgcggtggttacaatctgttaaacccacactgttctctatgtcttgggagcagttctgtcaacttcttctggaccgctttggcaaacaagagcacgaaattcttatccgtaggttattccacatcaagcaaaccaccactgtcactgcatacattgatcagtttgcccaattgctagaccaactccgtgcctatcagactatcacagacccctatattatactatgaaatttcttgatggcttgaaagatgacattaagtctgttgtaatgattcaacgccccaaagatttggatactgccttcgttctcgctcaattgcaggaggaggtgggggatacgaccaagaagaaggagttacgcaagtgggatctgtcttcgccatttagaccttattccaagggccccatgcccctgccactgccaccaaacaagctatcgtcgtcaccagcagctgtcaatgataagttggggctggttcctgccaagcagcattcaacaactgacgaacgattgtccaacctgtatgcttatcgcaaggctcagggactctgttacaaatgtggg

SEQ ID NO: 104165 - DNA, 312 bp, Zea Mays
atgtctcctgggcgtgcagttctggtcatttgcatgttcctcttggcctcgtcctctcatctgcaagctgctagggtggctgcgacgacgaccagcagcaatgtccttggtgttcatggcaagaagggccccgtttctatttctgctagcagtagcactactggaagagctagcccgtgcttgcacgaagcacgtctaccggcggcattgtcgtcgccaccggccgccagtgaaccagctgacatcgtcgccagcagcggtggacgcggtcgagccctatggtcgaccccaagcgacggcgttggccattag

SEQ ID NO: 104166 - DNA, 1037 bp, Zea Mays
acttagctcttgtcctgctatgttttgtagaccagtgagcctagcagaaatcgattaaaataatacggagcagccaattgcactcgatcaatatcaatagaagtgacaactccatctctggtctcccagactcccacgcctataatctcattcccctccttcaaagccctctggcgatcgagattcttccccctccgtctccagatatggcaaacaaaaggattcagaaggaactcatggatctgcaaaaggacccaccgacatcatgcagtgcagggccagctggagaggatctattccactggcaggccacaatcatgggtcctagcgacagcccctatgcaggaggggttttctttgttaatatccattttcctcctgactacccgtttaagcctccaaaagtgaacttccaaacaaaagtttatcacccgaacatcaactctaacgggagcatctgccttgatatcctcaaggagcagtggagccctgcactgaccatatcaaaggtcctcctctccatcagctcgcttctgactgaccccaacccagacgaccccctcgtccccgagatcgcccacatgtacaagaaccagaggccgcgctacgaggaaaccgcacgggcctggacccagaagtacgcgatgggctagctgattctgtctcgccgaacaatactgtcactggcaagaagatcatcatcacgatgttgtaagaattaagttgaaccggtttccccgtcgtgtgatggtattaagaccaaagttcttgtgcgtgtacagtacttttgaagctggatagtctgaatcctgtgccagaaccaaaggtcttcgctttgttccctgaagagcgtttgtgaccatagaatctgcatgcgtaaccttgccagccaagaaaacagtagctgcttgtatgatgtcgagatgatatagttcagatgggtggaaccgtgcagatgaaacagtccagtggtcttgcgttcaaaacatgtcgtctgcaccgcatggttcagatggagcgttccttgttgcctgccg

SEQ ID NO: 104167 - DNA, 970 bp, Zea Mays
aaaataatacggagcagccaattgcactcgatcaatatcaatagaagtgacaactccatctctggtctcccagactcccacgcctataatctcattcccctccttcaaagccctctggcgatcgagattcttccccctccgtctccaggtatacccatcggagcagcacagacaagagttctcctgatatggcaaacaaaaggattcagaaggaactcatggatctgcaaaaggacccaccgacatcatgcagtgcagggccagctggagaggatctattccactggcaggccacaatcatgggtcctagcgacagcccctatgcaggaggggttttctttgttaatatccattttcctcctgactacccgtttaagcctccaaaagtgaacttccaaacaaaagtttatcacccgaacatcaactctaacgggagcatctgccttgatatcctcaaggagcagtggagccctgcactgaccatatcaaaggtcctcctctccatcagctcgcttctgactgaccccaacccagacgaccccctcgtccccgagatcgcccacatgtacaagaaccagaggccgcgctacgaggaaaccgcacgggcctggacccagaagtacgcgatgggctagctgattctgtctcgccgaacaatactgtcactggcaagaagatcatcatcacgatgttgtaagaattaagttgaaccggtttccccgtcgtgtgatggtattaagaccaaagttcttgtgcgtgtacagtacttttgaagctggatagtctgaatcctgtgccagaaccaaaggtcttcgctttgttccctgaagagcgtttgtgaccatagaatctgcatgcgtaaccttgccagccaagaaaacagtagctgcttgtatgatgtcgagatgatatagttcagatgggtggaaccgtgcagatgaaacagtccagtggtcttgcgttcaaaaca

SEQ ID NO: 104168 - DNA, 504 bp, Zea Mays
tactgtcaactgaccagggaaaagcgcaaggttttattgcaaccgtgcagtctgtagctatattgttggcaccactatttatgagtccactgacctcttacttcatttcagaggaagcgcccttcgactgcaaaggtttcagctttattgtggcgagtttcttcttggcaatctcgtcctgcctcgcttggatgcttaacccaggaatgaaggacaagggcacaaaagctgccgtttcagacagcgctgatgaggaagcagcgcaagcaccactactggcaaaatggaccagaccatgactccagctccaggaaactgagctataaagctcagctggagtgtgcgtaaaattgtaggatatgtgaattagagtgccaacaacatagggcttgcttgtacctgtagtatagtgtctgtacatacctcagaacgagaaagccgataaagctcggtgttttgtgccatccagccttcactgtttcaggcaaatggatctttatgtta

SEQ ID NO: 104169 - DNA, 255 bp, Zea Mays
atggagaaacagggagctggaggaggtcgcgcacagggaggtaggtggccgagctgggcgactccggcgtgcagggagcatcgcgagctggaaccagggctgcggcgtgtcttccatggccgagcagagaggtggactgagggggacgcggccaaggcagggagctcggggagaagctcggccgggcagcagccagggaaggtggagctcgactgcaacggcgacgagcgagcagaggggctgggcgccgagtag

SEQ ID NO: 104170 - DNA, 852 bp, Zea Mays
cctgtcgtgctctctttcttctctgcccctgctcgctctgttgctctgcgcgccccctgatttcactgcgcgcgagctcctgcgcccgccttctcccttgccgcgttcctctggtggccgcgcgccctccagcccggagctctgcgcgcccagcccagccactcgccatggctcctccctgcgcgcgtcggagttcctctgctcggccgcctgccatggagctcgccctgccccctgtttccatgaccggcgtccccaagctcctcccctgccggcgtccagcacccggccggatctctcatggtgcgcgtgcccttctcttggcggcgctcactttgtgcttctctctctcagcgctcgcggctctttctctcctgctccgtccatggctgtttgcctctgctcgcggcgtccctgctcgcccagccgagctctccactacctagctccatctcacggcgctctgtctgctcggttccatggccgtggtactccagctcgccgtgccctgcttcctctgtttccatggccagctctctgctcatcgcgcgcgcctggacgctctccctggtggccgcctgttctccctgtgtaccgcgcgagttctttggtagacgcgcgctggccgtgctccacttcgcccatcgcggcgctccagttccaactcgctgcgcgccgagctcttcgctgttgtccgtgcgcgcgccgctcgtcgacctctctcctcacgcatagctcgctctttccttgtttgccgcgcgcacgaatttcatctgctcgccacagcgtgtcgagttcccgcaccatcatcgcttctatcacaagctcgttggccacatttatcttgaccgt

SEQ ID NO: 104171 - DNA, 2631 bp, Zea Mays
cgctgttccgttgctgtctgcctccagcctcctgccgttacgagcgcgtcagggtttttccttggccagccggcggcggccgttgcacctcctccatccacccctagtcgaaggtcgccagttcattcatccaggctgctgcgcccgagtccctggccaccgtcgctgggcacctgccgtcctcggaagtcgcaaccggaggtgggatttattaaatttctgagatggcagaatgtcggatacaagactggaagcgcgcttcaactccagagtcagtttctagacatgaaacatcaataccaagaacaaagcaaagaaacatttttagtctattagctcagcgggagctctcacctcgaacaaaaaaccaagcaaaaaatctttggaccaaacctccaagacttgatgcttgtcctattgaatcgaaattttggggcacctatgctcagcatgatctcctttcttgggctgaagcagagttcttgcattggtggattcccaaatattgccctctcacgccttcttcgaaggcaactattgcagctgcatttagtacagatgggagagtacttgcatctacacatggtgaccatactgtcaaaataattgattggcaaactgggaaatgcttgaatgtactgcttggacatcaccgcactccatgggtggttagattccatcctcagcgttctgatattcttgctagtggaagtttggattgtgaagttcgtctctgggatgctaaaacatctcgctgcacagcagaactggtcttctgccagttgcatcaattgcatttcatgcaactggggagcttctggcagttgcatcaggtcacaaattgtttttatgggactgcaataaacgatgggaaactttggaacttccaatcatactagaaacccgccgttcactgagagctgtgcagtttcacccccatggtgccccatatctacttacaggagaggttcacaaccttgattctgaagattcaacgatgacccctgcacttctgagcaattattccttcagagacacacctctccttggtggttctggggtagataacttgattagtgaactacaatacatgcagaattttgagcaggttggtgcctcatcatcagttccagtcactactggcagttttgatgggtcaaggctacatgatacctctggccatcatctgatgacctctttacctagtgttgggaggccccttctgggtactcatgctgctgaagctcctgccatctcattaagtgtcgggtcagaacaaactacgtctctgcttggtggtggcaccgaattaccttgtacggtgaagctaagaatatggcgccacgaaatgaagaatccatttatcacattagggcctgaggcatgcctcttgacaattcctcatgctgtactttgcagcgaaatgggtacccatgtttcaccctgtgggcgatttttggttgcttgtgttgcatgtgtgctgccacacagttatggtggccatggaagtcagttgcatgaacattatgactctactggggctggaacatcaccaactcgccaagcatttccgtctcgccaaattatatatgagcttcgggtttattctcttgaggacgcaacatttggaacagttcttgcaactagagcaataaaggctgctcactgtttaacttccatccagttttcacccacatcagaacacatactattggcatatggtcggcaacatagttcactgttgaggaccattttgatcaatggggagaccagagttcctgtgtacacagtcttggaggtgtatcgagtttcagacatggagcttgtaagagttcttcctagtgtaggagaggaagtcaatgttgcatgttttcatccttcccctggatcaggtcttgtttatgggactaagcaagggaaggttaggtttcttcggcaccatggtgcatcattcacttgctggggagaacgttcatgagatttagaggcatgtgctacaaatgcagttctggacataataactgaatttgagcatcgcattcttgtgctgctgaatcttatcttgattatggcttcggcaacatcctggaagaggaatttatggtcaactgagatcatctccaagaccgagagggctaacagaaaacatcagatttcagcatccaattactcttgactaacgttccactctttgcaaaaccattgtgccggcaaggagggctactattttaggtccggttaacgtgtgtaagtagccccgtctatgagaaaatggacaaggaatcgcagcctcattcagcatgaattaccaacgatggttgactactactagtacaaggagacctcaagggatacggtcgcctgtacgaatatggatgcgagccatatactgacggccggcctcccaaagatgcgatgtgttccttagttcgatgattttttttttgaaactgtatagaagcctgcgaagaaatgtagtggttggctgagtgaagtgagggaagggataggcattatttcccttgggtgacattgaccctgtttggatcagattctagccgcgagaatctgattttcgtaataaaaaaatcgaaatcgaagtggtttacggtctatttgttttggccgaat

SEQ ID NO: 104172 - DNA, 2023 bp, Zea Mays
tcttcgtcttctcgttcacgcaatcacgcccccgccaaacccaaaccgaccgaaagcggaaagcaaatagcagacggcagacaacagtcgaggggacacaggaaggcgcgaagaagaccgagatcctcgcccaacgccatcacgccactcccccaatactcaggtgtcaggacagcgagcaggcacaagcagatctcactccacgttgctccttccgcccttcctctccgccgctccccggatcatggagcgcgggattcttggctccaggggcgccgtccaaatcttggggtcgaagaccggggccgcgatgtcatgtggcaaaacaacctctacaagttttacttgttctaccaaacacgagctgaacttgcatgtgaatgttaagccgttgcaattggcaacagatggatcctctcgtttggcatacaaaactccagtgcttaaaaatcagtggaatctttctgctagttcttcctctgcaaatgtggttaccacttttgatgatgacaaaggtgtaccttccagttttgctgaagaaaagatcggagtactgttattaaatcttggtggtccagaaaccctagacgatgttcaaccattcttgttcaacctatttgctgatccagatatcattcgactgcctaggctcttcaggttccttcaaagaccactggccaaacttatttctacttttagagctcctaagagtaaagaagggtatgcttcaatcggtggtgggtcaccattgaggaaaattactgatgagcaggcaaatgctttgaagattgctctggaaaagaaaaaattgaacgcaaatatatatgttgggatgcggtattggtatcctttcacagaagaagccattgatcagattaagaaggataatatttccaagctcgttgttcttccactctaccctcagtactccatatcaacaagtgggtcaagcattcgtgttctccaaaatgttgtcaaggaagattcatatttttctggcttgccaatctccattatcgaatcatggtaccaacgtgatggctatgtgaaatcaatggctgacctaattgaaaaagagctatctgccttttccaatcctgaagaggtaatgatattcttcagtgcacatggtgtgccacttacctatgttcaggatgctggagatccttacagagatcagatggaggattgtatttctttgatcatgggggagctgagatccagaggaatcttaaatggtcacactttggcgtatcagagtcgggtgggaccagttcaatggctgaagccatatactgatgaagttttagtagaacttggtcagaacggtgtgaagagcctcctggctgttccagtaagcttcgtgagcgagcacattgagacactggaagaaatagacatggagtacaaggagttggctctggaatcaggcattgagaactggggccgggtccctgctcttggatgcacttcgactttcatctccgaccttgcagatgcggttgtcgaagccctcccatctgcctcggcgctgggaaccagaaagcctgaagacaccgattccagcatggatctgatgcattacctgaccaagatgttcttcggctcaatcttggcatttatcctgctgttgtcaccaagactggtttctgctttccggaacaccatgctttaggtggttaggtaggtaagcaaaaagggaatggtgtgataggtaattcttaaaaatttgagattaataatggaaaaactggagagagcttggtgatagtaactagagatcctttaggctttgtttgggtactctagtattgaccctaatccgtgtgttgagatagattgaggtgtaaattagtttaagttatacctcaattcagctcagtacatatagattgagctcaatactagaatactcaaactaggccttagtgcacgaggtagcagcttgtaatttgctgtttttgatattgttcacaggaaacattggtctcataaatgaatctgtgaaagcacataacgttac

SEQ ID NO: 104173 - DNA, 1899 bp, Zea Mays
tcttcgtcttctcgttcacgcaatcacgcccccgccaaacccaaaccgaccgaaagcggaaagcaaatagcagacggcagacaacagtcgaggggacacaggaaggcgcgaagaagaccgagatcctcgcccaacgccatcacgccactcccccaatactcaggtgtcaggacagcgagcaggcacaagcagatctcactccacgttgctccttccgcccttcctctccgccgctccccggaaggatcatggagcgcgggattcttggctccaggggcgccgtccaaatcttggggtcgaagaccggggccgcgatgtcatgtggcaaaacaacctctacaagttttacttgttctaccaaacacgagctgaacttgcatgtgaatgttaagccgttgcaattgttttgctgaagaaaagatcggagtactgttattaaatcttggtggtccagaaaccctagacgatgttcaaccattcttgttcaacctatttgctgatccagatatcattcgactgcctaggctcttcaggttccttcaaagaccactggccaaacttatttctacttttagagctcctaagagtaaagaagggtatgcttcaatcggtggtgggtcaccattgaggaaaattactgatgagcaggcaaatgctttgaagattgctctggaaaagaaaaaattgaacgcaaatatatatgttgggatgcggtattggtatcctttcacagaagaagccattgatcagattaagaaggataatatttccaagctcgttgttcttccactctaccctcagtactccatatcaacaagtgggtcaagcattcgtgttctccaaaatgttgtcaaggaagattcatatttttctggcttgccaatctccattatcgaatcatggtaccaacgtgatggctatgtgaaatcaatggctgacctaattgaaaaagagctatctgccttttccaatcctgaagaggtaatgatattcttcagtgcacatggtgtgccacttacctatgttcaggatgctggagatccttacagagatcagatggaggattgtatttctttgatcatgggggagctgagatccagaggaatcttaaatggtcacactttggcgtatcagagtcgggtgggaccagttcaatggctgaagccatatactgatgaagttttagtagaacttggtcagaacggtgtgaagagcctcctggctgttccagtaagcttcgtgagcgagcacattgagacactggaagaaatagacatggagtacaaggagttggctctggaatcaggcattgagaactggggccgggtccctgctcttggatgcacttcgactttcatctccgaccttgcagatgcggttgtcgaagccctcccatctgcctcggcgctgggaaccagaaagcctgaagacaccgattccagcatggatctgatgcattacctgaccaagatgttcttcggctcaatcttggcatttatcctgctgttgtcaccaagactggtttctgctttccggaacaccatgctttaggtggttaggtaggtaagcaaaaagggaatggtgtgataggtaattcttaaaaatttgagattaataatggaaaaactggagagagcttggtgatagtaactagagatcctttaggctttgtttgggtactctagtattgaccctaatccgtgtgttgagatagattgaggtgtaaattagtttaagttatacctcaattcagctcagtacatatagattgagctcaatactagaatactcaaactaggccttagtgcacgaggtagcagcttgtaatttgctgtttttgatattgttcacaggaaacattggtctcataaatgaatctgtgaaagcacataacgttac

SEQ ID NO: 104174 - DNA, 2073 bp, Zea Mays
tcttcgtcttctcgttcacgcaatcacgcccccgccaaacccaaaccgaccgaaagcggaaagcaaatagcagacggcagacaacagtcgaggggacacaggaaggcgcgaagaagaccgagatcctcgcccaacgccatcacgccactcccccaatactcaggtgtcaggacagcgagcaggcacaagcagatctcactccacgttgctccttccgcccttcctctccgccgctccccgaaaattcctgcaggaaggatcatggagcgcgggattcttggctccaggggcgccgtccaaatcttggggtcgaagaccggggccgcgatgtcatgtggcaaaacaacctctacaagttttacttgttctaccaaacacgagctgaacttgcatgtgaatgttaagccgttgcaattggcaacagatggatcctctcgtttggcatacaaaactccagtgcttaaaaatcagtggaatctttctgctagttcttcctctgcaaatgtggttaccacttttgatgatgacaaaggtgtaccttccagttttgctgaagaaaagatcggagtactgttattaaatcttggtggtccagaaaccctagacgatgttcaaccattcttgttcaacctatttgctgatccagatatcattcgactgcctaggctcttcaggttccttcaaagaccactggccaaacttatttctacttttagagctcctaagagtaaagaagggtatgcttcaatcggtggtgggtcaccattgaggaaaattactgatgagcaggcaaatgctttgaagattgctctggaaaagaaaaaattgaacgcaaatatatatgttgggatgcggtattggtatcctttcacagaagaagccattgatcagattaagaaggataatatttccaagctcgttgttcttccactctaccctcagtactccatatcaacaagtgggtcaagcattcgtgttctccaaaatgttgtcaaggaagattcatatttttctggcttgccaatctccattatcgaatcatggtaccaacgtgatggctatgtgaaatcaatggctgacctaattgaaaaagagctatctgccttttccaatcctgaagaggtaatgatattcttcagtgcacatggtgtgccacttacctatgttcaggatgctggagatccttacagagatcagatggaggattgtatttctttgatcatgggggagctgagatccagaggaatcttaaatggtcacactttggcgtatcagagtcgggtgggaccagttcaatggctgaagccatatactgatgaagttttagtagaacttggtcagaacggtgtgaagagcctcctggctgttccagtaagcttcgtgagcgagcacattgagacactggaagaaatagacatggagtacaaggagttggctctggaatcaggcattgagaactggggccgggtccctgctcttggatgcacttcgactttcatctccgaccttgcagatgcggttgtcgaagccctcccatctgcctcggcgctgggaaccagaaagcctgaagacaccgattccagcatggatctgatgcattacctgaccaagatgttcttcggctcaatcttggcatttatcctgctgttgtcaccaagactggtttctgctttccggaacaccatgctttaggtggttaggtaggtaagcaaaaagggaatggtgtgataggtaattcttaaaaatttgagattaataatggaaaaactggagagagcttggtgatagtaactagagatcctttaggctttgtttgggtactctagtattgaccctaatccgtgtgttgagatagattgaggtgtaaattagtttaagttatacctcaattcagctcagtacatatagattgagctcaatactagaatactcaaactaggccttagtgcacgaggtagcagcttgtaatttgctgtttttgatattgttcacaggaaacattggtctcataaatgaatctgtgaaagcacataacgttacaaatcaaaggtctctgtgggcccttctctcttt

SEQ ID NO: 104175 - DNA, 2060 bp, Zea Mays
tcttcgtcttctcgttcacgcaatcacgcccccgccaaacccaaaccgaccgaaagcggaaagcaaatagcagacggcagacaacagtcgaggggacacaggaaggcgcgaagaagaccgagatcctcgcccaacgccatcacgccactcccccaatactcaggtgtcaggacagcgagcaggcacaagcagatctcactccacgttgctccttccgcccttcctctccgccgctccccggaaggatcatggagcgcgggattcttggctccaggggcgccgtccaaatcttggggtcgaagaccggggccgcgatgtcatgtggcaaaacaacctctacaagttttacttgttctaccaaacacgagctgaacttgcatgtgaatgttaagccgttgcaattggcaacagatggatcctctcgtttggcatacaaaactccagtgcttaaaaatcagtggaatctttctgctagttcttcctctgcaaatgtggttaccacttttgatgatgacaaaggtgtaccttccagttttgctgaagaaaagatcggagtactgttattaaatcttggtggtccagaaaccctagacgatgttcaaccattcttgttcaacctatttgctgatccagatatcattcgactgcctaggctcttcaggttccttcaaagaccactggccaaacttatttctacttttagagctcctaagagtaaagaagggtatgcttcaatcggtggtgggtcaccattgaggaaaattactgatgagcaggcaaatgctttgaagattgctctggaaaagaaaaaattgaacgcaaatatatatgttgggatgcggtattggtatcctttcacagaagaagccattgatcagattaagaaggataatatttccaagctcgttgttcttccactctaccctcagtactccatatcaacaagtgggtcaagcattcgtgttctccaaaatgttgtcaaggaagattcatatttttctggcttgccaatctccattatcgaatcatggtaccaacgtgatggctatgtgaaatcaatggctgacctaattgaaaaagagctatctgccttttccaatcctgaagaggtaatgatattcttcagtgcacatggtgtgccacttacctatgttcaggatgctggagatccttacagagatcagatggaggattgtatttctttgatcatgggggagctgagatccagaggaatcttaaatggtcacactttggcgtatcagagtcgggtgggaccagttcaatggctgaagccatatactgatgaagttttagtagaacttggtcagaacggtgtgaagagcctcctggctgttccagtaagcttcgtgagcgagcacattgagacactggaagaaatagacatggagtacaaggagttggctctggaatcaggcattgagaactggggccgggtccctgctcttggatgcacttcgactttcatctccgaccttgcagatgcggttgtcgaagccctcccatctgcctcggcgctgggaaccagaaagcctgaagacaccgattccagcatggatctgatgcattacctgaccaagatgttcttcggctcaatcttggcatttatcctgctgttgtcaccaagactggtttctgctttccggaacaccatgctttaggtggttaggtaggtaagcaaaaagggaatggtgtgataggtaattcttaaaaatttgagattaataatggaaaaactggagagagcttggtgatagtaactagagatcctttaggctttgtttgggtactctagtattgaccctaatccgtgtgttgagatagattgaggtgtaaattagtttaagttatacctcaattcagctcagtacatatagattgagctcaatactagaatactcaaactaggccttagtgcacgaggtagcagcttgtaatttgctgtttttgatattgttcacaggaaacattggtctcataaatgaatctgtgaaagcacataacgttacaaatcaaaggtctctgtgggcccttctctcttt

SEQ ID NO: 104176 - DNA, 1766 bp, Zea Mays
tcttcgtcttctcgttcacgcaatcacgcccccgccaaacccaaaccgaccgaaagcggaaagcaaatagcagacggcagacaacagtcgaggggacacaggaaggcgcgaagaagaccgagatcctcgcccaacgccatcacgccactcccccaatactcaggtgtcaggacagcgagcaggcacaagcagatctcactccacgttgctccttccgcccttcctctccgccgctccccggaaggatcatggagcgcgggattcttggctccaggggcgccgtccaaatcttggggtcgaagaccggggccgcgatgtcatgtggcaaaacaacctctacaagttttacttgttctaccaaacacgagctgaacttgcatgtgaatgttaagccgttgcaattggcaacagatggatcctctcgtttggcatacaaaactccagtgcttaaaaatcagtggaatctttctgctagttcttcctctgcaaatgtggttaccacttttgatgatgacaaaggtgtaccttccagttttgctgaagaaaagatcggagtactgttattaaatcttggtggtccagaaaccctagacgatgttcaaccattcttgttcaacctatttgctgatccagatatcattcgactgcctaggctcttcaggttccttcaaagaccactggccaaacttatttctacttttagagctcctaagagtaaagaagggtatgcttcaatcggtggtgggtcaccattgaggaaaattactgatgagcaggcaaatgctttgaagattgctctggaaaagaaaaaattgaacgcaaatatatatgttgggatgcggtattggtatcctttcacagaagaagccattgatcagattaagaaggataatatttccaagctcgttgttcttccactctaccctcagtactccatatcaacaagtgggtcaagcattcgtgttctccaaaatgttgtcaaggaagattcatatttttctggcttgccaatctccattatcgaatcatggtaccaacgtgatggctatgtgaaatcaatggctgacctaattgaaaaagagctatctgccttttccaatcctgaagaggtaatgatattcttcagtgcacatggtgtgccacttacctatgttcaggatgctggagatccttacagagatcagatggaggattgtatttctttgatcatgggggagctgagatccagaggaatcttaaatggtcacactttggcgtatcagagtcgggtgggaccagttcaatggctgaagccatatactgatgaagttttagtagaacttggtcagaacggtgtgaagagcctcctggctgttccagtaagcttcgtgagcgagcacattgagacactggaagaaatagacatggagtacaaggagttggctctggaatcaggcattgagaactggggccgggtccctgctcttggatgcacttcgactttcatctccgaccttgcagatgcggttgtcgaagccctcccatctgcctcggcgctgggaaccagaaagcctgaagacaccgattccagcatggatctgatgcattacctgaccaagatgttcttcggctcaatcttggcatttatcctgctgttgtcaccaagactggtttctgctttccggaacaccatgctttaggtggttaggaaacattggtctcataaatgaatctgtgaaagcacataacgttacaaatcaaaggtctctgtgggcccttctctcttt

SEQ ID NO: 104177 - DNA, 2106 bp, Zea Mays
gtggcgtggcgttgcctccccttcgcttcactccgatcccctatcgcggccatgacgggagccaagcaatctcgccgatgcaacctcctgacgtttttctccaccatattggccaccgttctgcttttgatcttccagcgattctcgccgacggcagctgcagtgccgcagtggagaaggggaggaactcaggaacatatcgacgttgcgcggggagccgaggcagtgggccacgggcaaggacgatgcgaagattctctccgaggcggaagctcgcgctggcggcggaggagagggtttgctgacggcggacgagggacgcgagttcgcctcgctctacagcatgctgcagtgggcaattggtatgcagggaactctgatccggataagttgagagaaaaggctgcagaattggtgaaactatcggcagaggaattactcaagagacagatggagattaaggagttgatggagaagttcaaggcgccatcagatgctgagttgataaagattgctattgctgacttaaataattcctctctggaggaccgccaacgtgcactgcaagagctcttaattctcgttgagcccatcgacaatgctaatggtaaattatgtatttgtttgtcaatataaacatatgcctgaaacctcattttcagcaaatcaatgtattcatgaatgtgtaactggataatagatgcccccttttgacccttgtccataagagagagtatgtcagcttaattatttacctgttgtaatgggtgcatattaagatgacccatgtacatgttgcatagttgtttgttgtgaaagttaacactgtgttttcaagtctccattctctgtctcataaagatcagcagttcatttatagtcatgtttgccagtttgtgcaatccaagaattatactttttcctatacttgattcttatggtgacatgattttctcaatttattttcataccttgacaaacttggagggcttcttccgttaattcaggaacttggcaatgcagacgaaggaataagaactacttcagcatgggtgctgggcaaagccagtcaggacaatgttcttgttcaaaaccagatcaatggatatggagctttggacagattagtgaagatgggttattccagttctggaccagaagctgcaaaggcattgtacactatatcctctttgattagggacaacgaacatggtcaggagttgttcctttcagaaaatggttatgcaatgttgcagcacatattgtcaaccacaaacactagtgttcggcttcagaaaaaggttgtgtctttactggcatatatagctgactttcagctaaatacagggaagtcacaagctcaatccttactcaaccactttttcatataatcagtagttgagatgatatcagcagtgcctgaccttgacctccaggagaaggctttgttagctgttaggaatctgctgcaccttacgtcagctgatgctacagatcttcagaagttttcaggcctggatgattccctgaatgcactgaaggtgcaattggatgagttgacatctcatgaggaacaaagagagtatgctccggaaattgaaattctccggagagaagtccacactgtcttccagcggaaaactgaccaggcaagggtggtgacaaatgaaggcaaatataatggttagaaacatttgctgtccatataagcgtttgttcggttcttccccaaaccaagagggttgggggatttaatagtcccccctcaattctctccaaccccttggtttcgggaggaaactaacaagctctaaaggtgatcacataacaattcctcaactgaatgacaagttgtcaatagaacgagttgcatgggatcatagatacttcacagagataggatgtcacaaaatggtgattgtctatcaagttacagaacgaagaagtgcagtggaacagagttctcattctcactgatttctgcttcgtgtgaaactgtttcatagtacacttgtagcccattgaatgtcgatgttgttcatacgcaaggactcaaagttgttactgggcctgaactaaggctacaatcgcaatagccctgattca

SEQ ID NO: 104178 - DNA, 378 bp, Zea Mays
atgagcagccatgatgccaaagtgctgcaaaacttggtcctcaatcttgcttcctcagtggaaagtggtgctttcaatattaggacctttttagaagaggctttccgtcatttgggtgatgagcattaccttctgaatgctctacttgctattcgaaaggaggtagacctgatggagcaggatgcactggagagcaaagcaaggtctgacccagagaaggagaggatggaggaacaaattaaccttgctgaggctgccaagacagtgcctagacaattcactttcacccccccttcctcaccagaattgtatgaggccagtgacaatgactcctacgactcggacaggtccactaggtatagcatttggaacctgtaa

SEQ ID NO: 104179 - DNA, 767 bp, Zea Mays
ctgtaggctgctgcatggcctcctagcatgtcggtaggtgcaggagatgtgcgatctgcacctgatttagccccacaccccttcgcagcttctccaagttgcgcatcactgcgccgcattgggagggcatgcggttccacatgtgggaggcaggcaggttctttcccccgtggatggcgaacttggagtttgcggcagtggcggttggggagggtcacccctccctcatcgctgttctctatcggaagccctcctcttttctcaatccatttcaggttgagaataataaaatgagccgagatgtaaaaagcttgcttttaggtgttagatcgttggttaggttgcagctcgaggatgagctacttgtccaggaggggtgtagtgttagattgctggttagttgattgggttagtttggaaggttggaggaatgataggaaagaaaaggggaattatagggaatggtttagccagggaggcttgttatctgcaacctgtatggggattagaaaggaaacaccttctctcttgctcggccatgggcaaggccccggctctcccaaccccagccgccaccgtagcaggccttggctataaattggaggaaaaaggagagacgttcaagttactgtttgtaacctcagcctgcagttatgcttctgataggatcaccacactgccgacatgcataatcatgtccagatggaggcctccaactgcatccgcatatagacattggatggaaaaagaaacaaatttaaaatcat

SEQ ID NO: 104180 - DNA, 1214 bp, Zea Mays
ccatatttaccacatggggacggtttctactctttttccccccaaatctttagcgtagtctgtctgcagagatttttctttttaaaagagcaccattaatctcatatgtactaattgtatgatactgcatgtattagtattatcaatcaccaataatgaaataaatagaggaaaacacattttgaaagcagtgaaagagcaacctgcagcatcctatcttctagatgctcaaagtggaatgagcgtgtcccctagagttcctgcccaggatatgaaagaaagccaagaagttaaagaagcactgagagcgcagatggaagtccaaagaagactgcatgaacaagtggaggtccaaaagcgcgtgcagatcagaatggaagcgtttcagaagtacatcgacagtatcctggagagcgcgtgcaagatggtcaccgaacagttcgcttcaagtggcttcagcatctctgaccctgatctcccggagatatcccctggaggggtggtcatgtgtggcggccccacggacacgttgagctcgtcggtgttcaaccagctttccgtcagctccatcggctcgcacagtccaggaggcaaaccttccccttccccatcaggcatggaatgtccgccgctgctcctccacaagtcgcatgagctcaagcggaggtcctcttgaactgacaaatcggcgaagcctgagggcgcggtgatggctgtctttgctagtgttgtcggatatggtggtactggtggtgacaagggaaattggtggtccagtcttgtggtagctgactttctccaggtagcaagatattgctgtgtttgtttgatcagtcaaagcatcaaacagacagacctacgttcatgtgaactgcctcatgcatgtgctagattgaaaaaaaaagttatcatattttgtcatgagattatgattctactagctagcatccttagcacacttgagatgttgttgactcgtgtcctagtgtcctctgtgttgatccatgtatgcacagcgattcatgttgggagttgggactgggacatgttaacaccagatgtttcaagcttcgtactttgcctcagttgtccatgcatgcagcaggcatcccagtacttcacctgctgttgaacttgaagactagtgtattcagcttatgaaagattcatgctgagtttgtacccccacaaattgctagttgcaactttgaact

SEQ ID NO: 104181 - DNA, 1417 bp, Zea Mays
cttgttcctctcaactcccttccctccaccggctctgtcattctgtcctccattaccgccacctcctagtttctcgcgcctcgccgtcggcgagcggcgccaccgtcggcgtagagccaggcccgaggccattcctccctcgcagggaggcgtcgccgttgccccgccctctgggctagcgcggcgtggaggggacaactggagatccgcctgtctctgcttggattgctttttcctcctctcgccgtgcatgattcaaaaagctttgcaagcagagagttgctgaattgaagagggaattgcataagtcagaaagttctattggacagaactaccctactgctgcgtgaagacgatggagtggccaccaccgtcgacgtcaccatcgccgtcgctggtggtgcgcagccccaggcaaacagtcagcctgatccgcaaccggcgaccccatcgtgactgggccccctcatcgaggtctccctctttcgccgcccgtgaccatggccccaagccttcggaggtgtacggcttcgttggatccatcaccaccgtcattgccaccgccgtgtacctcgcctgggcatacacgcccgagcccgtcctccagtcactcggcatcacctactaccctagcaagtactgggcactggcggtgccatcgttcgtggttgtgaccgtggtgctgtccatgggcatctacatgggcctcaacttcgctgccactcctcctccgacttccttcagtactatcttcgatgaaaagagtagggagcacacagccttttcttctgcaactgaggatgagaggcccattgaacccatctcagacatcggtattgatcggatcaacagtcttatgtttggtgatagatgatttcccccggtggaatatgagtttaccatggagcgccggattggaaatagatgcaaacgcgaaggaagatttccatgtcagctgaactttgttgcctgcatatgctattgagaggcccgtcgaacccgttttcagacggtagtattgatcagatcaggaatcttatacttggcggtgatagacgattactcaaaaatggagtgtgagtttacaacagagtgccagattggaaggcgtgaagaaataatccacattgttaagtgaactttcatattaccttcaagcataaccgacaaaggaattcgatccttgagcttttcgtttcacgtgaagggacgccctgtaactggattttttttgtgttgtgtagtaatgtgatgtgtactgtggtaaactcactgcggctgtgcctaggtatttatttgtgttgtgtagtaatgtgatgtgcacagggctgttcctgacttttgaggggcccgggacaagattataaatagaggctccaacaccataaaaactattttttactattatatatatcaa

SEQ ID NO: 104182 - DNA, 1339 bp, Zea Mays
cttgttcctctcaactcccttccctccaccggctctgtcattctgtcctccattaccgccacctcctagtttctcgcgcctcgccgtcggcgagcggcgccaccgtcggcgtagagccaggcccgaggccattcctccctcgcagggaggcgtcgccgttgccccgccctctgggctagcgcggcgtggaggggacaactggagatccgcctgtctctgcttggattgctttttcctcctctcgccgacagaactaccctactgctgcgtgaagacgatggagtggccaccaccgtcgacgtcaccatcgccgtcgctggtggtgcgcagccccaggcaaacagtcagcctgatccgcaaccggcgaccccatcgtgactgggccccctcatcgaggtctccctctttcgccgcccgtgaccatggccccaagccttcggaggtgtacggcttcgttggatccatcaccaccgtcattgccaccgccgtgtacctcgcctgggcatacacgcccgagcccgtcctccagtcactcggcatcacctactaccctagcaagtactgggcactggcggtgccatcgttcgtggttgtgaccgtggtgctgtccatgggcatctacatgggcctcaacttcgctgccactcctcctccgacttccttcagtactatcttcgatgaaaagagtagggagcacacagccttttcttctgcaactgaggatgagaggcccattgaacccatctcagacatcggtattgatcggatcaacagtcttatgtttggtgatagatgatttcccccggtggaatatgagtttaccatggagcgccggattggaaatagatgcaaacgcgaaggaagatttccatgtcagctgaactttgttgcctgcatatgctattgagaggcccgtcgaacccgttttcagacggtagtattgatcagatcaggaatcttatacttggcggtgatagacgattactcaaaaatggagtgtgagtttacaacagagtgccagattggaaggcgtgaagaaataatccacattgttaagtgaactttcatattaccttcaagcataaccgacaaaggaattcgatccttgagcttttcgtttcacgtgaagggacgccctgtaactggattttttttgtgttgtgtagtaatgtgatgtgtactgtggtaaactcactgcggctgtgcctaggtatttatttgtgttgtgtagtaatgtgatgtgcacagggctgttcctgacttttgaggggcccgggacaagattataaatagaggctccaacaccataaaaactattttttactattatatatatcaa

SEQ ID NO: 104183 - DNA, 186 bp, Zea Mays
gggggcaaagaaatctcattcaatatagattttaaagttgacaatgcatatattttaattttttggataaacagtatagcataaagcatattggtttatgtgaaaaggtacaaatagtttgagagcaaagaatagcataaatcatattggtttatgtgaaaaggtacaaatagtttgagaacaaag

SEQ ID NO: 104184 - DNA, 307 bp, Zea Mays
gtgctggcccggtccgacacgattattttttttattttacaaaaaatgtatatacctatatacaatttatattcaatattaaaaacatcttagcatgatgttctattggttagacagtttcaccagtgtctcccgcccttcttccattagggcatgggttcgaaccccacctcctgcactgtttttaatattttacgccgatttaattaaatgtgtcgacggactggcccgacatagttagaagaccgtcatgacgtgcctgtgccatagttgtggcccgcgtgcatctagcccatgtcgggcgtcg

SEQ ID NO: 104185 - DNA, 297 bp, Zea Mays
gcagtgacactgatttatttggctagccaatagaccattatggaggccccatgcatagtccgagggaattttttgtggatgatattagcacaagtgcaaggcccagaaataggtcagattggtagtacggcgatgtctcatgtttaagccttctgttattaaaaagctcatctcagctatgaaatatcgaggcatcagtcaggggattattgttgggtcccttaaccattatgcaaaaaggcgtttgcctggtttgaatcagcgtaaaagcatcagtgatgctgtcaacagtctttt

SEQ ID NO: 104186 - DNA, 828 bp, Zea Mays
atgagcttgaaccttcgtcctacccccagtagatgcacgacccttcgaaacaatccagtccacgaagaaggggattcgtcagctatcatcgttgccgagccacaacccctgatgcagcagcttcgacatcaccttgcaaagccccatcttcacccgcataccagacatcgagaatcgaaagcaaccatcgaaggcgaagctgaggccgagacacaaacttcaatgcgacgccttcaggaagggagtgacgtcggggacgacaccgtcgtgagtccgagatggaccaggctttcgcccaaggaagaaaatattggggaatatgacgcccccaacagtggaagcggcgcccacgggcgtcgccgtcgccgaggctctcgcccaagaagcccccaacaccaatgtcaggccaagagctaccggcgttgccgtcctccataccatatgcatcacacaggcatgtaccagagccgcacccggcagccgatggcactagcacacatggccaccgaatctagatgtcgccgagcaccctgccaccttgcgttgtcctggccattggccggcgccacccctcacaaacgtgcgacctcaagcaccgccacgccgatgtcggagcgtcgagccaccaccatcgcagcttcacacagccgcaagccgaggccacaaatgaccaacgtcgtcggccccggcacctgccgatgttgctgccagcagccacaggacgtgtgtcccattatctcgggcaccgccccctgccctgaggccaccggatctggatggcaggccccaaaaccggcgtccctgcagatgtcgcggcctccgtgttga

SEQ ID NO: 104187 - DNA, 594 bp, Zea Mays
atggtgagacgggttcaggtgctgttcttgttgcggtggtcttggcttgtgcactggagtgcactgggagccatagctgatggctctgatcacaagtacaaggatggggatcatgttccacttcagaatgcaccctgggaatatttgattgagctgcttgaggacaggaagagcagcaactactcatatctacataccaatgaccgcttagaaaacaataattgctttttaatcaagaaaaagatttgtttcattttccctttttattggtcttatgaactcacaattcttattttacttattttagctccacactccttaaccagatcaactgctgcagtgtctgttccacccaatgcaaatcgcaaggtatgcgatcgtagcggctcgggctcttcctcaccaagaggaacacaaacagagctcagttgttgcctaaatttttgtaccttgttcatcgtactggagatgctacttcatgtggagttggtatgtaggatgattatcacgagtacttcaagcgctcatttgaggaagacatcgctgcgcaagtgcctcaaggagtggaatggtgagcccctgtccatctgctga

SEQ ID NO: 104188 - DNA, 994 bp, Zea Mays
ggatcactatcaaatcttatagccagaacatacatgtagatgttagtgactaaaaattaattaaaacaagtaaacattgatcgctaaattgcatggtgatttatttctttttaatattgcttgtatgtttatttcatggtttgtttatgtatggacatgactatagtatgtaattgtgttctttgtgcttatatgatattagttattacgttaaataggacaataaatttttattcagatgtttattatttatttgcattcgtaataatgtattcaaatgtttattatttatttgtaaatttttatgaatttttgagtaatttaaaatgcatttcgaaataaaaaaaccctccctaaccctaaggcccactagggcccatctacctaaccctagcagccgcgcgctccctggcttctctcccagccgtcgccgcctctatctctcccttccctcttctctctcccctcacctctcctcccttccctcgcctcgctcctctctgtcccgaccgagcagcaacggctgagccctggccgagccgccctcccccgatgtgcctgcaccgaccctagtgccactgccacgcccggaagtggctcgatgcccagaggtttttacgcggcgcgcggcgggtcatctcacagtcccatatgcaagagagtccggagcggaggccgggcgggaccgcgggagggggcggccggggtccggtccggggaggcggggaccagggcaatgcacaacgcgccggcagtgaccagtagcccactatggcaccagctcctcgcatcgcatctcccctgctaggcctcctcgtcccggcgaagtgttgaagatggctttggtgacggaaatgtcttgttagcatcaagtaagtggcgacatcacaacccctacaagcttgtgccttaaaacaagaggatacaagaagttggagtgcttttatgaaggcttttgcgaatcacttgaagcgttagtacttttgtgaatgat

SEQ ID NO: 104189 - DNA, 483 bp, Zea Mays
acaccataccgcaagtagcccagctctgcgctcatcttccctgcaccaaacctcctctcgatcagaccatgaagctcggaggacgacaagggaggctcaacagagccttgagggagaaaagggctaggttctacattttccgccgctgcgtcgtcatgctgcttcgctggagcgactagaccgatctccatcactccatgggtgccgttttggtagagtttaggcgtagttgctctcttgctgtgtacatacaggatgagcacaccgtgtggctggttctagtggcaatctctctctctctctctctctctctctctctctctctcttgttttcctgcttgcctgttgtttcagtaaaggcaagggtgattgatcgatcccgctctgtggtctgagatcgccgtactatgtactgcccgaagaagattcattcatatgaacagtcttttgttaccggcgatgataataaactagcaatatcat

SEQ ID NO: 104190 - DNA, 132 bp, Zea Mays
atggagcagcagcggaagaagcagcaccagcagcagcagagagggaagttgcagagggtgctaagacagcagaaggctaggctctacatcatccgccgatgcgtcgtcatgctcctctgctggagtgactga

SEQ ID NO: 104191 - DNA, 504 bp, Zea Mays
atggagattcctgtaatctatgaggcacttggcgatctcgatgaggcccaaaagcttcttcatagggcactcaggcgagggctcatcgagggagtggagcattgttgccggtgttgtggcacaaatgggcgttctgtactacatggtgggaggtatgcaaattcggggaactcgttcaagggtgcagttgcaaagtctagggccattgtacagatagatggagtacacagcgacatatttagccctggtgctgaaagggggagccacacacttctgattcaagtattatttacccgctatgaattcaaagtcggcactcacgatggccttggacacaatcctgagcaacaagatgttgaaatactatttggacctggctatactggtcttgcggatcttgggaatagatactttgagaaacagagtttgaaagctgcatttgctactgcactagctgatccaacagtagacctaaacatgcaaatgcaccgaagggatctctga

SEQ ID NO: 104192 - DNA, 1124 bp, Zea Mays
tttcgtcgtacacctcacccgctttcctttgctccacacgagcgacgcgatttctctctcttttaaattaaattatcttggactgctgttggtctggtcggcggctggtggcatagggatggagacggcggcggcgatggtggagggcggggtggggcggttctcgcgggcgccggcgctggccgcggcgctgctggcggagacgtgggcgccgctggccgtggcgctcgcggcgctggccacgctgcccagcctgctgcgccggctgcaggtcatcgtgctgcgcctccgctcctgcgggaaggaggccatccagtcgcacatcgggacctactactactcgtcctgcgacgaggatgacggcgacagcgacgaggacgagagctccgacgacgaggcggaggccggctcctccggcgacgacgaggaggatctggagcgggtcgggttctacgagggccccgcagacggcgtcctcccatggggcggcgccgtggtccggacctggcagggccgcttctccggctgcgcctcgggcgggggagctgtcggcgccaccgccagcggagcggcgtcccccgccgctgtcaggctgtggggtgccggcacggccagcggcgagccttggtgggctgcctgcagcgccgacgaaagcggctggcgcgacggtgcggccgcggaggcggaccaggtcgtggtcgggtggccgcgcgagcacgcgtcgcagcagcggcggcggcgcgagcggcgtgccgttcctctcgctctcacgggcaggtgaaacggaaggcacggcaatcggcaaggggggctgtcggaggatgtgaatatgccgcagggcgaccagctggagatgccgattccacgcagacgcagggagggacggccacggcccagaccaggccaattgaaccggctactacctcgggtgggtggactatagaaatgcatggtcatggagctgcgcgcacatcttcgatctacccgtggtggtgatgcttgcgccttccacttgcacgcatgcaatttgtacttccattcttagagtcatcttttgatcaataagcgaaacaaaatggtgatatcgcctttgttttttttaataaaaacttgttctcttcgta

SEQ ID NO: 104193 - DNA, 342 bp, Zea Mays
atggctgcccctcgagaggaaggcgccaccgagctcaaccaggagagccgatggccggtgtggtcttctctgctcctgtaccggcagatcctcgacgagatcgaggccaacgactacgacaacttcacccggagggcctacattcctaagacgaagaagctgatggcgctgcccaaggcgtacctgagatcactggtggtgccctcctcgtctcctcaggctgagagccggagacactattccaccctaacatagaccggtctctctctcactgtcggtacatagcagaagcaatgaatgatcgatatgatgtacaaatttctggccaagctgtttggagga

SEQ ID NO: 104194 - DNA, 1038 bp, Zea Mays
gaagcagctcatgttgtcgacagtgcaacccagcgtctcctggaggaaaataaccagttgcttaaccagatttctgcaaataatgaaacattcaagacagtggagaacacaaatccttttctccgcacgagtaacaacatcaaaacaattttaagcagaatgagcgaaacgcctggtatcatgggtcagatgcccccattgcctttatccataaatgaagaccatataaattctcttattcaactgaacagaccggtaaggacacacaatctgttagcaaacagaagagatgtttgatatttcagtgcgacgttaacaacaggctctcaattatgtctaagcaacattatcttatcctgaaaggttgcatcatatggcacaacaagcatttcccatcacatgaagcaagagacatgagttgaaaccctaattaaaaaccaaaatgccattttttaagcacggacctccaagcaacaagaccatacgatacaaatgactccacaagacctacaaatctcgagcatcatcagaacagtttgcagacaggcaggcaggcagctaccaccgccacctccaccatgtgccccaccgtgtcgcttccctctcgttggccatcatgggctcctgcctctcctccgaggcccccgccaccggcgatggcccagcggcgtggcgaaagaggcaccacgggagccaggagggcgcggccggcggaggtgggaagaagctgcccggaggagcgggggagatgacggaggatgagctcgcgtgggtcctcgagaggttgtgcggcaaaggcgctagcgcggtggcgagcctccacacgcagcaggaccggaagggcaccaaccaggacgccatggtcgtgtgggagggaggggggactgcagagggagcggatgctggacgaggaggggatggactggggcagcggtcatgcggaggggatagacggcgagaggatggggcggatgcggcatgcagatgacccgtgcgcggctcgcggatgggacagatggggtggtttgtgcgggcgag

SEQ ID NO: 104195 - DNA, 1633 bp, Zea Mays
gctgctgtttcaacaatgcggaaggttgatcgacccccaaccaatccgaagcgtttaatcattgagtcaagtcaagaatgtttcagtgttgacattccacgctcgactgacatggcagaccctacaaatacgccgtctgatggtgatcctccgcagcatagaaagacgggcgttgcagctgctgctaaaaacattgctatgcctaatgtggatgatgatgatgactttgagccacccaaaaagaagtgcaatatctcaatggatgccccaaataagacgcagaagctcaacatcagatgcaacccaggagatgttcttgcgtccattcagatattgaatgaaaggcaacgtcaagctatagtcagaaaaggattttctagtattcttgacatgacaattgatgcaattggatgtcgaacacttctctgttggctcatgcagaagctagaccccagggacatgactcttcgtattggtccagacaaagaactcaaaatcaccaagcagactgtccatcagatattgggtcttccaaatttgggtggtggaaagccccttaatattaatgaagcgaacgctgcggcaacacttcgggcctcattgaatattagcaaggatgatgacttatgtgaggctgcccagagatggcacaacaggagcattaacaatgtgtcggcgacgatatatggctgttccatcattgttcttctgtattatttggatcatttgcatcatgctgctgctccaaacaacaaaaatggcactccacgcataaagtattttaataagaatattataagggcgttgtcaatggccgataagcggaagcctcgccagggtggtgaaccatttggtgtttgcccttttcgtagcagcagtgagacatgttacgtctcaaaatcgccaactacttgccagattgagtttcctatgaggccaaaaacttttgatgaagacccaaatcaacatgatcgacttcccaatataatcatccaacttcctcttatgcaagacttgatggcaaataagattcagatgcttcctgtacatcaacgccagaagttccaagctacgttgattgattatgacttagaggttggcaaaatatttgcctctatcaagcaatgtttgaatactattggtacaaagcagtccaatctagctgctacatttggagaattgattgatgaggttcttcgggccaatgaatctgttacaccaaatactgttagtcagacagtggtaggtggcacagttgaaaatgattctggaccagtatttgacaagactcctattgggagtgtttctgcaccaggtctcttcttatctgaattagaatgtgctcgggctcttcgggcatacttgtgttctaggttcattgaattggacaggtacataattttcaatttctttgacttggcatattttttaattctttttaattctgattgaacaacatcgtggcaatggtattgatactattaagttttattcaatctttgcacccaaatatttagcattgaatagaagcgaaagcaaaatagctatacacatgactgaactttgagttgtagcttctatagaacatttgccttgagcatccactttccttctgtcagctccaacagcaggc

SEQ ID NO: 104196 - DNA, 857 bp, Zea Mays
gagcaggagcaacatagtaagtctcctcgtccatttgacccttcagttttggagagttacctattgaagacactgccttctttcaagcagctggatgactacaaatcaataatggtacccatgctacgatctagacattggacattgtatgttgttaatcttcagattggacgcatacatgtgttagattccaacccttatggaccagagatgggtgggactatctggaaaaattaccattgtatacctatggatttgggtgataggaaggtttcatgggccaggttaatgatgagtaggctcaatctagctattcaaaatgctcgaccaagatcagctctccctgcttttttgaattaccctattgaactcatgaataactgcccaacaatgaaattggggtctaatgattgtggattctttgtcatgagatatatgcagaactacgactacatggttggagctatgaatgcagtcattgatccggattattcagaggacattcgctctcttgtactgcattacctaatattccatcgactaaatagaaacagcttcgtggtctcccatctggacagattcaagttctctcagtagtagcctagtatagtttactatcttaatattagtatgaacatcatggtctgatggcttttggtggcttcaagttatctcagttctagcttagtttagggtagtgtcactgaatggtgttcatgtaaatattggtctgttggcttatgttaggattcagataatacttatgtccatatgcagctcttagcaaactcttatatacatcgtaccagatatgttttagatggttatatttatatatgatagttctgcactttatc

SEQ ID NO: 104197 - DNA, 1443 bp, Zea Mays
aggctccaggcacactttgagaaggtgaagaggatttgcgacactaccacattgcctttggctatgcatcatctcagtgataagataacaagccaactggatatttcaaaattgactgacaaactacggcaagcaaaggtagactcaagtgcactgacaccaaaggagaagtacgaaacctgggaggagattaaaattaagagtttcgcaaagatagtttcttcaatgtgggcaatgacattgcttagcttgtatgttagagttcaggtcaccatattaggcaggcatctctacttagattttgcccaaggtacaaatggtccacagttacaggcagaatctgacacctttagtgaaaatggacacaggagctttcttgcaatggctgattatcttgtcactgacaaaatcactggattcctaacgcaaatgcaacgtgcagcaactgaagtccttaaagagaagcaactgaaagaccgtatgaacatggaccaagtattgcagacagtattacaaatattggacatgttcatgggcctttctgaagataactcatggataaattatcttgtacctgagaatccccctgtttatgcacagttgatggctgtgtccagtagtggctttgatgattcatcactcctaaacgatttcagaaagctagaccaactaatgtctgagacacgaatagtactggcaagtgatgatttcagaaatatcatggagaggtcattgaggaagatcgcgggagtggtggtagaggatctgggtgtgcagattgtaactccaggatcgggattgcccttagcaacgctcttgcccaaagttgatcatctgagttccccgttgcttgaggaaccaaacaagaacaaacacattcagatcatccgaagtatgccggaagtggaactcttctacacattgctctacacaaacatgccaccagaaacgtaatccgtacattgatgtgaaaagaacacttgcttctgaattttggctacaaagatctggtggtatatgtgcaggttgagccgcctgaaatcaggaaactgataaacgtggagagatataggttggcattttctgccctgtatatactgagaatgagatattccgttgttgctaacaggaactgagtaaggttccttccatttggattctttcttgttttttcaaggttcggttgtgcacgtctaggtagaacctcacgaatcgggtctgctattttactattttttgggtgctattttactatattttttgggagcttacacgctgacagatgttccagatgttttactggccacacaaggttaatgtaattgtatacattgtcagttgaatcttgtgtgtcgggtgaatgaatattcgagcccacagtttgcgaccctgcagcatatgccgaagtgaagcttttgtgaggacattcggctaagttgaccc

SEQ ID NO: 104198 - DNA, 711 bp, Zea Mays
atggcgactccggcgagagggaagaaacggctggtcctcgacgtcgatgtcgaggtcgacagtgaggtcgaagtggcttccgccttcagccgattatctgtttcaatcgttgccaagcgtacaggcgacggttgcggcttggagcactccaccgccaaagagcacaccaccggcaaggaactcacctgcgcggccacatcaggtacctctttctgtcgtcaaggagcactcccccagcagcagaccccttctgtcgtcaatcactgctcgccacctcgttcagtgtcggtaagggttgtactaagttcaatactatgcagtactactcgttcaattccaacagcaatttttgtggtttcgcagataacccgatttgaaacagttcgtagtgacctcgcccaagccattgcaaagatgcatgtagttgggaaggagttgaaagatttggccggagacgagattatggattcgccagatacggccaaaaaggtgttagtgaacttcgcaatgtggcgcgtgtatgagcttgctcagtcacttgaggacgaagcacatcgtttagaagatctcgaagctggtccgtcgccagcattatctgagtcactcctgctgcacaacattacctccctggcgcaacatcagctgtgtttcagtagaaacttcagttcttccggggtcatcttgtgtgttgtcatcttgatgttcagctga

SEQ ID NO: 104199 - DNA, 1921 bp, Zea Mays
ccctctctctaccacacataattgaagggtttgccgttcggaggacggtgatccctgtctgtttctgtttctctctagagatcccataccgccgccagcccgccgctgtgcctcatcgccggcgacggcgcagaacaacccagccgatcagccgtcctcacatcgaagtctccatacaccagtggcatcgcccccatatttcgcccgttgcattgaactactgcagagtggagatccgtctatccatgacccacccagcaggccctggatcgatctgtcattctcttggtaattaacccacgcttgctcggaggaacgctgcagggcacaagaaatgcagagggatgccggctccggcgaccggacgccgggcaccccgagcccgacgcacggtggccggctcaggcaccggaagcgctccaacgaggtccccagcgacgtgaacacgactaatggcgccaacctgctcttaaacgaccagaacaagtacaagtcgatgctagttcgtacctactcctcactgtggatgatggccggggtcgtgttcttgatatatatgggccatctctacatctgggccatggtggtggtcgtccaaatcttcatggcaaaggagctcttcaaccttctccgcaaggccaatgaggaccggcagctcccagggttcaggatgctcaactggcattttttctttactgcgatgctgtttacctacgggcgcttccttagccatcagcttgttaacacgatgacttcagataagttgttgtacaagctggtgagcaggctcatcaagtaccagatgtttatttgctactttctttacatagcaggttttgtttggtttattatcacactaaagaaaaagacatacaagtaccagttcagtcaatatgcatggactcacatgatccttctcatggtatttgcccagtcatctttcactgtggcaaacatttttgatggaatattctggttcatcctcccagcttcgttaattgctatcaatgatgttgctgcatatttctttgggttcttctttgggaaaacaccactgatcaagctctctccaaagaaaacatgggaaggctttataggtgcatcagtgacaacattgctttctgcatttgtggttgctaatttcatgggccatttccagtggttaacatgcccaagaaaggatctatcaactggatggctttattgtgacccaggtcccatgtttacaccagaaggttatgatctaccgggatggataccacaatggtttccatggcgagaaattgcaattatgcccgttcaatggcatgcattagctcttggcttgtttgcttcaataatagcaccatttggtggcttttttgcaagtggattcaagagggcattcaaatttaaggattttggggacagcatacctggtcatggtggatttacagataggatggactgccaaatggtcatggctgtttttgcgtacatctattaccaatcatttgtaatggtacaggacttatctgttgagacaatcctggagcagatactacgtaatctcacctttgaggagcagcgtgagctatatggacagctaggcaagttacttgtgagagcgaactgaagctaacagtggccgtggaagcacctgatccaaaaggataatgcgcaatgctttttcaggccttgcttttttgttaatcttcttgtacagccctagcacccctaaggatgagacgaagaaccacaacgctgacagggatcgcatcgctgtatgacgttttggagcatacagctcccgtctttttcagagatttgtgtcacctttttgatttgcttctggtgctacgcttgttgccgcatcaaaaccagctaacgctgttttgtcgtgtcagtggtttatttgacaatgtgtaggagatttccacct

SEQ ID NO: 104200 - DNA, 1180 bp, Zea Mays
gttttttttacaaaaaaatgaggcaaatgcattctcataaagtttgaaaattgcttgcttattgccaccatagtaatttatttattttctaggttttgtttggtttattatcacactaaagaaaaagacatacaagtaccagttcagtcaatatgcatggactcacatgatccttctcatggtatttgcccagtcatctttcactgtggcaaacatttttgatggaatattctggttcatcctcccagcttcgttaattgctatcaatgatgttgctgcatatttctttgggttcttctttgggaaaacaccactgatcaagctctctccaaagaaaacatgggaaggctttataggtgcatcagtgacaacattgctttctgcatttgtggttgctaatttcatgggccatttccagtggttaacatgcccaagaaaggatctatcaactggatggctttattgtgacccaggtcccatgtttacaccagaaggttatgatctaccgggatggataccacaatggtttccatggcgagaaattgcaattatgcccgttcaatggcatgcattagctcttggcttgtttgcttcaataatagcaccatttggtggcttttttgcaagtggattcaagagggcattcaaatttaaggattttggggacagcatacctggtcatggtggatttacagataggatggactgccaaatggtcatggctgtttttgcgtacatctattaccaatcatttgtaatggtacaggacttatctgttgagacaatcctggagcagatactacgtaatctcacctttgaggagcagcgtgagctatatggacagctaggcaagttacttgtgagagcgaactgaagctaacagtggccgtggaagcacctgatccaaaaggataatgcgcaatgctttttcaggccttgcttttttgttaatcttcttgtacagccctagcacccctaaggatgagacgaagaaccacaacgctgacagggatcgcatcgctgtatgacgttttggagcatacagctcccgtctttttcagagatttgtgtcacctttttgatttgcttctggtgctacgcttgttgccgcatcaaaaccagctaacgctgttttgtcgtgtcagtggtttatttgacaatgtgtaggagatttccacct

SEQ ID NO: 104201 - DNA, 1335 bp, Zea Mays
caagctgaatgattatggtgatgttcataactaggttcatcctcccagcttcgttaattgctatcaatgatgttgctgcatatttctttgggttcttctttgggaaaacaccactgatcaagctctctccaaagaaaacatgggaaggctttataggtgcatcagtgacaacattgctttctgcatttgtggttgctaatttcatgggccatttccagtggttaacatgcccaagaaaggatctatcaactggatggctttattgtgacccaggtcccatgtttacaccagaaggttatgatctaccgggatggataccacaatggtttccatggcgagaaattgcaattatgcccgttcaatggcatgcattagctcttggcttgtttgcttcaataatagcaccatttggtggcttttttgcaagtggattcaagagggcattcaaatttaaggattttggggacagcatacctggtcatggtggatttacagataggatggactgccaaatggtcatggctgtttttgcgtacatctattaccaatcatttgtaatggtacaggacttatctgttgagacaatcctggagcagatactacgtaatctcacctttgaggagcagcgtgagctatatggacagctaggcaagttacttgtgagagcgaactgaagctaacagtggccgtggaagcacctgatccaaaaggataatgcgcaatgctttttcaggccttgcttttttgttaatcttcttgtacagccctagcacccctaaggatgagacgaagaaccacaacgctgacagggatcgcatcgctgtatgacgttttggagcatacagctcccgtctttttcagagatttgtgtcacctttttgatttgcttctggtgctacgcttgttgccgcatcaaaaccagctaacgctgttttgtcgtgtcagtggtttatttgacaatgtgtaggagatttccacctgtgagtctcttcgctagtactagtagccggtgatgcatccatgtttttgttactgtatctactacctccgttcacaaaatatatgatgttgttgactgttttttttataaaatttaataattcatattattcaaaaaattgtaagctatcatttattttgttgtcgtcttccaaataaatattttaaataaagagtgattaaaattttacagaaaaaaaaagagtcaacggtgtgtcttatcaacggtaatttaatttaaggcagtttgatgattatctaagacattccctcgttcagccattcagtactcattttgttcaagtgaacatatctcgtgcacttaagtttttagtg

SEQ ID NO: 104202 - DNA, 1551 bp, Zea Mays
ctattgatttgtgctttactccatttattatcatttagttttgcatacatgttgagactgtgcacttgtcaaactacatgattgatattaataaagcttgagcagctaaactatgcctggatgttgggtgggggcagggatgcattttctgggggttgttattatttgtttgaaatctgattcaggtcccacattcaaccgggccttatgtgattagttgtaagctgacatgaagatgatgcttttgtaggttcatcctcccagcttcgttaattgctatcaatgatgttgctgcatatttctttgggttcttctttgggaaaacaccactgatcaagctctctccaaagaaaacatgggaaggctttataggtgcatcagtgacaacattgctttctgcatttgtggttgctaatttcatgggccatttccagtggttaacatgcccaagaaaggatctatcaactggatggctttattgtgacccaggtcccatgtttacaccagaaggttatgatctaccgggatggataccacaatggtttccatggcgagaaattgcaattatgcccgttcaatggcatgcattagctcttggcttgtttgcttcaataatagcaccatttggtggcttttttgcaagtggattcaagagggcattcaaatttaaggattttggggacagcatacctggtcatggtggatttacagataggatggactgccaaatggtcatggctgtttttgcgtacatctattaccaatcatttgtaatggtacaggacttatctgttgagacaatcctggagcagatactacgtaatctcacctttgaggagcagcgtgagctatatggacagctaggcaagttacttgtgagagcgaactgaagctaacagtggccgtggaagcacctgatccaaaaggataatgcgcaatgctttttcaggccttgcttttttgttaatcttcttgtacagccctagcacccctaaggatgagacgaagaaccacaacgctgacagggatcgcatcgctgtatgacgttttggagcatacagctcccgtctttttcagagatttgtgtcacctttttgatttgcttctggtgctacgcttgttgccgcatcaaaaccagctaacgctgttttgtcgtgtcagtggtttatttgacaatgtgtaggagatttccacctgtgagtctcttcgctagtactagtagccggtgatgcatccatgtttttgttactgtatctactacctccgttcacaaaatatatgatgttgttgactgttttttttataaaatttaataattcatattattcaaaaaattgtaagctatcatttattttgttgtcgtcttccaaataaatattttaaataaagagtgattaaaattttacagaaaaaaaaagagtcaacggtgtgtcttatcaacggtaatttaatttaaggcagtttgatgattatctaagacattccctcgttcagccattcagtactcattttgttcaagtgaacatatctcgtgcacttaagtttttagtg

SEQ ID NO: 104203 - DNA, 2479 bp, Zea Mays
ttctggttccacgaaggagagggaacactaggaaaccaagccagcatctgatctttattagctgcttctctgttcctagctcctcccatatgggagtacttcgccaaggcaacacacggggcaaacaggcattgcgagaactcagaagctgctctgctataatggctctgctataaggtggagaagagaagccgatggccgcagccgaggtcctgacggccgcatgggaggaatggggcctgcgggcgctggtgctgctcagcctaacggtgcaggtgacgctccacatcctggcggagttccggcgccacgtcgactccggcgcgctgagggccgtggtatggtcggcgtacatggcggccgacgcgacggcggtctacgtgctgggccacctgtccgtggccagccggtcgccggagcgcgagctgacggcgctgtgggcgccgttcctgctgctgcacctgggcgggcaggacaagatgacggcctacgccatcgaggacaaccagctgtggctgcgccacctgcagacgctcgtcgtccaggtggccgccgccgcctacgtggtctacgggtcctccgccatcgtcggcgcgcgccggctccccttgctcctcgcggccaccgtcaccatgtccgccgtcggcgtcgtcaagtacggggagcgagtgtgggcgctccggcgcgccggcactagcccgaccggcaactacagcagcgacatcgggaagaggaggttcaacctggcggtgcccgattctttcatcagccgcttggatcccgcggagacctacctgctgcacgctcacctgctgctggacatggccaaggacaggttcaagggtccgctaccgcgtctgtatctgtgcgggcccggcagccaggaaacgcagctgcacggcgaggaggagctgtacaaggtggccgagctgcagctgtcgctcctgcacgacgtcttctacaccaaggccgaggccacgcacacctggtgcggcctctgcgcccgcgtgctgtcgtcgctggccaccgccgccgcgttcgtgctgttcaacgcgctgctcctgggcgcccatcgccgcaagctggagggctacagcagaggcgacgtggcggtcacctacgtcctcttcgtcggcgccgtcgtgctggaggccgcgtcgctcgtgagggccgtgttgtcgagctggacatgcgcgctgcttgtcaagcacggctccgaaggcagcgcggtgtgcaactccctagcccccgcggccgtgtacctccgccggctggtccgcgcggcggagtggaggtggtggcgctgctggtcgcgctctatggggcagctcggtctggtccagctgtgcgtgcgcagcagggccagccggtacagcagggtcgctagatggatgggcgtggaggactggtggaacacgatggcctattccggcccgtccgtccccgtgtcgccggacgtcaggaagctgctgctcaagagcctgaaggcgaggccgtgggatcgagagcagttcgagagcagagggctgtacggccgggagctgggccttgactgggtcgcagagtcgaagctggaggcgaggatcctcgtctggcacgtcgccaccgagctctacctgtactggtttaacaaggatcagctgccgctgccgctgccggccgccggtgctggtgttgcggacctcgtcgaggtcgctcagtcgctgtccagctacatgctcttcctgctggcatcgcgcccacacatgctgcctcccgacgccagccgcaacgactacctcgtggtgtgctacgctctcaccacccacgagaggtacagcacagccgacgatctgctctcctcgctacagcgctttgcggacgcgctgtgggccaacaactctgcgccggagtacgaactgcgttgcaagaatactaatcggcgtgggtacaaggtgttgaggggaggatgctcgcttgctgcgttcctcatccaccaccaacaccaagaagactcctcctcctcctcctcctcctcgcctgccggtggcaccggcaccctggaaatgatctgcagggtgtgggcgcagatgctgtgctgcgttgccgacgagtgcagcgccaattctcatgcaaagcaactcagcggcggcggcgagttccttactgtcgttgctcttgtagccaaattcatgaggtccaagaggttgtcctggcacttgcacatagaatctcagcgtacagacgaatggtaaattatacgtactagctaggtagggcgactgcttctacaagtatggccatgcctgttctgtgtgtgcactggtcgtttgtttggtttactggtcatctgcaagctggccacaagtagtaggtggtgtttttagttggctgttttacaccatgcattgcattaagcaatacgccgtagccactctctggcccacaaaaaaaaagtctaaaatcaagaacaccttagccaattgagatcgatgccttc

SEQ ID NO: 104204 - DNA, 999 bp, Zea Mays
accaccaacacaacaacatctcctccattctcctaactccagcaacgaacaggcttctccggcccccctcctcctcattcttctatcatagctagctagctagcttcacatcagcagctacatactcacactcaccgatagatacagacctcagagcaccacactcctagctcagagcacgcatccgcatggacagcctcttctccccgcgctgcgtgtgggtgaccgggcccatcatcgtgggcgcggggccgtcggggctagccgtggcggcgtgcctgcgcgagcagggcgtgccgttcgccgtcctggagcgcgccgactgcatcacctcgctgtggcagcggcgcacgtacgaccgcctcaagctgcacatgcccaagcagttctgcggccagctcctgcgtatgccgttcccggacggctacccggagtacccgacccgccgccagttcgtcgactacctcgagcgctacgccgccgagttcaagatcaagcccgagctcggcaccgccgtgctgtctgcgcgctacgacgagacgtcgtcgggcatctggcgcgtcgtcaccaacggcggcgacatgaagtacatcttccatggggccactggagatacggctggtggaagccggcgccttcgacgcgctcatggacctgttggtcagccagggcggctccatcaaccagtacgagacgccacggtgcatcgagccgggcggcgccgcgctggagctgctcgactccaaggccaccgcctcgttcatcagcccgtgccccgtgtaagctttcgggcttctggtgactgaggttgttccgagctcgatctgctactctaaagctagctaatcctctgctggatctaaataatctgagaattttcgtctgggttatcccgccccgttacattgtacttctgtgaggctttgctactatgcaaagaagcctttttcttatatgagatcgttcgtgatcatcaattgcctatctgtcttccctctt

SEQ ID NO: 104205 - DNA, 1609 bp, Zea Mays
caactcaccagctaattaattaaatgctaaccttatctcttgctttataatttatactacatctttataagggattaaaatattggcctactaatattctactcggtacactaattcagctaattgtccggaatagcgaaataaatcgctataatagaacctggctcgataatcgcaagaaccgcgaagtcgacgagagttccgtgactcgcgtaatttatcgagcaactagtgagtatcacactagcacattaatttattcaacaattgaactattctgaataactcatcgacttaccatgaccagaatgatttgataatcgtagatcgacgatgagcattggttcagacttcccatcgaacacatgacagggattgtgctcgaaggcggctttcaggggaagagctcgacaggggctttggagctcaacacaagtgacacgcatctggcagatagatcgtcgggatcgacgggcatgtcgcgacgcggcgtgggttgacgacgaagaataaaggggctgctagcttcgacttcagcaccaatctccttccaaaattataatcggctcgaacttcacaaagaaaatgattaaaccctggttcaggatgtacgacgatcagctggcaggcggggtgtactagagctttggttccttaatccttcatcagctgggactccttttccaatcatcacatacacaggagagcagcgcaagtaccctgtcaaaatgacggattgacgaagtcgctgctcacggcgcggcgtcgaaggacggcaacgttgcatcaactagcaacagcaaacgatgttgtaccaacggcagggccgaaaacgacgatggcagggagcttcgacggctgggcgcgcggcgaagagaaggaacgctcggctgggagcttctgccggcgaacaggaagagcagaggatggacgcgacgcagggattgggcatcgagcatctgcgtgagccagtataccgcggaacgcccgaaggagatgcggatgacaggggaaaaggaagaaggagcgcgcaggcagccggacttgggcaggggcgcgagatccacggcacacaggggagctggagcgggaggagggagacgaccgagcagagggagacccagcgcgtcctcccggccgtcggccgagctggggctccaaggcgccatggaagcttggagagaggggcaccgaacgagcagaggacggtgcgtttccagcgacgaactcagagaagccacggcgctgggagagtcagaggatgcgcagaggagaaccctgtgcgcgtagaagaagaagacttgggcgacggctgaggaggaagaagcactgcgctcggctggaagattaagtcggcaaacaaaaaatcccagaggaagcctacgcgcgctggaaagaggataagaaagcagagggagcttgggcgcgccatggagaagagaaaaggagctcgcgactggggaagaggacgggggcgcagggagtttcacggcgctggggctgggactcgaccggtgagcaccaaggggaaaaatggcgacggcgtccgccatggccgaggacgagcagagcccggacgctaggaggaacaggggtgagggcgccatgg

SEQ ID NO: 104206 - DNA, 215 bp, Zea Mays
tatttgtatctttttttcacaaatggaactttatgtaaagatacaggaagaactttaagcagaatcataagtgcaggttttggctgaccattattagttgattttatttagcgatatttttaaaattgtcctaatttcacagttgttaacaattattttatagattattattaagtcttaacaaagtagaacatgacatgatgtatgtgaagttt

SEQ ID NO: 104207 - DNA, 387 bp, Zea Mays
atggcccgcgcgggctgcagggcgagctcggccggccgcgtcgcgagccgcgccaggccgtccatgggtgcctgctgcaggggccgtggggatgggggctacagggggcgagagcaccgtcagggtggctgcgacacaggggagctctcgccggcggccgagaataggggaagtcgcgcctggggacgcctcgcaggggatctacgagaggcataccgccatggccagggagagggatgggagaagaacgcgtggggagggagaggaagaaggatccgtgagtacctggtaacagttgtccttcacgcctgcgatctggatctggggaaacgatctggatctgggggaagtcgggaggttttgcgacggctagagcagtatttgtag

SEQ ID NO: 104208 - DNA, 1503 bp, Zea Mays
gcgaggcagcgcggctcacctccttcccggtcccggctacccacaggccgcagtgccccgcttgctattttccgccgccaacgttctccctcctccccgcccccacctccgcttcctcctacgcgccacccacacgcctcgcgtccgcctccccgcctacacctccccattctccagcgtcccgcgccccgagaagcgctgcaggcctcaccttcccgtcctgctgcccccaggaaccgcggttcaggaaggaaggaaggaggaaaggcaagtgcctgccggtgccggggctcagcagcgcgcgatggcgtacagggcggaggacgactacgactacctcttcaaggtcgttcttatcggcgactccggcgtcggcaaatccaacctgctctccaggttcacacgcaacgagttcagcctcgagtccaagtccaccatcggggtcgagtttgccaccaggagcatcagggtcgacgacaaggtcgtcaaggcccagatctgggacaccgccggccaggagaggtatcgggcaattacaagtgcgtactatagaggggctgttggtgcacttgtcgtgtatgatgtgacacgtcatgtgacctttgagaatgtggagaggtggttaaaggagctccgggatcacactgatgcaaacattgtcataatgcttgttggcaacaaagctgatctgcgacaccttagagctgtatccgtggaggatgccaagggcttcgctgagagggaaatgaccttcttcatggaaacatccgcgctggagtccatgaatgttgagagcgctttcaccgaggtcctaactcagatctatcgtgtcgtcagcaagaaggcccttgacattggcgatgaccctgctgctccaccaagagggcaaaccatcaatgttggtggcaaggatgatgtctctgctgtgaagaaggcagggtgctgttcatcctaaatcacttgtgaccatgaaaaggattaaaggaactatatactcaccccggtcatatgattggtaactgaaaatatgactcttgtgctgcctaacctggtggctattagattatgttggtactccagagacatgatttagaggttaagaatttgattccaagttgggacaaaaaacttacttttcacggtgtcattgatattcatggcttcgttgtatggttcatatgcgctactgttccacactagttgacattagaatcctcccaatccctcactgcgtaacataccctgctaaaagtgttgtaattggagctactgatgttttcttactgggagcaaagagtctaaccttttctttttttatgtcacaatgggttatgttccactcggtaaatgcccatctctcattggtaggcagcaagtgttagagggttatatcatgtaattctctcagatgtacaaaatttggattgaaggtttatgaggctatttactgtcatgttcagacatatacacatgtttatatttgctgttcatgatggttaagct

SEQ ID NO: 104209 - DNA, 903 bp, Zea Mays
tcccggtcccggctacccacaggccgcagtgccccgcttgctattttccgccgccaacgttctccctcctccccgcccccacctccgcttcctcctacgcgccacccacacgcctcgcgtccgcctccccgcctacacctccccattctccagcgtcccgcgccccgagaagcgctgcaggcctcaccttcccgtcctgctgcccccaggaaccgcggttcaggaaggaaggaaggaggaaaggcaagtgcctgccggtgccggggctcagcagcgcgcgatggcgtacagggcggaggacgactacgactacctcttcaaggtcgttcttatcggcgactccggcgtcggcaaatccaacctgctctccaggttcacacgcaacgagttcagcctcgagtccaagtccaccatcggggtcgagtttgccaccaggagcatcagggtcgacgacaaggtcgtcaaggcccagatctgggacaccgccggccaggagaggtactcgaccgtcctctccccccttctttttctcgatttatttactttctttgtctgctattctaggcatcatcgtgttgaatcggaattaatttgtattcattcatctatacaatgcaatgcaacattgttttatttcggaccgcgccggacacgcaacgaggaaaatgctcaccttgcttgtgcaaattacaatcggccacaccttgttgtcctgctatatgtagtcctggatttacattgatcttggatgttagcagtattcatgaggcattctctggttctgtgaagagaagaaaatgttcgcttcagattaaagccagctgttcggacggctacaactctaatccatagagacaaaacacggtagaagtagtagaaggcggtacggattaaagtcaatgc

SEQ ID NO: 104210 - DNA, 1008 bp, Zea Mays
tcctctcagcaaacgtttccatcccacgagaaagcaaaaggtaaagaacagaagaaactaagaaagcagaaaaatgttgcccatagagggtctgcctttaccaaggaggaggatgctgtgatttgctcggcctttctccatgtcagtaaggatcccattgcaggagttaatcaaagtgcatgtgcttactacaaaagaatgtatgattttttctgtgagaacaaaccagaacgctcaacaagaagtcagattggcataaaaaaaggtggcaacttatccaaaaggcagttagtaagttttctgcattcaaatcgaaagttgataggcgaaatgaaagtggcaaaaaatgaacaggataggatcgatgatgttgtgaagatgtacgaggagaaggaagctttccaattcttgcactgttggaagctgctacataatgagcccaagtggaatgataaagtgctagagctaaacaacactccgacaagaaaaacacaacaaccagaaggcccctgtaatcccgttggtacacaacccaacactgaaaatgcagcaattacaaggcctgaaggtcgtgatactgcaaaaaaaagaaggttcaaagaagacactgcatcatctagtgctgctgtagaagtgttgcagtagatgcaagagaggaatgaaaaaacagaagagaagcaagatgaacagatgcaagagatcctgacattgaaggggaataaaatgaggcttactgagaagatgtttgacttgcagaagcatgaaatggaagttaagaacaagttgaaggaggagcagctcagtcttaccaagcaggacatagaagcaagggccaaacaaagcgaggcacaactgcttactgctgaattgggcatcatgggagcagacttagataaactttctcccagtgtgagagcatactacgtcgccatgcagcagcaaatcatggagcgtagaggcatcatcacccctcacaacaatgatgcggcatagaagcacttctgtagt

SEQ ID NO: 104211 - DNA, 130 bp, Zea Mays
ctatataccattttaggtctccatattttaggtccactgttggactcagcctaactagttttagatttcaatttttctaataaaaaaatgaactcattttaattagaaaaataaaaatttcttagtaaaa

SEQ ID NO: 104212 - DNA, 1685 bp, Zea Mays
ctttcttgagagaaaccgcataaggcccacgaccacagagcacggcggcatggctgcggagctcacgcagatcgttgtcgtgccgttcccagcgcagggccatgtcaccccgatgctgcacctggcgcgcgccatcgtggaccgcgggcacggcagcatctcggctaccgtcgccgtgcccgacttcatccaccgccgcatgggccagtactccgccgccggggtggccctcgtgtccataccctgcggagtagcggacgaagacggcagcgacgagccccccggacccgctatgttcctgcacgccatggagcaccgcatgccagcccagctggagggcatgctgcagtctgcacggcgcggcgtaggtgccggccgccgcgtctcgtgcctggttgtcgacctccttgcgtcgtgggcgatacccgtggccgcgcggttcggcctgcccgtcgtcggcttctgggtcgggatggtggccacgtaccgtaccgtggcggtcatcccggagcttatcgccaagggcttcgtctcggaatccggtaccctgctgccagcagacggaaccaagaacattggagatctcaacatattgccggcgaagttaaagctgagattcaaagatcttccatggctcctcgacagcgcgcttccccagaaatcaaggatctccttctggctccaggcactggaccgtgcgaagagcctgcgctgcatccttgtcaactccatctccaaggaaggcggcgccggcggcgactcacctgacgaccagcagcagtacgactacgaatatctgccgcaggaccagcagcaaataatgctccacgttgggcccttgctgttcaacgccgacgcctcaaagaagacggccaccatgtggcagcctgacaaaacctgcatggactggctagacaagcagagccccgggtcggtgatatacgtgtcgttcgggagctgggctgcgccgatccagcctgacaggataaggggcttcgcgcgtggcctggaggcgtctggccggccgttcctctgggttctcaagagccacccgtcgtggcgagctggcctcccggacggctacgcagagaaggtttccggccgcggcaagatcgtctcgtgggcgccgcaggaggacgttctgaaacacgaggcactgggctgctacgtcacgcactgcggctggaactcggtgctggaagctgtgcggcaaggggtccgcatgatctgctaccctgtctccgcagaccatttcgtcaactgcgcctacgttgttaacgtgtggaaggtcggggtggagctggccaccagtggacagggtgatgtgaaagactgcatcgagagagtcatggaaggcgacgatggacggcgtctgcagcggaaggtgaatgcgttgcgagaaacagtcacggcgggtgaggcaatgcgtgctgccaagaggaacctcaccttattcatggacagaatcaatggcagttagcgccagataaaggcataagaaaataggataatatataagtaactcgatctgccaaaatggttatgatggccccccatccttatattacaatacccttttcttcgagattcagttttagtttcaagttgatagtaatgactctgttttgcttccgatgtactagttcatttgtgtccccaaaagagaccaaaatgtttctgtcgtc

SEQ ID NO: 104213 - DNA, 2007 bp, Zea Mays
ggactggagcgaggtacgcggcggtgaggtgtggtcgacccgagagggaggccgggagcgagggactgagtgacacgaagcgggacggagctcgatcagagctgcccttttagggcttgttcgctttggagtggattgagggggattggaggggattaaatcccctcctatatataggaggggatttaatcccctccaatccccctcaatccactccaagcgaacaagccctaaaagggcagctctgatcgagctccgtcccgcttcgtgtcactcagtccctcgctcccggcctccctctcgggtcgaccacacctcaccgccgcgtacctcgctccagtccagtcctacctggacggcctgccaacacaaccaagagggcatttctcaccatcgtcccatggcgtcgacggagatggagatgggcgtcgtaggcggcggcgtcaatagcagtggaggaggcagctgcggcgggctggtggtgacggagctgagccacatcaaggagctggtgaggcagctggaggtgcacctcggcgggtccccggacctgtgcaagcacctggcctcgcagatcttctccctcaccgagcgctccatcggcctcatcacatcctccaacctcgacggtgcccggcggcagaagcggcccgcgggcgacgccggcctcgcctcgccgctctcggcgacgcccaccagcgacgtcaccgacgggcctttccagagcaccaagaagaagaggaaggtgatggaacagcggaggcagagggtgagctctgccggcggcgagaacccggtcgaggacggccatagctggaggaagtacggccagaaggagatcctcggagccaagcacccaaggggctactaccgctgcacgcaccgccactcgcaggggtgcccggcgacgaagcaggtgcagcgcaccgacgaggacccgacggtgtacgacgtgatctaccacggcgggcacacctgcgtccacagggcggcggcgggccaggcccaggccacggcgccgccggagcacagaccggacgcgcacggccacctgcggagcctgggcgccggcctcaccgtgaagacggaaacggaggagggcctgcccgcggccgcgcccttgtgcctctccgcctccacgccgccggtgagcggcggcgggtgcccgtgcccgtgcctggcgccgtccacgccggagaactggggcgtgtcgcccgcgagctccaactccaaccacgccgcctcctacctgccgttcgaggacgccgagtggcgggggcacgccgggctccaggaagtggtgtccgccagcgcgccgcctccgcccgccgtggacagcctcgacgacctcctcctcctcgtcgacatagacgacatcgccagcttgttcgactgatccgcacaccgtacgtagctgatgaacggtagggaatcgaagaaggcacgagtacgacgagtataatgtgaccgagccctctggctccggggtccggtcgggcgttcgttcgtgcctggaacggaacggaacggaggagggaagagcgctagagctctgctttcctgggtccatgcagatggtgataccgtaggagatgatgatgaaaaagagtagtggttttattttacgttttttgggctactcctcgctttttttgttaacctttttcctcctcttctgaggcctgagggtgctgtgtttgtgttgtattgtattgtattattggtttcttattatgccaagggggaaaaaaataagatccttcgagccatctgagaattgtctttgatctcaattatcagtagttttgctctgcttctaaacccttacatataaatgtattttgaaatcacaaatgcatttaaggttttttttgtgtgtgtgtgtgtggatgtctcagtgtctggacgcagttctgaattgagcacaagatagtttgtcatttgccaacactgaacctgaatactgaccatgttttgtccttgtaataataataaatagaagaaaaa

SEQ ID NO: 104214 - DNA, 492 bp, Zea Mays
atgggagacgggcgctatgggccagggaggccgacgaccatggggcagagagctccatccgtcctactgcttgagggagcgagggcaccgagcaaggctcgtgcaggggagaaaagaaagaaggggcggggctggtggactagggaggcgctgtgcacgtccaccagtctagggaggccaacgaccatggatgggaaggccggctggaggttgaagaaagcagggagagggaaaggtgagccggtcctaggcgtctttggtcggcggcggggagcagtagcagagtcgaggcggcgcgagcgcgactggaaggagcgcccggcgtggatccctggggccatcgcagtccggcgcggccggctggtgcgggatggcagcacagcgcggaagccaggggtgggagtgagcaacggatgcgcaacccttggcttactactgctgtgcgcgaggtcgactggcgacgaagggacggaggctgcgagcccgcgctag

SEQ ID NO: 104215 - DNA, 2046 bp, Zea Mays
ctcctctcggcacgctccgatatttgttttttccccaacaaaacaccgccaccttttatagatccaatctccccacttccacaattctccccgcctccccctccgaccctcccaaatcagcaccacccataggggccacggccgcgcaatgccgccctctgccgacgcaatgccggcccccggagacgccgcgtgcgccggcgacgtgcgcttgatctcctccaaggagctccgcgagcacgcgtccgccgccgacctctggatctccatctcgggcgacgtgtacgacgtgacgccctggcttccccaccacccgggcggcgacctcccgctcatcaccttggcggggcaggacgccaccgacgccttcgccgcctaccacccgccctcggcgcgcccgctcctccgccgcttcttcgtcggccgcctctccgactacaccgtctcccccgcgtccgccgactaccgccgcctcctggcgcagctctcctccgcgggcctcttcgagcgcgtcggccccacccccagggtacagctcgccctgatggccgtcctcttctacgcggcgctctacctcgtcctcgcctgcgccagcgcctcggcgcacatgctcgctggggggctcatcggcttcgtctggatccagtccggctggatgggccacgactcgggccaccaccgcatcacgggccatccgctcctggaccgcgtcgtgcaggtgctctccggaaactgcctcactggcctcagcatcgcctggtggaaatgcaaccacaacacgcaccacatcgcctgcaacagcctggaccatgacccggacctccagcacatgccgctcttcgctgtctcccccaagctgttcggcaacatatggtcctacttctaccagcggaccctggccttcgacgccgcctcgaaattcctcatcagctaccagcactggaccttctacccggtaatgtgcatcgccaggataaatcttctggcgcagtccgctgtcttcgtcctgaccgagaagagggtgccgcagcggctgcttgagatcgccggtgtcgccgcgttctgggcttggtacccgttgctggtggcgtgcctgccgaattggtgggagagggtggcgttcgtgcttctcagctttaccatctgcgggatccagcacgtccaattctgcctgaaccacttctcgtccgatgtgtacgtcgggccacccaagggcaacgactggttcgagaagcagacggcaggcacgctcgacatcctgtgccctccttggatggattggttccatggcggcctgcagttccagattgagcaccatctgttcccccgcctgcctcggtgccaccttcggaaggttgcgccggcggtgcgtgacctttgcaagaagcatgggctgacctattccgcagcctccttctgggacgcaaatgtgcttacatggaagacactcagggctgccgcattgcaggccaggagcgccacaggcggcggcggcggcgctccgaagaatttggtctgggaggcattgaacacccatggatgataaacgggacgaggatatggctgaggggaaggcaacttctggtgtttcagctttgtgccgacgcgattgtctggttgcttctaatctcagttgtttagattgtattggtcattgaacccgtccgagtcgggctggaatttttgtgttgacaagtgaccgtctatccagttgaagagttcatgcttcaattgtctgggttgttcgtcggctgttctattctgttcctcctatatcatggtaacgatatcgtgatccttgctctaagtcatggacctctgttttattaaggttatgtccattcgatttctcgctggcattgccaggattgtggatgcttttttatgttcatgatgttgtaagcttaatgaacggctggtaatgttatatgtagtaccaccaccccctgtaatctcagttgctgtggcagctttgactctctttggaatactagtatgtactccgtatatgacaatgatcaattcatccatattcctacagcattt

SEQ ID NO: 104216 - DNA, 2420 bp, Zea Mays
tccccacttccacaattctccccgcctccccctccgaccctcccaaatcagcaccacccataggggccacggccgcgcaatgccgccctctgccgacgcaatgccggcccccggagacgccgcgtgcgccggcgacgtgcgcttgatctcctccaaggagctccgcgagcacgcgtccgccgccgacctctggatctccatctcgggcgacgtgtacgacgtgacgccctggcttccccaccacccgggcggcgacctcccgctcatcaccttggcggggcaggacgccaccgacgccttcgccgcctaccacccgccctcggcgcgcccgctcctccgccgcttcttcgtcggccgcctctccgactacaccgtctcccccgcgtccgccgactaccgccgcctcctggcgcagctctcctccgcgggcctcttcgagcgcgtcggccccacccccagggtacagctcgccctgatggccgtcctcttctacgcggcgctctacctcgtcctcgcctgcgccagcgcctcggcgcacatgctcgctggggggctcatcggcttcgtctggatccagtccggctggatgggccacgactcgggccaccaccgcatcacgggccatccgctcctggaccgcgtcgtgcaggtgctctccggaaactgcctcactggcctcagcatcgcctggtggaaatgcaaccacaacacgcaccacatcgcctgcaacagcctggaccatgacccggacctccagcacatgccgctcttcgctgtctcccccaagctgttcggcaacatatggtcctacttctaccagcggaccctggccttcgacgccgcctcgaaattcctcatcagctaccagcactggaccttctacccggtaatgtgcatcgccaggataaatcttctggcgcagtccgctgtcttcgtcctgaccgagaagagggtgccgcagcggctgcttgagatcgccggtgtcgccgcgttctgggcttggtacccgttgctggtggcgtgcctgccgaattggtgggagagggtggcgttcgtgcttctcagctttaccatctgcgggatccagcacgtccaattctgcctgaaccacttctcgtccgatgtgtacgtcgggccacccaagggcaacgactggttcgagaagcagacggcaggcacgctcgacatcctgtgccctccttggatggattggttccatggcggcctgcagttccagattgagcaccatctgttcccccgcctgcctcggtgccaccttcggaaggttgcgccggcggtgcgtgacctttgcaagaagcatgggctgacctattccgcagcctccttctgggacgcaaatgtgcttacatggaagacactcagggctgccgcattgcaggccaggagcgccacaggcggcggcggcggcgctccgaagaatttggtctgggaggcattgaacacccatggatgataaacgggacgaggatatggctgaggggaaggcaacttctggtgtttcagctttgtgccgacgcgattgtctggttgcttctaatctcagttgtttagattgtattggtcattgaacccgtccgagtcgggctggaatttttgtgttgacaagtgaccgtctatccagttgaagagttcatgcttcaattgtctgggttgttcgtcggctgttctattctgttcctcctatatcatggtttggagtgcattggtgtggcctgtgggaaacgcattcagctgatgatcgtgtccggttcctgcggtagccccccgtggccctgtctgccccttgagccgcgattcttggattgtggttcagacttcagagacgcagcacatggagcatgtcctggcatactcaggggcccccctgtctttttgtaacagaaaatggcatgtactacgacgtatggcttctttcttgctgtcaaccacaccacgcgaccacggatggtgctgccagtgccatgccaagagcatccacgctcgtgcgtctgtggacgccactccggctttgctgctcaggcattcatccatattatattccattccattgggacgacgacgggaggcaaaatatctcgtcgccgggccggatgcctcgacctcgacctcgacctcgagagccgccgatcttgggagggtcacgacaccacgtccacttgctccctagtaatctttgcaagaatctttatcatgcccttggaggacagagcatcctatcctacaccgacggtggcgacgaggcagtgcctctacttgtaaagattccccaggtcaggtgactcaccagctcgtgacttgctacttccagtttttacacattgtgatatgttcaacttgcagtcttgccttgttgagtgtcgaccaaagcttttatatatatattccctccgttcacaaat

SEQ ID NO: 104217 - DNA, 1072 bp, Zea Mays
atgatgaaatttaagaagggaggatgttgtggcaaggcgtccaaagatgaaaatacaagaaaagataacatgatactattaggtaagagagaagcaaagcaagcaacaccggctgccgacgcgcaggtcagtacaatgagaggatcgatgttctgcggcggagatctccggtggtggatgttggccatcttcttcctctgcacactaattgctgccgcggaggagcgcgtcgtcacccatctccccggcttccagggaccactccccttccagctccgaactgggtacgtggaggtggacgaggacaatggcgtccgcctcttctactacttcaccctctccgagggctcctcagccgacgacccggtcatgctctggctcagcggcggccccggatgcacttccttcaccggcctcgtctatcagattggccctctcagtttcgaccttgacagctacatgggtggcctgcctaagctggtgtacagacctgagtcctggaccaaggtgagcaatatcatttttcttgattccccggttggagctggattttcatactctgtcaaagagcaaggatacaattcaagtgacacaaaagctgtcagccatattctggtctttctcaagaagtggtttgacgagcacccagagttcttgtcaaatccactttacattggcggtgattcatacgctggtatgattgtgcctaccgtcacttctgaaattgctaagggtttgaaaattgttggtagtaaacctacaatgaatctaaagggctgccttgttggaaatccattcacagatcaatcaaactttgatgggccatcgaaaattccatttgctcataggatggctctcatatctgaccaaatgtacaaggtaacaagggtagacttaattatagccattaaatattcttgttgtaacctgcatgattttctgtgtttgttgggtatgcactgaatattttaagactgactataagggcatgtacaaccttgaaccccttgcacgatactctaaacacaagacataactaagacacagtgtgatacaatgtttgtgtctaaaa

SEQ ID NO: 104218 - DNA, 1906 bp, Zea Mays
atgatgaaatttaagaagggaggatgttgtggcaaggcgtccaaagatgaaaatacaagaaaagataacatgatactattaggtaagagagaagcaaagcaagcaacaccggctgccgacgcgcaggtcagtacaatgagaggatcgatgttctgcggcggagatctccggtggtggatgttggccatcttcttcctctgcacactaattgctgccgcggaggagcgcgtcgtcacccatctccccggcttccagggaccactccccttccagctccgaactgggtacgtggaggtggacgaggacaatggcgtccgcctcttctactacttcaccctctccgagggctcctcagccgacgacccggtcatgctctggctcagcggcggccccggatgcacttccttcaccggcctcgtctatcagattggccctctcagtttcgaccttgacagctacatgggtggcctgcctaagctggtgtacagacctgagtcctggaccaaggtgagcaatatcatttttcttgattccccggttggagctggattttcatactctgtcaaagagcaaggatacaattcaagtgacacaaaagctgtcagccatattctggtctttctcaagaagtggtttgacgagcacccagagttcttgtcaaatccactttacattggcggtgattcatacgctggtatgattgtgcctaccgtcacttctgaaattgctaagggtttgaaaattgttggtagtaaacctacaatgaatctaaagggctgccttgttggaaatccattcacagatcaatcaaactttgatgggccatcgaaaattccatttgctcataggatggctctcatatctgaccaaatgtacaagtcatacaagaagagttgccgtggaggagacaacaggcaccaaagcatccagtgcagaaatagtcttgatgccatagatgagtgtgtcaaggatatatctgagtttcacgttctggagccccgctgtgcttatgcaagccctcaccaatacaatgttctcaagctgaagacgagtttaggtgttcagaagatgcagcagctaccagacttcactgcagaagggcttcacttgtctgagatttctacagagtgcagaacaatgctatatacactgtctagaatatgggcaaacaatgccacagtgagggaggctcttgggattcacaagggaacagttcccctatggttaagatgcaacacggacataccgtatttgaaagatattaagagttcagtgaagtaccatttggatgtgaccaccaaaggatacaaaagtctagtttacagtggtgatcatgacatgggtgtaccttatattggcacacaatcctggattaggtcacttaatttctctattgtggatgactggagaccatggtatgttgatgggcaagttgcaggatatacagtgttgtactcaaataacctcacatttgcaacggtgaagggtgctgggcatactgctccagaatacatgccaaggcaatgccttgctatgctttcaaggtggcttgctggtgataccctttgattggcgcatagagatgcactgctacatagttgtatagactttatgtgtatgtaagtgagttacttgggactagttgtctggattgttgtgtctaggcttttcgtcgtttttccctttaataaaccgagcgattgtaatgttttcgggtctgttgtccctaataaaaatttggtcaattcttttgtacctacagtgaaatgcagaactctgcccttttaaaaaagagaggttctatacaattatggtaaactcatgtaatccttttgcaatcctttacagaacctccccgaaaaggattgcaagcataatattcgatcgaaggaaaaaaatcaaataa

SEQ ID NO: 104219 - DNA, 2403 bp, Zea Mays
atgatgaaatttaagaagggaggatgttgtggcaaggcgtccaaagatgaaaatacaagaaaagataacatgatactattaggtaagagagaagcaaagcaagcaacaccggctgccgacgcgcaggtcagtacaatgagaggatcgatgttctgcggcggagatctccggtggtggatgttggccatcttcttcctctgcacactaattgctgccgcggaggagcgcgtcgtcacccatctccccggcttccagggaccactccccttccagctccgaactgggtacgtggaggtggacgaggacaatggcgtccgcctcttctactacttcaccctctccgagggctcctcagccgacgacccggtcatgctctggctcagcggcggccccggatgcacttccttcaccggcctcgtctatcagattggccctctcagtttcgaccttgacagctacatgggtggcctgcctaagctggtgtacagacctgagtcctggaccaaggtgagcaatatcatttttcttgattccccggttggagctggattttcatactctgtcaaagagcaaggatacaattcaagtgacacaaaagctgtcagccatattctggtctttctcaagaaggttctatccccctgctctagtttcaatcccatgtgcatctatatattgctactaaacataaactggaatatgcttgtcacaataataacttcaataagcaaagatgttgaattgtaagttgtgtttcgtgtctttctttctcaataactttgcagtggtttgacgagcacccagagttcttgtcaaatccactttacattggcggtgattcatacgctggtatgattgtgcctaccgtcacttctgaaattgctaagggtaacatcgctcctcaaccttcagtttttgtttcttttttccctgtcagtttttgttgccttttttctggtattatacatgcatatttccttttgcctcatcaacaatttgattttgtgtcatgatgcctttgccttttccaggtttgaaaattgttggtagtaaacctacaatgaatctaaaggtttgaaaattatactgtcagcagcaaaaacatatagagggatactttgagttcccaaactgctatcctatttttggaggacagaattcccctgttaattttgcatacggtgttcagggctgccttgttggaaatccattcacagatcaatcaaactttgatgggccatcgaaaattccatttgctcataggatggctctcatatctgaccaaatgtacaagtcatacaagaagagttgccgtggaggagacaacaggcaccaaagcatccagtgcagaaatagtcttgatgccatagatgagtgtgtcaaggatatatctgagtttcacgttctggagccccgctgtgcttatgcaagccctcaccaatacaatgttctcaagctgaagacgagtttaggtgttcagaagatgcagcagctaccagacttcactgcagaagggcttcacttgtctgagatttctacagagtgcagagtttgtgcctagatgaggttttaacttattcagcagtacaccatattatgcctaacatttcacatcataccattctttgcagacaatgctatatacactgtctagaatatgggcaaacaatgccacagtgagggaggctcttgggattcacaagggaacagttcccctatggttaagatgcaacacggacataccgtatttgaaagatattaagagttcagtgaagtaccatttggatgtgaccaccaaaggatacaaaagtctagtttacagtggtgatcatgacatgggtgtaccttatattggcacacaatcctggattaggtcacttaatttctctattgtggatgactggagaccatggtatgttgatgggcaagttgcaggatatacagtgttgtactcaaataacctcacatttgcaacggtgaagggtgctgggcatactgctccagaatacatgccaaggcaatgccttgctatgctttcaaggtggcttgctggtgataccctttgattggcgcatagagatgcactgctacatagttgtatagactttatgtgtatgtaagtgagttacttgggactagttgtctggattgttgtgtctaggcttttcgtcgtttttccctttaataaaccgagcgattgtaatgttttcgggtctgttgtccctaataaaaatttggtcaattcttttgtacctacagtgaaatgcagaactctgcccttttaaaaaagagaggttctatacaattatggtaaactcatgtaatccttttgcaatcctttacagaacctccccgaaaaggattgcaagcataatattcgatcgaaggaaaaaaatcaaataa

SEQ ID NO: 104220 - DNA, 661 bp, Zea Mays
ctttaacatgtgggagtgttagcccaatttatttcattatgatttgtaaaggtaaagtggatgtaaaactctggtataattatgccctacaatgcagggaacagttcccctatggttaagatgcaacacggacataccgtatttgaaagatattaagagttcagtgaagtaccatttggatgtgaccaccaaaggatacaaaagtctagtttacagtggtgatcatgacatgggtgtaccttatattggcacacaatcctggattaggtcacttaatttctctattgtggatgactggagaccatggtatgttgatgggcaagttgcaggatatacagtgttgtactcaaataacctcacatttgcaacggtgaagggtgctgggcatactgctccagaatacatgccaaggcaatgccttgctatgctttcaaggtggcttgctggtgataccctttgattggcgcatagagatgcactgctacatagttgtatagactttatgtgtatgtaagtgagttacttgggactagttgtctggattgttgtgtctaggcttttcgtcgtttttccctttaataaaccgagcgattgtaatgttttcgggtctgttgtccctaataaaaatttggtcaattcttttgtacctacagtgaaatgc

SEQ ID NO: 104221 - DNA, 1194 bp, Zea Mays
gcctatagccatctccaccgtaacatcagggtcctcctttacacgacggtcgttcagcaacacgcctcatccgtggcagcgggcagcggctcggacagcgctcattcagttcgtcacggcctcgcagtcttgcagatctgaggacgggccgtaagggtactagagccggcgccggcggttacctggggcggccgccccacctcgctgttacggtaggtccgtccctaacctcgaagattcgacgcaagcgggcggtgaatccaatggcgggcgaggaagagctcactgtaggcggcggcgtgcccatccggccgccgcggctggaagacgcggggctcgaggactgcgcgctcccgccggagtctatcgctgaggcattctccctcgctgccgcggccgtctcctcccgcctcgcccggctgcccttctccgaagactccgacgaggaggactgcgtctcggcaccacgcggaggaggctgcgtggatgacgccggactcgactgcggggccgcccccgtctcccttgtcggcggcggcgttgcgggcgtcggcagcgtcgacgaagtcgtggtcgtcggcggaggacgcggaggcggatacgaggacgcggtagtggtcggtgggcgcgcagaagaggaggatacagtcgtggtggtcggggaacagcctagggacagggagaagaagctggggaaggatgatggatgtgtcgagggggtgcgagaaggggtcagtgaacccagacgggcgcaaggcgatgaagacggcgaggaggcggcagagaaggcgatcttggtgccagatttcgactgaacagctcaatttctgatcgctgaatctggcatctcgctgtagcttgggccaaggtgtgaatttcagtttagctctttgttcttactagaggtaactccgagggtgagcagatctttcggtgcatgttttcttggcagtaatgtagtgttgttttaagacaagatgatattttctcatatgtttaaacttagaggacagtttctcagatgtttaagctcaggcgagagtggatcatagttttcctgacttctatgtgccttcttgaccttgatgtggtaaactggtaatgactggtgattgatatggaatgatgaaacagctactgagctggcacctgtgttgaaatagatctaaataattataatgttaaaaagagaaa

SEQ ID NO: 104222 - DNA, 1175 bp, Zea Mays
caatcggatgctcactttctgtgtgcattctagtcgaaaatgctcccaaatttgtctgtgctgcaatatatcatttggcttcgcgccaaaagaaaaaaaaagacgacgagaacaatgcgtgatcagatgagatttgaaggagaacctgatgctcaaccccatcctctgtgggcatcggttgcaaagcacctgattctccattccacctggtgagtggtgagcctgagccccagtacatggatcgatggttggttatactacacatagcgacaccctcaaagaactcatcggtcatcaccctccccggtggtcaccacaatgggagatgagatgagtgacggccggcgggcagacgggagctacgggccggagtacggccccgtccctcgtgagtttcagcacgcctggtaccctcagttgccatccaggaccaggaggaggtccccgtggcctctgcatcatggggattacccttggaggctttcggagcacaggttcagaagaccacctttcgagcgctccagttcctggcacccgttgcagccaccattccatatccaccgtgtccatggcagcagcggcagtggcgcgcccctaaacccgagacacaggcgaggagacgctggactgaccaacgaggagttcagagaggccatggatcagctgaggaaggacgaatacaggcagcagcagaagcatggcggcggcggcagaggtaacctccggacagggaaggaaaccagtgaagaggagaaggtctgcaccatatgcctggagacgttcctgcctggagagcaggttgcggtcacgccctgcaaccacacgtttcaccaggggtgcatcgctccctgggtgcaggggcacggcagctgcccggtgtgccggttcgcgctctgcgagaggagcgtcgccgacgaagacggaggagggatggatctggacctgctggcgatggtgatggcgatggaggaggcattcagccggttcaggttctcagactccacgcaacactaccactagatgaatcagcatcattctcatgataataatgtaaaactccagtatcatcggatatgttgcgataatgtaaaaattagattgcgatttgctccttatcatgcatttcatttcaaatgtcagaccagaccacataataatataattagttgcacgag

SEQ ID NO: 104223 - DNA, 264 bp, Zea Mays
atggattggccgctagcgttgtcgtcagagatggatcggccgctagctgcctgcttttccctgttactggtggcaatggatcaccgccgcaagcatctcgctaaacccgatctacctggcgggctaaacagaaaggctcgtgtgctccgcctgcttcctcccgtgacagcgtgtgctcatggcttccctgcggcgctcggcgggccgccgctggctgccaacggcgcgcaccagacgctagatcgggctgcccagggcagttaa

SEQ ID NO: 104224 - DNA, 239 bp, Zea Mays
atgtgtaccagcacattagttgccattttacccttgcaaaataaagtagtaaaacagaaagaaacactgcccgaaatcagacgagtgaattatgtgccttatcctaaaaacttacttcctccgttcggaattgtaggttattttagctttgtcctaagtcaaactttctctagcttttgattgactgactgagtttatagttttatgcacaatcatctacatgatcaaacaacacttat

SEQ ID NO: 104225 - DNA, 920 bp, Zea Mays
tccctataaaatgccgcatgtttagcaacggcattccaatcctaaactaaaaatatctaagacatagtatacttttaaatcaaataagaaaataggtgtaaatttagctaaatttgaattttcgacggacccttcaacaaactccgagaacatcatggcactcttgaccgactccagatctagtaacgcaatccaccaacgccagcattggaaggaaatctcagcgggaatctcagcagctaaacacgagatcctacctggctggcagcgatgcggaggaggcccctgcggatcctggcgtcggtgggctcggagatgcgcatctgcacccgcatgagctccccaaacgtggcgggcctacgcgggggcgccgccttcccgccactcccggggctgccgacacccttggaggaggcggacgagcggagcccgagcgccttcttcatcttgctggcggcggcagaggtgagggagcgctggagcgaggcggaggatgccgaggacgcggaggaggccggggacgccgtggcccccgcggccaccgacgaggactgggggatataggtgaggggcttcccgcccgtggtgcgggaggccgcgaccagcacctcgtaggcggcctcccggaggtccgcggtggagagggcgaccccgaggtccgggaacggcgaggggagcgcggagaccgaggggctggaagcggacgccggcgggaggaagccattggaggaggaggagaagggggacgagtcgcggcgggactcgcggaacaggcgagccatcgcggccgtcggcggcgacggtgacctcccggcgtgactctctccctccctccctctcgtgctaggtcccggctctctagtggagaaagagggggatgaggaggagagagagagggaaaccccctcccaactccagcg

SEQ ID NO: 104226 - DNA, 634 bp, Zea Mays
agcgaggggagcacagtcacggccgccgcgtctgcgggctccacagccacgtcgaggagatgctgttgggctccgtggatgcaagctgggccagcgacggagaacgacattcgtgccgccatcggcgacaactccggcatgagcaaagcgatacgatagctgttgaagcaggagggcgacttgcggcatgcaggcaatggtggtgccctggatccgtatgtttatatggcacttgaatttgttaagcagctaggagaggctttgcattcagtcaattccaaatcaactagccacaatttggaattaatttatgttattccggctccaagaatgcaaaagctcaataattaggactttggacccaaagatctcatgcatctggctgacactgtagatgggttttctcttatgacatacgacttctcaggacctcaggatcctggtcccagtgcacctctaaagtggatacatcattctttagcagcagttctttcagcaaaagattcctctcatagcaattcacattcacggatgatattccttggcatcaacttttatggttatgattttctactatctggaggtacatataacttatatttatctttctcctcttttcttttgatatgatcaa

SEQ ID NO: 104227 - DNA, 1123 bp, Zea Mays
ctcccaaattgtgtgttccttctccggggaaaccatgaatcctttaatatggtttcgagaaggagataatgactaaatacaaagatcaaggcccttaactttatcgaaagttttaaagatgttttggggaccttcctctagcggcaataatagcaggatgtgtgtacactgcacgtggaggtgtcttcactagttccatggtacaattgtaatgccatcacataattcaaaaaaggggggaaagggtcacaaatacaaggcgaattttactaatgatttgacttccatgaaacttggatcattggatgagttattaaaagcaatgataactgttcttgaccctccttgggaaggctcaaatttgatccctagggatgtgatgtggtctgacccttccttgcagatgggtctttctccgaataaagatcaagacattggattgctttggggtcctgatatcactcagcaatttctgaggacaaataatttgaagcgacgcacaggcgaattgatcatgtggaggcctggaagtgtaatggtggtttaccgagggagcatttacaaaaggcctctaaaatctcaagctctaaatggtgcctcatcatcggttaaaggcgaatttggtgcattgttcatcccaaatgcctcgaatgccgttgagaatgatattcaagggatatatttgtctgcaaaacatgcaactgtgtccctattgaatgtgtagaatattaagcacatgaatgaggaagggttggagttcaattagataatgatgagctaggtcctcattttgtggattggtgggaacggagctgactagccaaagttagtgaggaaccttccatgccattttgctctagggagaaaccagaactatcaagtttagcagcagtaatataataaggagcatgttgtaactgccccagcgttggtgtggacagcagtaatatattgctcatcgattgcaaataattttattctaatttttcatcacatcaccaagaggtatggacacaactttgcctttttctatttcctcttattgttatgaggatagcaatatcaatatataaatataacctcgacaaaacacatctgattactgtctcatgcctgaaaaatc

SEQ ID NO: 104228 - DNA, 1283 bp, Zea Mays
tggtacgggtgacaggagatgatacaggcgaatcgttgcagagagatgtgatataggggagagattgctgacgtagtgggtgaaattccgttcaagacagtctcagtcatccacttcccctctgcaccttgaacgtcctccgcagaggcagctccccaactgttagaatggacgacacggaagccgccaagaacacggccaccaccggccccactttcgcctcccctctcttctctttctccaacctcggcggtgcttccttcggctctggctttggcttcaaatccagcgctcctctgccgcctgccatcgaggtccagctctgcgaggaatcacccgttccggcagctaggttggagccagtcgtggtcgatgactccttgacgatctacaagggcagagtgagtacatctgacgtgtttggtgtcaaagactctgatttggtccctggaaaatatgaaggtgggttgaagctgtgggaaggttcattagacttggtgaaagccctgaattctgatatcaaagaagataaatttcatctggaaggcaaacgcgtattggagcttggatgtggacatggcctccctggcatttttgcgggtctcaagggtgctgacctgattcatttccaagatttcaatgccgaggtgcttaggtgcttgactataccaaatgtaaaagtcaatcttttcaaggattcaccagaaggaacatgtacatgtccgattgttggtttctttgctggtgattggagtgaaatggataagctactactttgcggggatgctgagcaagacaaaacagccagtggtgatacagaagtgcttgcgctaccctgggggtgtggtttacatggcagggaagaagcattactttggagtaggtggtggcacaaggcagtttctgcgcttggttgaaaaagacggtgccatgcatcctgagcggctcaatgatgttgctgatggatcatccaatgttagggaggtttggaaattctcattcaaatagattagcactgcccctgcgattgtcgggagaactggaaacatgtactggactccatattgggtgagagggaggtcttataggacttcctggttctgttaatctacctgtgactgtttcaaaaagctgatctttctcttttggagcactgctttgctcttgtagactaaaaaaaatcgcttttacctctggtttctgtttgttaaacttgtttagcctttcatatgaaacgatgaattctccatgatattatcacacttgctctcaaattaccctcc

SEQ ID NO: 104229 - DNA, 1375 bp, Zea Mays
tggtacgggtgacaggagatgatacaggcgaatcgttgcagagagatgtgatataggggagagattgctgacgtagtgggtgaaattccgttcaagacagtctcagtcatccacttcccctctgcaccttgaacgtcctccgcagaggcagctccccaactgttagaatggacgacacggaagccgccaagaacacggccaccaccggccccactttcgcctcccctctcttctctttctccaacctcggcggtgcttccttcggctctggctttggcttcaaatccagcgctcctctgccgcctgccatcgaggtccagctctgcgaggaatcacccgttccggcagctaggttggagccagtcgtggtcgatgactccttgacgatctacaagggcagagtgagtacatctgacgtgtttggtgtcaaagactctgatttggtccctggaaaatatgaaggtgggttgaagctgtgggaaggttcattagacttggtgaaagccctgaattctgatatcaaagaagataaatttcatctggaaggcaaacgcgtattggagcttggatgtggacatggcctccctggcatttttgcgggtctcaagggtgctgacctgattcatttccaagatttcaatgccgaggtgcttaggtgcttgactataccaaatgtaaaagtcaatcttttcaaggattcaccagaaggaacatgtacatgtccgattgttggtttctttgctggtgattggagtgaaatggataagctactactttgcggggatgctgagcaagacaaaacagccagtggtgatacagaaggtaaaatgtgtaatggttatgatatcatcctgatggctgagactgtttacgcggtatcttgtcttccaaatctctacaggctcatcaagaagtgcttgcgctaccctgggggtgtggtttacatggcagggaagaagcattactttggagtaggtggtggcacaaggcagtttctgcgcttggttgaaaaagacggtgccatgcatcctgagcggctcaatgatgttgctgatggatcatccaatgttagggaggtttggaaattctcattcaaatagattagcactgcccctgcgattgtcgggagaactggaaacatgtactggactccatattgggtgagagggaggtcttataggacttcctggttctgttaatctacctgtgactgtttcaaaaagctgatctttctcttttggagcactgctttgctcttgtagactaaaaaaaatcgcttttacctctggtttctgtttgttaaacttgtttagcctttcatatgaaacgatgaattctccatgatattatcacacttgctctcaaattaccctcc

SEQ ID NO: 104230 - DNA, 868 bp, Zea Mays
attggggcaagctttgtccctatctccacgtttcagtgctgctaatcctagcttcaacatggtacagccttgtgtgggggtcattccatgtggcctactgtcgtgatttgtattgtatgtacccctccttgtaggtagtgtctatatctcctgccttgcagcttttgcagtgagctaccatgtccacgatgggcttcttccaggacacccgcgtcgtcggtggtggcagcagccggacggccaggtttctccagtaccagaggctggagtgctgggaggacgccggagtcgctcccagtcccaggtcccggtggcggtggccgtggctgccgacggagaatggtaagatggctcccccctgtttgttcaatgtcaagaggctgaagtggagcaagatcacctcggctctgatactaccaaggaaggttgctgagctctccgcaaagatccgtcacgccagcgccaggaccgaggccgccgccaccatctgcccggccgtcgtcttcgtgtcaccgtgggggcttcctgtgctctcccggccactcttggtcggccacaagagcaggtaccagtatcaccatggaaaggacacctgatgatgagctgagcaggtagtacccaatctgtattcctggcgatgattatatatgcggcgagctagttgatcttgtagtatgtgtagtaatcctcattttgattcccctgcgatgcttgtgtcatgcttgattgggccccttgctacggcatgcatgtcatgttgtgccctctatcaacatccgtaccaagcaaagcaattgctatattccatcactaccattcgcccatgtggatttggatatctcgtaggaattcaccgttcttcatgagc

SEQ ID NO: 104231 - DNA, 1114 bp, Zea Mays
ctgcaaacgacgcgacgacgagacgatatgaagagcgaggagtaagagaaaccaaccaaaaccacgggaaggagacgagacggggggaaaaacactgcgcaggcacaggcagggagagacgtaaagccgccgcttcgtgcgcgtcgacgtcacctcgccgccggggcccgtctcgccgcggggtcccttagagctcccttccgtcgccggactgggcggtcgccggacggatcgggaagcgacgacctgaggggactggctgggatggccgggaagaagcgcaaggcggaggcggcacgcctggaggagacggaccgggcgctctacggggccttccggggcgccgccaactcgctctcgcagctctacacgctcggcatgggcgcgcagaaggcctccttccacgccggcgaacgtcacgccatggaaaaactttatgaatggatcctgaggcagcacgaaaatggtttgaggctaacagttgctgatgtagcctcccatatccaggtaagtttgcaatcgttccttgatatgtttctatacaaattgacaatacaaactcaggtaaaaaacctgcatatattgccatttcataggtcatggttagttctaaattgtgtgctactgacttgttgccttaatgaacaatagtttatgacaaatgagatgagatgaacttgttgttcttgcagacttaacttcgatcctgttcctatcctctgattattttctttgcctttttacatatccagccatagcatgtttgcatacagtttcaccattgttcttccttttgcgcatattcaggcaaagaatgattacacacttatgtatcatctgtgtgtagcatgagattcagtatggaggtgacaatgcatcagcctctccaaggtcacaataccctagccaaagcactgcaccgacaatgcacattcccaacacaagcaaccagcaaccatcgccaagcttatttgcttcaggaaaccctgggttgacacagtccaagaattccatggtcttttcaagcgcattatccagccccatccggcggagcctgcaaccttaccacctagagcaggacggggatgcagggtacttcgcgaacggtgcaagc

SEQ ID NO: 104232 - DNA, 1202 bp, Zea Mays
ctgcaaacgacgcgacgacgagacgatatgaagagcgaggagtaagagaaaccaaccaaaaccacgggaaggagacgagacggggggaaaaacactgcgcaggcacaggcagggagagacgtaaagccgccgcttcgtgcgcgtcgacgtcacctcgccgccggggcccgtctcgccgcggggtcccttagagctcccttccgtcgccggactgggcggtcgccggacggatcgggaagcgacgacctgaggggactggctgggatggccgggaagaagcgcaaggcggaggcggcacgcctggaggagacggaccgggcgctctacggggccttccggggcgccgccaactcgctctcgcagctctacacgctcggcatgggcgcgcagaaggcctccttccacgccggcgaacgtcacgccatggaaaaactttatgaatggatcctgaggcagcacgaaaatggtttgaggctaacagttgctgatgtagcctcccatatccaggcaaagaatgattacacacttatgtatcatctgtgtgtagcatgagattcagtatggaggtgacaatgcatcagcctctccaaggtcacaataccctagccaaagcactgcaccgacaatgcacattcccaacacaagcaaccagcaaccatcgccaagcttatttgcttcaggaaaccctgggttgacacagtccaagaattccatggtcttttcaagcgcattatccagccccatccggcggagcctgcaaccttaccacctagagcaggacggggatgcagggtacttcgcgaacggtgcaagccgcgatgtgaaccccacggcttcgaatgattcgtccatggacatgcactcggacagcccagctcatgactcctactgagcagctcccaccatggaaccagcctcaagaacagcacttcaagtggaagaagtctgctgtcacagccttcccaggcctagtagtaatattcaatttaacaccttccatagcctctcttacactaagcgtgtgatgtcttgtgttgttactactacttaccacttgttgctttgcgagaattatgtaatttgcatgtactatactatactgtaccatttgatttatctgtgcatattactgctgttggtacgtgacaagtgcaggaaacaaaccactgaaaagaattaacagcttggacagtttgtgaggt

SEQ ID NO: 104233 - DNA, 1162 bp, Zea Mays
ctgcaaacgacgcgacgacgagacgatatgaagagcgaggagtaagagaaaccaaccaaaaccacgggaaggagacgagacggggggaaaaacactgcgcaggcacaggcagggagagacgtaaagccgccgcttcgtgcgcgtcgacgtcacctcgccgccggggcccgtctcgccgcggggtcccttagagctcccttccgtcgccggactgggcggtcgccggacggatcgggaagcgacgacctgaggggactggctgggatggccgggaagaagcgcaaggcggaggcggcacgcctggaggagacggaccgggcgctctacggggccttccggggcgccgccaactcgctctcgcagctctacacgctcggcatgggcgcgcagaaggcctccttccacgccggcgaacgtcacgccatggaaaaactttatgaatggatcctgaggcagcacgaaaatggtttgaggctaacagttgctgatgtagcctcccatatccagcatgagattcagtatggaggtgacaatgcatcagcctctccaaggtcacaataccctagccaaagcactgcaccgacaatgcacattcccaacacaagcaaccagcaaccatcgccaagcttatttgcttcaggaaaccctgggttgacacagtccaagaattccatggtcttttcaagcgcattatccagccccatccggcggagcctgcaaccttaccacctagagcaggacggggatgcagggtacttcgcgaacggtgcaagccgcgatgtgaaccccacggcttcgaatgattcgtccatggacatgcactcggacagcccagctcatgactcctactgagcagctcccaccatggaaccagcctcaagaacagcacttcaagtggaagaagtctgctgtcacagccttcccaggcctagtagtaatattcaatttaacaccttccatagcctctcttacactaagcgtgtgatgtcttgtgttgttactactacttaccacttgttgctttgcgagaattatgtaatttgcatgtactatactatactgtaccatttgatttatctgtgcatattactgctgttggtacgtgacaagtgcaggaaacaaaccactgaaaagaattaacagcttggacagtttgtgaggt

SEQ ID NO: 104234 - DNA, 763 bp, Zea Mays
cttgtactaactctttttaatctaggggcaagtggttattttagataatgcacactttgagctattttataggaatttatcgaggaggttatggctctggtagagcttgatcagctgagatatgcattagtagggaagcagggttctactgggttatcaacagagcaaaggaagagctttactaatttttcaaattatgttgcttattgtagcagattgctagagttaccttacttttttcttgtaaaagaactgttttgtttgttactgaatctcaatttagggggaatacttccacaatatctgcccatgatatcattaaatgtttttctaagatacttgttctccacacaagaccctttttatctgatactaatattgtatcattcaatggaggtaatttcaatcttttggaggatcgtgcttttcttttggattttgtcttcaactatccttgtaagggttgtgttcaggttgagctgtcctgaattatttggagctcatggttctttttttctcttcttttttagcattaacctttagatttgtgtaatggatttctgcaacatcaagattgatactggcaactccattgataagactgcatgctcaaataaagcttggaccatgaagtgagatcgagctcatggacaagtagcgatcattttttatccaatcttagtgtattcccaatagagcacacgtgaagaagaatattttgtttgactactgtaaatgtttaaggcaatggaaatttacaaat

SEQ ID NO: 104235 - DNA, 2267 bp, Zea Mays
cttcgtttattccccacttccacacggccacaccgccacagccgccgccgccggacggcgctgtccttccctgggaggcgctccactaggctcggctcagctcacgcgcggcggcggtgtccgtggctgctgggcttgcgcgcgcacctgattccgtgctgggcttcgcgaggtgctcctcgtgcgagacacacgcccgatgcggcggaatcgcgcggccggcgcccgagacccggcgtgattcggtggggaggctgggtcgcggtgcttccgcgtgcgggaaccagtgacttttttattcttctcttccccagcggctcgggcggctagcgggcgggccgcttggtgctcgtcagcgcgtgaggcggagattacccggcgccgatctggtgctcttgccgcccggagaggtggtgccgggggccattgccgggttctgattaggaggaggcggaggaggtaagtccctagtcttatggggctcgcgccgccggagctggggcagttcgacgggtgggagagctccggggaggagagggagcgctggggctggtgccgccgcagccgccgcggcagcagtaggcgccgcgcggaccccaagggcgccgacgacgacaccgccgtctccaccggttgctgcatccgcctctggcccgtcggaacatgcccgccgccgccgccgccgccgccgccgaggtccaaggtcgacacctccaccagcagcgccagcacgcacggcgcagaaaagtcaacagaaaatggtagcaggaatcaaccggtcgcattggtagtctcaggttctacaactactagtaacgctgaaagcagttcatctgcatctaaagatggagaattgataaaagttgcctttcagctgcgcaagtttgcattcaatgatctaaaatgtgctacccggaacttcaggcctgaaagtctccttggagaagggggttttggatgtgtttttaaagggtggatcgaagagaacggaactgcacccgtgaaacctggtacaggtctcacggttgctgtcaagacactaaaccatgacgggcttcaagggcataaagaatgggtggctgaagttgattttcttggaaatcttcaccatcccaatttggtcaagttgattggatattgtgttgaagatgaccaaaggttgctggtgtatgaattcatgcctcgtggcagtttggataaccatctttttagaaggtctcttcctctcccatgggctatcagaatgaaggttgcactgggagcagcaaagggtctggctttccttcatgaagaagcagaaagtccagtcatttatcgtgattttaaaacatctaatatactactggatgcggagtataatgcaaaactctccgattttgggcttgcaaaagacggacctgtaggtgataaaactcatgtctctactcgagtaatgggaacctatggatatgcagcaccagaatatgtcatgactggtcatctgacatcaaagagcgatgtctacagcttcggggtcgtgcttcttgagatgatgtcggggcgcaggtcaatggacaagaatcggcccaacggggagcacaacctggtggaatgggcacggcccctcctaggggagaggcagcggttctacaagctggttgaccctcggctggagggcaacttctctgtgaagggcgcgcagaaggcggcgcagctagcgcgcgcctgcctcagccgggaccccaaggcgcggcccctgatgagccaggtggtggaggtcctcaggccgctgcagaacctgagggacatggcgagcgcctcctacttctaccagacgatgcacgccgagcgcatggcgcactcgagcagcatgaacggcaggagcagccacggccacggctcctccaaggcacagagcccgttcgggcggaacgggcagcagcagcccgtgcggagcctctcggacgggccccgcgcctccccgttccgctactcgccgaagccgaacgtgaaatgatgaggcacctggtccgggccgtgggcgtcgaagtcgaaccccattcgttgatgtgtgttgtgtacttgtgtagattgacatatgcacaaaggaaaagatgtaggcgaaagaggaggtgtaggttgaatgaatgctgatggatcgttgctatatatttttgcccccaaacaaggcaggtttaggtgtttttagccttgcaatgtgcggtgcctcgtgaatcttgatgctagatgtcgtgttaggtctggtgaagagaaagtgcttcggtacc

SEQ ID NO: 104236 - DNA, 1492 bp, Zea Mays
agcccctcctaaatttttttctagatccgtccctgtttgccgctgtgtttagctctcttccccgcaaggatccatcgatcggtcggacagggtaatcgatttctcctcgctcgtactagtgaatctcggatgggtgcattggcgatttgctgcgcaggcacagtatagggttcttggtgggggtttcttggggatggatctctcatagctccggggtttatttccacattctaactagacgcagcaacttatctttccctcgattttgtgtaatggcgtgctctttgctcaagtcttgcctttcccagctctagccgctactctgctcttcccccagcgtggctgttttgcacttttgcggccgtcagtgcgggagtggacaaagctaaagacttgggggctggttcagacggggatcgacatgtgtctagtaaattaagcaataagacatgggtcagattttgggtttagttcaggttgatcagtcaactgtagccatcaaagaaaattttggcaagttcagcgaggtcctggagcctggttgccacttcctgccctggtgcatagggcagcagattgctggttacctctccttgcgtgtgcgccagctggatgtccgctgcgaaacaaagacaaaggacaatgtctttgtcactgttgttgcatctgttcaatatcgcgctcttgctgataaggcatctgacgccttctacaagctgagcaacaccagggaacaaatccagtcatacgtatttgatgtcatcagagctactgttccgaagctgggcttggacgatgcatttgagcagaagaatgagatcgcaaaagcagtggaagaggagcttgaaaaggcaatgtctacttatggctatcagatcgtgcaaacgctaattgttgatattgagcctgacgaccgcgtcaagagagcaatgaacgagatcaatgcagctgctaggatgagggtggcagccagtgagaaagctgaggctgagaagatactccagatcaagaaagccgagggagaggcggaatccaagtacctggctggcgtgggtattgcaaggcagcgccaggccattgtggatgggctgagggacagtgtgctcgccttctcagagaacgttccaggcaccactgccaaggacatcatggacatggtcctggtcacccagtactttgacaccatgagggagattggggcctcctccaagtcctcttcggtgttcatcccccacggtcctggagctgtcaaggatgtctcggcgcagataagagatggcctcctgcaggctaatctgcactgagggtaccctgagaaaacgaaggattcagagggatgagggcatcggtcctatgatgctataaaattgtcaattatagactatatatgatatatagaggcaggcttgattgatttgtaaaagcatagttaagcaccgattgagctataagtgcacttgtgagtgagcctgggtatccaaacctgtcagct

SEQ ID NO: 104237 - DNA, 1480 bp, Zea Mays
agcccctcctaaatttttttctagatccgtccctgtttgccgctgtgtttagctctcttccccgcaaggatccatcgatcggtcggacagggtaatcgatttctcctcgctcgtactagtgaatctcggatgggtgcattggcgatttgctgcgcaggcacagtatagggttcttggtgggggtttcttggggatggatctctcatagctccggggtttatttccacattctaactagacgcagcaacttatctttccctcgattttgtgtaatggcgtgctctttgctcaagtcttgcctttcccagctctagccgctactctgctcttcccccagcgtggctgttttgcacttttgcggccgtcagtgcgggagtggacaaagctaaagacttgggggctggttcagacggggatcgacatgtgtctaataagacatgggtcagattttgggtttagttcaggttgatcagtcaactgtagccatcaaagaaaattttggcaagttcagcgaggtcctggagcctggttgccacttcctgccctggtgcatagggcagcagattgctggttacctctccttgcgtgtgcgccagctggatgtccgctgcgaaacaaagacaaaggacaatgtctttgtcactgttgttgcatctgttcaatatcgcgctcttgctgataaggcatctgacgccttctacaagctgagcaacaccagggaacaaatccagtcatacgtatttgatgtcatcagagctactgttccgaagctgggcttggacgatgcatttgagcagaagaatgagatcgcaaaagcagtggaagaggagcttgaaaaggcaatgtctacttatggctatcagatcgtgcaaacgctaattgttgatattgagcctgacgaccgcgtcaagagagcaatgaacgagatcaatgcagctgctaggatgagggtggcagccagtgagaaagctgaggctgagaagatactccagatcaagaaagccgagggagaggcggaatccaagtacctggctggcgtgggtattgcaaggcagcgccaggccattgtggatgggctgagggacagtgtgctcgccttctcagagaacgttccaggcaccactgccaaggacatcatggacatggtcctggtcacccagtactttgacaccatgagggagattggggcctcctccaagtcctcttcggtgttcatcccccacggtcctggagctgtcaaggatgtctcggcgcagataagagatggcctcctgcaggctaatctgcactgagggtaccctgagaaaacgaaggattcagagggatgagggcatcggtcctatgatgctataaaattgtcaattatagactatatatgatatatagaggcaggcttgattgatttgtaaaagcatagttaagcaccgattgagctataagtgcacttgtgagtgagcctgggtatccaaacctgtcagct

SEQ ID NO: 104238 - DNA, 1244 bp, Zea Mays
agcccctcctaaatttttttctagatccgtccctgtttgccgctgtgtttagctctcttccccgcaaggatccatcgatcggtcggacaggataagacatgggtcagattttgggtttagttcaggttgatcagtcaactgtagccatcaaagaaaattttggcaagttcagcgaggtcctggagcctggttgccacttcctgccctggtgcatagggcagcagattgctggttacctctccttgcgtgtgcgccagctggatgtccgctgcgaaacaaagacaaaggacaatgtctttgtcactgttgttgcatctgttcaatatcgcgctcttgctgataaggcatctgacgccttctacaagctgagcaacaccagggaacaaatccagtcatacgtatttgatgtcatcagagctactgttccgaagctgggcttggacgatgcatttgagcagaagaatgagatcgcaaaagcagtggaagaggagcttgaaaaggcaatgtctacttatggctatcagatcgtgcaaacgctaattgttgatattgagcctgacgaccgcgtcaagagagcaatgaacgagatcaatgcagctgctaggatgagggtggcagccagtgagaaagctgaggctgagaagatactccagatcaagaaagccgagggagaggcggaatccaagtacctggctggcgtgggtattgcaaggcagcgccaggccattgtggatgggctgagggacagtgtgctcgccttctcagagaacgttccaggcaccactgccaaggacatcatggacatggtcctggtcacccagtactttgacaccatgagggagattggggcctcctccaagtcctcttcggtgttcatcccccacggtcctggagctgtcaaggatgtctcggcgcagataagagatggcctcctgcaggctaatctgcactgagggtaccctgagaaaacgaaggattcagagggatgagggcatcggtcctatgatgctataaaattgtcaattatagactatatatgatatatagaggcaggcttgattgatttgtaaaagcatagttaagcaccgattgagctataagtgcacttgtgagtgagcctgggtatccaaacctgtcagctatttggtatgtatatgttctgcgtgcaaaatcctactgtagccatagcgttgaacaggaagaattgtaaatggatttggtgagtttatcaatcaggttactgc

SEQ ID NO: 104239 - DNA, 1345 bp, Zea Mays
ttttttcttctagacagttgtagatgtgatgtggagcagtgcacaaactgctccatatctgaacaccgcatgataattgtatatttgcagtgtacaaagagtcaaattgcatattttatcttcagtttgtggtcaggtgccttgaatcgtgagagtttacaccttgtgattcccatggctgcctcaatgcgacatgtatctacccttgtctatgatcaaattcaggttgatcagtcaactgtagccatcaaagaaaattttggcaagttcagcgaggtcctggagcctggttgccacttcctgccctggtgcatagggcagcagattgctggttacctctccttgcgtgtgcgccagctggatgtccgctgcgaaacaaagacaaaggacaatgtctttgtcactgttgttgcatctgttcaatatcgcgctcttgctgataaggcatctgacgccttctacaagctgagcaacaccagggaacaaatccagtcatacgtatttgatgtcatcagagctactgttccgaagctgggcttggacgatgcatttgagcagaagaatgagatcgcaaaagcagtggaagaggagcttgaaaaggcaatgtctacttatggctatcagatcgtgcaaacgctaattgttgatattgagcctgacgaccgcgtcaagagagcaatgaacgagatcaatgcagctgctaggatgagggtggcagccagtgagaaagctgaggctgagaagatactccagatcaagaaagccgagggagaggcggaatccaagtacctggctggcgtgggtattgcaaggcagcgccaggccattgtggatgggctgagggacagtgtgctcgccttctcagagaacgttccaggcaccactgccaaggacatcatggacatggtcctggtcacccagtactttgacaccatgagggagattggggcctcctccaagtcctcttcggtgttcatcccccacggtcctggagctgtcaaggatgtctcggcgcagataagagatggcctcctgcaggctaatctgcactgagggtaccctgagaaaacgaaggattcagagggatgagggcatcggtcctatgatgctataaaattgtcaattatagactatatatgatatatagaggcaggcttgattgatttgtaaaagcatagttaagcaccgattgagctataagtgcacttgtgagtgagcctgggtatccaaacctgtcagctatttggtatgtatatgttctgcgtgcaaaatcctactgtagccatagcgttgaacaggaagaattgtaaatggatttggtgagtttatcaatcaggttactgca

SEQ ID NO: 104240 - DNA, 1437 bp, Zea Mays
ccccacagaaggagaaggaaaataaactagggtttagccggggccacacggcaggctccacggcgtggttatgtccgcctttattctccccccactcgtctgcttcgcctccacctatccgccgcctcccaatcatcctgcccccaaactcccaccccgcagcatccccacgccaccacacctcgtcgcgtcgcgtcgtcaccggcgtgaagatggtcgggccaggcctctacaccgagatcggcaagaagaccagggatctgctgtacaaggactaccagactgaccacaagttcaccctcactacctacacctccaatggcgtcgctgtaactgcttctagcacaaagaaagctgacctgatccttggcgagatccaatcacagataaagaacaagaacatgaccatagatgtgaaagcaaactcggagtcaaatatcattacgacaattactgttgatgagattgcaacaccagggctgaagaccatcttaagctttgctgttcctgatcagagatctggaaaggttgagctccagtatttgcatgattatgctggagttaatgcaagcatcggtctgacagccaatcctgtagtcaacctctctgctgcctttggtactaaggctgttgcagttggtgccgatatctcacttgatactgcaactgggaacttgactaaatacaatgctgcactgaggttcactcatgaagaccttgtcgcatccctgaacctgaacaacaagggagacagccttactggagcctactatcacaaggtgagcgaattgaccaacacagctgttggggcagagcttacccacagcttctcgaccaatgaaaacaccctcacctttggcgggcagcacgccctggacccactaaccgtcttgaaggcccgcattaacaactctggcaaggccagtgccctgatccagcacgagtggaggccaaagtcgctggtcaccatctcggccgaggtcgacacaaagaccatcgagaagagctcgaaggttgggattgctgtggccctcaagccctgattggttatacagaccattttttccccttctaagttcctagcatgactgtttgggtcagatcagatcagctggggaaaacaaaactgttggggttcctggcatctttgtttgctgtagtcagttgatttaatgaactccgaaatgtctcatggaggaaaattttcggtcgcctgtgtagcgctctgttaaatgagcaaccttcacaataattcaagctcggtagaattctgaacttgttaatgatgattgatggtgactgtcaactgaggtaggggaggttctgttttcagcaataatttttctaccttgtggtgtcggggactttacccaatcgattcatgtgtttttgtggtgcagtatttaattaatgtcaagcgttttttattgcaattta

SEQ ID NO: 104241 - DNA, 4148 bp, Zea Mays
atggtggtccaggttcttgggatgcccggggccggtgtgaagccgccggcgccgccagtcgaggccgcgacggggctaccgccgcgcaggttgacaccttcgagagtctccgccaagcggtcctggccgcccgggtgcggtcggttccctgcgcctctgcccgcgccggcctctccggccgcggcaggtcctgaggtgaatggcgttgatggcgccttcaccatcgtcggcggcagggccgacgacgaggccgcccccgctgtcatttcgccttcggctcagaacggatgcccggataaggtggaggaggccgtcgccgccgccacagtttcgcctctgcccgagaacggcgccccgcctcggccgcaggggtcggataaggtggaggaggccgccgccacagtttcgcctctgcctgagaacggcgccccgcctcggcagcagggttcggataaggtggaggaggccgtcgccgccgccacagtttcgcctctgcctcagaatggcgccccgcctcggcagcaggggtcggataaggtggaagaggtggctgatcctgccgccgtttcacctgtggctcagagttgcggcctgcctcaccaagaggatgataaggtggacgatctctcagctgttttgcctgcagcgcgcagcagcgccctcccacatgccctgcctcagtcagggccggagagggctaggcaggatggagacggtggggagaacggagaggtgcaattggtgggcggtgcagtcaagctgtcatcggatggtcagcaaggggacagggtggtgcaggtggcagggccaacgttagaagtactggggagctgtaccactgttggtgctagttctatgcagaacggtggcgagggggatggcttgttggtggcagcagagaagggctgtggtggcagcagcgatatggggcaggaggttgctgctaatgatttcacagagattgaaaacaaaacaggcactggtgagttacagggaaaggaaaatggaattgcaggaagcagaacaaaacggtggtcgtcggaatcgtctctgaatccgctgcctaagaggagggcagtctcagccgtacgcaaatttccacctggctgtgggaggactattgttaccaccgcagacagtggtgttttggaggtctcacctatacgctcatttgctcctagttttgggatgtctgctgttaataccacaggcagtggagatagggagtggttgccttcagaagccacccctgtcaacaatggtgatgccttggtggcaattccggttttagttttaggagaatcggcttttccaacttcagcaatagaggcatccaataagaaagtggaaagcaagaaaatagtggatgaaggacatagcaaggctcacaatagggtccaagttcgagatgattttgccggtaccaaacaagacggtgaccagcgaaatgttgtttcaaaagctacacagaggaatgtttctgatgagaagatgaatgggaaattctcggcacataaaggggagcaggtagcacaagaaatggtggatcataagatgaaaaatgaacttgaaagtagcttgcaaagaagtaatcttaggacacctttgagcaatcccattgatgtaaaggtaaagaggttggatagtggcaagatgaatgctggattgcttggtaatgcaaggtcctctgcaggtgggaagatgcaaagtaagactctgagtgctaaaaaggaagtgtcctcaaatatgaacacaaagcaaaataagtttgctcataagttgaagagtgatgacacaagcaagggtaatttgcatttgtccgctagggagtccaagcttggaacacatgttgcaatcaatcaaattgaagagcctaaccaaataattgtacaagcattgatggctcctgataattgcccttggacacgaggaagaaagtcatttgctagtgcttccaagtctcttgttcctaggaacaagcttaagggaaaggatggtagtgcttccaagtctcttgttcgtatgaacaagataaaggaaaaggacaccactcgaaaagatatactagcaagaaaagtgacctctaatgaatcgatcaatgatgagacaatggatgataatgagacacgaggaagagaacctattgatagtacttccaagtggcttgttcctgtgaacaagctagatgctactccaaatgatataccagtagggaaagtggtatcttgtgactcgagcaatgatgaggcaatggatgacaatgatggcattatcttggaagatgatgacaactctagggcgctagttgtgtatggacaaaaacaagaaatgtgtctcacggttcttccggttgttccttccgggtcacaccacaagcaatctcgggaccatgatatagatgctcgaagcaaagttaggaagttgctccagttattccaggcgacataccgaaagcttacacaagttgaggaacaaggtaaacgcaaagttggaaggattgacattgaagcagctaaggcactaaagaacgaccctatttataaaaagcttggggctgttgtgggaaattttcccggtgtcgaagttggcgatgaatttcattttagagttgagctgtccataattggtctccatggcccacttcaagcaggtattgccacttctaaggtgaatggtatcaatgttgctataagtatcgttgcctctggtggctatcctgatgaattatcaagctcagatgaactaatatacactggttccggagggaaggctggtgggaataaagaaggagatgatcaaaagcttgagcggggtaatcttgccttgaagaattgcattgaaaccaagaccccggttcgtgtgattcatgggttcaaaggccaaaatagaagtgaaattggtcattctaaaggcaagcaaacttcaatatttatatatgatggattgtacgaagtgttggaatgttggcaagaaggcccaaaaggcgagagggtcttcaagtacaagttacagaggatcgcagggcaacctgaattagccctacatgcagttaaggcaacgaggaagtccaaagttcgtgaaggtctttgtttgcctgatatatctcaaggaagggagcggatacccatatgtgtcatcaacacaattgatgacatgaagccagcaccatttaaatacattaccgaagtcatatatccagattggtatgaaaaagaaccaccaaaaggttgcaactgtacaaacggctgctcggactctattacatgtgcttgtgcagtgaaaaatggaggggaaatcatgttcaatttcaacggtgcgatcgtcgaggccaggcctctcatatatgagtgtggtccatcatgcaggtgcccgccaacatgccacaacagggtgagtcagcatggtgtcaaaattccactagaaatattcaagacaggcaagacaggttggggtgtaagatccctcagttctatatcatcaggcagtttcatatgtgagtataccggtgagctattggaagatgaagaagctgaaaagagagagaatgatgagtatctatttgatattggtcataactaccatgataaagaactttgggaggggctgaagtcagtggttggtctaggatctgctacctcatcttctgagaccatggaaggcttcacaatagatgcatctgagtgtggcaatgtgggaagatttatcaaccatagttgttcaccaaacctctatgcccaaaatgttctctgggaccatgatgatatgaggatgccacatgttatgttttttgctgttgagaatatcccgccactacaggagctgacctaccactataactataagataggggaggtctacataaatggcgaggagaaggttaaacattgctactgtggcgcctcggattgctgtggaaggctctactgaaacattattgactgttgttagctctatgttttgaacacctctgtcctgtctctgcggtacccttctattctcagttcgccttgtcttgtcggcgttctgatgtttacagcaagctgcatttgatcttgctgttttcatttagaaaaaaaaaaacattctgcttcgctctactgtgttttgaattgtgaatgaattttgaatggaaccccgttgtaccatgt

SEQ ID NO: 104242 - DNA, 675 bp, Zea Mays
aggtgatgcgggcgcaccggatcatggagcgcgtgcaggaggaacaacgctgctagtacggcgtcaaggagccgaggcaggtgctcgccgtcaccccgacctactcacgcgcattctaggcgctccacctcatcggcctcctccactcactccgtcggaatccttgcgcatactggcacgacagaccaactacggctcagcgaggaggacaagcagaatatgcctcttccagtccatggccctgcttgcaactcctcagggcatctgattggatggcacacgttcaactcattgcccttctctgggaagacggccacagttgttggtgaagcagcccctgttctgcccagggatttggagtgggctggttttgtgttgaactcgaggatgctgtggaaggaggctgacggtaagcctgactgggtgaaggatcttgatgctgtgggcgagaatggcgaggagattgagaacccacttactctgttgaatgatccgtcctctgttgagccactgggcaactatgggaagaaggtcctactgtggtggctttgtgttgaagcacgggctgatagcaagtttcctgaaggaaagtggccttagagaatggattaattttggttgacacaaagtatgagtttggaaaaacatctgatgggacaattgtgttgattgatg

SEQ ID NO: 104243 - DNA, 2112 bp, Zea Mays
cttcaaccccctgtccgccctctgcttccactcccacgtcgttatccggaagagcaacggggaggagaaagatcctctccctcctcctctgtactcttctttcccgtcccctccacgtctcgtctcctccctcgctgcggtgcgggatacgggctagattcagtcagcgctcatgatccggaggatcgagggcaacaaccagcgcggagcggcacaagcctcacgtgtccgggatctcttctccgcccagtaggcttccttgccttcgggcggtttccaggttggtagcatgtgagagtgatggcggccgccgaagcgagggctgcctggcagcgcgccgccaaccgctgcatggtccaggaggacgccaagcgagctccccatctggtctgctgctcgccgcccctacaaccgcacgacacgagcgatggaaatcctctgagcccgcaagatctccatgtccctacatttgtgcccatcaactggaacctgatgaactccagcctgcccatggagacccagtggtggctccagttgcagcccaactttgggtgccaggcagccttagctagggagcgcctcaactatgtaggtgcggaagccgctgagaagaaaacggagggtctagcgccagtacctaaacttgaggatgtccaagcaaacaaggccgcagatccttttgagcctccatggaccatttccgcggctgtcatgaagcaaacatctggaacgggtttggaagagttgaagaatctcgcttgctataccccagtgagcctcgactgcaaaggtagtgccaacagatgtgtttccgaggataacaagtttacagatttcaaagctttcgatcctctcttccctaagccacaaaaggaatactgcgaaatgcatgccccctggaaagaaaccagaaaatctcagccatggtggcaactagctgatgccgatggtttggcttcccttgtcgctgaaagagcaatggaaaacattgtcgacaatgatctgccaaggcccactcagacagtccgggttcatgggggtgaagtgaaggtccctgaaaacaaggatgattatgggctgtctgctctttgtgcggacaaagagctggatcctgcacatgacactatggagtgcagctacagtgtttcaagcaccaccaacaacgacacgaactcttctgatggggggcattggcaacaacatcaaagaaataaagagcccggggaggcacatgattcttatagttccaccgccaatacaccgggcggcaagccagcatatcagaatgcttccgagagggccaagctgttagatgctctccgccactcacaaacacgtgctagggaagctgagatagctgccaagaaagcctacgacgagaaagaccatgtcatcaagctattgttccgtcaggcctcgcacctttttgcatgcaagcagtggttgaaaatgttgcagctggaaaacatatgccttcagctcaggttcagagagcaccagatagcgaccatgttcccagagcttccatggatggtgacgaaagaaaaggtagcaccttctcaagagcacagtgacaggaagaaaggcagaaggctgaacaggaaaggtggcctacgcgatgccgttgcatttgctgttggtgttggtattgttggtgctggattgcttcttggctggactcttgggtggctactgccctaactggaagtttcattgtcgtagatgacaggacagatgccacctgtgcacgctgaattgaatggcaataggtaagctccaagtgcgtgctttcgtgaagagtgaaaaaggggcagatttttagagttcttccatggtagtctgttgatatggtgatgatagcttgatctcttatgttggttccgtatacataggaaggatctggtgtacatacttccagaaactggatataccttatgttggatgcgatccttagctgtgtgctgtacatatgggccagtgagggtctggtggaagatgaaatcagccgacttcaacaacgtatgcgctagtactgtaaatctatagattttatttgctttaatgtagcaggaattgtgataatccgtttgctgtaatgtgtgctagacttac

SEQ ID NO: 104244 - DNA, 2046 bp, Zea Mays
acgtcgttatccggaagagcaacggtactcttctttcccgtcccctccacgtctcgtctcctccctcgctgcggtgcgggatacgggctagattcagtcagcgctcatgatccggaggatcgagggcaacaaccagcgcggagcggcacaagcctcacgtgtccgggatctcttctccgcccagtaggcttccttgccttcgggcggtttccaggttggtagcatgtgagagtgatggcggccgccgaagcgagggctgcctggcagcgcgccgccaaccgctgcatggtccaggaggacgccaagcgagctccccatctggtctgctgctcgccgcccctacaaccgcacgacacgagcgatggaaatcctctgagcccgcaagatctccatgtccctacatttgtgcccatcaactggaacctgatgaactccagcctgcccatggagacccagtggtggctccagttgcagcccaactttgggtgccaggcagccttagctagggagcgcctcaactatgtaggtgcggaagccgctgagaagaaaacggagggtctagcgccagtacctaaacttgaggatgtccaagcaaacaaggccgcagatccttttgagcctccatggaccatttccgcggctgtcatgaagcaaacatctggaacgggtttggaagagttgaagaatctcgcttgctataccccagtgagcctcgactgcaaaggtagtgccaacagatgtgtttccgaggataacaagtttacagatttcaaagctttcgatcctctcttccctaagccacaaaaggaatactgcgaaatgcatgccccctggaaagaaaccagaaaatctcagccatggtggcaactagctgatgccgatggtttggcttcccttgtcgctgaaagagcaatggaaaacattgtcgacaatgatctgccaaggcccactcagacagtccgggttcatgggggtgaagtgaaggtccctgaaaacaaggatgattatgggctgtctgctctttgtgcggacaaagagctggatcctgcacatgacactatggagtgcagctacagtgtttcaagcaccaccaacaacgacacgaactcttctgatggggggcattggcaacaacatcaaagaaataaagagcccggggaggcacatgattcttatagttccaccgccaatacaccgggcggcaagccagcatatcagaatgcttccgagagggccaagctgttagatgctctccgccactcacaaacacgtgctagggaagctgagatagctgccaagaaagcctacgacgagaaagaccatgtcatcaagctattgttccgtcaggcctcgcacctttttgcatgcaagcagtggttgaaaatgttgcagctggaaaacatatgccttcagctcaggttcagagagcaccagatagcgaccatgttcccagagcttccatggatggtgacgaaagaaaaggtagcaccttctcaagagcacagtgacaggaagaaaggcagaaggctgaacaggaaaggtggcctacgcgatgccgttgcatttgctgttggtgttggtattgttggtgctggattgcttcttggctggactcttgggtggctactgccctaactggaagtttcattgtcgtagatgacaggacagatgccacctgtgcacgctgaattgaatggcaataggtaagctccaagtgcgtgctttcgtgaagagtgaaaaaggggcagatttttagagttcttccatggtagtctgttgatatggtgatgatagcttgatctcttatgttggttccgtatacataggaaggatctggtgtacatacttccagaaactggatataccttatgttggatgcgatccttagctgtgtgctgtacatatgggccagtgagggtctggtggaagatgaaatcagccgacttcaacaacgtatgcgctagtactgtaaatctatagattttatttgctttaatgtagcaggaattgtgataatccgtttgctgtaatgtgtgctagacttac

SEQ ID NO: 104245 - DNA, 906 bp, Zea Mays
atggagaaatctccaagatccattcttatcggatcaggacctgctagggccgacacacgcaaagatgtcgctgaagctgcaaatgggactaggctgattgatgggaataggcgcacaggcatcgtcgacacgagcaacattgattatggcactagtagattacgtccgcgccatcgattatgtaggacacatgatccgctatgttttactgcgcagagatataatcgagtttgggatggtcttttagacgccattagacagatgcaattatctgccgatgagttgaggaagttgagccgtcgcaatcatgtgcctgagtatttggatatggtgcacaagaattgcttggttaatgccatgagtgatgttactgaaattgcaaaaggtctagacactatgagcagggatttggaggaagttcttattggtccgcaacctctccttgaggattacgaagcccttggagtgtacgatgatttcaaatctgatgttcattgtgattgtattgagcagtttggtcttttatgtaccatggaggccattcctgatgcagaatacacttcctacactattgctgatgctggaagcattcacatgaataaggtgctgcagtttactcttgcagatattgatcaggcaatatgtgtctcacttacaagcaaagagaacactgtcttcaggtctgggatatctccagagaaggttttcatggttcctaatgcagttgacactgcaatgtttactccctctcgcaagcgcttaaacttggcagctaacttcagaaatacaagcgtcctgaattttcagaaacttaacagcccgaacgcgtccgaaaacaagctactgaattcactgccagaaacacaagcgactgccaacaagcgactgaattcaccaagctactga

SEQ ID NO: 104246 - DNA, 946 bp, Zea Mays
atcagctcggggcgcagagctttgggaattccaagcagagccagcacagccacagcccacagcccacagcccgggaggagaagcgagcgcgcgatccagttggtggccgcccccgcccgcacaccatggcgacgccgtggtggtggccgtcgctgctgccggcgtggctgagctccagcgcgctatggttcctcgtcgccaacgcggtcgtcgccgcggtcgccatcctgtccaggcgcccgccgctgccgctgccgctgccgctgccgtcgccccgccgccgccgccgcagcagcggcgccgccgccgcgctcacgcggagggcctcgtctgcgctgctgcagcgcctccgctccttctccatcttcgccgtcccctccgcctgcttcaacaccaccacgccgtttccgcaccccgacgccgcccaaggaacagaaactgaggcgccggccaggacaccggcgtcccctctctcgtcgctgggccgcgcgccggcggcagacgccgacgaggaggatagcgagcccggcgggatgagcatggacgaggcctacgcgctggcgctggaggcgcgccgccggccggaccgggagagggaggaggcgcccaggaggtccgaggtggacgccaagcccgaggagttcatccgcggcttcgaggaccaccaacgccagcagcgcctcaactccatcttcaactacacccagatgctcaagcagcgcgccgccgccgcccgccgccagcgccagccggatgccccgccagatcagctttgagtcacgtgttcggttcgttcgttcctgatattggtcagcgttttcagggagaccaaaatcagttttgagttgctgtacatagcctgctttcaacagattgtttgtatatagtcaccagatatgatttacagataaagtacgacataaagatatatcttgatcgtttataa

SEQ ID NO: 104247 - DNA, 226 bp, Zea Mays
gtggcccaaggtggcaccgttgcacatacagggagaagaagggggatcttccagtcacacgatctgatggagaggtgggcggcggcaaaccaacgagccgctgagacccttgcgaagtatggtacgatgcggcttaatgtagacctacttgatggctcggtctcctattcagagcctgcatcggatcatggtatgcatcaccggttcactctaaagaccttgtttt

SEQ ID NO: 104248 - DNA, 859 bp, Zea Mays
agctgccattcatcatcagagctagctagctcagagaagagaagagctgttgcgtagcgcgcgcgcgcgcgctgtgacgacgactgtgagtagcgagagagtgagtgagtggtgactatttcaagaacatcagctcgaccgtttcttcgaccccgcgccctttcctgctagtagctttggaactaactgaaccatgggaggcacgctggagtacctgtcggacctgctgggcggctgcagcagcagcagccggcgccggtacaacaggaggacgcagttccagacggtggagctcaaggtgcgcatggactgcgacggctgcgagatgaaggtcaggaacgccctctcccgcatgaaaggggtgcattccgtggagatcgaccggaagcagtccaaggtgacggtgcaggggtacgtggagcctcacaaggtggtcaagcgggtgcaggccacggggaagaaggcggccgagatctggccctacgtgccctacagcctcgtcgcgcacccttacgccgcgccggcctacgacaggaaggcgccgccgggctacgtgcgcagggtcgacgccgtcatgcccgcctccagctacggcggacccacggcggccggcccgcaggaggagcggctcgtcaacatgttcagcgacgacaaccccaacgcatgctccatcatgtgaatttcaattactactgtgtcaaatagctatagaccacgggtgcagctctcttcgatcacagaacaagtatatgcatggtcgcctcggttggatgtttatgtccatgacagaatatatatatatatatatatgtcttttgtgtgagcagctggagtagataagcgtaaaaaatgttttcct

SEQ ID NO: 104249 - DNA, 707 bp, Zea Mays
ttgaccatacctcggaaccagaaaagaaaaacccaaaccaccagcactcgtgggagctcgggggcgagaaatcgagtagcgtcgccgcgttaatttctcggaacgccaccgtcctgattccagaggaggtgcaattggtgttcgcgggacatcggtggacaagcctctaggcatgacggtcaccatggtctagccaattcgtcgctggagtactccactcggcggaatctgcagtcggtcgtggccggctgatttgggcacccaattaaccggtacgtcctcgtctagtgtgttcctcgtctcctccgcaattattttcgggaatcgaggatcgaagtggagggtcggctcgcgaaatcacctcgccgcggcaggtcgccggtgagagttgggggcggcgcggtcgcatgctgtcgaggggaggaagaaaggtttgcgtcgtcggatgggttttggacggtcaggattagatcaaggaataccgattcactggtgttggggacttgttctcaaatgctatgagttaagaacaaggcaacacaaaatgttaaatgttaatgtccttcgtcctttgaagcattatttcccttaggatataatgatcttcggacgaaggttatgaaagacatatcttcatcaacgtgatatgtgttaataaaagaataagtatatgaaacataataggccaagtaaataatcacataaca

SEQ ID NO: 104250 - DNA, 1101 bp, Zea Mays
cagagctcacccaccacttcccgtctcctctctcctgtcctgtcctccacaccacacgcgggcacgagagagacacagggagagaagagagctcgtgcttgcatttccattgccggcgcctcttcctgtgatcgtcgcagcatcacgaccgcaccgcacccttgcgttagctctgtcttcttgtcgtacgtacgtttatttctttgcttggagctagcggtaaaggagatatggtggggaagagggagcgggactgcaagaacccggtgcgccggaccacgagcatgacggagttcgcgctcgcggcggtgatggaggaggacgacgaggaggcccagctgcccgacaacggcagcagcagcagccgtggcggtgggcagcaccagcaggactggctgtccgcgctcggcggcggcgccgccgcagcgcaggaggactggatcgcggcgtaccgcgcccgcgcggcgccggcaaaagcggggctccgccgcaactcggccgactactcggccgtcgagaccgccgcgttcctccgcgcctgcgggctctgccggcgccgtctcggccccggccgcgacaccttcgtgtacaagggcgaggcggcgttctgcagcctggagtgcagggagcggcacatcacgcaggaggagtggaaggacaagtgcgcggcgacgtcgatcaaggacgcgggtgcggcgaaggtcgtcagcggccgccgccgcgccggcgaaggcaaggccgggggcacggtggccgcggcatgacgaggcgcacgcccacgcagaggctacacctactgccagtgccagcttctcctcgactaggcagctgcaactgcaagctcatcatcgatcgatcactcgtccacaaccacatctataccagtcagcatattattatttatttatataaaccaccagcttagctcaatcgattagttacccggatcgatcgctgcatgcatgcaagccgtacagacatctacatgtaccattagagctagctccaagcaaagaaataataccctccaatcccgagaggaaataagttcattcctacctcaatcctctccaatctcgaaggggatttgagatttctaaa

SEQ ID NO: 104251 - DNA, 1159 bp, Zea Mays
tttcttggacccgagtcgagtagtccggtacatcccaccgcctcgcaccgcggccatgttgacaccgcgcgtcctcaaggcttcgctgctccgctgcttgcgcgctaccgccgagctgcctccgttgcggcgaccccggatcctacctgtgcgggtttaccattccagaggctattctagtgggggaagctccaagtatgataggccaatgagacagttttccgaacagaatgagtcaacctctcagccattaatatattacattgctccatctgctctgcttgcttttgctgggatagccacatttgttcattacaatgatgagaggcgtgcagttcccttcgctaaagtaccaggacagaccaatgttcccaaaagatgtactaccaatagacctgcaataggagggccatttaagctgtatgatacagaaaacagtgaggtgactgaatcaaagcttcggggaaagtggaatctgatgtactttggctatacatcatgcccagatgtgggtccagctgaagttcagaagatagctgatgttgttaaactgttagagtcaaagtacgatatcaatattacaccactctttgtcacaattgatccacaacgtgattcacctgctcagcttaaggcataccttactgagtttgacccaagaatagtaggactaacaggtcccatcagtgcagtaagacagatagctcaggagtaccgtgttttctttaaaagagtagaggaagttggtcaggactatcttatagaaagctctcacaatatgtacttgctagatccatgcttggagacagtaaggtgctttggaagtgagtacgaggcatcagaccttgctgaggctataacaacagaggttcagaaagcatctgcctcatcaacaaattagtctagcgggtattggcacttggtgtactatctaattttttgttgattgcactttgtgatacaaaagcaaagctatgcatgtttataaatttgcaagcctttttcctacctgaaagtaaaacaatagctgcattgttaatatttggccttatgttccaaccttttatcttattagaaactttttgaagtggaaatggtatttcctctgatagcgagttattaatatgaaacccacatgattgtaccgttctagtaacaa

SEQ ID NO: 104252 - DNA, 1259 bp, Zea Mays
cttggacccgaggtaagaccgcccatagaattttcatttcgccgcattattttttccccttctcactccctgcttcggtccttcgccttcctcatgtccccgactctccgatactagtcgagtagtccggtacatcccaccgcctcgcaccgcggccatgttgacaccgcgcgtcctcaaggcttcgctgctccgctgcttgcgcgctaccgccgagctgcctccgttgcggcgaccccggatcctacctgtgcgggtttaccattccagaggctattctagtgggggaagctccaagtatgataggccaatgagacagttttccgaacagaatgagtcaacctctcagccattaatatattacattgctccatctgctctgcttgcttttgctgggatagccacatttgttcattacaatgatgagaggcgtgcagttcccttcgctaaagtaccaggacagaccaatgttcccaaaagatgtactaccaatagacctgcaataggagggccatttaagctgtatgatacagaaaacagtgaggtgactgaatcaaagcttcggggaaagtggaatctgatgtactttggctatacatcatgcccagatgtgggtccagctgaagttcagaagatagctgatgttgttaaactgttagagtcaaagtacgatatcaatattacaccactctttgtcacaattgatccacaacgtgattcacctgctcagcttaaggcataccttactgagtttgacccaagaatagtaggactaacaggtcccatcagtgcagtaagacagatagctcaggagtaccgtgttttctttaaaagagtagaggaagttggtcaggactatcttatagaaagctctcacaatatgtacttgctagatccatgcttggagacagtaaggtgctttggaagtgagtacgaggcatcagaccttgctgaggctataacaacagaggttcagaaagcatctgcctcatcaacaaattagtctagcgggtattggcacttggtgtactatctaattttttgttgattgcactttgtgatacaaaagcaaagctatgcatgtttataaatttgcaagcctttttcctacctgaaagtaaaacaatagctgcattgttaatatttggccttatgttccaaccttttatcttattagaaactttttgaagtggaaatggtatttcctctgatagcgagttattaatatgaaacccacatgattgtaccgttctagtaac

SEQ ID NO: 104253 - DNA, 1860 bp, Zea Mays
cttggacccgaggtaagaccgcccatagaattttcatttcgccgcattattttttccccttctcactccctgcttcggtccttcgccttcctcatgtccccgactctccgatactagtcgagtagtccggtacatcccaccgcctcgcaccgcggccatgttgacaccgcgcgtcctcaaggcttcgctgctccgctgcttgcgcgctaccgccgagctgcctccgttgcggcgaccccggatcctacctgtgcgggtttaccattccagaggctattctagtgggggaagctccaagtatgataggccaatgagacagttttccgaacagaatgagtcaacctctcagccattaatatattacattgctccatctgctctgcttgcttttgctgggatagccacatttgttcattacaatgatgagaggcgtgcagttcccttcgctaaagtaccaggacagaccaatgttcccaaaagatgtactaccaatagacctgcaataggagggccatttaagctgtatgatacagaaaacagtgaggtgactgaatcaaagcttcggggaaagtggaatctgatgtactttggctatacatcatgcccagatgtgggtccagctgaagttcagaagatagctgatgttgttaaactgttagagtcaaagtacgatatcaatattacaccactctttgtcacaattgatccacaacgtgattcacctgctcagcttaaggcataccttactgagtttgacccaagaatagtaggactaacaggtcccatcagtgcagtaagacagatagctcaggagtaccgtgttttctttaaaagagtagaggaagttggtcaggactatcttatagaaagctctcacaatatgtacttgctagatccatgcttggagacagtaaggtgctttggaagtgagtacgaggcatcagaccttgctgaggctataacaacagaggttcagaaagcatctgcctcatcaacaaattagtctagcggtatggcagcatcagcagttttccaatcttgccgtgaagcacctcctcgcctgttgcatagccctcacagaagggcgtgactcacagtgggctggccattcagctctgcctgcaaccaaccgattcaagttctcctattctcgctcttgttgtgtcagatctgagcttaactgtacagaatggtcttcttgcgacgaagtctcctggcagttccagatcacttacaattctgcgagatgagaatgatcttacaatttccagcaaacattaacctgctgcattggatgaggcatatgacctacagacttaccaggttgttagcacagattcatgaacctgctttgctctctcctctggatgctgaacaggtaaacgattgtgaggcgtgacagcgctgtccatgttatgtcggtagtagatctatatcgtcgcttttgattcgtgtccgaactcgcttttccatgggacgcacggaatgccacctcgctttcggctttcccctttgcttgcaggtagtactcgatacgtgctttttgtctacccgccggcacgacagcagccacctgctgccattatgcctgcccgaggccgagggcctcgccatcctcatttcatattcgcggttgtgtttgttctagggcctagctaggtgttgacatcgtgtgagagcctccttttgccactggagtgagtagagttaagcctgttgtgcagtagtagtggaccagtgttagctgtagcaccttttgttttattttatagtcccgtgtgctcgtgcgtttggtgtaagctgacgcctgcaatttaggcttagccggcgtgatcttatgatgatttttgccttgttaaa

SEQ ID NO: 104254 - DNA, 1771 bp, Zea Mays
tcagcctcgtactcaccatcaccaagtacactacaaccccagcgatccctgtattcctgatctctctctctctctctctatccctctgtttctttgggctttgcagcaatatctgaggcctttgctttcttctacatcgcgttaagttctcattcaggatctaacgtacgtgcttcgtgcgttgcctccaaggaaaaaaccctctccatcgtcgtgggtaagcaccaagtagaactgtgcaagggttcaggcatatcatatgcaaaacatctgaaaactcgctcggttttgccagctatatatatatagtcgaattctcgtagcagaatgcacacgtcgtcgtgcgtgcatatatatgtaatatgttttcttgtccatgcatatgcatgcatcccagcgcatccatcgcttgctcgtcgtcgcgcgctaaacaacggcaacgtgtgcgcgcggtgtgtacgtacgttctaacagcatgttggttctaccgacagcattggcaaccggccgatggcgtctcgggaaggaggaggaggtccgccggcgggccgcgtgggccggacgcgggagtaccggacgggcatgcagaccgagctgctgtccatcgacgccccgccgtcggtgagcctcttcgtgctctgcggcgaccgcttcgaggccgcgcacctgttccggtcgggggccctgtcgctgcacatggcccgcgtggagggcgtcccggtgtccatggccacctgcgccgtcggcgaccaccactggatgctggcgcgcgacgccctcgtggcgcgcatcgacgcgcgcgccttcgtcttcgagctccccggcttcttctacgccgtcgtcgtgccgcccggcgccgcggcggacaggaagtgcgccacgatggccgacatcttctcgcgcttctgcgcgtaccacgatcttgccaccgccgccgatgatggaaacgaacttgctggcgaggcggtgagcacaaacccgtgggtccgtgcccacgccgtgatacagcgcctcaagaggcacgcctcgcccgcagcaggacgacaggccaccgccgatgacgcgtcgccgtcgtccgaccgtgccaggcagatggagcgcgccgtccgcacgtccgcggtcgtcaagctacttacccgatccctgctggctggcgtgctccagcccggccgccacctgaccatcaccaccggaggcggcggcggcggcgccgccaatgccggcaccagctcgcggccctccaccacagcagcgctgccaagcaaatcggccgtgtcagacctcctcgacgctatcgagacgaaccgggccgtgccgcgctgcgacacccgccgtgcatccggtggcggactcgggtggtggagcctcaacgtggagggtgtaatgctgctgctcagggtcgtccaggcggtgcggggaaggaagaacctagcggcgccggcggcaggggagaagaggccacgggacgcgggacctggtcgcgacaccatgagaggtggcgttatgggtggcggcggcgcggctcggcggtggtgcggcgggaggccgaggaagattgggaataccgttggcgcctgcgggagctcttagaatcttcggcgcccaaggaatatagtagtacgagattactactagtaactagctaggggtttagggtaattagggaacggttcgatttcttgatctactcttgtctcttgtaagcatcaaatagatgcatgcgtggagatcggtatgctttcagaattcaattatttgagtagttctcgcc

SEQ ID NO: 104255 - DNA, 1570 bp, Zea Mays
tcagcctcgtactcaccatcaccaagtacactacaaccccagcgatccctgtattcctgatctctctctctctctctctatccctctgtttctttgggctttgcagcaatatctgaggcctttgctttcttctacatcgcgttaagttctcattcaggatctaacgtacgtgcttcgtgcgttgcctccaaggaaaaaaccctctccatcgtcgtggcattggcaaccggccgatggcgtctcgggaaggaggaggaggtccgccggcgggccgcgtgggccggacgcgggagtaccggacgggcatgcagaccgagctgctgtccatcgacgccccgccgtcggtgagcctcttcgtgctctgcggcgaccgcttcgaggccgcgcacctgttccggtcgggggccctgtcgctgcacatggcccgcgtggagggcgtcccggtgtccatggccacctgcgccgtcggcgaccaccactggatgctggcgcgcgacgccctcgtggcgcgcatcgacgcgcgcgccttcgtcttcgagctccccggcttcttctacgccgtcgtcgtgccgcccggcgccgcggcggacaggaagtgcgccacgatggccgacatcttctcgcgcttctgcgcgtaccacgatcttgccaccgccgccgatgatggaaacgaacttgctggcgaggcggtgagcacaaacccgtgggtccgtgcccacgccgtgatacagcgcctcaagaggcacgcctcgcccgcagcaggacgacaggccaccgccgatgacgcgtcgccgtcgtccgaccgtgccaggcagatggagcgcgccgtccgcacgtccgcggtcgtcaagctacttacccgatccctgctggctggcgtgctccagcccggccgccacctgaccatcaccaccggaggcggcggcggcggcgccgccaatgccggcaccagctcgcggccctccaccacagcagcgctgccaagcaaatcggccgtgtcagacctcctcgacgctatcgagacgaaccgggccgtgccgcgctgcgacacccgccgtgcatccggtggcggactcgggtggtggagcctcaacgtggagggtgtaatgctgctgctcagggtcgtccaggcggtgcggggaaggaagaacctagcggcgccggcggcaggggagaagaggccacgggacgcgggacctggtcgcgacaccatgagaggtggcgttatgggtggcggcggcgcggctcggcggtggtgcggcgggaggccgaggaagattgggaataccgttggcgcctgcgggagctcttagaatcttcggcgcccaaggaatatagtagtacgagattactactagtaactagctaggggtttagggtaattagggaacggttcgatttcttgatctactcttgtctcttgtaagcatcaaatagatgcatgcgtggagatcggtatgctttcagaattcaattatttgagtagttctcgccatcatcaaacagagatgcatgcttgacgattggtatgctttcagaatatactcttcccagcctcaaattaaaacga

SEQ ID NO: 104256 - DNA, 1575 bp, Zea Mays
tcagcctcgtactcaccatcaccaagtacactacaaccccagcgatccctgtattcctgatctctctctctctctctctatccctctgtttctttgggctttgcagcaatatctgaggcctttgctttcttctacatcgcgttaagttctcattcaggatctaacgtacgtgcttcgtgcgttgcctccaaggaaaaaaccctctccatcgtcgtggcattggcaaccggccgatggcgtctcgggaaggaggaggaggtccgccggcgggccgcgtgggccggacgcgggagtaccggacgggcatgcagaccgagctgctgtccatcgacgccccgccgtcggtgagcctcttcgtgctctgcggcgaccgcttcgaggccgcgcacctgttccggtcgggggccctgtcgctgcacatggcccgcgtggagggcgtcccggtgtccatggccacctgcgccgtcggcgaccaccactggatgctggcgcgcgacgccctcgtggcgcgcatcgacgcgcgcgccttcgtcttcgagctccccggcttcttctacgccgtcgtcgtgccgcccggcgccgcggcggacaggaagtgcgccacgatggccgacatcttctcgcgcttctgcgcgtaccacgatcttgccaccgccgccgatgtccagatggaaacgaacttgctggcgaggcggtgagcacaaacccgtgggtccgtgcccacgccgtgatacagcgcctcaagaggcacgcctcgcccgcagcaggacgacaggccaccgccgatgacgcgtcgccgtcgtccgaccgtgccaggcagatggagcgcgccgtccgcacgtccgcggtcgtcaagctacttacccgatccctgctggctggcgtgctccagcccggccgccacctgaccatcaccaccggaggcggcggcggcggcgccgccaatgccggcaccagctcgcggccctccaccacagcagcgctgccaagcaaatcggccgtgtcagacctcctcgacgctatcgagacgaaccgggccgtgccgcgctgcgacacccgccgtgcatccggtggcggactcgggtggtggagcctcaacgtggagggtgtaatgctgctgctcagggtcgtccaggcggtgcggggaaggaagaacctagcggcgccggcggcaggggagaagaggccacgggacgcgggacctggtcgcgacaccatgagaggtggcgttatgggtggcggcggcgcggctcggcggtggtgcggcgggaggccgaggaagattgggaataccgttggcgcctgcgggagctcttagaatcttcggcgcccaaggaatatagtagtacgagattactactagtaactagctaggggtttagggtaattagggaacggttcgatttcttgatctactcttgtctcttgtaagcatcaaatagatgcatgcgtggagatcggtatgctttcagaattcaattatttgagtagttctcgccatcatcaaacagagatgcatgcttgacgattggtatgctttcagaatatactcttcccagcctcaaattaaaacga

SEQ ID NO: 104257 - DNA, 1302 bp, Zea Mays
atgtacgcgcatgcttgcttgttagttgttacacacaccctactaactggcacttggccgcatcagttagcttggtccgttgcgtcgatcgtctcattgcgtccgactcagcctggagaggcgcttccactcgacgagccgcagcaagaactccatcacctcggcgggctcctggagcgagtaggaggcgctggtctccttggggtgcttggacaccaggatgccgacgccttggccctggccccggcgccgcagcgccctgaaggcgtcctcgtcggtgcggtcgtcgccgatgtacacgggcaggacgttggtgcagcccgcgaagccgagcgactcgagcaggaactcgagcgccttgcccttgtcccacttgatggtgggccgcacctccagcaccatccgcccctgcgtcagccgcagcctggggtactcccgcagaacgcccttcaccgactcccacagctcgccccacatcttttcgtcgacgcatctgaagtggacggagacgcagaacctgttgttctccaccttggccccgggtatgctgcgcgtcgtctctaccaggcgctcgtgcacagcctctatcatgggcaggaactcgctcgccgttgccggttggaacaggactccttttgcctgggccttctcgtgccgggaagaagaggccttggccggacccttgatgtccatgccgtggctgccggcgtagtagagctccgccagcttcacgaacccgaacaccttgtcgcggcaccggccgctcacgatcgccgtcgggaaatgcttggcgacgctacgcacggccatccgcatcgtctcgctcatgaaggcggcgtcggggtcgtccacgatgggcgacagcgtgccgtcgtagtccaggaacatgacgatgcgcctgccctcggacgccgccacgatcctctcgaacttgcccagcgccgacgggtgccgcgccatccaggcggcgcgctcctcctcctcgtcggcgccggcgccggcgagcgcggctgcggccctggcgtgcgtgggcgacgacgcccgcatggactccacgccccagcaggcgccgccgcccacctccgcctgcaagcacttgcggcgcacggcggcggctgcgatcccgctggcgccgcgcggcggcgggtacgggaacagcgtcgtccccgggcaggggcacgagcacgacgcctgcgctgggacgccggaagcctccgccaccgccacgctcggcttcgccatcggcatccgatcggtcggtcgacggcgatcagaggctggctgcagattggaaaggaatga

SEQ ID NO: 104258 - DNA, 89 bp, Zea Mays
ctcctatacatcagggaaaaaagagaaatatttccagacattcagctaccctaataagaactaaagttttcaaaaccacgtatgtgcat

SEQ ID NO: 104259 - DNA, 740 bp, Zea Mays
atcatatcgattcgtgctagctgctacacacgagtacacgacacgacccttagaacagcgtacaccatcatccaccgggatacgtgcgtcgaccacaagcagcagctagccagcagcaacgcctaccgcgcgcgcgaccgcaatgtccatgatcagaaggccgtccactgagacgctggcaatggcggacgtcgactgggcgcggtacgacgaccgcgccttccacgacgacgaccaggacacgccgccggagcacctgcgcgccttcgaggccttcgttgagacggtggtgccgctggacatggtgctggcgttcgggcgcgagcagagcacgagggcccggcgcccaggccacggccgggaggacgacgtcaaggagaagctcaagctctgggccaaagccgtggccgccaaggcgagacgacaatacatcaccaaacaggacaacgacgaccagaatgcctgaatgcacagtgtctgctagggcatatatgcttgttttaaaacaagcattctaagcattttctaactgttttgatcaaatccagctctttgttttttactagatagatcgatggcagtctctcggtccttccagcagctaaccggatctttaatgtattttcaagtttgctcgtagatctcttgcttaattagggttaatttccatctaaagagaggcatattggttgtaattttattataataataatatcagtttacggcaattttctgcacaa

SEQ ID NO: 104260 - DNA, 2075 bp, Zea Mays
tcctccgattttatgcgttattttgtttgccaacccacagaaaaaggcggcagttcatccgctgctgttcctagttctctccacccagaagtcgacctcgttgtttcctccctcctgtcccaaatctcacctccttccagttccagctaccgctgctcgcgttgactcgcctcttcctccattcagtgactccttggatcggctcagggacacgcaccagcgtattgtgtcggcgccgaatcttgcgcgcatttcgcgctattgttgccccggaggagtggtttggatccaagaaagtgatcggccttcttggttggatctcctcccgcaatggcggcgctcctggagctgttcctgggctcctctcccacgccggtggactgggaggcagaggtctacccggcgtacggggacttcgccgtactccccttactcgtcgccttcttccccgccgtccggttcctcctcgaccgactcgtcttcgaggttttagcacgaaaatttatatttggaaagggacatgataagctttctgaaacagatgacagtagaaagaaaatcaataaatttaaggaatcagcatggaagtttgttttttttctttctggcgaactgctttcactatctgtaacatacaatgagccatggtttaagaacacaagatacttttggataggccctggtgaccagatctggcctgatcaaaagataaaactgaagctcaaagctgtctacatgtatgctgctggattttacacatattcaattttcgctctcctgttctgggaaacaagacgttcggactttggagtatcaatgtcccaccatatagcaactgttgttctgattattctttcctacattttccgattcgctcgtgttggcactgttgttttagcccttcatgatgcaagtgatatattcctagagattgggaagatggccaagtacagtagctgcgagtggctagcagttatggcatttcttctttttgtggcatcgtggatacttcttcggctcgttatgttccctttctggatcctaagaagcacaagctatgaagtgctgctgaccttggatagggagaagcatcgattttatggccccatatactactatgttttcaactgtcttctgttctcactcctagttcttcacatatattggtgggtactgatatggcggatgctagttaaacagattcaatcgaaagggcgtgttggtgatgatgttcgatccgattctgaaggcgaagatgagcatgaagattaactttttaggttgaatgattaactgaagaactacattgtgtgatacctgcagcaaggcacaccttctgaaccttttttttttcttttacagaagatatccagatattgtaattcattaggtcatatcattcgttcagcatagaagatgacaaccatcatttgggagttgtcaatgaagccgcctatcggatgctttttatcaaaacagaagtgcattgtatttatttcactaaaccatcatttataagagatacagaatgatcccttgttcatccattcttgtagctagacagttgatttgctttcaaatcatgtaatttgctacagaagcttagttgatttcttggtgtatcattcattgtgatggaaatggaaatcttgggaagaagttcccaacaagaatgtaacatttgtacttttatttctggaggaccctgtttttctgccacaattgtccaacaaagataagctcctaaatattctaataagagcatagcgaagaagcctaagtgcaaaggcaataacatatactccttcagtcctaaaatataattcgttttagactaatcacatatttattaagtaacatacgaatgtagtttctatatatgtctatatttattatcatttggatgaatgtggacagaaaaaaaaaagtagaaagacctattttaagacggagggagtatcatatagcagctttatagcagctttgacgttcaattgacatttatgacaccctgagaaataaagatccccaaacattagacggatgtaataacctgaaagttctacaaagaatca

SEQ ID NO: 104261 - DNA, 1582 bp, Zea Mays
tttatgcgttattttgtttgccaacccacagaaaaaggcggcagttcatccgctgctgttcctagttctctccacccagaagtcgacctcgttgtttcctccctcctgtcccaaatctcacctccttccagttccagctaccgctgctcgcgttgactcgcctcttcctccattcagtgactccttggatcggctcagggacacgcaccagcgtattgtgtcggcgccgaatcttgcgcgcatttcgcgctattgttgccccggaggagtggtttggatccaagaaagtgatcggccttcttggttggatctcctcccgcaatggcggcgctcctggagctgttcctgggctcctctcccacgccggtggactgggaggcagaggtctacccggcgtacggggacttcgccgtactccccttactcgtcgccttcttccccgccgtccggttcctcctcgaccgactcgtcttcgaggttttagcacgaaaatttatatttggaaagggacatgataagctttctgaaacagatgacagtagaaagaaaatcaataaatttaaggaatcagcatggaagtttgttttttttctttctggcgaactgctttcactatctgtaacatacaatgagccatggtttaagaacacaagatacttttggataggccctggtgaccagatctggcctgatcaaaagataaaactgaagctcaaagctgtctacatgtatgctgctggattttacacatattcaattttcgctctcctgttctgggaaacaagacgttcggactttggagtatcaatgtcccaccatatagcaactgttgttctgattattctttcctacattttccgattcgctcgtgttggcactgttgttttagcccttcatgatgcaagtgatatattcctagagattgggaagatggccaagtacagtagctgcgagtggctagcagttatggcatttcttctttttgtggcatcgtggatacttcttcggctcgttatgttccctttctggatcctaagaagcacaagctatgaagtgctgctgaccttggatagggagaagcatcgattttatggccccatatactactatgttttcaactgtcttctgttctcactcctagttcttcacatatattggtgggtactgatatggcggatgctagttaaacagattcaatcgaaagggcgtgttggtgatgatgttcgatccgattctgaaggcgaagatgagcatgaagattaactttttagaagatatccagatattgtaattcattaggtcatatcattcgttcagcatagaagatgacaaccatcatttgggagttgtcaatgaagccgcctatcggatgctttttatcaaaacagaagtgcattgtatttatttcactaaaccatcatttataagagatacagaatgatcccttgttcatccattcttgtagctagacagttgatttgctttcaaatcatgtaatttgctacagaagcttagttgatttcttggtgtatcattcattgtgatggaaatggaaatcttgggaagaagttcccaacaagaa

SEQ ID NO: 104262 - DNA, 294 bp, Zea Mays
atgagttgtgtaaattgcatgggattaaccatccgagacgaaggtgtttcgcttggccgtgattgttggaggaaggagatctacgacgatgtcgtgtggatcgatgaatgcttcttctacgctccacctcgccggtcgtcgacgcagctcatggacgtcgacggcgtcgaggatctagcgttgcagagtcgcgcgagccgatggactccgccggatccgcgcttccctggaccaccgccgctcgatccggtggcgatgggggagggacacctagccaacaactcaaccgcatga

SEQ ID NO: 104263 - DNA, 221 bp, Zea Mays
aagttttagatagtgttgaaaatatgaaatataacctcttttgtgcatagaaaatcttgattaaattttagtttctaattatgcacttctttctaaacctcagtttgataatatggtaggccaacatagggaaaaaagagaatttcatgcttcattacaggagtttaggggggagattctgacatttctgaaaggctactgagatcaaatttattctgaac

SEQ ID NO: 104264 - DNA, 1753 bp, Zea Mays
gcagccagtccgatgacacttcaactagctgtatccactttgccctttctctttccccaaaccccgcaccgcatccccccgaactcccgaaggcccttgactgtctggaacagcgccatcagctggatcggtcctcgatcccgtgacacccatgggcgcctccactcctcgccaccatcccagctcccccttccagcgatccctcctctccaagcggatcatcaccttggctctatacgccctggtcccgctcgccctcctccactacctcctctccttccctcccattccagccccaaccacctcctccccgccaccgcccaaagttgctgccgccgccggcggagcagcaagaaagatcgcggcgccaaggtgcgactactcggatggggcgtgggagcggagcgaggcgggcccgctgtacaacggcacgagctgcggcgagacgatcaaggccgcccagaactgcgaggcgcacgggcggcccgacacggggtacctccggtggcggtggcggtggcggccgcgcgggtgtgcgctcccgccgttcgaccccgccgagttcctgcgcctcgtccgcggccgccacgtcgccttcgtgggcgactcgctcgcgcggaaccagtgcgagtccctcgtgtgcctgctcagctccgcgttcccggcccagctcgtgcgcggcgccggcggaggcgacggggatggggacggcgacgagctccgcaagttccggcgctgggtgttcccgtcgcacaacgccacggtgtccgtgttctggtctccgttcctggtgaacggcacggagaaggccaagggagcggcggtggggctggaccacaaccggctgtacctggaccagccgaacgagcggtgggcggcggaggtgcccggcatcgacgtggtggtgctctccgcggggcactggttcctgcactcggccctcttctacgaccgcggtgccgtggtcgggtgccaccactgcccggagcccaaccgcacggagacgggcttcttcggcgcgttccgcctcgccgtccgcggcgcgctgcgcgaggtcgtcctccgcggcgccagggcgcggcgccagggtcgcaggccgaagctggccgtgctgaccacgttctcgcccgcgcacttcgagggggactgggacagccccaccgcgtgcgcgcgcaccgtgccgtacgcgcccggggagcgggcgatggagtacatggacggcgagatgctccgcgccgaggccgaggaggcggccgcggccgcggcggacgcgcgggcgcgccgggccggcgtgacggtggagacgctgcaggtgacgcggatggccgggctgcgcgcggacggccacccgggagcgtacatgcacccgttcccgttcgccggcggcgcgagggagcgggtgcccaacgattgcgtgcactggtgcctgccggggcccatcgacacgtggaacgagatactgctgcagctcgtcaagcggtgggcggacggggtcgacgccgacgccctgtcctcgtcgtcgccatgaaagatggaagctaccgtcggcgtcaccgcaagaggagtctggatttgggagtttggttcaaattagtactatagacttgttcgaactagaatgtttagaccttaattatttagagagattccaagtcgaaacggcatcgctacgagggtttgaccaggaagtgttacgatgttctaacaagttgttcttggacggtttttgttgttctcatgcgcttgtagtatt

SEQ ID NO: 104265 - DNA, 1712 bp, Zea Mays
ggggacaaaaaatagaataaaaattgttcgcgtcttcctcgcgttcgcgccggaggggcgccgtcgccttgtcccattgcttcgccaccgcagctgccgttcgtcgtcgccatcaccctgccggtagtcgtcgttgccgtcccctcctctcgcccgctcatcgacgacttcttccccttcctctcctcgccgtcatcctcgcccgcgccagtgggagctatcgccggaggtggtgcttgtgggcgtcgacgcccaaccagcagggcacccgaggagaagcgcaagacgaccgcgccgtcagcgctgaacgaggctaagcggtagtgccatgaggtgtgctcgtcgtggaggtcatcgccgctcgcggagcacggccacccggtgaagaagaagcacaggtgagaagagatgatggttgttgtagaccatacgcctctacgagatcgccgcacgcgacccattcctttcctctggagcaaatacgtccacatcgtcgttccccatctggatgctgctggcttctccctcgtccgtcgattggaaggaaggtaagactacaacagaagaacttgaagagcattcactgatctcttatttgaagaccagaatgcaaggtaccaaaagaaagaaaaaattgaattgccttcactaggctcctcttgagaagatacaaggtaaaagtatttttctaccttgctttgcacaagcgtattgcgtatatatagtaatataaagccctccctcctaaaaacttcagaatcttaacatgttacagttagttctcagaagatttcatgtgcattgtaattctaaaactttagccagtttacacctgttatttagtctactccttgaaaaaagtttttccctttgatctaaacatgaatgcttccttttactccaacatcacagcaaaaaatcaaaagcattgcacttcttaccactgatacccctatgtcactactaccatacaggttagtgcacgatccttacctttatgttctacatgtctttgggtttctcttttttttcaagtgcgttctattattgtttatatgtccaccttcacactgattagctgttcatgcatagttattatctgttatgtacatttttatacctttccaaattagcttattatcttttaaaaattgtattttcttggctactttacattggaatgaccgatggcaacatcttcaaacaaacatagctaacttagaggaaagaaaacataatctttaaactgctcataagagagaatgtcaattttcagaaaaaaaaagaaaaaacaatattgatgctttagaaaatcttaaactgatgcacgttaatattatcatatcaatgccaacaacatatgtttaagctggtttcatccttcctagcaactctactagcttcctctcgctcttcactgctatttttttaaatttcactgctattttttaaattggaaggaaaataagagtacaacagaagaacttgaagcgcattcactggtctcttatttaaagaccataaaacaaagttccaaaaaacaaaaagaaacattgagttgccttcaccaggctcctcttgagaaaatacaaggtaaacatatttggcaattgtaatatatgttgttattttgctctttagttgcttcaaattgtttatgggtaccaccaggcaactcagaagaggcaacattctttagaaaggcatattat

SEQ ID NO: 104266 - DNA, 1258 bp, Zea Mays
ctcgacgcattcgccagcgccaccttcaaccagatcgactccgcctaccgcgaggtcggaggggacccttttgtggccaccagtatcctgtcttccacgcaggacatgcacctgccgcagccccccgccgccactggatctcttgccgcacagtggatctggtggaagaaaggctggtcggaggcccaagcgggttgcggtggccgctacgggcatggtcgcggacgtgattggcaaggagtacacatgatccgcggctaattctatagtaagcatgccaaatgcttggaagggtcgggacggggagagcgatggcgacgggtctggtggccgcaaggacagtgttgaagaggcagagcagttcctgtgctccatgctcggggataattccgagcttggcatgggtgttgtcagagacgtgccagtgggtacgggttacccgacgggtaaaaatacccgcgcgggtacgggtatgggtaagattttatacccgcgagtatatatgggtaacccgacgggtagaattttttttgatgggtacgggtatggaatgaccgcccccgcccccaaaaagcacacgcccgctcggaaaccccgcaaaccgcccgccaaccccggcaacccgacctccgtattcatcgctgccgcaaaccgcccccaaccccgcccgccagacctccgtattcatcgctgtcgcgccgcaaaccgcccaccagacctccggaatcgtatccacggcgcaaacacgccatggttttggatgggggcgactcaatccgttcgccgcggctaccaacaatcctcgcagcccgacctggaggaggcccttgaagcctcgcgctacgcgtctcacccctactcctcgcaccccaaggaagtttacaacagttatccagggagattcgtgtcattgtttcccccagtggaatggggtggtgaagaatcgatgaatgaaggtggaggaaaatatgtcgtagccacacatgctgtcaacttggcaaggctcctacggttctttctagaaaatctgacgcctgagctgataaagaagggagcacaaccgcctcactgggtaacacacatgggcctgccctactctttgcagcaaggagacggagacctgcgtccggctctggcataactgcaagcttacctatcaagaacatgggtgtcgctgatccctgaactgtgcgcctgattgttcaggctgccaacaatggtaacaacttttgactagcaagtctttaattagccggag

SEQ ID NO: 104267 - DNA, 1688 bp, Zea Mays
gcaattcactagtaccatttcaaccaccgtcaaccagcaggcgctccactccttgtcctcccattggcgcctcgtagactgctgctctggtaattggatcttggatccatctccatgggtgcctccagtacttgcccttgccaccacttcagctcgtcttccatcctcaccaagcgggccatcgccttcgtgctctacgccctcgtccccctcgccctcatccactacctcctatctcttcctccccgtctcccctctcctcccaccaccggcgccgccacctccccgtcacggccgcagcaggcggaggaggctccggcagcgcggtgcgattactcggacggggagtgggtgcgggccgcggcaggtcctcggtacaacgggtcgagctgcggcgagacgatcaaggccggccagaactgcgaggcgcacgggcggccggacacggggtacatctactggcggtggcgcccgcgcgggtgcgcgctgccgccgttcgacccggaggagttcctgagcgcggtgcgcggtcgccacgtggccttcgttggcgactcgctcgcgcggaaccagtgcgagtccctggtgtgcctgctcgcctccgcgttcccggcccagctggtgcgcggcgctggcggcggcgacggggacggggacggcgacgagctccgcaagttccggcgctgggcgttcccgtcgcacaacgcgacggtgtcggtgttctggtcaccgttcctagtgaacggcacggagaggcccaagtcgccggcggcggcgggagggctggaccacaaccggatctacttcgaccagcccgacgagcggtgggcggcggcggtcccgggtttcgacgtggtggtgctgtcggcggggcagtggtacctgaactcggccatgttctacgaccgtggcgccgtcatcggctgccatcgatgcccggagcccaaccgcacggagacgggcttcttcggcgtgttccgcctcgccgtccgcaacgcgctccgcgaggtcatatcccgcgtcgccgccacgtcctcgcccgcgcgcccccggctggctgtggtgacgacgttctcgcccgcgcacttccagggggattgggacagcccgaccgcgtgcgtgcgcactcagccgtacgcgcgcggggagcgggagatggagtacatggatctggagatgctgcgcgccggggtcgaggaggtcgccgcggccggcgcggacgcgagtgagcgcggggcgggcctggcggtggaggcgctgcaggtgacgcggctggcggcgatgcgcccggacgggcacccgggcctgtacacccgggcgttcccgttcgccgagggtgcgaaggatcggatgcccaacgactgtgtgcactggtgcctgcccgggcccatcgacacgtggaacgagatcctgctgcagctcgtcaagggatgggccgtcggcgtcggcgccatcgccgacacctcgtcgccatcgccatgaactgggccgttcgaagctaccgagtggccgtttggatgggcgattttggtccaaatccttgcgatggatttcgaattatttactcactcaagcgctttagattttgtagagttggccttttgttcaagcgctcagtcaggtatctttcgcttgtattttaatgataccagaactggaatcaacttaattagtcagcttagtcagac

SEQ ID NO: 104268 - DNA, 1755 bp, Zea Mays
agttaccatccattggtgtggacgtgtggtggactggtggttgcgttgcgttgcgttgcttcgagttggaggttggagttggagtgggccgcgtgcgagaggatctgagcggataggccatggagtggagtgattagcggttgctgggtcaggagaaggcggcgtgtgttttgatcctactcgcgtttgaggggccccgatttcgagcgggtgttcagttttggtgccggatttcgagcgggtgtttagttttggttttggggacaatggttttggactgcctgatattcgattcataggttggtcaaacgctttggagtagagatttttttcccggaaaacaagagccatttttctagttgtgctactcgtcaatcaatccatggaagctgaactctggaagaagaaactttcctaattagacccggtatttcgtggttggccgttggcgtctaaagcgcgttttagtttaaatatatgaacacattttcctgtttactccgcccaaaatctttccgctggatctacttgtgaatcgggtttgtttgttttttacctgagctattcttgttgatttaggatttcgagtcggcagatccaagggaacgccgaattttgcctgatttcttcgcaatttttggtccgatcaagaggctcctagccttttttttttcctcgcgagaagcaagggggtctcccttttcttctttcgctatgtccatggctttgagccgcttcacgcaatggctgtggccggggggcgccgcggcgcgggtggacacccacgagcaccccagtggggggctaacgagctcctccttccctgacttcccctccgggttccgggagcccgacaccgtcacgttctacaccggccgccagcgcgcgcgcccgaggagggtcaggaatcgccgccgcagccgcggggaggcccgtgtcgaccgggagtacgacatggtcatcgtcccgtccgacggcggtggctgcctgtctggctccgactccgacgactccgactggtccatcggctggctcgagccacaggcgccggagcttcagacggacggcgaccccgagaactgcttcgccgtcctcgttccgtgttaccgccacggccgccaggagcagcagccacggaggcaggagggcaggtttcttggcgccggcgccctcaccgatggtggtccctctgatggaaagaattttgtagagcagtggctttcttctttccagaactaatatcgtcagacctctcctaagctaccctgtaaatagtatcactctgttttagttctactacgtttgtcctagtcgcacaacgtatcgatgaaggaagacatgaaaaagaaatctaaaaagaaaaagaaaaaaaagaggagcagtagaattttgatttctgaagcagcaccaattggatatgtccttcctgagggtcccaggttattctactcttgccaagcaaggcgaaagctgagctgcacaaactgcgcgccgtcgagaatgattttgccgtcctgatatgtgctgagtgctaacacgtagagatgaactgctattccattgttaatttgtcccatttgcttggcgacctcggattctactgcctgtacagtgttcttgcagtgtatatagtcttgcgcaggactactgcagttgcgcgatttttcagtgtgtgttggtacgtgtgtcgtattcttgtacatggaactgaatttctgatgaatgaatctatctggtgtatataatttttgtgac

SEQ ID NO: 104269 - DNA, 1991 bp, Zea Mays
atggcgagtggcgtcagtgagcccgaaaccaaccggcaaccgtcatgcacctggcatggcatggcgtcgttgtcgcggccattcatggttgtggtaggtatcgtcgatcagagcatggcagtggcaggcgccagcccatcacccgtccatgacccagcatcggcccaaccacctccaacgctgacgtgctgttccgtctttaattcccccccgcgctttccgtgcgaggagcccaacaacctgccgagtgccagagacgtgacctgcctgcgacgagcgagttggtactttggtagcatagcaccgaatccatccaaagcttcgttagattgctcacggtcccaggttgacttgttcggttcggtgcctccttccgttccgctggccatggcttccttgtcccggtttaatttggcgtctgattgctcgacctcacctgatccatcgccccatcgtctacacagttgctgctgccgcccaggccgccggacagcggatgactgctgcggcagcactggtgccggtccagggagcgagagcgagagggacagcaccaggaagaccaagatgccggcggcgggactgaggagggccggcggccggtttcctcttgcgcgggacgtcgggagcagcggcgccaatgagcgctcctcctcggtccgccgcggcttcggcggcggcgttgcaatgccgcgcgcgttgctggaggactcggcgccggcggtggacgcccccgcgacgaccggcagggagccgccgcccccggcctcatccgcggcgtctagggtcacgccggcggtgctgttcgtcacggtggtcctggccgtggtgctgctcgtctccggcctgctccacgtcctgcgccgcctcttcctcaagagccgccacgccagcgcaggcgccggggagcgccagctgctgcagcacgaggacgccggcggcggcctcggccaggccgccatcgacgcgctccctgagttcgcgtacggcgagctgtccggcggaggcgccgccgcaagcagcaagggcaagggcaagggcaaggagaaggcggcccggccgttcgactgcgccgtctgcctctgcgagttcgacgaccgcgaccgcctccgcctgctcccgccgtgcggccacgccttccacgtcgcctgcatcgacgtctggctccgctccagcgccacctgcccgctctgccgcaccaggctctctgcgccatcatccgtcggaccggacgtcgaggagcagaaactgcagcaggaccatcagccaccagacgacgagagcggcgtcgtgctcccgctcccggttaggctcggccggttcaagaacgccgacgccgagtccagcacaggcgccaccagccgcatcgacgggcggaggaggtgctactcgatgggctcctaccagtacgtgctcgccgacggcgaccacctcctggtctccgtgcacctgcggcacggcaatgcgcgcggcgggtcgggcgcggtgtgcggccccagcgccgccgcgcccagcggcagcgacccgcgtcagggcaagaaggtgttcgcgcgcggcgacagcttctccgtgtccaagatctggcagtggcgcggcagcaagcggctgcccggcggcctctgcgccgacgacgacggcctgccgtgggcgccggcggccaaggatcggacgacaaacacgaggaggcaacatagcgacacttgacttgatcatacacagcagtagacaagacagacaaccgacacacacgcttcaccttgttgactagcggcggattggtagtagaattttgctggtgaaatcattccacgaacgaccaattattcactcatgccaaaaaagaaaaaaaaaagaagcatctttttgggtgatcttggtgtgcaacaaactgtacaatagtttgatgactaacgttaatcccagcaggttggcagtgcagagcacacacatatagatatagatattagcccataattttgtacttgcactgg

SEQ ID NO: 104270 - DNA, 115 bp, Zea Mays
gtggaggagatggttgtctagttggacactacaaccaccggaatgaaaaaaggataaaagtagctccatccatccccccgcacttaaacagcgacaccaaacttttcaaaggcgg

SEQ ID NO: 104271 - DNA, 1599 bp, Zea Mays
ctcacagcgaccagcatcgcccagagtcccatggcgtcttcagctcctgcccctgcctctacgttaccttgcagcggagcccatgacgcgcaggctgagcttccccacatcgtcatcttcccgttcatgctcaagagccacaccatcccgttgacggacctcgcccaccagctccgacgccggcagatggccaccgtgactttcctcacgaccccgggcaacgcggcgttcgtccgcgccgctctggctggtgccgacagcgtggccatcgtggagctccccttcgccgacaacctgaccaagccgggcgccccgccgcgccgggagtgcgtcgagaccctggacttgatgtcctccttgcatgccttcgtcgagtccgtctccctgctgcggccgcagttcgaggaggcgctcgccgccctgcggccccccgccagcgccgtcgtcgccgacgcgttcctgtactgggcgcacacggcggcggccgcgcgcggcgtcccgacgctgtcgttcttcggcatgaacatgttcgcacatttcacccgcgaggtgttcgtgcgcgacaacccggcctccgtgctcacccgcggcaccccggacccggacgccgtgttcaccgtgccggagttcccggacgtccggctcgccctcgccgacatcccgttccccttcaacgacccggcgacgacggggccgacccgcgagatggacgccaagatcgggcacgccatagccagcagccacggcctgatcgtgaacaccttcgacgccatggaggggcgctacatccagcactggaaccggcacatcgggccgagggcctggcccgtcggcccgctctgcctcgcgcggacggccgaggcggcgtggcatcatggcgacgtggccaagcccgcttggatgcggtggctcgacgagaaggccgctgctggccgtgccgtcctctacgtcgcgcttggcacgacgctggccgtcgagagcgctcagctgagggaggtggcggacgggctggaccgagctgggttggacttcatatgggccgtgagacccgttgacgccgacctcggagcgggcttcgaggagcgcgtccggggtaggggcgaggtggtgcgcgggtgggtggaccagcgtgccatccttgcgcacgagtgcgtcaagggattcctcagccactgcggctggaactcggtgctggagagcatcagcgccggcgtgccgttggcggtgtggccgatgggtgccgagcagccggtcaacgcgaagctggttgtcgacgagctgggagttgggatcagggtgccaccgaaaagcgacgcggtcagcgggatggcccgaagcgagcagattgccagggtgactagcgacctcatgaccggagagacgggcgccgaggccgcaaggaaaatgtctgctctggcagccaaagcgcgggaggccgtggccgaggccgggtcgtcgtggagagccgcggaggagctcatcggtgtgttgagcaaggggaacacaccccaatcgtagaatcgtcgttccgattcctttatccttttttccggcttgaatgcgtggtcggcgaactccttacgaagcatgtcagcgttt

SEQ ID NO: 104272 - DNA, 794 bp, Zea Mays
gagcggagaggcagcagttgagggttcaaggccaccgccgcggccacccatgccctcgtcgccatcgccgtccttatctgttccttgcccagatgttggttgggctgtgtcgccgtcagatcccaaaaggaaggctgggattggaggcttgaggcattgggctacacggtatcctgtccgcgacagacgagacggcagaaggcgctcgaacacaaatccacccggtcctgtttggtgtccagggattaacgatcgtaacacgcattttcttttacggtttttagggttttctatttatcgtattttagtttaaaaatgaactagcgaatgataaatatttcacattttattttaatctcactatttttttttgtcatgttttagtttaaaaatgaactaacggacgataataatattcaagaatggtgatagtattaaacttagttcaataaatgcacgtctgttacaatgtgcagcaggatacactcccaggtggtaaacaaagcaggcggcgttcattcttcacgattcaccacggaatgcttctctcactttgtttgcaactaggccataaaaacagagacattatttgccaatcaaggttaacctagtttattttattttacacggtacgagtgatcaacaaacggggctaaaaaaacacgaagagagagagtgccagttcatgctgatggatcacttcccggaataaccgtgccgccacatgactgagttttccttcattttgtgctagtcgccaacacagcaagctcgtagctgcaagctgcaggata

SEQ ID NO: 104273 - DNA, 246 bp, Zea Mays
gtagcacaaacaatctagatttcagacatcactacatcggcaagcactcatccatgaaccatgatccattcatccatccatcagaaaaaataagtacttcaggaccgatagaagaaatggagaaatggagtttgctcaccttcattggtcaccatctgagttcgttggcgcctgagaatccatggtcgtcaccgtcgtctgggcagggcatagcatatggctggttattttagggttttgtttttt

SEQ ID NO: 104274 - DNA, 1233 bp, Zea Mays
gcatctgccaccgttccttccaaaaaccatggacgtttttttcatcagctcctcacacacggacacggcacaaatgtctaacacctaaaccaagcaatttacatagtacaaaacattcatcacaatggacgtggatcggtcgccggagaagggctcagaactcggcggtgttgccgagctcgcgctgccggcgcctgaacgacatgagcccgtccgacacgatgctcccgccgcagtcctcgcactcggcgctgctgccggtcaggtcgttgttatactcggtgccgccgtcgtcgttgtcgaggtcgccccgcatggcgcggagggtcttccgagccatctcgcgccggacgccgccgccctcgtcggccaccacgcgccggagcgcccggtccgcgccggccgcgcgcgccaggccgcggaaccggaggctgccacggctcatcgcgtacatcgccgacacgcaccactcctccaggcccgccgccgccgccgctgcgccgccgtcggagaggaggatggcggagacggacgccacggctcccgcgtccatgagcgcgttgcggccctcggcgcaggctgccacgttgcaggccaccatgagcgcaagcctccggacggggcccgggtcggcggcgcccgaggccacggcgagcagcgccttgggcgcgccggggaagcgcgcgaccttggactggttgacggcggcgagggtgaggtggtagagcgccatcccggcgtcgcggcgcgcgcggggcgggtgggcgcgggacgccagcaggtccaggagcggcggcaccgcgcccagcacgccaatggcggcgcggttgtcctcgtggatggcaagcccgaagagcgcccccgccgcgtgctcccgcgcctcgggcgccgacgcggccgaccgcagcacctcgacgagcgccggcaccgcccccgcgcgcacgatgcgcaccttgttgccgggctccagggacaggttgaccagggcgggggcgagcacggcgcgctggtggtgcggtggaacgggagcttccagcgccgcggacgcgccgcacccatggagcggcgaactgccgcgaggggggggtggggggtatacgctggtagtctctggtagattagctagcttggggaaggcggtggagggacgatgtgtgcttttgctacagcctcgggcatgtttttctggttgtgtgtccgctgcttttggggcttgggggtgctacttcgttc

SEQ ID NO: 104275 - DNA, 156 bp, Zea Mays
gtggtagaagttggcagacgtcatattaacaaggccatcagcaagcgaacaagcaaattggctgtgtcactgaaaatactgcagtcgaacaaacagtatgaaagctgcattgaatcatcggaaatcccgtgcgaaataaaaggattttttccaaag

SEQ ID NO: 104276 - DNA, 612 bp, Zea Mays
atggcgcgccgcacgcagagatgtgcccacgtcctcaatctgcctccacgacggcgcgccgcaccacgacttcaatctcctcccccacgacctcaaccgctctgccagactcaacaccgtccagctccggtcaccggttcatggcggcggtggcggtactccttcggtaggcaaaggagcaaagttggaggcgacgagggtccagatccggccgccggtggcctccatctggggtttggaagcgccgccggtccagatggcgcagctgatggcctcgaccctggcggagaaggggaggccggccctggccccggcccctgtcctgaccttggcggtggagcagttgctgcacctgagagaatcctgcacctgatgaatgtaaagggtttgactgtgaagcatatagccatccatctccagtatgccgaacagaaaccagtgatgttcatgaggcaacccagcatcgtgctcaaggacgggatgacgcgagccccggccgtccggttcccatctgcacgccacgccgccgagctcaaggccttcttggaggacccagcgaactttgacaccctggttatggtgtttaacagtgcggcatttagttgcatgtga

SEQ ID NO: 104277 - DNA, 258 bp, Zea Mays
atggctgcagaaatggtgaaggcggcgatgagtggtaagctcaaggagatggattgggaaaagaagatcaaaatctgcgagcttgtggagcaagatcctgggcctgtagctcaggttggaagggatccaagatttgagcctgtatatggatctgttgacaaagaagggttcaggaaaagatacaatttcttatttgatcaagactttccttctgaaaaagaagtgtgttcagtgttcatattcaattgcattgattag

SEQ ID NO: 104278 - DNA, 463 bp, Zea Mays
atttgaattttgttttatcatgacgatgtttggagctttccgtcattgctattttatattactgtgaacatgccatggttgtgtacaaatattgtaatcatgttgtcgttatctatgcttgatatatttttttattaaatagtagtacaatggtatataaatttatttatcgatcatgtctacttgagaggatgctctcagaactttcttattgagaaggctcgataacctcaccaaagaggacaagatgcagataacgatgatatcaacttgggctattgagttgtacttagacaagattaatcacctaatggaggataccactatcaccatcataaattgagtagcagagcctaatagctcggaatattgttaggtagtaagtgaattctgtgcttttcttagtgacaacaaagatgtattagatgaagcaacaacaatgaaactactggaaagatatggt

SEQ ID NO: 104279 - DNA, 321 bp, Zea Mays
atgcggcatatagacggcacagcagatggatctctggcaccagctcttgcagtcaacaaagctgcatgtttctcagcagctgcaagtgcttctgatcctgtcacgccgttagaacccacagcctccaaaagggcctacatggcagcaaaggctccgcgcggtgtccatggcaatgcccggcaccgaggcaggggctacagccgtgcattctcgagggatggccttgcctcgagaaggccaaagagagaggagtcatcggagcgtcagcaccagccagagataccacatggaacgagaaaggtgtcacagtctcacagatga

SEQ ID NO: 104280 - DNA, 1039 bp, Zea Mays
agcgaaaacatttgagttactattaattatgtcgacatggatttataaagcgtaagttaactactataaattagtttaatttcaaagcctaattaattaatgctagttaaaccaaaatataatataattagttatttaaaacgcgcgacatcgtggaacaaggttaccaacgcgtagacgatgctcacctcgcaacgacggtagacagccagatgagctagtggcgagccacgatgacgtgctgcgcgcacgacgcgaagcgacggcaaggctgccgctacgccgcgcagactgtgacggggcacgaaatggtgagcacatagcaaggaatagcaaggacaaggcgtgggataacaaggtgcgcgatttgcagggggcatgacgagggaccctggttgtggaggatgggtcacttggatgaaacgttggttgtatgcaacgcaacgctcgtcctaggcattatgtcgagcatcaacagggcgagcaggagccgtgcgttgcaggggttggctgggaaggggcgccctactggagagcttcctgtgtcggctgttggtgtcccaagccagcgtccctgctgctggtcagccgcggatacaacagttgtcggaggtggggaaatggcatgggggcgccatggatgaggaaaggaacgacacatccatggaatgggtgcacaggtgcagaggagcagggtctcgcaaatggagaagaagatgggcgccatggaccagagctcagtagacgccgaggtcgataaagactaggggaaaccgacgaaattggtgaaggtgcaggggagccgagctctagggagatgagttcccatggcggtggctggctgcctaggggaagacgccagggaaggggagggtgtcgagcggaggggatggaggagggcttgggcgctgagagggtgcagggagggggaagtcgtgtagggcgccggccaccaggaacaagggagttgctggaggttgaagatagaagggcgtgcgtgaggaagaggcttacggctgggaaatgagaaggtgaggtg

SEQ ID NO: 104281 - DNA, 390 bp, Zea Mays
atgacgtgttgcgcgcacgacgcgaagcgacggcaaggctgccgctacgccgcgcagactgtgacggggcacgaaatggcattatgtcgagcatcaacagggcgagcaggagccgtgcgttgcaggggttggctgggaaggggcgccctactggagagcttcctgtgtcagctgttggtgtcccaagccagcgtccctgctgctggtcagccgcggatacaacagttgtcggaggtggggaaatggcatgggggcgccatggatgaggaaaggaacgacacatccatggaatgggtgcacaggtgcagaggagcagggtctcgcaaatggagaagaagatggggcgccatggaccagagctcagtagacgccgaggtcgataaagactag

SEQ ID NO: 104282 - DNA, 443 bp, Zea Mays
aataagctggatatagtctcacgttcgtgacatacacatatgacatatgtttaaatatgggtataagtatggataagctagatatagtctcacgcgcatgacatacgcatatgacatatctgcagtatcttttttctgcaacatgttccaaaagaaaaggaaatcataaagaccgagttacagcagtcaatttgtcacccttttacaaactagttaagtatacacgaggaccaactcagaaacatatgccagaagcttttaagacctacattgtgcagtacagtattattttatgaacactcgtgttcacaatgaacaggggaagagctgcagtatcctatcaatgtaaatcatcttggtccaaagtatccaatgactgaaaaaaatacctcaggaagcaaaagtccgttccagaaatattttgtctcataaatccttcggct

SEQ ID NO: 104283 - DNA, 132 bp, Zea Mays
gcattttgtacttcattgtgtttgctcaatgcatttttttattctatgtgctacctatgtgggcatgtctggggaaagcgaaaattgtaggtgatggaggagatgtctatgtcagagtatggaactgtactg

SEQ ID NO: 104284 - DNA, 103 bp, Zea Mays
gctgttttaagggagggtggagcaggtttttttagatcccacctttcttcacaaaaacgactcccgatctttcggctccacacgagaatcagtttaaaaaata

SEQ ID NO: 104285 - DNA, 1864 bp, Zea Mays
aaaatagtccaattagttgatactttatcaaataaccccctaaatggcattttatctgtaatccagtgtttgaaaatggcgtaataacgaagcgtgttctcataatggcattcgagcgaatccgtagtttgataatggcataaatccaattttctcctccaccgagccggccgaatcaaatcgaaccgcgggcagcgcgcacgcgcagcgactgccggcgatggcgagcctcaccctgccgccggcgccccccaacccacgccaggacgccatcgacctccacaaggccttcaaagggtttggatgtgacagtacaacagtgataaacatacttactcatcgcgattcggtgcagcgtggactcattcaacaggaatacagggctatgtatcatgaggaactctcccaccgtatttcatctgaactcagtggaaaccacaagaaagctatgtcgctgtggattcttgatcctgctggacgtgatgcaactgttttgagagaagctctaaatggtgacactatggatctgagagcagccactgagattatatgttccaggacaccatcacagttgcaaataatgaaacagacttattatgctagattcggtacttatcttgagcatgacattgctcaccacacatccggtgatcaccagaagcttttacttgcatatatggggattccacgctatgaaggtcccgaggttgatcctacaattgtgacacatgatgcaaaggatttgtacaaagctggtgagaaaaggctgggtacggacgagaagatttttatccgtgttttcactgaacgcagttgggcacacttggcatctgtttcttctgcttaccatcatatgtatgaccggaaattagagaaggttatcaagagcgaaacttctggaaactttgaatttgcacttttgactatcctcagatgcgcggaaaacccagcaaagtattttgctaagctcttacgaaaggccatgaaaggtttaggcactgatgacatgacacttataagggtggtggtgacgaggaccgagattgacatgcaatatatcaaggcagagtacttgaagaagtacaagaagccattagctgaggctatcaactccgagacatcaggaaactatcggacgttccttctttcacttgttggtcatggccattaggctatgtttcgaccatgggacatgatatttctatcgatccaccctaaatgcagcgacctacctggaaaacttatgatgttgccatttatctgtcgtgactcctggatctaactgccacatatcacatatgcggttcctagtatgcttgtttaaagtattcgtgtatatatttccatccgggtttcttgttggaagattctggatgggataccagatcagctgttgctggtcacagtgggcttgactggtgtctctatgacgccaatattattatgtcatgttcttgtggtatttccttcatttgttattctgtttttcgctgcttatcccatatccctgttttctccgtccttcacggagaccaacgtcttaggacataacccagagatataggggtacgtttcttggagtataaaagataggttttgtatcttattgtaagatatgactcatacgagggttgtatatatgaagctgtttgttggacttaaaagaaccgtgttaaagatatgtcattgttagaacaactactccctccgtttctttttatttgttgctggatagtgtaattttacactatacaccgacaaataaaaagaaacagagggagtacaagagcttcctaaaaagttgttccccaaaacatcatattaggggctgctgaaaaacaaactcctctaaaaaaaatctaaa

SEQ ID NO: 104286 - DNA, 225 bp, Zea Mays
atggcgccccatggaattgtgagatcgggagcgcgtggatgggaccagcagcggcaacagccagcaggttcctacatgatcatcgcgcaggcggtagccgccgcgcgctcggctagtgacgcctgcgctggatccacccgctcggaaggccaccgtcgcgcgttcagccagcgccgctcatgctggatccacccgcacgcaaccgctgccgcgctgaaaccctaa

SEQ ID NO: 104287 - DNA, 570 bp, Zea Mays
gtctccttcgcgaacccgccgtcgcccactgcctcctctccttctacctcgcgcacccgccgccgcttgctgtctcctctctcgcgcgcaccggtgttcccatcgccgtctccttatctccctcgtgcagccgctgttgtctcctctccacccttgtacccgccgccgcctcctcttcagatttcctcttcttcaccctcgctgcctcctcttcaccctcgctacggcctcctcaaatcgttgagacaactagtacagttgagacaactggtgcgaggtcggacggcggggaccatgcgaacaagctcgttgctgccttctcggctcgtgcaccctcatctcaagaagtgaatcgcctcaggtgatacacaagggattttcatcaacaagtggtcgccagaagaactgaaacatcaagatggcgtttgcttttaggtcatgccattcaggagatgatgttttattattatgcactgagactatgtttgacattggtcgtgtacactgagactgttttattatgatgcactgagactatgtttgtgtacactgagactatgttttattatg

SEQ ID NO: 104288 - DNA, 662 bp, Zea Mays
gtctccttcgcgaacccgccgtcgcccactgcctcctctccttctacctcgcgcacccgccgccgcttgctgtctcctctctcgcgcgcaccggtgttcccatcgccgtctccttatctccctcgtgcagccgctgttgtctcctctccacccttgtacccgccgccgcctcctcttcagatttcctcttcttcaccctcgctgcctcctcttcaccctcgctacggcctcctcaaatcgttgagacaactagtacagttgagacaactggtgcgaggtcggacggcggggaccatgcgaacaagctcgttgctgccttctcggctcgtgcaccctcatctcaagaagtgaatcgcctcaggtgatacacaagggattttcatcaacaagtggtcgccagaagaactgaaacatcaagatggcgtttgcttttaggtcatgccattcaggagatgatgttttattattatgcactgagactatgtttgacattggtcgtgtacactgagactgttttattatgatgcactgagactatgtttgtgtacactgagactatgttttattatgatgcactgagactgttttattaagcagtgtgaagttcacagctgctgttctcattttaatgcaattgtgttcaatgagcagtgttgaatgac

SEQ ID NO: 104289 - DNA, 303 bp, Zea Mays
tattacagatgtgctgatccaattcagttttcagagtgatacacaagggattttcatcaacaagtggtcgccagaagaactgaaacatcaagatggcgtttgcttttaggtcatgccattcaggagatgatgttttattattatgcactgagactatgtttgacattggtcgtgtacactgagactgttttattatgatgcactgagactatgtttgtgtacactgagactatgttttattatgatgcactgagactgttttattaagcagtgtgaagttcacagctgctgttctcattttaa

SEQ ID NO: 104290 - DNA, 375 bp, Zea Mays
cagcagcagcagcaggatcatagcacaaacacgaaggttaatcaagcgagcgcttagctaataagcgcgcggtcttctttttcctcgagagtgagtgagagtattgaggcgcgagaagagatggctctgaacggcggcaagacgttcgtgcatgacgaggagaagcagcggctgctcctggaggagcacaccgagaagcacttcaccgcaggcgaggtggtccgtgacatcatcatcggcgtctccgacggcctcaccgtacccttcgcgctcgccgccggcctgtccggcgccaacgcctcctccgcgctcgtgctcaccgcggggctcgccgaggtcgccgccggcgccatctccatggggctcggagggtaa

SEQ ID NO: 104291 - DNA, 1088 bp, Zea Mays
gttttatctctataagttgtagctgcatctgtcccaacagttgcctttaatccgaagcgaatagcttcagatttaggaacatgtatttgtgtgtgagagagatgaattcagaataaaaaaattgttgaaacccctagtttgcaatgcaaatagctctttattatttatttgtttgtgtttccgacaagttgtggagtaaacaggccggaacgcatgcattggagcccgtactattctgagcccagctaccacgcactcactaaaactaaccttttttcagctgctgtgtgtgcgtgtcaggtatctggcggcgaagagcgaggctgatcactacaacagggagctgcagcgcgagcaggacgagatcgacaccgtccccgacgtcgaggccgccgagatcgccgacatcctgtcggagtacgggctggggccgcaggagtacggccccgtggtgacctccctccgcaacaaccccaaggcgtggctggagttcatgatgaagttcgagctggggctggagaagcccgagccccggcgcgcgctggtgagcgccgccaccatcgcgctgtcctacgtcgcgggcgggctggtgccgctgctcccctacatgttcgtgccggaggccgggcgcgccatggccgtgtccgtcgccgtcacgctcgcggcgctgctcttcttcggcttcgtcaagggccgcttcacgggcgaccgcccatttttcagcgccgtccagaccaccgtcgtcggcgcgctcgcctccgccgccgcctacgccatggccagggccgtgcagtccatatgacgatgatgattaatgaggcagctcgtggtgaaaagtccgctcgccggccggtcgccggaggtcgtatcattcatcaccggccggccggccggctaggatggcgaagaaaaataagggcagctactacgcatacgtggtagccaaactgtactgtacaacgtgtagtgtgcttgtactatcacagtactagtactagtgtgtactttgtttgatggctgcctgcgtgtcgcacatgtcgtgtttggatgatttaggtgaagccaaactgtggcccgctgggcttttc

SEQ ID NO: 104292 - DNA, 594 bp, Zea Mays
atgccgctgcgctcgaaccactcctcccagttcctcccgtcggccttccggtactcgacgtggcccagcgtacgtacccggatccacgcaggcgacggtgacggccacgccgtccgggttggacctcggggtgtagaaggaggtgatgccgcagaccttgcagaaggtgtgcctggccgtgtgcgtgccgaaggtgtaggtggtgacggactcgtcggcgccggcctgcagcctgaacttggcggcggggacgacgaagtgcgtgttcccgcgcatggagcagtcggagcagttgcagacccacgcgacgatgctcgcgggggcctcgacgcgccagcgcacgcgacggcagtggcacccgcccgtgtgcaccaccaccacgtcgtgggagccggcggagctggtcatcttgtgaattgtgattgcgaggtgtgtgtgcggcggatcagagggtttctgccgtcagctgtacctgtacgtcttgaggaagttgggcgatgtacccggtccgggtgggctctggtttcaacgcaccgcgagaaaattcggcgcagctttgtggaggagagacgctcggaagaagctcacttgtga

SEQ ID NO: 104293 - DNA, 498 bp, Zea Mays
gagaaaccgcaccgaatatatgtacctcaggatgaggcatttgaggagctgaagcaaggcgccttctcatcacggaggctgcgagcagtacttcacacgcttatcccatcgatgattgcaaccatgtcagctgagacccacggcttccaaggcttccaccatgttgataatctatacaaggaaggcctcaggctgaagttgggtctccaggagcacctgttccagaaaataccccttgttcagaagattcaggaatcaagtgaggggatgcttcgctatgatacacctagaatgttttccaaggacaagtttgcatggctccatgacgatgagtttgctcgatagactgtggtaggaataaacccagttagcatcaccaggctcacggttttcccaccagtaagcaagatggatcctgcaatctatggctcgccagaatcatcaatcacagaagcgcacatcactggacagctcaatggactcacagtacaacatgta

SEQ ID NO: 104294 - DNA, 529 bp, Zea Mays
ctcgcctccaaggctccaacgcatcaatcaacagagcgagcgcgctgtggcatggagcacaaggatgggggcacggcttctgctggtggtctgcccgccggaagcagcttgtgctcgggctcgccgttgctggacgcgccgatcctccgccgcctctacgccgggcaaatccttgccagatggggcgcgaggtgcgtccggaccatgcatcagctcctctgctctgctgtctgctcccgccctatctagtttttcactattccgtagcgagcgcttctgttacattacagcgctttagttttgggcgtctgtcccgactcccgaaccacacaaaatttgatggatgctgttcttctttttggttccacttttttccatgcattcggtgattgaataattgaattggtagcgggggtaccatgtttcagaaaccagttttgcggtaggaaaaacacacacacacaagaacaggtttctaaatgctggcccggcccgggaccgggatcccacagcggccaccgacaaaaaa

SEQ ID NO: 104295 - DNA, 1743 bp, Zea Mays
tttttctttgttttcttctcatttgacactatataaatgatccgaaaaaattgtatttattaatttttaaagcaataaattcgaaatatcaataataattacattgattgttttgttgctgtgtaattgttgtcggtaacgcgccacatagtataatatcgttgccaaaataagttttcaaatggacaagcttgcaccgtaagccagtactcttcttcgagaagccatagccttgcttcccttgcacgacaagcgcacgtcttctatccgaagcgtacttcctctataaataccaaaaatggaagaggaagaagaagagttgcagttggcgaggcacatggtcaataggaggcgacgtgcacgcaatgagcgtcgtcatggtggttcgattccagggcgtgttaggattcatcatgatcacatgagcggcgatgcaagaatccgagcggactactttggagccaacccggtgtacacggatgctcaatttcgtaggaggttccgcatgcgtcgccatgtctttgagcgccttgttgatgttgtgcaacaagtggatccttattttattcagcgtccaaattgtgcgggtgagattggtctttctgctctacagaaagttgttgctgctgttcgaatccttgcttacggtattccagctgatgccgttgacgaatacgtacgtattggggaatctactgctcatgaggcattgaaacacttttgcacggtcgtccaaaccgtgtttgctccatattatctccgtgcaccaaatgcagaagatatcgcacgccttctccaagttggcgagtcacgtgggtttcctggtatgcttggtagtgttgattgcatgcattgggagtggcgtaactgcccaagttcatggaaggggatgtttacagggcgtggtaaacatcctaccatgatcttggaagctgttgcgtcgtatgacctgtggatatggcatgcatattttggtctgtcaggtagttgcaacgacataaatgttcttcacagttcaaaccttttcgaaaggcatctaagcggtgacacacctcctgtttcattcactgtgaatggtcacacgtacaatatgggatattacctagcagacgggatttaccctgactggcccgcatttgtgaagacaatccgtaacccctacgacgttagaacccaacactttgcaacaattcaagagtctgctcgaaaagatatagaacgagctttcggtgtactccagaagagatggggtgtggtccgtggacctgcatacggttggagtccagaacacattggggacatcatgaaaacatgcataatattgcacaacatgatagtagaagacgaaggtccattgtctttgaacacaacctttgaaaacatcggagtgctggcagacacaactcaaggttcaatggaagagcgcaacgacttcgtcaatcaaaggtacaaccaactgaaagactgcaacaaatatactcagcttcaggtagatctgatacaccatcactgggcgcgacatggatccggagttgcataggacgcaatgaaacaagttctgtcatggctgttcttatctactgtcgaactgtctttgtttactttacattgttctactgtctgtgttagtgtcatgtctgttctacttcatgtgtcaagtgtgtgtactgtgtgtcttagtgtccaagtgtcgtagtgtctcatgctgctgtttgaattcaataagaaggagtactactgtca

SEQ ID NO: 104296 - DNA, 1530 bp, Zea Mays
atggatcctcttcgtccctggctccccgcggcgacagcctccagctctccaccagcgccgctccgcgtgagcgtccacgctccaatcgaccaatcccatctgttcgcggccgcccacgcttccgccgccagcgccttgatgaaggacaagatgaaggatttcgtgaagaagatcacctcctccgggtccgggaccccctcctccttcaagggaacctcccacgtccttggctccggcccctccccctcctcctcctcctcccaccccgcttcccgtccttcaaaccctagcgcaaaccccaggcccgcccctatgcggccctccccacctcccccgcccacttcaaccaccgatttcgcccccctcacgcccctcgtctcctcctcctcctgccgtccagatgcgaacggcaccgcggccgccgccgtcgcttgccccagctgcggagacgcgttcccgtccgaggtcgccgtctccgagcacctcgacggctgcctcgcgtcggcagggggcgcccgcgcgtgtgcctccgcgtacctcgccgccgacccgcccccgcccgcggcctccgtggaggtggtcaaacgcctgctgggcaacctgctgcgggagcccgagaacgacaagttcaggcgggtgaggctgagcaacccgcggatcaaagaggcggtggcggacagggaaggcgggatggagctcttggaggccgtcgggttcagggtcagagatgagggcggagaacccttcgccgtgatgaacgaagtgcccagggacgcgaggctcaatgggatcaggagggccgtcctcctgctcgagggggcacacccctctgcgcctccagtgaaggcagaggttgaggccaaggagagctgcagtaatgtggctgatctgcaggacggtgctaagaatattgatcggcaggttcgggtatttttctctgttcctgagagttctgtggcacaaaatgatgtaccagattctttttacaatcttactggtaatgagatacggaatgaagcaaagatgaggagggaaaggttagaacaatcacgattgttgataccaaagtcttacaaggagaagcaggcattggctgctcgacagaagtataaacaagctgtcattcgagtcgagtttccagatagaatgattcttcagggcgtattcctaccaggcgaggccactggttcgctgtatgagttcgtcacatctgctctgaagcagccaggcttggagttcgaacttatctctcccgccattcctaagccgcgtgtggtgcctcattttccaaacccgggagagcgggcacgcaccttgcaagaggaggagctggtcccttccgcgctcctcaagttcattcccagggagactgattccgtggtcttcaccggtttgcttgatgagcttctgaaggccagtgagccgcttcctgctgcatcacaatgaagtgtgtgtgtatgtgtgtgtatagcagttcgttctgttgctgtttctgcttgctgcatcacaggattacttggataataacgg

SEQ ID NO: 104297 - DNA, 532 bp, Zea Mays
caaaaaatcacatgataaaatcaagccataccgtaaacaactattgtcgcataaaattcaagttttatatcaatacatgatacaaaatttaaagaaaaaaccatataaaaaaagcaaacatgccgttaagttcttgttgaccgaggcaattgcatccttctagttttgagacgttgaaatcgtcgaataataacctcatcatcaacggatttgaagatctctttctcagtgtagcaaaccattaattattgacattattggcattattattatcctgaccaccaattgcggacccccttgaaagtggttgaaaaaatctcctcatttatctaaatcttcgtggctgcttgcctgctcgcttcttgggtcttggctaattagcttctcagccagcggctaggaacagccgaacaggaggtgccgaggtggacgctggacggtgcttgcttgtcgacagccgtggacagcagccgacggcccgacgcccgccagccggagtgccgcctcgagccagcgattcgctcgctagcgg

SEQ ID NO: 104298 - DNA, 136 bp, Zea Mays
taaggggaggcaactgactaagagtcagacttgtacatgtagaagggaaaaagtgattgttttacatatggaaagtcatcttgataggtgcaacaaccacgtggcggttggcctcaaacttgtccaggagatctga

SEQ ID NO: 104299 - DNA, 673 bp, Zea Mays
gcacggcacacatcatcctagcaaacgtccttatccggctacaactttcgcgacgtctgcgacatcagaaaactgagctcgccccctcttgccttccctcctccgccggaccgctgctgtccgcctccaaccctccagttcgacgcaggcggcgacggcggcgcgccgagatgaaggtctccgtgaagacgctcaagggatctagcttccagatcgaagtggagcccaccgacaaggtactcatcggttgcgctcccgatctgtcgctatgtttctagttgctgatgtattggcggggctgcttcgctagatttggctgctttttaggtttgtttggggtctaggatttggttggttccgctgtggaggagatgagagtattggaagccgcgggcgaagctgccgtggatccaatctgtaggttgctgatttggttccggtggtgcgtgtggaacaggcggaacggagagctgttgcagacttcgcctgtggattttctggtttcaatttgggttttttcttggatacatgaatcagatgacaaggtgaagttatcaggcattgtagttggtagatagagcataggttgcagtcaatctatcgtcgctgtcctacatctcttcaggttgtgtgtttaattgaataaagagtaaggcaacacgatacttcatta

SEQ ID NO: 104300 - DNA, 1502 bp, Zea Mays
gcacggcacacatcatcctagcaaacgtccttatccggctacaactttcgcgacgtctgcgacatcagaaaactgagctcgccccctcttgccttccctcctccgccggaccgctgctgtccgcctccaaccctccagttcgacgcaggcggcgacggcggcgcgccgagatgaaggtctccgtgaagacgctcaagggatctagcttccagatcgaagtggagcccaccgacaaggttgctgctgtgaaaaaggtcatagagaatatgcaagagcaggcttcctatccagctgaccaacaagtccttatacatcaaggaaagaacaagggatcatcaagtgcagcaccggctaagacaactgcgaatcaggcacctcctactcagacagtgcctgttgttccacctcaaacgtcagcagccccagctgcaccagcacctattgtacctgtcagtgcactggctgcaactgctacagcctcagcagctcctgctgttgctgtatccaccgaggcagatagttatggtcaggctgcctcaaacctagttgctggcagcaacttggaaggaacaattcaatccattcttgaaatgggtggcgggatatgggacagagacactgtactacgtgccctgcgggttgcgtataacaacccagagcgcgctgttgagtacttatattctgggattcctgaacaaatggatgttcctacatcacctccgagtatccagccagtcaatcctgtccaggctgcacaagcagctcaaactgcagctccatctggaccaaatgctaaccctctagacctctttccccaatctcttccgaatgcttccgccaatgctggcacaggaaaccttgatgttttgcgcaataacgtacaattccaaaacctgcttggtttggtgcaggctaatcctcagattttgcagccattgcttcaagaattgggtaaacaaaatccccaggttatgcagctaatccaggaaaaccaagcagagttcatgcggatgatcaatgaaccacttgagggagacgaagagaatgaaatgatgctggaccagatggcggatgcagctgagaccattgcagtgactccagaggagaacgaagctatacttcgtcttgaagggatgggctttgaccgggcactggtcctggaagtgttcttcgcgtgcaacaagaatgagcagctgaccgccaactacctcttggatcacatgcacgagttcgacaacgatgacgggctcggagggccaccgctatgagggcgctctcgatccctacatcatgcgaacgaaggctgtagggcagtagtaggaaaacgttttgggattcgtcccgtctgttcgctcactctacatattcgtttggctttgctgtttagtacagaatttctagatttacggacttactacttgatatcctgatatagaggtcacggccaagcttactttttttccccctggatcaacttgttagcttactactatgttttgtgc

SEQ ID NO: 104301 - DNA, 1699 bp, Zea Mays
gcacggcacacatcatcctagcaaacgtccttatccggctacaactttcgcgacgtctgcgacatcagaaaactgagctcgccccctcttgccttccctcctccgccggaccgctgctgtccgcctccaaccctccagttcgacgcaggcggcgacggcggcgcgccgagatgaaggtctccgtgaagacgctcaagggatctagcttccagatcgaagtggagcccaccgacaaggttgctgctgtgaaaaaggtcatagagaatatgcaagagcaggcttcctatccagctgaccaacaagtccttatacatcaaggaaaggtgctcagcgatgacaccacattagaggaaaatcaagtgactgagaataatttccttgttataatgctcagacagaacaagggatcatcaagtgcagcaccggctaagacaactgcgaatcaggcacctcctactcagacagtgcctgttgttccacctcaaacgtcagcagccccagctgcaccagcacctatgtgagcttcgtatttattttgtacctgtcagtgcactggctgcaactgctacagcctcagcagctcctgctgttgctgtatcgtaagttcctgattctccttccatcttagatgatttaactaatcttgtaataagcataatttttgtttgatgatgcattggtatttcgtaaaatttgctacagcaccgaggcagatagttatggtcaggctgcctcaaacctagttgctggcagcaacttggaaggaacaattcaatccattcttgaaatgggtggcgggatatgggacagagacactgtactacgtgccctgcgggttgcgtataacaacccagagcgcgctgttgagtacttatattctgggattcctgaacaaatggatgttcctacatcacctccgagtatccagccagtcaatcctgtccaggctgcacaagcagctcaaactgcagctccatctggaccaaatgctaaccctctagacctctttccccaatctcttccgaatgcttccgccaatgctggcacaggaaaccttgatgttttgcgcaataacgtacaattccaaaacctgcttggtttggtgcaggctaatcctcagattttgcagccattgcttcaagaattgggtaaacaaaatccccaggttatgcagctaatccaggaaaaccaagcagagttcatgcggatgatcaatgaaccacttgagggagacgaagagaatgaaatgatgctggaccagatggcggatgcagctgagaccattgcagtgactccagaggagaacgaagctatacttcgtcttgaagggatgggctttgaccgggcactggtcctggaagtgttcttcgcgtgcaacaagaatgagcagctgaccgccaactacctcttggatcacatgcacgagttcgacaacgatgacgggctcggagggccaccgctatgagggcgctctcgatccctacatcatgcgaacgaaggctgtagggcagtagtaggaaaacgttttgggattcgtcccgtctgttcgctcactctacatattcgtttggctttgctgtttagtacagaatttctagatttacggacttactacttgatatcctgatatagaggtcacggccaagcttactttttttccccctggatcaacttgttagcttactactatgttttgtgc

SEQ ID NO: 104302 - DNA, 1581 bp, Zea Mays
gcacggcacacatcatcctagcaaacgtccttatccggctacaactttcgcgacgtctgcgacatcagaaaactgagctcgccccctcttgccttccctcctccgccggaccgctgctgtccgcctccaaccctccagttcgacgcaggcggcgacggcggcgcgccgagatgaaggtctccgtgaagacgctcaagggatctagcttccagatcgaagtggagcccaccgacaaggttgctgctgtgaaaaaggtcatagagaatatgcaagagcaggcttcctatccagctgaccaacaagtccttatacatcaaggaaaggtgctcagcgatgacaccacattagaggaaaatcaagtgactgagaataatttccttgttataatgctcagacagaacaagggatcatcaagtgcagcaccggctaagacaactgcgaatcaggcacctcctactcagacagtgcctgttgttccacctcaaacgtcagcagccccagctgcaccagcacctattgtacctgtcagtgcactggctgcaactgctacagcctcagcagctcctgctgttgctgtatccaccgaggcagatagttatggtcaggctgcctcaaacctagttgctggcagcaacttggaaggaacaattcaatccattcttgaaatgggtggcgggatatgggacagagacactgtactacgtgccctgcgggttgcgtataacaacccagagcgcgctgttgagtacttatattctgggattcctgaacaaatggatgttcctacatcacctccgagtatccagccagtcaatcctgtccaggctgcacaagcagctcaaactgcagctccatctggaccaaatgctaaccctctagacctctttccccaatctcttccgaatgcttccgccaatgctggcacaggaaaccttgatgttttgcgcaataacgtacaattccaaaacctgcttggtttggtgcaggctaatcctcagattttgcagccattgcttcaagaattgggtaaacaaaatccccaggttatgcagctaatccaggaaaaccaagcagagttcatgcggatgatcaatgaaccacttgagggagacgaagagaatgaaatgatgctggaccagatggcggatgcagctgagaccattgcagtgactccagaggagaacgaagctatacttcgtcttgaagggatgggctttgaccgggcactggtcctggaagtgttcttcgcgtgcaacaagaatgagcagctgaccgccaactacctcttggatcacatgcacgagttcgacaacgatgacgggctcggagggccaccgctatgagggcgctctcgatccctacatcatgcgaacgaaggctgtagggcagtagtaggaaaacgttttgggattcgtcccgtctgttcgctcactctacatattcgtttggctttgctgtttagtacagaatttctagatttacggacttactacttgatatcctgatatagaggtcacggccaagcttactttttttccccctggatcaacttgttagcttactactatgttttgtgctact

SEQ ID NO: 104303 - DNA, 592 bp, Zea Mays
cttttcacactctgccgcccatttcacactctgcacctcgcttgcctgcctcagaccagtggataccgctttcgtcgtcgtcatctcgacgcacgacgctcctcgaccagtctccatggactactacaggcagccctactgcatcatgaccctgaggatgagcatcgactgcaacgggtgctaccagcggatcaggagggcgctcctccagatggaagggctggagagccacctgatcgacaagaagcacggccgggtcgtcgtgtgcggcgccgccttcagcccgcaggacgtggccatcaagatcaggaagcggaccaaccgccgcgtcgagatcctcgacgtcagcgaggcctcgccggcagcaccagaaggcggccccggccacatgccctcctgaaggagtcacgccgccgacacgtgctctgtagcggcggaagaagcctgcttgctattcccctaaacgaaacgaaagcatgtgcctggcatgttttgcctgcttgtaacttttggaatccttgcaccattttgttctgtaactgtaaaggattgttgaagtagccagaaaattccaagaccgtgttctaaaaga

SEQ ID NO: 104304 - DNA, 690 bp, Zea Mays
cttttcacactctgccgcccatttcacactctgcacctcgcttgcctgcctcagaccagtggataccgctttcgtcgtcgtcatctcgacgcacgacgctcctcgaccagtctccatggactactacagggtgagtgttctattacgttctgccagtcagtcctcgcaaaatggttttcgagagctgaaaacatcgagaggcagtgacgcgtaccatgtactcagcagcagccctactgcatcatgaccctgaggatgagcatcgactgcaacgggtgctaccagcggatcaggagggcgctcctccagatggaagggctggagagccacctgatcgacaagaagcacggccgggtcgtcgtgtgcggcgccgccttcagcccgcaggacgtggccatcaagatcaggaagcggaccaaccgccgcgtcgagatcctcgacgtcagcgaggcctcgccggcagcaccagaaggcggccccggccacatgccctcctgaaggagtcacgccgccgacacgtgctctgtagcggcggaagaagcctgcttgctattcccctaaacgaaacgaaagcatgtgcctggcatgttttgcctgcttgtaacttttggaatccttgcaccattttgttctgtaactgtaaaggattgttgaagtagccagaaaattccaagaccgtgttctaaaaga

SEQ ID NO: 104305 - DNA, 1308 bp, Zea Mays
atgaagccgcgggcgctcctggagcgcctggcccgccacttcccgtcctcccgccggtcctcgtccgaccagtcccggcgcgacagggaggaggaggcggacctggaggcgatcgcggcgcgggagcagcgcgggttcaagtacgagaccctggcggcggcgacgcggggcttctcggagaagaaccggctcgggcagggcgggttcggccccgtgtaccggggccgcctcgaggacgggcgcgacgtggccgtcaagcgcctgggcgccgggtcgcggcagggcacgcgggagttccggaacgaggccacgctgctgtcccgggtgcagcaccgcaacgtggtcaacctcatcggctactgcgcgcgcggggcggaggacaagctgctggtgtacgagtacgtccccaacgagagcctcgacaagatcctcttccccccctcctccgcctcggcctcccactcccactccagcagcaacagcgaccgatcacgacgagcggagctgacctggccgcggcggcacgaggttgtggtcggcgtggcgcgtggcctgctctacctccacgaggacgcgcacacgcctatcatccaccgcgacatcaaggccagcaacatcctcctggacgaccggtgggtgcccaagatcgcggacttcggcatggcccgcctcttccccgaggccggcgatggtcactctcgcgtccatacccgtgtcgccggcactaacgggtacatggcgcccgagtacctcatgcacggcgacctctccaccaaggccgacgtcttcagcttcggcgtggttgttctcgagattgtctcgggccgcaagaactccgcctttgtcccgcccctcgacgccgaggccgacagcctcctggaatacgcctggagactgtacaagaaaggtcggagcctggagttgcttgaccccgcggtcaagtcgtcggcggtgccggagcaggtcgagctgtgcgtgcgcatcgggctgctgtgcgtgcaggccgacccgcggctgcggccggacatgaagcgcgtggtgatcatcctgtccaagaagcagagcacactcgaggagccgacgcgcccgggcgtgcccgggtcgcggtaccggcggaggccccacggcctgcggggctctcactactctgtcgggtcatcgtccggcaccagctcgccgtctacgtccgctacatcgcacgcgtcagcatcagcgtcagcgtcagcctcccacgccatgacgacgtcgagcacgcacaccatgaggagccggggcttgccctcgcaccgagaagaagagcaggagtag

SEQ ID NO: 104306 - DNA, 2745 bp, Zea Mays
tcctcctctcgcgtcgcagagcctagcctcgggatgacgtggcgtaccacaacaccaccacacctcactcagccctgcgggtctccgaccaaccatttctagaagcctccaaaccctagcgcaggaggaagaggagttaggaggagctccagggatggcgaaggcgaggaagcagaagggtgacggtgccagtacgggaggaggcgccaccgtgctccaccagaagctctgcctctccatcgacatggagaaccagctgatctacgggtacactgagataaaagttctagctgaaaacaacagatttgctctacatgctgacaatatgacgattcagagcatttgatggatggtgcaactgttgagtttgactattcccctcattggaaaaatgaaagtgatcaaccgaattggtcttcagtatcatgtttgaagactgctgctgatgctgcatgttcaatgtatactttgtctctaaatcgagaagctacaccaaatcttattgtgtcatctgagagatcagtcaagtcaatgactgaacagcagttagatgaaaacagtgaaaagcatgaagaaaatagtggaaggcttgaagaacatggtggaaatcctgttcaaacttcctatgatcaaattgttaatggctgcagtggaagagggaatagaaaattctgcagtggaagaaggaaaggaaaaggaaaatgataaggaaaaagaagaggaaaatggaaatgagaagagcaaggaaactggaaatgagactgaatatgaaaaggtgaagaacataaaactggttcacatagattatattttggagaaggctgaaactggcgttcagttcgttggcaatgtcatgcgtagcagtagtcagacaaggcgggcacactgttggtttccttgtgttgatagtgccacagaacgctgtccatttgacctagaatttacagttagcatggatttcattgctgtcagcaatggtgacttgctttaccaggtctctagtaaggaagatccttcaaaaaaacttatgtgtataaattgaacactccagttagtccacagtggatatccttggttgttggcccacttgaagttcttcctgacagaatcacagaaatgacataaatgtctcacacatatgtttattccctgctttggcaaagcttcagaacactattgcatttttccacaatgcatacagctgttatgaagactatctttctgcaccatttcccttaggtttatacaatcacatttttcttccatctgaaatgacaatattaccagcaagcttaggagcctccacatgcatcctcagttctgatatcttgcatgatgagaaagttatatagatcagataattggcacaagaacgaaactggcttatgcccttgcaaagcaatggtttggaatatacacaagtgcagaggagtccagtgacgaatggcttttggatggtttggctggttttctaactgagttattatcaagcgttaccttgggaataacgaggcgcgttataggcgtttcaaggctaactgctcagtatgtgaatctgatgttagtggtgcaactgctttgagctctactgctgcttcaagtgatttatatggaactcaagcaatcggttcatatgggaaagttcgttcattgaaagctgtagctgttttcaaatgttggagaagcagatgggaccagactcatttcggaagattttgcaggtgatagtggctccaagtcgtgcataaaatctaggcatgagcttcctagcctctcttctcaagcaaattgatcggttcttgcaatttgacaactttatgcctggttataatggggtcttgactgtcagctgcattcgtacccttgtacgaatagcaaagaaggtgccatcttttgtatgccttgatcacatttttgaattggttgcccctttccgcaacatggacaaaccatggaaagttcgaattgaagctagcaggattcttattgatcttgagttacaccataaaggactcgatgcagctcttttgttgttcttgaaatatgtggacgaagaaaagtctttgcgaggttggattgctagagtactttttgatggttttgtatgctttgctatcttttgacatggaagctgttgaaggagcgacaaagttggctgttcatgtcttgcgtatatgtcaaacaagtattgttcctcacgccaatgatcaaataaattttggcaactctagttaggggtggtaacgggccatttaatttagcctagcaaatttacggatcgaatcaagttagggccggatcataaaacaatacaattttgaactaacaaaattaagggctttgttggtttgtgaagcaagtattagggtcatgatccattaccacccctaactctagttggtcttcttcatctgcttgctggcacaaaggcatacaataacatatttcttcgtcatcaagtgttctgcatattgcaagttgctgctggaaggttagtgagtttgttattgcatatgtattcattattttgtttcgttgattacttgttattgcattgacatctgtactacataaagcaccagttttcacggttcaaatttccaccgtcgtcgtgctctcccgcatttaaatggtaaaaacgctatttttttcacaaatggggattcaaaccatgattgttggctctaaacccacttaggcaacaatgttttattttatactctatacttaagcgtaaatggaaac

SEQ ID NO: 104307 - DNA, 1328 bp, Zea Mays
ttacttctaccatgccaagcatgagtccatgttgattctgtgtgctaatttgctctcatattgacattttaattcaggtccccaacgttatttggtgttccaaaggtcctcacaccccctctggtggtcaactacatcttcagtgatcaacacactaaagatgattcctcaattcctcaaccatcatagtctcaggaaccttccactagcactcctagtgtccgggaggtcttaccgacctctggacccactcaagatgctgataattatcttactgcagtgaaagaaggaatgtggtcaaaattagggtgaagcttactgcatcttccagtaaagcatctgatgctgaccatagaggccattctgatggcgcaagaaatgaaaatgaaccgggtcaatgcagctcaatgtcaatggatgcccccatggctggagcagcaaatgaaccattaaatgtaagcaatcataacattgaggaacaaaactcatgtcacgaccttggatcaaggatgtcggcaagtgttagcaatgctaaactaatggacagacatgatatttccaaggagctacagtgcactgctgattccaggctggatactgttcccaaggatcagttctctcctgccattaatccgccggaagttttagacaaacctggcagtcagcttgaaggtgtctccaactatgatgtaaaccaagctccagagactgaacggagtggaaacagaagagagagaaaaaaacaagaaagataaaaagctgaaacgtgacgaaaaactagataaaaaaatatgacccagagtatctagagaaaagctccttaataagaaggaaaagaaagagttggccagaaagcagctagaaggtgaagagctacccctgaacagcggagagcagtgaacccttcaggttcacaggaagttttgccttcaaggccaccagctccagttctaagtgttgaaacacctgttcgaatctctgaaccccaggtatcaagcaaggaaacagctgtagatactgcacgtgcagcagccaaaccaaggataaagatcagagtcaagcccttggtaagaaaatctgaagggaattaaaaaagattgtagaattgtggccagtctgccatcatttgtaaggattactgtacagcaggaaaaatgcgggtttagttattttgtgaatggctgatgtatcctgtaaaaaaacattgctctgctctagtaatttctggggtaatcgaaatctgagttctagggtagtccatattttctgctgcagttgctttagtatctcagcgcttattatctcacaggttttaagtgtttgttcga

SEQ ID NO: 104308 - DNA, 2649 bp, Zea Mays
atggatggtcgttcgggagagatggcacaaaggagtcatgcttctgtgccccgaccgcccactaagccaacctctctaaggcggtcggtggatgacctccagagggatctggacgtggctcgcatggctttggaggtggctttgaaggtccgggtcacctcagataggggactcggtgaattattcagaaacccggaggcatcagtccggattgccaaatgggcagccaaactctccggctaccacatcacatttgaaccaaggacaaccatcaagtcacaagtcctagcagacttcgtcgttgactggactgggccaataacacagccggacccgtccgtagagaaggtgtggacaatccattgcgacggcgcatggtgccatgcgggggcaggcgccgctgtagtcattacttcacccacaggggtcaagcacagatacgcagcacgcctcaactttgctttggagtctgatagatgcactaacaacatagcagaatacgaagctgtcatcctcggccttcgcaagctaagggcccttggcgtcaccacctgcatcatcagaacagactccaaggtagtcaccggccaagtcgagaaagactacgcagcgaaggaccccgcacttatgcaatacctcgcagctatccgtagtctccagaggcaattcaaaggcttcaccttgcagcatgtggaccgtgccaagaataaggaggccgacgcattggctaaggcagccgctagaggcgaggccctgccctccgatgtattctaccatgtcatcggcacgccagccgtccgcagcccagaggggctccaaataaccaatgacagcgagggccatcgcatagtcaaccttatcatgaccgaagactggcgggcaccaataaccctgttcctgcagggatactatcatccaaccgacatcaatgaggccaagcgcctcaaacatcgaagccgagacttcgcactaattgaaggacaactttacaagaagggggccagtcaacccatgcttaaatgtgtcaccgagaccgagggcgtccaaattctgcgcgaagtccacagcaggacttgcggctctcacgcagggcctagggcactagccgcaaaggcaatccgtcaagttgacaatggcaagcaatttgacagccaagacttcaaggatttttgcttctccattggcaccaagcttgccttcgcctcagtataccacccgcaatccaacggagttgtggaacgcgcaaatggcaaaattttcacagctgtcaagaagatgctcatcgacgataaaaagggcaagtgggccgatttgttacctgaagcggtctgggcattaaacacgactgagtgcagggcgactgggttcacccctttccgccttctatatggatcggaggccatgacctcgcaagaaataaaacatgggtcaccacggacagtcccgtcagctgtccccgacgtggacgagcccacttcgaaggacctcatcgacggagaccgcgtcttcgccctacaggctctaaacaaataccaagccccacggtgggcgccaaaatggtgttatgactcaaatacaaaggcgtatagggtcttcaacaaatcatcgggtttggttgaagtctctagcgacattgtatttgatgagactgatggctctccaagagagcaagttgttgatcttgatgatgtacatgaagaagatgttccaacgaccgccatacgcaccatggcaattggagatgtgcgaccacaggaacaaacggagcaagatcaaccttcttcctcaacaatagtgcaacccccaactcaagacgataaacagcaactcaaggacggcactttcatctcccaaacaaagtacacgcaagacttgatcaagcggtttgggatgaaggatgccaagcccgcaaagactccaatgggaactgacggacacgtcgacctcaacaaaggaggtaagtccgttgatcaaaaagcataccggtctatgataggttctttgctttacttatgtgctagtagaccggatattatgcttagtgtatgcatgtgtgctagatttcaatccgatccaagggagtgtcacttagtggtcgtgaagcgaattcttagatatttagtcgctacgccttgcttcgggatctggtatccaaaggggtctacctttgacttgattggatattcagactccgactatgctggatgtaaggtcgataggaagagtacatcggggacgtgccaattcttaggaaggtccctggtgtcatggagttcgaagaaacaaacttctgttgccctatccaccgctgaggccaagtacgttgccgcaggacagtgttgcgcgcaactactttggatgaggcaaacccttagggactttggctacaatctgagcaaagtcccactcctatgtgataatgagagtgctatccgcatggcggataatcctgttgaacacagccgcacaaagcacgtcgacatccggcatcactttttgagagatcaccagcaaaagggagatatcgaagtgttttatgttagcaccgagaaccagctagccgatatctttaccaagcctctagatgagaagaccttttgcaggttgcgtagtgagctaaatgtcttagattcgcggaacttggattga

SEQ ID NO: 104309 - DNA, 1459 bp, Zea Mays
acaacacctaaaagcttcactactctcacatctttctgcttcctgtccagtgtccacacacacaccggaccctttcgccatctctaactttttcatcgatcgatctgtttttttcgaccttggctttccttcccccttttaagctttgatgcacacacacaccacacgcagtcgtaatggacaggctccacctcttgatgtgaagatctgttgcatttccagtctagctagcagtctcgctcacatgtgggaggaacgcatccagcaagcgaagaagatgatgaagaagcagtaacagcggcagtaccactagaactagctagatctcctctcttactagctagaagcttgtacaaacagtgcaccacacagatgttgccgtaccctaacaaccctcaccatttcggcgtctcccaagaactcccacacccaaaccctacggccggcttccccatgcctccaccgggcgcgcatctggatcagcgctactacgtggaccatcacttctttcccggccacggtcactgcttcaactccgagactctggaggcggtgctgaggccggcgcgcgctgccccagagtgcgacgaggccctagtagtcacggcgccgcaggcgggtggaagaagaaacggtagtctgcctgccgccgccgccgccggccagggccagggccagggccacgcccgagcgcggaagcgcccgttccggacggaccggcacagcaagatccggacggcgcagggcgtgcgcgaccgccggatgcggctgtccctcgacgtcgcccgcgacttcttcgctctgcaggaccggctcggcttcgataaggccagcaagacggtggactggctgctcacccagtccaagccggccatcgagcggctcgccgccgccaccgagccctcccaccagcggagcgacgacgcagctttctcacccccaacgtcaggggtggctgatgtgtcagctggtaataagagcggaggagttgccgagaagttgggccgctccagaagtgggggatccgcgtccatggagatggagcgcgcctgcgggctggaccgcctcgtgtcggccgcaccagtgcttcgtgagtactactacggcctcagcgagatgatgagcaacgacaacggaggagatggcgacgacgacggtgagtacgaggaagacggtgatttcctggacggtatgcaatattagtatggtactactagtagtagcttgcatggttaatttctacgtacctagtacactagtacctccagtccagctgctggcagcttacctagctagctagctctttatctggcaatgcaagcacttcttcactatccttagttcctagctagtaactagtagtatgcatgtgtactccttcctttaagttaatgctactggcaaatgctgtgtcagatgttactgatcttgtgctttgacgttactaatctatcttttt

SEQ ID NO: 104310 - DNA, 97 bp, Zea Mays
ccaagttgcactttaatatagttaatatatcatgctcaagtaaagacagcttttatgatagttcaattcagtcagcgaatggtagttgctatagtaa

SEQ ID NO: 104311 - DNA, 2565 bp, Zea Mays
acataaaacgctccccactgaatggctgagcctgaagcagttaccgctgccacgcactgatgcatatgcaccacacaccattatacccgaagaagaaaccatggcgcccaaaggcttttgaaacgacggctaaacttatactagcaagtagctacgctaaataacttgcagatatatatgcgttcatgcatccatgcaatgcaatgcaaagcataaagacgcacagctcgataccacgctgctggaaaacgccgtgtgtgtgtgtgcgcgcgcatgcatgaatgctacaccgaacactgctcctgcgcgccgtagttcatgcgctgccgcttaatgctcccgccgccgccaccagacgacgacgtgtcgcagctgctggccgtcctgcggtccatgacgccgcgcagggcctcctggaccgacgcgatgcactcgtgcctccggtgcgaggcagcgcgctcgccgccctcctcctcatcctcctcctcctcgtcgtcgtcgccgtcgccgccgccgccgccgccgccgcgctggacgtccgctctcctgtccgcggtgatgaggagcaagctgcggacgcgcccgccgagcgtggtgatctcggcccggcgcgcgcgcatctggagggcggccagcgcgcggacgatgtccgggatgaggtccgggcggtcctcgcagcagagcgacgcgcgcaccacgagccggccggcgccgtcggcccccgcgtccacgcacagctcgtcggcctccgtcggcagcagctgcgcctgcgcctgcgcctgcgtccgcccggcgccttcgtcgtcggcgtcggcgtcggcgtcggtggccgccatcatcgccgaggtctggcgcttcagctccttcacgtggtccagcacctcggccagcagcgacgctttgtccgtctgcacgaacgcgtgcgcgcgaataatacaggggcacatagaatcacatgagtgcgtggatcggtttcagcggtctgcgtcgtgtgtgaacatcatctcaaggcgcgagcgagcgagcatgcatgatgattattctctcgcctagctagggtggcgcactcactcgctcacgctagcgaagcgatcgagtgttgttagcgagcgcggcctgatgagagaatggcggtacactcgctcgcgcggtgcagcttttttctatccctgcattcataaatggcctttggagctttttacactagctagacacgcgtgtaggtgtaggtgtcgtcgtactgccagtgcctgctatacgaaatgatagtacgtaacacaaacgcattcatgtcatgtcgcacagggctttgaagccggtttcccctgtagcacaagcaggaacaaacgtacgtacagcggcttccttccgtgtatcaaagatttgtgctgcctctccgtgtcctccttctctctatcgtatcaggagtgtttaatttggcaacatatcacatgtagcccattgccactaatgcccaccacttggtaacaccaacatatcgtttatatctgtatatgaatatatatactatacttctagattttatcatttccctccattgcaatactagcactaatgcatgccattaggtggggggaggcaaaagtagatccttggaagcagcttcatcatgtgtcatgtaatgatgcgaacaacttttctcaaagctgtgtctaataagctctactacgtccaagcaaaactgattcaaacgagacataatcagtcaaaatatactcatatatatagctaggtacgtagctatagctctctctcacgcgggccctaggctatccgtgactattccattgtacatggatcttccaatttcgtagccaagttgatccgttcatggctgcaccatcgatcgagaacgacggcggcgatcgacgatgccggtatgcagatcaccaaaacggtgacgcgctaatttgatgtggttattagcgagagttctagatcgcggtggagattagtgatcggtggcaaatgcgacgcgaaccaatataattaataatccaatggtcaccttggtggtgttggggagaaggctcctgagcctggcgaggtggccgttgatccgctgccggcggcggcgctcggcctcgctgtggctgcgcgaggccgccagcgccttggcgtccatcatctcccgtgccgtcatccgccccagctccgcctgcaggctccccagcagcccggacaccaccaccgccttgccgctcccgtccgccgcgcgctgctgctgctgctgctgctgcaccgcggcgtcgaaaccgaagccgaacaccccgccatgcccgagcccgccgacgccgtcgcaggcgtaggcccccatggcggcgccgaggcccgccacggccgccggctcggagaagggcgccgcgccgagccacgggagcagctggtgcgcggcctcctggctcccgtgctcgacgcctccgtcccacatggctagccctagcttccggccggtcttggctagctccgaggttggtggtggtgctgctggtgctggtgctggactggcgaacgaagctggccaaggtgtggcttccggccggc

SEQ ID NO: 104312 - DNA, 1170 bp, Zea Mays
ggatcaggacagatgggagccgagaacggtagcaacaacccttcgtcgaccgtcttggatggcctctacggggtgcagctcggccgtccatcggatccggcacagaccgacggtggggcgtcgtcgtcaccagcagcttgtgaacaccaccacaagcgtggccgtggtggtacagcacaggcacagcagaggttgcagatccgaaggctatggcagcacagaccgtcttgcttcaagcccatccactgcaccattacgtgtgacaagcatgctggcgagactgtcgcgaacgtcgtcacctcgctgcccttcatcgttcttggactgcaggctccaaggaagaacctgaacgccgctatctacgccaactccctggtcgggatgggagtagcgtcgagcctgtaccattcttccagaggaggaatccggaggctcctgcgttgggccgactacactatgattgccaccacaactctggtaggtcgtcggcatcgaggatagctactagtcgagggattaattcgcacgtcgttcatgacaacaacaactatgtatgtacgtgttccacgcagtgtttgtcgagagcagtaggcaacgagaacccaagattgctcatggccgcttcagcgttgctcctgccgtttcagccactggtggtttcggctgtccacactggactcatggaggtttcatttgcgagaagagcgtcgatggaaccggagctcaggatggcgcataacctgcacaaggtgtcgtctctgctgggaggtgcgctgttcatcgccgacgactgcttcccggagactccctatatccacgccgcgtggcatcttgctgctgccatcggcgttggcacgtgcaacaagcttcttgaatgacaacagcccggcctccactcatgctgatatcaatgagcagttgatttcagcacctatcacgacctacgctacgtagaatgcacacagtatagcagcttgtcgacatttataacagaaaacaccatatgtctattatttgatagcctaggctgaactccttcgtctgacacatggtgtgggagggagtaacgtttgagaccatcttacaggcaatctgaaggtggtgaagatttgttaaagactgatccatttgcatctatgtcagtgcactgaggaaaattgtcaagacatc

SEQ ID NO: 104313 - DNA, 84 bp, Zea Mays
cttcctactaattttgggccttacactcaccgtccaaacgcatcgccggagttacgtcgtccgtcgtcgaagcgatcgcgcagc

SEQ ID NO: 104314 - DNA, 563 bp, Zea Mays
tatgttcgcgcccgggtcttggtgcccccgaaatccggatgtgacaaatatggtatgcataatcgttttaaacaagtttgagtcaaggaatttaagggaaaccggtgtggattttatatgtactaactcatgttgtcagttatgataattttggtgtctttcttttggattctgagcattgtgttgagtgaagtaaagatgcatagtcttgctgatggtgctgtcctatggatgggctgctcggtagcacctccaggtgtttggttatgctggtacctggcaacgctcaatagagatccttgaaatggttgcccactaggaccctggtagccaatgttcttgctacaagcataatggcagttcttgctataacatccaaagtggtagatacaaagcgatcaacaactattcttagtggaatacaactcgacttccttggttgcttgagcacaatgtctacttttgatgctgaagtgtatacaatgagaagaagtgggcagattgctagggccttcatttatgctgcatccaccttcatgctttcttttctgctagcacaactc

SEQ ID NO: 104315 - DNA, 2120 bp, Zea Mays
gggaggggaggggaaggggggagcgctgcagtcagtctaaggggcccttccccgctcccgccgccaatagggggctcccacctcaccccctcctcgcggctccaccgcacggttcaactgagccgaccccacccgtcaggtccgcgtgcccgcctcccgttggtccgccgagcaccacatcacaccgctacatacaaataaataagcgagacaccggcgcccaacgacttcccaaatcccgtgtgctggcgtgctcgagcccacatcccaaccatatacgagacgagccgacgttcccccgggcccccaaggaaaaccatgtgctgtgcccgccaggtgccactaaatcggtagcgcatgctagcactgagacggagctcccagtaacggcaacaacaagcagcagcagccagacagccagtagtaacacagtaaccggcagaggccatggcgagatcaaggcaggaaggggaggccggaggagaggagcggaagctggtcctgggcaagtacgagctgggccgcctgctggggcagggcaccttcgccaaggtgtactacgcgcgggacctgagcgccgccgccggcacgggcagcaccagcgtggccatcaaggtgatcgacaaggcgcggctgcggcgcatggaggggatggtggagcagctgcgccgggagatctccatcatgcggatggtgcgccaccccaacgtggtgggcatccgggaggtgctcgccagccgctcccgcgtcttcgtggtcatggagtacgcgcgcggcggggagctcttcgccaaggtggcccggggccgcctcaccgaggaccacgcgcggcgctacttccagcagctcgtggccgccgtcggcttctgccaccgccgcggcgtcgcgcaccgggacctcaagcccgagaacctgctgctcgacggggacggccggctcaaggtcaccgacttcgggctcgccgcgctgcccgagcagctgcgccacgacggcctgctccacacgcagtgcggcacccccgcgtacgtcgcgcccgaggtgctcaggaagcgcggctacgacggcgcccgcgccgacctctggtcctgcggcgtcgtgctctacgtcctgctctgcggcttcctcccgttccagcacgacaactgcgccaagatgtaccagaggatcttcaaggccgagtaccaggtgccgccctgggtgtccggcgacgcgcgccgcctcatcgcgcgcctgctcgtcgtcgaccccgccaagcgcgcctctatcccggaggtcatgtgcacgccgtggttcaggaagggcttcgtgccgcccgtcctttcagtttcacccccgatgacgcccaagaaacggctggacggagatgacgacggcggcggtgcgctcttcgacagcagcagcaactctggcgccacctctcctcggtcgtgcaacgcgttccagctcatctcctccatgtcctccgggctcgacctgtcggggctgttcgagaacgaacagaaggccgcgaccgtgttcacggcccgcgcgccggcggccaccgtggtggagaagctcgagtccgcagcgcgcgccctgggattcgagaccaccagggggaagggctggaaggtgaggatggaggctaaggccgggggcacaaacggacggctcgctgtcaccgccgaggtgctcgaggtggccgtggacgtggccgtcgtcgagttcgcgcacgacgccggggacgcgctggacttcaacaagttctgcgctgtggacgtccgtccggggctcgcggaaatcgtctgggcgtggcagggcgacagcccggccgccgtcgttgggaccgcgtgaacctacggccgcccgttcgtcctggcgtccacgcctgttggagccagccttacacggctgcatcggcatcatgtaaagtttccgttgttgcttcgagacagccatggctagttcgttatgagtcgtatgttgtacaggaagagaacaagtgcaaaactgaagagaggtttctgtcgacacgagagccgaatcgagccgggagtgttcgatcggcttgcaaagttttgtagatcatataatcgctattttgtggagatgcgcacatacacaattttgttttggtcgcc

SEQ ID NO: 104316 - DNA, 1719 bp, Zea Mays
cgccaaccccggcctgctcctgcttgtctttcctttctccctccccttcgagccaccaacccgggatgcagcccactacgcgggaaatgcaggccatggccgccgccggccagcagatctccctcgacgacctccgcgcggcagcaggcggcgtgcacgacgacttcctggaccagatgctcggaggcctgccgccgtcggcatggccggagctgtcgtccgcggcgggagggaaggcgccggatggcggcgcgcaggcggagcagatgcagcaccagccgcagcacttgggtgggggtgggggcctgtacgacgactccgccttgctggcgtcgcggctccggcagcaccaaatcagcggcggcggcggcggggaggccgtgaagcagatggtgctgcagcagctggccgatctgaggcaggaacaccatgtgttgctgcagggcatgggccgctcgacctcgacgggcggcagcagagacggcggcctgctcctcccgctctctctcggcagtggcggatcgggcggcgacgtgcaggcgctactcaaagctgtagccgactccgccggaggagaagccgcaggcgtcttcggcggttccttcgccggatcgctccaccaccaccagcagcagcagcagcattttcaatcacatccgcagcaaacggcgccgttgccggggcagggcttcggtggaggcgcgggcgcgtccggcggcgtgtcgcagccgcaggccggcgctgcgtgcggaggcgccgccgcgccgcccaggcagcgggtacgggctcggcgcggccaggccaccgacccccacagcatcgcggagcggctccggagagagaggatcgcggagaggatgaaggcgcttcaggagctggtgcccaacgccaacaagacggacaaggcgtcgatgctggacgagatcgtcgactacgtcaagttccttcagctccaagtcaaggtgctgagcatgagccggctaggtggtgccgctgccgtcgcgccgctggtggccgacatgtcctcggagggtcgaggcggcgtggcggtcgcggccgggagcgatgatgggctggcggtgacggagcagcaggtggcgaagctgatggaggaggacatgggcaccgccatgcagtacctgcaagggaagggcctgtgcctcatgccggtctccctcgcctccgccatatcctccgcgacgtgccacatgcgacctccggtgggaggaccgggcctcggggtcgccgccgccgccgcgcaccacatggccgctatgcggttgccgccccacgccatgaacggcggcgccggagccggagccgacgccgtgccggcctcacccagcatgtccgtgctcacggcgcagtcggccatggcgcccaacggcgccgggggtgggactgatggcgagggctcgcactcgcagcagcagcagcggcatcatcccaaggacgccgcgtccgtgtcgaagccgtgatccgctcgtgaacgtgaaggcaacggccgccgtgacactaacggcgcaaccatgacatgacactcggagctgacaaagtgggctctttggcgggcccacccacgggctctcggcactgcagctggccctccgaccttcccccttttcgcattttattcccagtgtaaccattgtttttttttccttgtttaatattaatcccatgtattatcgattcgcaaatgcaaggctggttctcctc

SEQ ID NO: 104317 - DNA, 1722 bp, Zea Mays
cgccaaccccggcctgctcctgcttgtctttcctttctccctccccttcgagccaccaacccgggatgcagcccactacgcgggaaatgcaggccatggccgccgccggccagcagatctccctcgacgacctccgcgcggcagcaggcggcgtgcacgacgacttcctggaccagatgctcggaggcctgccgccgtcggcatggccggagctgtcgtccgcggcgggagggaaggcgccggatggcggcgcgcaggcggagcagatgcagcaccagccgcagcacttgggtgggggtgggggcctgtacgacgactccgccttgctggcgtcgcggctccggcagcaccaaatcagcggcggcggcggcggggaggccgtgaagcagatggtgctgcagcagctggccgatctgaggcaggaacaccatgtgttgctgcagggcatgggccgctcgacctcgacgggcggcagcagagacggcggcctgctcctcccgctctctctcggcagtggcggatcgggcggcgacgtgcaggcgctactcaaagctgtagccgactccgccggaggagaagccgcaggcgtcttcggcggttccttcgccggatcgctccaccaccaccagcagcagcagcagcattttcaatcacatccgcagcagcaaacggcgccgttgccggggcagggcttcggtggaggcgcgggcgcgtccggcggcgtgtcgcagccgcaggccggcgctgcgtgcggaggcgccgccgcgccgcccaggcagcgggtacgggctcggcgcggccaggccaccgacccccacagcatcgcggagcggctccggagagagaggatcgcggagaggatgaaggcgcttcaggagctggtgcccaacgccaacaagacggacaaggcgtcgatgctggacgagatcgtcgactacgtcaagttccttcagctccaagtcaaggtgctgagcatgagccggctaggtggtgccgctgccgtcgcgccgctggtggccgacatgtcctcggagggtcgaggcggcgtggcggtcgcggccgggagcgatgatgggctggcggtgacggagcagcaggtggcgaagctgatggaggaggacatgggcaccgccatgcagtacctgcaagggaagggcctgtgcctcatgccggtctccctcgcctccgccatatcctccgcgacgtgccacatgcgacctccggtgggaggaccgggcctcggggtcgccgccgccgccgcgcaccacatggccgctatgcggttgccgccccacgccatgaacggcggcgccggagccggagccgacgccgtgccggcctcacccagcatgtccgtgctcacggcgcagtcggccatggcgcccaacggcgccgggggtgggactgatggcgagggctcgcactcgcagcagcagcagcggcatcatcccaaggacgccgcgtccgtgtcgaagccgtgatccgctcgtgaacgtgaaggcaacggccgccgtgacactaacggcgcaaccatgacatgacactcggagctgacaaagtgggctctttggcgggcccacccacgggctctcggcactgcagctggccctccgaccttcccccttttcgcattttattcccagtgtaaccattgtttttttttccttgtttaatattaatcccatgtattatcgattcgcaaatgcaaggctggttctcctc

SEQ ID NO: 104318 - DNA, 1694 bp, Zea Mays
aaccgtaccgggagtccgggaaaaaaaaaacgaaaaatattgccattcacacctccactccattccaagtgcagaggggaccgagggacgaagaagggccagaaggagaaggcgcgatgcccgacgcgataccggcctgcttccgccgcgtcgcggcagcacccggcgggcgggcgtcgccggggtcggggcccggctccggggtggggacgagcctggccacgtccgtctacaccacgcggctcggtctcgccgcgctgacctggtcgcgcgccgcgctcgggctcagcctccgcgcggtgctccgcgtgtccgcggggcccgcgccgtctccctcggcgtccgactacggcgacggcgaggtggagtacgggggcgccgagaagggcgacggcgagggggagcaggacgcgacggtggccgtgcgcttgcggccgtggctgctgtggcggcggcgcgggtccaagcgcttccgcgcgcggggccgccgcgtggacctggcctgggacctgtcgcgcgcgcgcttcgcggcctcgggctccccggagcccgtgtcggggtacttcgtcgccgtcgtggtggacggcgagatggcggtcgccgccggggacatggcggaggaggcctacaggaagaccagggcgcgccgcccgcccggccccggctccggccctggtcccgccctcgtctcgcgccgcgagcacgtgtccatgcgcgacggggccggcggcggacaccggacctgcgtcgtcgtgcgcggcagggagcgggagatcgcggtggatctcgtctcgcgcgcgcagggccagggccaggggcgggagcgggacagggccgaggtcggcatgtcggtctccgtcgacggcgatcgcgtgctccacgtccgccgcctgcgctggaagttccgcggcaccgagaagctggacctcggcgccggcgaccgcgtcctcgtctcctgggaccttcacgactggctcttccccgcgcgcgacgcctcgccacccgccgccacggctccgcccgcgcacgccgtcttcgtcttccgcttcgagctcgccggccgcgacggcgaggagcgtgacccggccgacgccagggagaaggaggtgctccaagtcggaggcggcttggcggggtacgtcgacggtaggaggtgggggagaggggactggagcgagagcagcagcagcggtgagaagcggaggacgaggggccaggcgagcaggctggcaaaggcgagctcctcctcgtcggcgtcagtggcttcctcctccgcgtcgtgggcgagcggctccaccgtcatggactggggcagccccgaggaggccgagctgcagagcggcgacggcttctccctcctcgtctacgcctggaagaactagcgtgcttgggccttgggctagcggcggccaaaggggcttgcccggcattgtttcgattgatgattggttcacagttcagtgaggatttctcttcccattgttgttgtaagttgcagttgttcagcgagcaatgttcttgtgcagctttgagtgctccactgaccaaagccatttctacccaattccttccattgacgactagtactcaattactcattggtctgcaaacagtaggtggcaaatcgctaactgatttggagctaaacaagtgatcgagtaactagatctcttgacttagaaagaaaaaaaaaa

SEQ ID NO: 104319 - DNA, 327 bp, Zea Mays
atggcggttagcacggcgacgcagtggaagaagctagcacgggggaagaggaagcacacacagggcaatattgccgagcttaacgccatagatctcagcgtcaagatttatggtgccgagctaggtgtcacgacgggcgccagtgcagcacagatcagcactgctggaacgacccaaaaaacagagctcactgattggaaaacaactattacgaaaggtggagctcaccatgatccaattgatgagcacactaatgctaggttggggcctattgaaaacacaactattacgatgattccaaacagcccaagcccgctatatgattag

SEQ ID NO: 104320 - DNA, 820 bp, Zea Mays
cctccgtcaatccccgctccactgcctctgcttctccgccgcgtcagggtgtaaaactactcgaaccgatcaccgacgcgacgaaccccgaacccgaaccctccaagccggcaggccggagcagagcgcgctccaagctgaatccccccatctcctatcgccgtcgaaagccgcagatgaccgtgggtttcgggtacctgcgattggaggagcgtccttcaataagcctttcattgcatagtgcaaattttggcttgtttcggcctacatgagtttgcggatttggtgtatttgcaaatagcttgaaatggagctagatcttttctgctatgattatcgtatttttttcagccgatgacatacgcgacgctaggagtagcgtcaattgaagaaaagtttattcaacaccggttgagatggtttgggcatgtccatcggagatcaggcaccggtgcatagaggcatcataagacaggacactaatgtgaagagagaggtagaagttgaccaaatttgacatgagatgagacaatcaaaagagacttgaaagaatggaatatctcaatggagttgtatttgggtagaagtgcttggaaagaagctatccacgagcctgaaccatgatttaggcctttttccttttagtgctctcaaatgcttttctccttccctttttctctttttctccttttggtgacatcttgttgggtttcaactctagcgtaccacaacttgcttgggactaaaaggctatgttgatgttgatgtgagacatctagcagttcatctaactatgttatgttgttttcagttttataaa

SEQ ID NO: 104321 - DNA, 2143 bp, Zea Mays
cctccgtcaatccccgctccactgcctctgcttctccgccgcgtcagggtgtaaaactactcgaaccgatcaccgacgcgacgaaccccgaacccgaaccctccaagccggcaggccggagcagagcgcgctccaagctgaatccccccatctcctatcgccgtcgaaagccgcagcaggtccattataactttttatgaccttgtctgggatggctgttgctttcaaagcaagtacaagttctgtcacacagcaacattggtcaagtccaacaaaggaccagtgtcaatatggtttcactcatttaagcaggcaaaagtgcagaaaaagagcactgtgtgtgacagctatatcagggaagctagacctagatttcactgatccttcttggaaccaaaagtaccaggaagactggaacaggcgttttagtttgccacatattaatgatatatatgatttggaaccaagaagaactacattctctttgaagaaaaacagaattcccctgggtgatggtgatggctcatcaactgatatgtggaacggttatgtaaataagaatgatagagcccttttgaaggtgataaagtatgcatctcctacttctgctggagctgagtgcattgatcctgattgtagctgggtggaacactgggttcatcgtgcaggtcctcgtaaggagatatattacgaacctgaagaagtaaaggctgccattgttacctgtggagggctctgtcctggtctaaatgatgtcattaggcagatagtatttactttggagacttatggggtgaagaatattgttggaatcccatttggttatcgtggattttttgagaaaggcttaaaagaaatgccgctctcgcgtgacgtggtggaaaacataaatctttctggaggaagtttcctaggagtctctcgtggaggagctaaaactagtgagattgtagatagcatacaagccagaagaattgacatgctatttgtaattggtggaaatggtagccatgcaggagctaatgctattcatgaggagtgtcgaaagagaaaactgaaagtttcagttgtagcagttccaaagacaattgataatgatatactttttatggataagacgtttggttttgatacagctgtagaagaagctcagcgtgctatcaattctgcctatatagaggcacgtagtgcataccacggaattgggttagtaaaattaatgggaagaagtagtggattcatagccatgcatgcttctctttccagtggacagattgatgtttgcctgatacctgaggtatccttcacacttgatggagaacatggtgtcttgcgacaccttgagcatttacttaatacaaagggattttgtgtggtttgtgttgctgaaggtgcagggcaggatttactgcaaaaatcaaatgcaactgacgcttcaggaaatgtgatacttagtgactttggtgtccacatgcagcagaagatcaagaagcatttcaaggacatcggtgttcccgctgatctaaaatacattgatccaacatatatggttcgggcctgccgggcaaatgcatctgatgctattctctgcaccgtacttgggcaaaatgctgtccatggagcatttgctgggttcagtggcatcacgtcaggtgtttgcaacacacattatgtctaccttcccatcacagaggtcattacaacaccaaagcacgtcaaccccaacagcagaatgtggcaccgctgcctcacatccactggccagccagacttccattgactacttcattaacacctgagagcaaggcgccaggagaatatttaatcccacaagggactgctaacaggaaacttgaataaatctggctaacccaaaattttgtgaggctggaggagctcataacgaaattgccagagccaccccctggtcatccagacgttgtaagcatgcataccctttctattggtttgcaatcccaagtgaaattaaaagttagaagttgtttgtgctgcaaacaattcaccataatcccaccagtacaaaactggctccagccttgtgagatgttttattgatgatgtactatgcataataggcaattggatattcttactgggaagtgcagtgatcagagatgagctt

SEQ ID NO: 104322 - DNA, 2280 bp, Zea Mays
cctccgtcaatccccgctccactgcctctgcttctccgccgcgtcagggtgtaaaactactcgaaccgatcaccgacgcgacgaaccccgaacccgaaccctccaagccggcaggccggagcagagcgcgctccaagctgaatccccccatctcctatcgccgtcgaaagccgcaggtccattataactttttatgaccttgtctgggatggctgttgctttcaaagcaagtacaagttctgtcacacagcaacattggtcaagtccaacaaaggaccagtgtcaatatggtttcactcatttaagcaggcaaaagtgcagaaaaagagcactgtgtgtgacagctatatcagggaagctagacctagatttcactgatccttcttggaaccaaaagtaccaggaagactggaacaggcgttttagtttgccacatattaatgatatatatgatttggaaccaagaagaactacattctctttgaagaaaaacagaattcccctgggtgatggtgatggctcatcaactgatatgtggaacggttatgtaaataagaatgatagagcccttttgaaggtgataaagtatgcatctcctacttctgctggagctgagtgcattgatcctgattgtagctgggtggaacactgggttcatcgtgcaggtcctcgtaaggagatatattacgaacctgaagaagtaaaggctgccattgttacctgtggagggctctgtcctggtctaaatgatgtcattaggcagatagtatttactttggagacttatggggtgaagaatattgttggaatcccatttggttatcgtggattttttgagaaaggcttaaaagaaatgccgctctcgcgtgacgtggtggaaaacataaatctttctggaggaagtttcctaggagtctctcgtggaggagctaaaactagtgagattgtagatagcatacaagccagaagaattgacatgctatttgtaattggtggaaatggtagccatgcaggagctaatgctattcatgaggagtgtcgaaagagaaaactgaaagtttcagttgtagcagttccaaagacaattgataatgatatactttttatggataagacgtttggttttgatacagctgtagaagaagctcagcgtgctatcaattctgcctatatagaggcacgtagtgcataccacggaattgggttagtaaaattaatgggaagaagtagtggattcatagccatgcatgcttctctttccagtggacagattgatgtttgcctgatacctgaggtatccttcacacttgatggagaacatggtgtcttgcgacaccttgagcatttacttaatacaaagggattttgtgtggtttgtgttgctgaaggtgcagggcaggatttactgcaaaaatcaaatgcaactgacgcttcaggaaatgtgatacttagtgactttggtgtccacatgcagcagaagatcaagaagcatttcaaggacatcggtgttcccgctgatctaaaatacattgatccaacatatatggttcgggcctgccgggcaaatgcatctgatgctattctctgcaccgtacttgggcaaaatgctgtccatggagcatttgctgggttcagtggcatcacgtcaggtgtttgcaacacacattatgtctaccttcccatcacagaggtcattacaacaccaaagcacgtcaaccccaacagcagaatgtggcaccgctgcctcacatccactggccagccagacttccattgactacttcattaacacctgagagcaaggcgccaggagaatatttaatcccacaagggactgctaacaggaaacttgaataaatctggctaacccaaaattttgtgaggctggaggagctcataacgaaattgccagagccaccccctggtcatccagacgttgtaagcatgcataccctttctattggtttgcaatcccaagtgaaattaaaagttagaagttgtttgtgctgcaaacaattcaccataatcccaccagtacaaaactggctccagccttgtgagatgttttattgatgatgtactatgcataataggcaattggatattcttactgggaagtgcagtgatcagagatgagcttaggtgctgttccaatttggttgcagcgttttgatgtttgtggtgttcgtctcgggaggtcaagtattgtgaacttgtaattctcttcttgaaggtatgttacagcaaatagtgctcatgcctatagattagaaaaaaaaa

SEQ ID NO: 104323 - DNA, 183 bp, Zea Mays
gatcccgtcgtgaatgaaagatgttacattgggattatagattatgatggggtctcgatccatgattctcgggaaactcctaaattaggggatagaaatggagcaatttcttcccacgaggatgtaaatggggatagggacgtgaaagcattctccatccccgtttcccgtggggacccgtta

SEQ ID NO: 104324 - DNA, 1675 bp, Zea Mays
cgtccttccttcgcctccttacggaccttacgtccttacctgttgttttcctcacctcccttgacccgtcgaccgtcgtcccatgctaaagcccagggttaggagctagaggtaatctctccctctctccccgtctctacccaccagtcaagcccagtgggggcgccgcgcgcatggaagcgatggacgtcaagtacaagcccgtcatgttccccaacggcgccgccttcaagaaggcgaagccggcggccgtggcgccggccggggagccgctgtaccgggagtgcctcaagaaccacgccgcgagcctgggcgggcacgccgtggacgggtgcggcgagttcatgccctcgccgggggccaaccccgccgacccgacgtcgctcaagtgcgcggcgtgcgggtgccaccgcaacttccaccgccggacggtggagggttccccgccgcagcctgcgcccgcgccgctggcgctcccgccgccgccgccgccgccgccgagcgtgctgcacggccagacgcaccgcggcggggaggatacgcccgaggaccgccacccgggggtagtcgacgccgacgaccccgattccgactcggagggctcggagtacgacgaggagcggtcagtgtccccgccaccgccgcaccacgtgccggcgccggtggcgcagcaacccccgccgccgtcatacttcccggcggcggcgccgcaccagcacatgctgctctcgcttggtcctggcgccgcggtggcggccgcggcgcagaggctggccccagcccagctgacgccgtcgagcgcgccgcctcccgggggcgcgatgcccaggaagcggttccgcaccaagttcaccgccgagcagaagcagcggatgcaggagctgtcagagcggctcgggtggcggctgcagaagcgcgacgaggccgtcgtggacgagtggtgccgcgacatgggcgtcggcaagggcgtcttcaaggtctggatgcacaacaacaagcacaacttcttgggcggacacagcgcccgccgcagcgtctctgcctcctcaggcgctgctgcgctcctccaaaccccatgcgccaacgccggcgctgctgcaccgtcattcaacccgtccaggctcacccctccccctcccgtcctcacatcgtccccgaccggcttcaacatcaacggcgccgcctcctcctcgccgcccaccgtcaccgccgaccacacggacaacgccaacggagcttcatcgccgcactccgcttaagctagagaggagagggaagcgagaatggagagacaaacatgcttaatttcagtggtcacttgtttttctttctatttagaccttccatctaagaaattagccccaacaaaacatgccgccatgcgccatgcctagaaatccaagcttcctcccctgtactttatgctcttgggatctgatgatgatgttgatgctgatttaggattagattatctcatctcatcccaaccacaaaaaaggtagcctccttggtggttcttgtcctctttgattgagcaaggcaagggagagggtttttttccttctaggctcctagtatcccatgctgtttgtgcttgtgacatgttgcgcaaaacggaagcagcctgccacctcccctctcatgtggccgtgagcactgttccgcccataaaaaa

SEQ ID NO: 104325 - DNA, 425 bp, Zea Mays
tttattgtttctattttcctttcttatttcaatttcaaatcaaaccaagttttaaattctaaatttcaaatttatgcacaagaaaaacttcacattatgcactattactacatagtatttcttcatttattttattattatattaattaggtaatgttttcaacatgaagtacacacacctcattatttcaatatattattatttgagtgtgtagtcgaactaaaggtaaattcagaaattctccctttgttttgataggaacattttttcaatgtctaatctttattatgatttattttaaccatcattattttattatgatcatttacctttaaaaagggtgaattataaagtttaattatttatcaagggtactttgctcagatttcttctaccaatccaaaatttagaatttgggtgttac

SEQ ID NO: 104326 - DNA, 3718 bp, Zea Mays
ctccactctccactgcccgctcgatacgggcgggcacgactggtgccaagttgttttcttcgccctccccccttccgcggcgcgttgtagaaagcgagcggggggtagtaggatccatcggtaggtcgtcccatcccgtcgcaccgcccgctacatacgccgcggcgggtaccttgcttccgttcatggcatgtttgtctcggacggtgggttagccatggacgccggaggccgtgcgggcgtgagcggccccgccgcggcgaacggctcgttcggactcgtccgcaccgtggtggggtactccacctcgcccctcttcttctggctcctcaccgtcgcgctcgtcgccgccatccacatcgtctccggctcgtcctccaagcctgccaggaacaatgagacggaggagaggaagaaggcgcgccgcgataggttcctcccggccgccgaggaacgggaggcgtcgggcaggggagatgaccgggttctggagatgatgcgcagtttcagcttcatgcaggcgaccgaggaggatttcatggagggcatgaccgcatacgagcacaacggcgttggcgacggcacagcgcacgggcctgtcgcgccggagccgcctgcgctgacggcgactagcctcagcttcaggtttcagcaccagatgcccgaagttccaacggagacggcgctggtttcgagagaattcactgcggcaagacaagagacggcggtagtttcgagagaactgacagcagcgagagacgatgatggacgacaacgagaggaagagaaggaaccacactttcctttggaaccattcgctccgttgcagacggcggcagacatgcaagaacaccggcacgacgaagcagaggaaacagagttcctggcggaggagccggcagaagagcggagcggagaggttgcgcaggaggaggcagcgccacccaagaccgtcgcggccacgcacaactatcagttcctgactgagcgcgacttccgggggttcgtcagggagccggaggccgtgacggtgcgcgtccaggaatctttcgtgccgtcgccgcctccggcgcaccagcccgaggagcgacgggtggtcgacgtctcctcccgcagcggccggttcctcacggcgagggacttccggccggcgaacgagcccgacgtgtgcgagagcgtggcgtcgtccgggaagtggacgccgccgcctccgaggccgaggccgaagccgaagccgaagcctgcgagctccccgtccgctgcttccatgggcggcggcggcggcttcacgtcggagttctccggtttcggcgactcggactccgagtccagcgccagcgacggctactcggtgaaggatctcgtcgtcgactccgacagcgattggttcctctcagagaaggagttcccggcgtctgcacttggctccggcaacctcaaaacttacaaggccaaggtgctcagggcgatcgaagccatggaggcggcgtccaacctggagccgtcttaccaggaggactcagcgacgacagtgtcgccgagctcggtccggcagcgctcaccggacaccgttcccgatggttctcccaagttccctgaggacgtgtggtctcgcagcccttcgccggacgtcgagtacaaagaggacgaggaggaggtaacgagagaagctgaagcacagtatgatgaggacatcgaacagcgaagcacgggggaagaggaggagggcaagggcatcgacatgagcgatgacgagcactcgtcgggcggcaaggaggtagaatccgcaccaatctatgatctggctcctgttgctgacgactgtatggatcattcagagaaggggatcatcactctaaatgatcattcaggaggtcaagctgcttctgatgctcaaagaagtccagaggcagtctctgccagacaattagctgccgtaccatcagatcaagttgctggcccagtcaagagaagtccggagccaccggagcaggaatttgttggtatggttgatcattcactcgagcacagttcttacgaccggaaacaaactgccagcgaaagcgatcagtcatatgaaatagtatttgatgacaaaagaaggccgcagcgtgcagagacaggatttcttgtttgggaagagatcgtcaccagaaacgatcaaccgcccctagggccccatgctgatgagcaaggcctggatacagcagaggaagagtatgtgggcacaggtgatcagccacatggtgcagtttctgatgagaagagcggtgcagagactccggagcaagaattcagccttaccgaccaccgaaacgtagcagttcctgacgccaggaacatctcggagaccagagaagatgaggaacaagccagtgcagatgatcattcggacaatgcagtcaccgggaaggcaaaggtatatgacgaagacggggaggaccgggaagcgaggtggaaggatctgacagacgaggaggaggacgagctggagtcgctgtgggagcaccaggatctggtagagcagctgaagctcgagctgaaaaaggttcggtcgtcggtcgggctgcccacgatcctcgaggagtcggacacaccaaaggctccggtggaggacctcaagccatggagtatggatgctaagttccttcgcgaggaccccatggacgagctgaacaagttctacaagagctacagggagaggatgaggaagttggacattttgtgctaccagaagatgtacgcaatagatttcctacagctcagagggtcccagcagtccaacaacaacaacaacaactctgtaaagtccttgtcgcctacggtggcgtccatcctgtcgcataacttccggtcatcgcgccggagatctcccgaggacccgtcggaacggttcctcagggagctccgctacgacctggagacggtgtacgtcgggcagatgtgcctgtcgtgggagttcctccggtggcagtacgagcaggcgcgcgacctcccggagtccgactcctaccacagccaccagtacaaccaggtggccggcgagttccagcagttccaggtcgtggtgcagaggttcgtggaggacgagtcgttcaaaggccctaggctgtcgaactacatcaacaaccggtgcgtcctccgcaacctgctgcaggtgcccgtgatcaaagacgcgctgaccgtagcaatgcatgcacttccgggctgttgtgtagaggacagcctgaaggacaggatggaggaccagcgcaaggggaactacgtgataaccagcgaggagctggaggacgtcatggaagaggcgatgcacgtcctgtgggagttcatcaaggccgacagggccgagacgacgacgacggcggcggcggcatcggtgctcaagggcctgtcgagcagcaacgtcgagctccaggaccctctggatcatggcctcatggcgcacatccattccgcgttacagaagaaagagaagaggctcaaggacctgctcaggacgggcaactgcatcgcgaagaagtttaagaagcccaaggaggacaggtccaaccagaacctcttcttctcgcaggtggacatgaagctggtggcgcgggtgctgaggatgcccaggatcaccagcgagcagctgcagtggtgcagggccaagctcgacaagatcgtactggtagataggaagatccacagggaggcttcatttttgttgtttccctgctga

SEQ ID NO: 104327 - DNA, 897 bp, Zea Mays
atcaagccatcaaacgcccaaacccagcggaaggaggcaaagcgaaggaaggagctcgccgtcgccgaactgcaactgcaactgctacaggacccgattcccagagacagacaccgctgcaattgcaactgcagctgcgatggagatggcctcttcctccgcgccgaccgcgtcctacaacgtgtccgtggcacaggcggtgctgacgctctccatcaacgccatcctcctctggctcaccaccgtcatcaagtcctactcctcctcatcctcctccgcccgccgccgcgacgccgcccctgccaccgccccggcaccgccgtctccgtccccggctaagcccgctgccgccgctgccgccgccgtcgacttggacgcggtgctcgggctgatgggcgccggcgccgagtccgtcgggttcgaggaggcggccgcgctgttcgaggaggaagaggcgacagtggaggaggccaggcaggcgttcgccgtcttcgaccgcgacggcgacgggttcatcgacgccgcggagctccgggccgtgctcacgtcgctcgggttcgagtccggcgtctccgccgccgccgaggcggagtgccagcgcatgatcgacgcgtatgacgaggacaaggacggcaggatcgacttccgcgagttcgtcaagctcatggaaaccagccactgaaacggataccgttctttcgcaggatcgccggatcagaagatggtccggtcgcgtttgttcagaaattctttgttcgttcgttcttttaccaatgtttttttttcttggctgaaattaatggagccgaatgatgcatacatataacaaaatgtgtatatatactcctctcacccacacaatggaaaaatcttaggaaaaaaattcaaactcgtttg

SEQ ID NO: 104328 - DNA, 1256 bp, Zea Mays
aacaggtggaggccgttgcaactgcacacacatccaactccggctccatgccgctccaacccaagcagccagcagctgcagcctgccctcctctccgactccaacccaatccaatggctctccgcccctgttgtctcacctcacgcgctctctgccctgatctgccgccaggcgccagaacgacgcgctgctccgcaccgcgtcaggtagaatggtagatggaccatggacgatatcgcttgggagcggggaaggaacgcagacgactcttcccgtgccgtgctgacgccaccacgcggccccggtctcctctcgccctcctctccgtctggatctggtcctatcccctccgccgccgtccttgccctcccggcctcagccacgagccagagcgccgggctcctggcctcgtctcgcctcgccggcgacatggacggaggcggggagacgctgctggtgcggaggagcaagggcaagaagagaccgcagccggcggcgcccgcggaggagggctccggcagcgggggcaggttccgcgcgatctggcgggactaccacgacctgctgcaggagactgaggcaaagaggaagaggctggcaagcacgaagcggagaagcctcgccttgcttgctgaagtcaagttcttgagaaggaagtaccagtcctttctgaggggtggctcgcagcagacacattacaggttgaagaagcaggctcggtacatgccatctccattgggaagcaataaggctgcagcgttagccgatcatggtgcaggggacccaagtgccttctaccagcaaaaactcaaaacttgacttgaatcaagactctgttctggcaagtgatggagttcatgaatcgacataaaatgtacaagagaagtgtttttatggcaattaaaagggttttcttgtctgcagaatgatggcatccataagtcgaaaagtttgatcaggtctcaaattatcagtttgtagggataaaggaaactctcctgcaattgaaggtaagaggacggttccatggcaagaccggctagcgttgaaggccgaggccctcagttgatttggccaagaaataagctgcttctctgatagctggctttgcaacagtatccctcagatgcacagtaatgctttgtatagaacaataggacacgatagttatatacatgatacattgcctaattgacaaactcagatggttgcaccatgctcctaagcaagttagacaaataaactgtgattttatg

SEQ ID NO: 104329 - DNA, 244 bp, Zea Mays
gtggaacggcgagcggccgagcgcgctgcggcgctacctctggtcgctggagactgctcagactggagaagtggagtcgtggagaggacagaggaggcaacgaggcaggaggcgcggcggtcggagcagtggagccctggaggtgcggcggccggagcagtggagcctagagaggagctgcggcggctagaggctggagctagggttgggatttggggctgggcgcgacggtgggcctctggtg

SEQ ID NO: 104330 - DNA, 3478 bp, Zea Mays
aaggtagagcatcgctcacacctgcgtcgccctgccttgccatcgcgatcgagcacctgagggatcgatcggaggccaagagctagctagcacgccggcctccgctcgccggtgccgcgcgcgatggaggccaacgccgggcttgtggccggctcgcacaaccggaacgagctggtgctcatccggggccacgaggaccccaagccgctgcgggcgctgagcgggcaggtgtgcgagatatgcggcgacgaggtcgggctcacggtggacggcgacctcttcgtggcctgcaacgagtgcggcttccccgtctgccggccctgctacgagtacgagcgccgggagggcacgcagaactgcccccagtgcaagacgcgctacaagcgcctcaaggggagcccgagggtcgccggggacgatgacgaggaggacatcgacgacctggagcacgagttcaacatcgacgatgagaagcagaggcagctggagggcaacatgcagaacagccagatcaccgaggccatgctgcacggcaagatgagctacgggaggggggccgacgacggcgagggcaacaacacaccgcagatgccgcccatcatcaccggcgcccgctccgtgccggtgagcggtgagtttccaatcacaaacgggtatggccacggcgagctctcgtcttccctgcacaagcgcatccatccctaccctgtgtctgagccagggagcgccaagtgggacgagaagaaagaagtgagctggaaggagaggatggacgactggaagtccaagcagggcatcctcggcggcggcggcggcgatcccgaagacatggacgccgacgtgccgctgaacgacgaggcgaggcagccgctgtcgcgcaaggtgtcgatcgcgtcgagcaaggtgaacccgtaccggatggtcatcgtggtgcgtctcgtcgtcctcgccttcttcctccgctaccgcatcctgcaccccgtcccggacgccatcgggctgtggctcgtctccatcatctgcgagatctggttcgccgtgtcctggatcctggaccagttccccaagtggttccccatcgaccgcgagacgtacctggaccgcctcaccctcaggtacgagagggaaggggagccgtcgctgctgtcgtcggtggacctgttcgtcagcacggtggacccgctcaaggagccgccgctggtcaccgccaacaccgtgctctccatcctcgccgtggactaccccgtggacaaggtctcctgctacgtctccgacgacggcgcgtcgatgctcacgttcgaggcgctgtcggagacggccgagttcgcgcggaagtgggtgccgttctgcaagaagttctgcatcgagccccgcgccccggagttctacttctcgctcaaggtggactacctcaaggacaaggtgcagcccaccttcgtgcaggagcgccgcgccatgaagagagagtacgaggagttcaaggtccgcatcaacgcgctggtggccaaggccatgaaggtgccggcagaggggtggatcatgaaggacggcacgccgtggcccgggaacaacacccgcgaccaccctggcatgatccaggtgttcctgggccacagcggcggccacgacaccgagggcaacgagctgccccgcctcgtgtacgtctcccgtgagaagcgcccgggcttccagcaccacaagaaggccggcgccatgaacgctctgatccgcgtctccgccgtgctgaccaacgcgcccttcatgctcaacttggactgtgatcactacatcaacaacagcaaggccatccgggaggccatgtgcttcctcatggaccctcaggtcggccggaaggtctgctacgtgcagttccctcagaggttcgacggcatcgacatgcacgaccgatacgcgaacaggaacaccgtcttcttcgacatcaacatgaaggggctggacggcatccagggcccggtctacgtcgggacagggtgcgtgttccggcgccaggcgctctacggctacaaccctcccaagggccccaagaggccaaagatggtgacctgcgactgctgcccgtgcttcggccgcaagaagcggaaggacgccaaggatgggctgccggagggcaccgcggatatcggagtggacagcgacaaggagatgctcatgtcccagatgaacttcgagaagcggttcgggcagtccgcggcgttcgtcacgtccacgctcatggaggaaggtggcgtcccgccgtcgtcgagccccgctgcgctcctcaaggaggccatccacgtcatcagctgcggctacgaggacaagaccgactggggcctggagctggggtggatctacgggtccatcacggaggacatcctgacggggttcaagatgcactgccgcgggtggcgctcggtgtactgcatgccgaagcgggcggcgttcaaggggtcggcgccgatcaacctgtccgaccgtctcaaccaggtgctccggtgggcgctggggtccgtcgagatcttcttcagccggcacagccccctgctgtacggctacaagaacggcaacctcaagtggctggagcgcttcgcctacatcaacaccaccatctaccccttcacctcgctcccgctgctcgcctactgtaccctgccagccgtctgcctcctcaccggcaagttcatcatgccgtcgatcagcacgttcgccagcctcttcttcatcgccctcttcatgtccatcttcgccacgggcatcctggagatgcggtggagcggggtgagcatcgaggagtggtggaggaacgagcagttctgggtcatcggcggcgtgtccgcgcacctcttcgccgtcgtgcagggcctgctcaaggtcctggccgggatcgacaccaacttcaccgtcacatccaaggccaccggcgacgaggacgacgagttcgccgagctctacgcgttcaagtggaccacgctcctcatcccgcccaccacgctgctcatcatcaacatcatcggcgtcgtggccggcatctccgacgccatcaacaacgggtaccagtcgtggggcccgctcttcggcaagctcttcttcgcgttctgggtcatcgtccacctctacccgttcctcaaggggctcatggggcgccagaaccggacgcccaccattgtcgtcatctggtccgtgctgctggcctccatcttctccctgctctgggtcaggatcgatcccttcatcgtcaggaccaaggggcccgacgtcaggcagtgtggcatcaactgctgagctgtctatcacggttcaaaaaagttctagagcttgtgcataggggagaaacaacagtttagaaattttgtattgtcatgttttggagctcatacgctacgttttgtgtaatgttcttggacccagaattgtcggacgaggaattgaacaaaggacaaggtttgaatgaatgttaaatagcaaatgatattcctgt

SEQ ID NO: 104331 - DNA, 3050 bp, Zea Mays
gacaaggcgactctgctggacctgaagcaggggctcaggctgtcatcttcagcggccctggcggactggaacgagtccaacggcgacgtctgcggcttcaccggcgtcacctgcgactggcggcgggagcacgttgttgggctctctctcgccaacttgggcatcagtgttgctattccacgggtcattggcaatctctcgcacctccggggcctcgacgtgtccaacaacacaatctctggccagataccgacgtccgtcggcaacctcacgcgactggagcgcctcttcatgaacaacaacgacatctcgggcaccatctcttcaatcttcagcaacctcttaccactccagaggctccggaaactagacctctcctacaatagcatctccggtgccattccgctggacatcggcagatttgggcaactccaaagctttaacatcacctacaacaacatctccggcgccgtccctccgtccatcggcaacctgactctccttgagtacctctacgtgcaaaccaacttcatctctggagaaatatctctggccatctgcaacctaacaagcctcgtggagcttgaaatgtccggcaaccacctcacggggcagattccagccgagctctccaacctccgcaacattcaggcgattcatctcggcaccaacaatttccacggggggataccaccttccctgtccgagctgacgggcttgttctatctcggactcgagcaaaacaacctgtccgggaccatcccaccatctatcggggaagttatcaacatgacgtggatgaacctgtcgagcaacttcctgaacgggacgatcccgacgtccctttgccggctgaagtgcctgcagcagctcgtgctgtcaaacaactccctgacaggcgaaattccggcgtgtattggcagcgccacgcagcttatcgcgctcgatctgtcggccaacgtgctgtcaggggccatcccaagcagcatagggagccttgccgagctccaatctctcttcctgcagggaaacaagctgtctggggtcatacctccgagcctcggccattgtgccgctctgttgcacatcgacctctccagcaacagcttgactggggtgatatcagaggagatcgccggcatcgtgacactgaacctgtcgcgcaatcagcttgggggcatgctgccggctggcctcagcagcatgcagcatgtgcaagagatcgacctgtcctggaataacttcaacggtgagatcttggccaacatcggaaactgcattgagttgacagtgctcgacctctcacacaactcgcttgccggcaacctcccttcgacactcagccagctgaagaacctggaaagcctcaatgtcgcgaacaacaacctcagtggtgagatccccattagcctggccaattgcgacaggctgaaatatctcaatctgtcatacaacgacttcagcggcggcgtccccaccaccggccctttcgtgaatttcagctgtctctcctacctcggcaaccgtcgcctctctggtcctgtgctcaggcgttgcggaggtcgccaccgctcgtggtaccagtcccggaagttcgtagtcatcttgtgtgtctgctcggcggctctggcgttcgcgctgacgatcctctgcactgtcagcgtccgcaagatccgcgagcgggtcgcggcaatgcgggaggacatgttcagtggccgccgcggcggcggctcgtcgccagtgatgaagtacaagttcccccggatcacgtacagggagctggtcgaggccaccgaggagttcagcgaggaccggcttgtcgggacgggcagctacgggcgggtgtaccgcggcacgctacgcgacggcaccatggtggccgtgaaggtgctgcagctccagacggggaactcgaccaagagcttcaaccgcgagtgccaggtcctgaagcgcatccggcaccggaacctcatgcgcatcgtcacggcgtgtagcctgccggacttcaaggcgctggtgctgccgttcatggccaacggcagcctcgagcggtgcctctacgcggggccaccggcggagctgagccttgtgcagcgggtcaacatctgtagcgacatcgccgaggggatggcctacctgcaccaccactcgccggtcaaggtcatccactgcgacctcaagccgagcaacgtcctcatcaacgacgacatgaccgcgctcgtctctgacttcggcatctccaggctcgtcatgagcatcggcggggtggccaacactgccgacgtcggcgcctccacggcgaacatgctgtgcggctccatcggatacatccctccagagtacggctacggctcgaatccgacgacaaagggcgacgcgtacagcttcggtgtgctggtgctggaaatggtgacaaggaggaagccaaccgacgacatgttcgacgccggactgagcctgcacaagtgggttaagacccactaccacggccgcgccgacgcagtggtcgaccaggcactggtgcgcatggtccgggaccagacgcccgaggtgagaaggatgtcggacgtggccatcggtgagctactggagcttggcatcctctgtacccaagagcaatcgtccgctcggccaaccatgatggacgcagccgacgacctggaccgcctcaagcggtacctcggcggcgacaccacggccaccttcgcgtcatcgctgggattctcctccaccacgctagaagtggaagacatcgattgaccacgaggtaaggtataatttttttaagcggatgcaaaaacacataggattaattcgttgaaggtgtctgattgatgtaataatataagccttggccatagatctatctatatggcttatacatatgatttctgttccacaaggagttactgaattgctcgctcgtctgtttctctttctgggacgtgctgctccgttcgcgttcgacaatatccgcgagcgatcgcagatccataggcgtgtgtggcgtaagcggctccctcagacgcgagcgatacttagacgcgagc

SEQ ID NO: 104332 - DNA, 603 bp, Zea Mays
atggaggggctcggctcgatggcaggctatgggtccgcaaagacccgctgctgggaggagcggagacgaagggcggcgggtcctcgtcgcggcaggctagcgcctcggtacccaaccccgtggtccacgctgggaggtgctgcgggggctgctgacgctatggcgctgtcgaccaaggacaaggaggtccgccacaggtcatgtgacgtcctcggcatcgacgctgacgagtgggacaatgagaataggaggatgaccatcgagctcaggagcagcaacaccagctcaggaaggcactggaagaccgggtgcaagtcagtagggagaccaccaagatggggtgatgggtcaagctccatcagtaatagaacaaaactttatgttgttgcagatgaattctctatgcctacttctagagtgatgttcaaagaggttgacgctccttcaccatccccagctttgtggaatggaccacaggtagccatttaggatgacaaagccacaagggtgtccttcatcaaggctatgctagaagcctcaaacttgtgtctgaggaaaattcataaaaatggtacacagaagagccactgcttgatgtatctg

SEQ ID NO: 104333 - DNA, 1265 bp, Zea Mays
aactaccagagtaggcttcttgaagtaatagattcaagtgagttgccagaattccttggtggttcatgcacatgtagtgacaagggtggttgccttggatcgaacaaagggccatggaatgatccttatatattgaagctgatccacaatttggaagttggatgtatgagggaaaccaccaaacctgtttatgagggtggtgaaagaagcagctcttcctttcggttggaacagatgaaatggcatggcatgttaagcgatacatcaaatgatgaatcaggatccgatgttgatgattttggtccatcatttgttcataaagtttcaggctatggttgcttgactccggttcgtgaggaggtaaagggcacagattgtgcaacatacttgagctgcgatgatcaaagtcacccggatatggttcctgaattttaccatggagtgcaacgaactactgaaatggtgcagaaacaaatggctgatttcaggcaatattccaccaacggaaggcctcgtgatttaggtatcttattttcctatcattccgggtaaatgaattctgaacctgtagttgtttgttaacatttaataaagagtaaggccattgaagacggtgtataatagtagcattattcatgataaattgttgccttgttaataaatgttataccaggaaactatcatctagaaaaaacctggttcagcaggaaagcaattgaaagaagcgcaaagtataaataaatctctttttgctttggctgatgttattggtgctttatcttctgatggacaacatataccttaccggaaccataagttaacaatgcttacgagtgattatctaatgtggattgtctgcaaaaaaggtactatactttaatcagtcgtttgtcttttcattatgattatctaatgtggattgtctgcaaaaaatactatactttaatcagtcgtttgtcttttcattattccaatctttattttaatagtttccatttccagttttttcagttctaattacaagatgatcatgatgcatatgttcctctgttttttacagactacaacgatgtagagcatgtggctaaataatataacataaatcacacccgacgggaatgcgttcgaccttaccaatgcagagctaactagcaaaacttagcgaggaaccttccatgccattttgctctaggtattgcttttgacagtgtcaatattaattttgactataatagcttttaccaattaacagtacatgccttctt

SEQ ID NO: 104334 - DNA, 327 bp, Zea Mays
aaggagcatgcgacaactgtgccccagcatggcaacgacatgaatatggacatcgagcatgtgctcaaggagaagttcggtgacgttttcaaggaaatccattaggtgttcgacggggaccagccgatagtagagacaatgtccgaggcggtgaactggcgcctggacattctgcggccaccgattgggaactacagcggtagcgtggatgcgttggccatcgatggcgaggactgcctggcgaggtatgacatactggaatccattggcagcgatatcaaggcgtccatcatggagaaattccctactgtattcagtaaacagtag

SEQ ID NO: 104335 - DNA, 404 bp, Zea Mays
ttgtgtgaaagtaccaaatgcaagccatgtgcccataaattctgcaaggcatgtacatcacgttttaaaaactgcgcactatgtggtgctgatatatatagagggtattgagcttgatgctgcacttgaagctcttgttgaccgcttcagatgatggcatccatgaatcaagagatcacatgctacaaggtttgtgagaacagcagggggaaagaataaagtcatatatgaggatgtctccatggagaggagcttttctggtgcagcaagccatgaggtcttttcacatccaaaacattgaaagcgcaaaatcaagacttactatgtgttcagatgaaatcagggaggagttgaaatctttagaaaattacttagacttggctcaatatttaaatattttaata

SEQ ID NO: 104336 - DNA, 307 bp, Zea Mays
ggcggggtggtacattattgtacagtgcagagtgcagactgcagataagaaatggcttgaaaagttagacattacactaaataaataaataaataaataatgttaaatgagaactattttaatgtttgcttcaattcctatgtatctgaatgactattataaggctatccgcaaccgttacctctaaatttttccccctatatcacttttctcctctatttttccccctattttttcatctcccgcagcggttccccctaaatactccccctataccccactaccactataaaatatcattttctat

SEQ ID NO: 104337 - DNA, 1314 bp, Zea Mays
ggttctttctccaccccgatgcccctccccctcccccgtgtgatcccctctccagatcgatgtctgccccggccgtaacccccgcggctcaccgcacgaaaccgccgcgagatcttggagctcagcctctgacgatggctacgactacctcgccaacctccgcgagctctgtccccctccctctcctccaccggcggcgggggatccttggccatgttcctcccgaggcgccggtccacgcgcttcggcctccgcgtggtcatcaagcctttctgatggctcggaacagaggtcagctatgcgatgtggcgtggcgaggttaccgcgggcgccgcggaggtggagggggaaggggaggacgagggcacgggcaagagagcgcatcgctgtggacggtctcgtgagagggaccttgggtgatccgggtgcttggtttcttggttctacggctttcgctgctgttggatttgccgagccggagccgacggagatgaccgtcgacgagctgaagctgcaggcaagggccagcggcggccacgacctaaggaccagttccccgtcggcatgcgcgtgctcgccgtcgacgacgacccgacctgcctcaaggtcctcgagaacctcttgttccgctgccagtaccatgtgacaacaatgggccaggcagccactgccctgagctgctgagggagaagaaggaccagtttgaccctgtgatcagcaacgtccacatgccggacatggacggcttcaagctcctcgagcttgtgggcctcgagatggaccttccggggattaacagctgaaaacctcgcccgatttgtaaagaagttttcttgttcaatgcggcattgaatttgggaggaatgacaagtctcatgaaaacttctgtatgccctacacgtgaccactaaaagaaagagttagacaggacaaaaggctgcagcggcagaagaagagcttttacatacccttacaatgctgattttgatggagatgaaatgaatttgcatgtccctcggacggaggaagctcgcactgaagcgcttaattctcataggggttcaaaataatttatgtactcctaagaatggtgagatactggttgcttccgcgcaagacttcttgacctcatctttcttagatatgttttcgaattagattgggatggaaattcacatttgttatcacattttctgttagcaagcacaaccattgtgacattattttgcatgcactcagcctctcaccatggctatgagaatgaaattcaacttatagatataccaaaatgttatagaatcaatataattagat

SEQ ID NO: 104338 - DNA, 2084 bp, Zea Mays
ggttctttctccaccccgatgcccctccccctcccccgtgtgatcccctctccagatcgatgtctgccccggccgtaacccccgcggctcaccgcacgaaaccgccgcgagatcttggagctcagcctctgacgatggctacgactacctcgccaacctccgcgagctctgtccccctccctctcctccaccggcggcgggggatccttggccatgttcctcccgaggcgccggtccacgcgcttcggcctccgcgtggtcatcaagcctttctgatggctcggaacagaggtcagctatgcgatgtggcgtggcgaggttaccgcgggcgccgcggaggtggagggggaaggggaggacgagggcacgggcaagagagcgcatcgctgtggacggtctcgtgagtgagtgctgctgcctgcccctctctctctgcctgcgttctcctggtgctgctctccctctcctcccctgcttcgacctcccgcctttccccaccgtttcttggatttctaggatccagacaaccgcccttgtgagcctgccttcctgcctactacctgcgtacgtacaggagggaccttgggtgatccgggtgcttggtttcttggttctacggctttcgctgctgttggatttgccgagccggagccgacggagatgaccgtcgacgagctgaagctgcaggcaagggccagcggcggccacgacctaaggaccagttccccgtcggcatgcgcgtgctcgccgtcgacgacgacccgacctgcctcaaggtcctcgagaacctcttgttccgctgccagtaccatgtgacaacaatgggccaggcagccactgccctgagctgctgagggagaagaaggaccagtttgaccctgtgatcagcaacgtccacatgccggacatggacggcttcaagctcctcgagcttgtgggcctcgagatggaccttccggggattagtgaagcggcagaagaagagcttttacatacccttacaatgctgattttgatggagatgaaatgaatttgcatgtccctcggacggaggaagctcgcactgaagcgcttaattctcataggggttcaaaataatttatgtactcctaagaatgtgatgggggatacttcaatgcaataatgagcttcccacaaaattacccaaacagcccaccatcagtcagatttacctctgaaatgtggcatccaaatgtctaacctgatgggcgggtttgtatctctattcttcatccacccagtgaagatccaaacggttatgagctcgcaagtgagcgatggacacctgtgcacacagtatggcttcgtatactttgtttacatatcttttccccattgtaatgttactcatctcccttttatgtgtatactttttagagagaaaattaccttgtagtctcattgtttcagtttatggtccaatttacaatggcttcactgtaaatgggaaaacaactcggtaggaatgcttttttgaattataaattatttctatttcatacgatgcttataggtatgtgatgagtcctccaatctgagaagtagagcatggtaaagcactccaagctgctctttcatcgggaaatttataggtgacacttgtgtcatacattgaactatggagtcaaacaaattacatattatccttcaacatttttcaccagtgggaactgtagttattgcgtagaatagatggtatattaatcgttgagagccaatgtttacattaactgttatgcagaagacaatttatgttttattttatatctaactgtactttgttgcagcttgtaggtactgatcacagcacattcaactccacacagattgtccatgtttctttcagtcaccatgatttatcactaggtcattgtgtttgtggccaacgagtattgttctaacagttatgttcccatagctagctagattcattgttgtgttttgttcagggtactttcaccacttctggtatggttctgtctgtaatgtgccagggattattatattgtttttggtttggatttggaatggtttggggtccacaacgatgatgcgtcagagct

SEQ ID NO: 104339 - DNA, 2352 bp, Zea Mays
atgttcctcccgaggcgccggtccacgcgcttcggcctccgcgtggtcatcaaggtcctaccaccgcctcacctcctccttgccgccgtgcggttgagcgccgacgacgttcgggctccggcggttcctgcatggaccggaagagccatctcatactctttctctacagcctttctgatggctcggaacagagccggagccgacggagatgaccgtcgacgagctgaagctgcaggcaagggccagcggcggccacgacctaaggaccagttccccgtcggcatgcgcgtgctcgccgtcgacgacgacccgacctgcctcaaggtcctcgagaacctcttgttccgctgccagtaccatggtacttcccctgacaacaatgggccaggcagccactgccctgagctgctgagggagaagaaggaccagtttgaccctgtgatcagcaacgtccacatgccggacatggacggcttcaagctcctcgagcttgtgggcctcgagatggaccttccggggattaggtactttcaccacttctggtatggttctgtctgtaatgtgccagggattattatattgtttttggtttggatttggaatggtttggggtccacaacgatgatgcgtcagagctgttccaaggattggatgatttccattcccctgctgccaattcgactaggctcgccgtctccgctctgcccaactggcaccaagcagccaatggaacttgagcagccaatggatgatttccattcccctgctgccaattctccgaactgctttgacccttcaactcaatccgcatgtacccagcctattgtggcagcaaacagcgactgggtgcggaagccggaagggagaggcgcttggttgacccagaacggacgacaagacaccgccgggggttcgctgcaaccgcacgcgtggtggccggtgtgggaaggagcccactgctcaagcagcgacgacttccgtaacttctcaggccaagggcatgatgaaatcagtgtttgctatttagcctccttcacaactaagatcatcctacataatagatttagacaacaaaaacttatggagtttgctgaaatgccctttcaggcatgctccatctgtgctacaaggttatgggcttcctgcttgctgccagcagtcttttggtgcttttatattgctattaatttgtttgaaatttattatggtgatgactgggaaggtctttttgaggctattactggttatggccttggtggctctttggccgtgttggtggtggtatttataccaaggctgctgatgttggtgccgaccttgtggggaaggtagaaagaaacattcctgaggacgatccaagaaacccagctgtcattgctgacaatgttggtgataatgttggagatattgttggaatgggatcatatctctttggctcatatgctgaatcgtcatgtgctgctcttgttgtggcctcgatctcgtcttttggaatcaaccatcaatttactccaatggtgtatccccttcttgtcagctctgttggtattatagcatgtctcataacaacgctgtttgcaactgatttcttcgagataaaggctgtgagtgaaatagagcctgctctcaagaaacaacttataatatccactgttgtgatgaccattggcattgcgctcatgttggcttggtcttccatacaccttcaccatttataactttggagcccagaagacagtgcaaagctggcaattgttcttgtgtgtggcggttggtctctgggctggcttagtcattggttttattactgagtactacacaagcaatgcctacagccctgtataagatgttgctgattcctgcagaactggagctgccactaatgtcatttttgggcttgctctgggttacaaatcagtcattatcccaatttttgctattgcgtttagtatcttccttagcttcagccttgctgccatgtatggtgttgttgtggctgctcttggaatgctgagtaccattgccacagaccttgctattgatgcctatggccctatcagtgataatgctggaagcttaagtctgtatgggtgcatcttatcatttatatgtatatctgaaagcttaagtatttttttaaatagaagatgtctggaaactttagtaacgacatgagtttcaggctttcagctatagcagtcttattcgcttttaagacagagaagatttttatttagagtttagaaagagtaggtgctatgggtgcatgttatcatttatgtggggaacatctctggtggaaattaatcagtaacgacatgagttaagacagagaagcttaagtattttttc

SEQ ID NO: 104340 - DNA, 105 bp, Zea Mays
gaaaagaggagcaggaagggcatgatgaaatcagtgtttgctatttagcctccttcacaactaagatcatcctacataatagatttagacaacaaaaacttatgg

SEQ ID NO: 104341 - DNA, 483 bp, Zea Mays
gatctcacacatctcttcaacattgcacaaacatgggtgcctttttcattccttgtgctaagacaataattttagctcattcggggtactgtataatccagagtttctttttcgatgccataccaatcgtttgtctctgcttgctgagacttgaagaaaactttggtgcgttgtctctttttgtttctgtcagattcattgctgccttccagcaatccagctctttaccctttacagtatttcctttccatttgataaatctgtacttttttaggcttgaaatcttctttctctgttctgaggactgctgcaaacttgtaacagatggattaatcgcttcttttcttattttttagggcatgatgaaatcagtgtttgctatttagcctccttcacaactaagatcatcctacataatagatttagacaacaaaaacttatggagtttgctgaaatgccctttcaggcatgctccatctgtgc

SEQ ID NO: 104342 - DNA, 928 bp, Zea Mays
ccctctcggcttctctgattatcgaattttgtctgagtgcgtgcggacgcaggagccggaagagttctcgttgaggagaagcttgttgcgacccaaagagagaggacacatacatgtggacgcgagacgactagagccagaggaggactgggcacgcagaagagcgaggaggacaacgagtcctcacacctcaccgccaggacgtcgtagataattttggttttcttgtgattctctttatgaagtgggtggtacctcaaaagacatagatgatctgttgacttatggcagtcgggcattacatttttttgcatgaaatcgacatctgaggagtgataattttgttttgatcgcttctctattgcaagatttagatggctactatcctttgcgattgatcaagaatggtgagctattctaaggaagcttctgaacaatatacccgctgtcctagagtgtcatagatcagggttgagatgattccatcatacttatacgaagattttcctagcaaggaatggtttgaacaatgttgtgattaggcaagggataatgggtacttgctctgtgatgactcaaaaagaatgagattgatcgtacgtacggggagagttcctccatagacaaagatgaaaaaaagaccttgtatttgatagaatgtgctgatccattcctcaaaccgaatagaaatgtgaggtcggttgtgattaatcttttgatcttaggtaaggtcaaggttctactgggctgctcgctgttgcaggattgtgtagctgttgtagctccaattgagaaatattatcagtattaagctgctttgatggttgcccggtctattgcttgcatgtagcatgcatctccgcggagatccaagttgttatgctttgagctattgcatcaagagtttaagatagtctttatatatttt

SEQ ID NO: 104343 - DNA, 457 bp, Zea Mays
cttataaattggcactgcatttgattctctactttcttatgtaggaatggtttgaacaatgttgtgattaggcaagggataatgggtacttgctctgtgatgactcaaaaagaatgagattgatcgtacgtacggggagagttcctccatagacaaagatgaaaaaaagaccttgtatttgatagaatgtgctgatccattcctcaaaccgaatagaaatgtgaggtcggttgtgattaatcttttgatcttaggtaaggtcaaggttctactgggctgctcgctgttgcaggattgtgtagctgttgtagctccaattgagaaatattatcagtattaagctgctttgatggttgcccggtctattgcttgcatgtagcatgcatctccgcggagatccaagttgttatgctttgagctattgcatcaagagtttaagatagtctttatatatttt

SEQ ID NO: 104344 - DNA, 2987 bp, Zea Mays
ctgtctccacccatggccggccgcgcccggcacccgcccttccgccttatgttctacctcatcggcctgctggcctcgctcatcccggccacgtcgcgggcgcagccaccggagacggtcacggtggggctcatcatcgacgccgattcgcccgtcggcaggatcgccagcaccaccatcccgatggcgctcgacgacttctacgcggccttgcccaactcctcaacgcgggtccagattctgcagcacgactccggcggggacgtcgtcgccgccgcgtccgccgcgctgcagctgatgacgacccagggcgcgcgcgccatcctagggccgcagtcctccgtcgagtccgccttcgtcgcggacctcgccacgcgcgccgaggtccccgtcgtgtccttctcggcgaccagcccctcggtgtcccactccgaggcgcgcttcttcgtgcgcgccgcgctcagcgacgccgcacaggcggaggccatcgccgcgctcgccacctacttcggctggcgacgcgtcgtgcccatctaccaggacgacgactacggcgcggctttcgtgccgttcctcgtcgacgcgctcacggcggtgcgcgcggaggtgccctaccgctgcgcgctgccctccggggcgtccagggacgccgtcgccgccgcgatgtatcgcctcgagtccgaacagacgcgggccttcgtggtgcacgcgcgcccggcgctcgcggagctcgtgttcgccgccgcggtggaggctgggatgatggcggagggctacgcgtgggtcatcaccgacgggctcacgggcctcctcggctccatccatccgccgcagggcgtcatcgggctcgcgccccacgtgccgtccaccgcgcgcctgcgcgacgtccggaagcggtgggcgcacaagttcatgcgccaacaccgggacgccgatctggctcaagccgagatgggctgctacgcgctgtgggcgtacgacgccgcatgggccgtcgcgtccgccgccgagcgccttgttagccccggtgaccagccatcgctgcaggggcttgtcggcggcaggagcggccccacggacttctccgggctcggaaagtcgatgtccggggccaagttcctcgcggcaataaccagcactacgttcgagggcctcggcggcaggttcgagctcatcaacggcgagctggcggtgccggccttccggatcgtcaacatcatggacgacgccagggagcggggcatcggattctggacgcgcaagggcggactgcacaggcaactggggcgccgcgggatcgcgtcgaacagcgggctcttgccggtgatctggccggcggactcgaccgtcgtgccgattggttgggtccagccgacgagcggccggaagctgcaggtggctgtgctggggagagtcgaccctggctattggccgatcatgcacctcgacgtcgacccagctacaaaccggacggtagccggtgggttcgtcatcgaggtgttcgaggcggcggtgcgtctgctgccctacgcgctgccgttcgagtacgtgctagtgggctccatgcgctacgacactctagtcgagagggtcggcaaaggggagttcgacgcggcggtggcggacatcaccatcacggcgaaccggtcgcagcacgtggacttcacgctgccgtacatgtcgtcggggatctccatggtggtgccgatgcgcgaccagcggagcaagcgcgccgcctgggtcttcctcaagccgctccgctacgacctctggctcatcagcttcgctttcttcgtcttcaccggcttcgtggtgtgggccatcgagcaccgcagcaacgaggagttccgtggccccccatcctaccagatcggcaccctcctctacttcggcttttcgaccctcgtctttgcacacagggagaacctgaagagcaacctgtcgcggttcgttgtggtggtgtgggtgttcgtggtgctcatcctgcagtccagctacacggctagcctgacgtccatgctgacggtgccgcagcttgagccggcgatcggggacttcgcctcgctgtggccggggacggacaaggtggggatcatgaacaactcattcatgcgggaggccatgaccaagacgggcttcccccagtacaggctcaggccgtaccaggccacgcagagcttccacgaggcgctgctcaacggcaccatcggcgccatcgtcgacgagacgctctacctcaggctcttcctcaactcctactgcgacaacttcacacagatcgcccagagcaacaagaccggcggcttcggcttcgcattccccaaggggtcgccgtacgtgggggacctgtcgcgggcgatcctgaacctcacggagagcgacgagctgagctcgatcgagcgcaagtggttcggcgacgcggacggctgcgcggcgcagggcagcccgttcacgtcggccagcctcagcttcgacagcttctggggcctgttcctcatcaccggcgccacctccctgttctgctgcgcgctgcacctgctcctcttcgtcgtggccaatcgccggcggatctgtgcggcgcgcgtgccctggagaatcaggctccgggtcgtcctcaagctcctcgacgacaaggacctatcgtcgcacacgttcaggaccatcaaggatggcggcgggtcggtggccggtcggagcgccggcgcccacgacgcgggcgcctccccggccgtcgcgcgcatcgcagccggaagcccgctcagcgtgtccaaccacacgtacgacatgagcgagtggtcatttggtgcgcagagcccggcgcctgcagctgcaggtgagatcgagctggctggcgccggcgaggcaggggaggtggcctcagctcccccaaccctcgcggcggctcgcggctccagtgatcaaagtggcacagtcgtccatcaggccagtaactgatcaaggtcttctctgagtgctctggcaggaaa

SEQ ID NO: 104345 - DNA, 1220 bp, Zea Mays
gaattcagaggaccgccagccagtcaaattggatcagtcttctacttctccttctcaacacttgtatttgctcatagggagaggattgtgaacaatttatcaagaattgcagtagttgtttggctttttgtggttctaatattgcagcagagttataccgcaagcttaagctcaattctcacggtagaacagctccaaccaacagtcaccaatttagatgaagttatcagacgaggggattatgttggctacctcaatgattctttcatgcctaaccttttgaaaaggttgaaaattaacgaaacaaaaatgagggccttcagctctcctgaggagtacaatgacgccctatcaaccggaaaagttgccgtcattgttgatgaaataccatacctcaaagtgtttcttgcgaagtattgccacaactacactatggttgggccaacttacaaatttgatggatttggttacgcgttccctcgaggctctccacttacacctgaaatttcaaggggaatactggaactagcatcaaatggcagaatggatgaactggagaaaaagttgtatggtgatacatcgtgcccagacaaagatgactcccaaacttctagcagccttacgttgcatagctttcttgggttgtttatcatcactggggcatcttctttactggctttaattttgcatgtcattataaccctttatgatcatcggagcaattggatcaatggcagtggtcagatatcatggcgtgaattgcttgctattctcgtcaagatctttcatgagcgtgatagcgctaatactccagatgaagaggtgcctggaatggaagatatagatcctgctacagccgagagtccatggagcatgtctaatcacgtcatcgagaacgttgattcagacactgataccggaagcacaccagaaggagaaggaactccaggcagggaagttgcgaatcagggtcctggtccactatcatttgcatacatgcattctgagggggcaatggagtaacatagcattctttcatctcgcgcttccagcaccaagatagaactctttggtcatgtcgcgtactgtacagtgaaattgatttagatgtatcgcctgcctctagtttcatgtttaatacaagtgtgtgttaacatgtaccgctggctgttgtcatgactagttaactaggaaatttaacatagtaatatctttgttga

SEQ ID NO: 104346 - DNA, 281 bp, Zea Mays
gaactgccaagccagtggccgacgtgctctgtcctcaccgtccctgctcgttcccctacagcaagttgttggctctaagatgccgggttccctccacctagctccgccaccggtgctcggcttcatccgcgacggtgtcccggtgtcgagcaccttgcccagctccgctactcctgactcgccggcaacctgtggctcggacttcaccatcggctctttgtgtgcttcgctgcgccagatcgccgcgtcaccgtgaagctaaatgccttgcctttcgctgc

SEQ ID NO: 104347 - DNA, 2232 bp, Zea Mays
ttcgcgccgcagacagtgctcgcgaaacgagcgttcggcggcaacggcagcggccagccgtgagagaagagatgatgctgataaggccgccgcggtttctctccccttcgccctcgccagggacacgcgagccccgccttcgccggcctctcgatgcctccagaatcttctcctcccctcgtcctcccggtcgccgttcccgcccccgcccccggctcgtctctccgtccaccgatctccgccgcctcactgcccgcatcgtcgacctcacccgccgcaggcagctcgcccaaatcatggaggaggtggaagcagcgcggcgtcgtgtgcgtgggggcgggttgctcaacaccatcgtcatgaacgcggttctcgaggcatgtgtgcgctgcggcgacgtcgaccgagcgctccggctcttcgaggaaatgcgcgggcccatggggtgcggagtcgacgatgtttcctacggcatcctgctgaagggcctgggtatagcaagaaggattgatgaagcattcgaaatactggaatcaattgagaaagattcttctattggggggcccaggctctctcctcatctcatttgtggttttctaaatgcccttatcgaagcaggagatatgaggcgtgccaatgctcttgtcgcccgtttccgcatggtcctttacgaggatcactctgtcttactatacaacttactgatgaaggggtatattaagagcaacttccctctcggagctttgactgttaaagacgagatattgcgtcaagggttgaagcctgatagattgacctacaataccatcatttctgcctgtgtaaaatcagcagagaatgataaagctatccaatttcttgaagatatgaaggtgtcacacaagtgttggaaaggaagaagctaatacagaaagtaaccctgaacttcttccagatgctgttacctacacaacattactcaagggtttaggaaatagccgtgacctttattcagtcgtgaagattgttgtggagatgaaatcttcactaatttcaatcgacaggactgcatacactgctatggtagatgctttgctagcttgtgggtccatcgacggggccctttgcatttttggtgatataataaagcatgctggcaagaacaatgatttgagacctaaacctcatctttatctttcaatcatgagagcttttgctaccagaggtgatgttgatatggtcatgagatttaacaagcgcatgtggctggattcagttggatcaattagccgtgccgccaaagaagagacacatgagctattaatggaagctgccataaataataatcagatagatttggctagagggcttctaagaagaatagtaaatgagaaagaatgtttctcttggacaagtagagtaggcctggtcgcagttaaagttgaaagcttatctggattcaccaactctcttctaaggccccacgtatttccacagattatcttgaatgatccagttgagaagtatatggttccatttcaagaatctcgaccattacccgccgacttaatattgcggaaggttgtgatgcgtttgttgaaagagcgtgcagttcctcttgtggatgattggggaggatgcattggcatagttcaccgcgatgattgtaccaagctggacgcacctcttatttcaatgtctagagggccacctctgtgcgtacctacttcaaccaccgtggagcacgtcattgacctcctcctgagaaacaagtccgagatggtgatcgtggtgaagagtggtaacatgtacgaaggcagctacacatccagctcaagacccttgggcgttttctccctcgccatactatggagcttcaccggcgactactcgtcaggatcagatgatgtccccgacgcaggcatctcccgggcagcaaaacccaaaccagacgccgaggcctgcaaccacagctagtttggtgtttcttttgctcagcttatagcaactccgcgtcgtgttgccgggcaaactagtcatgtaatggtcctccagttggacaaggggtgcatgcgaaaaaaggttttgatcctgacctgctgtggctgcgtgctgcgtacgatgtcttctgatgcacagagcgaaagtgacagtggactggagatttcctcccagccttcggttgaggcgccccaccgcgcagtgatggtcctgagtcctgaccggtttggtggcatgtggcatccctgctct

SEQ ID NO: 104348 - DNA, 2210 bp, Zea Mays
ttcgcgccgcagacagtgctcgcgaaacgagcgttcggcggcaacggcagcggccagccgtgagagaagagatgatgctgataaggccgccgcggtttctctccccttcgccctcgccagggacacgcgagccccgccttcgccggcctctcgatgcctccagaatcttctcctcccctcgtcctcccggtcgccgttcccgcccccgcccccggctcgtctctccgtccaccgatctccgccgcctcactgcccgcatcgtcgacctcacccgccgcaggcagctcgcccaaatcatggaggaggtggaagcagcgcggcgtcgtgtgcgtgggggcgggttgctcaacaccatcgtcatgaacgcggttctcgaggcatgtgtgcgctgcggcgacgtcgaccgagcgctccggctcttcgaggaaatgcgcgggcccatggggtgcggagtcgacgatgtttcctacggcatcctgctgaagggcctgggtatagcaagaaggattgatgaagcattcgaaatactggaatcaattgagaaagattcttctattggggggcccaggctctctcctcatctcatttgtggttttctaaatgcccttatcgaagcaggagatatgaggcgtgccaatgctcttgtcgcccgtttccgcatggtcctttacgaggatcactctgtcttactatacaacttactgatgaaggggtatattaagagcaacttccctctcggagctttgactgttaaagacgagatattgcgtcaagggttgaagcctgatagattgacctacaataccatcatttctgcctgtgtaaaatcagcagagaatgataaagctatccaatttcttgaagatatgaaggaagaagctaatacagaaagtaaccctgaacttcttccagatgctgttacctacacaacattactcaagggtttaggaaatagccgtgacctttattcagtcgtgaagattgttgtggagatgaaatcttcactaatttcaatcgacaggactgcatacactgctatggtagatgctttgctagcttgtgggtccatcgacggggccctttgcatttttggtgatataataaagcatgctggcaagaacaatgatttgagacctaaacctcatctttatctttcaatcatgagagcttttgctaccagaggtgatgttgatatggtcatgagatttaacaagcgcatgtggctggattcagttggatcaattagccgtgccgccaaagaagagacacatgagctattaatggaagctgccataaataataatcagatagatttggctagagggcttctaagaagaatagtaaatgagaaagaatgtttctcttggacaagtagagtaggcctggtcgcagttaaagttgaaagcttatctggattcaccaactctcttctaaggccccacgtatttccacagattatcttgaatgatccagttgagaagtatatggttccatttcaagaatctcgaccattacccgccgacttaatattgcggaaggttgtgatgcgtttgttgaaagagcgtgcagttcctcttgtggatgattggggaggatgcattggcatagttcaccgcgatgattgtaccaagctggacgcacctcttatttcaatgtctagagggccacctctgtgcgtacctacttcaaccaccgtggagcacgtcattgacctcctcctgagaaacaagtccgagatggtgatcgtggtgaagagtggtaacatgtacgaaggcagctacacatccagctcaagacccttgggcgttttctccctcgccatactatggagcttcaccggcgactactcgtcaggatcagatgatgtccccgacgcaggcatctcccgggcagcaaaacccaaaccagacgccgaggcctgcaaccacagctagtttggtgtttcttttgctcagcttatagcaactccgcgtcgtgttgccgggcaaactagtcatgtaatggtcctccagttggacaaggggtgcatgcgaaaaaaggttttgatcctgacctgctgtggctgcgtgctgcgtacgatgtcttctgatgcacagagcgaaagtgacagtggactggagatttcctcccagccttcggttgaggcgccccaccgcgcagtgatggtcctgagtcctgaccggtttggtggcatgtggcatccctgctct

SEQ ID NO: 104349 - DNA, 125 bp, Zea Mays
ccttccttatctgcagtggcggagctctataaaattaacacctcgggccactctataaaactttcaaggttactttaaacaacccctaatatattgtgtgactaaatataccgctaaaacaaaat

SEQ ID NO: 104350 - DNA, 225 bp, Zea Mays
taattcagtgccattttggtctttttatttgtaattttttttacatttatgtatatattgacataagggcgggtctggtgcagcgattcatcctatcgtctgtaagcggaaggtgtttaaagatacccttcctcagatcacgtacggtgcgggaaacttacggcactaggtacgctcttttttatgtatatattgacacatattttgatttttatactaagagac

SEQ ID NO: 104351 - DNA, 1088 bp, Zea Mays
gtcaaaagaaaggccgcccgaacgagtgcccactgcgggctgcggcactgcctcaccactgcccagtgcccacaatggcgcgcgctgaatcgcagtttcccgcctcctttggagacggagagggtgcacactccaaccacgtcagtaatccacggcaaagccatcgccaccgtctatttgtgatgtcaccaacgcatcccatccctccacgacagcaatccgcggcacatgccgatcgacgcccgctgctccgttctacaaatacacctcaacccactcttgttcacagccaccgaaatcttccgtctccaaatcctcctagcgaattcaccacagcttctcaccaccgctaccttcgatggcacccaaggcggacaagaagccggcggcgaagaagcctgcagaggagcccgcgacagagaaggcggagaaggctccggcggggaagaagcccaaggccgagaagcgcctcccggcgggcaagtccgccggtaaggagggcggcgagggcaagaaggggaaaaagaaagcgaagaagtccgtggagacctacaagatctacatcttcaaggtgctgaagcaggtgcaccccgacatcggcatctcgtccaaggccatgtccatcatgaactccttcatcaacgacatcttcgagaagctcgcggccgagtccgccaagctggcgcgctataacaagaagcccaccgtcacctcccgcgagatccagacctcggtgcgcctcgtcctccccggcgagcttgccaagcacgccgtctccgagggcaccaaggccgtcaccaagttcacctcttcttaaggttcatagtactaggctgggtggtgttggtagacgtggctcaatttatctggtaggggtagtgatggatgatatgatctgcgtctatttgagctgttaagactgatgaacattgttccacgtcacgttgtgtttgatggacattgttccagatcacgttgttaagactgcagaactgtgtctgacatggaacaagtatgatacttgaaatttctgtgagtgcattgaaacgtgaaatctgcagtccttaaaaaaaaaatctgaaatacaa

SEQ ID NO: 104352 - DNA, 676 bp, Zea Mays
actcgtccgggactacggttccaacttgaggctgggctcggagaggcggcggcgatgtctgggcgcggcaagggcggcaagggtctgggcaagggcggcgcgaagcgccaccggaaggtgctccgcgacaacatccagggcatcaccaagccggcgatccggaggctggctaggaggggtggcgtgaagcgcatctcggggctcatctacgaggagacccgcggcgtgctcaagatctttctcgagaacgtcatccgcgacgccgtcacctacaccgagcacgcgcgccgcaagaccgtgaccgccatggacgtcgtctacgcgctcaagcgccagggccgcaccctctacggcttcggaggctaggctaggcgcctcttcgtagtcggggactggttaggggacatgtctctgtgtgatgctttctgaggtagtattgctgcaatagctgtgtaatccatcgcttctgcaatgaagcgctttgaagcatgctacgtatgttgtgtctgtgggtgattgtatttctggtagtaacagtgattcttcctgaattttggataatacaagctcattcgcagtagtttctgatgtaatcatgtcttatcgtttgagagatgaattgcttttggcagcctttgctggtattctcatgctttttttatgcattaggatatta

SEQ ID NO: 104353 - DNA, 1701 bp, Zea Mays
atgcctaaaaaggctcggatggaaagcccagcatttagcactagcagcccacaaccatccgccaacgcatcaaacggcccaacccaaactttcctgtttgtccgtgtccccagaaatcctaaactttccacgcgatttgcacacagcactctccgcgcgcaccaccgccaaaaacctcaaaacccaacgcgctcctcgatccgcattgcctcttctccaccaataggaatcgagtctttcccatccaacggttcatcccacgcctcgcgcccctcacgcggatcgtgccccatccaacgcctcccacttcaccttgcaactctatattactcctcgccccacagtccgcatctccatccaacccatcagtacccaaccttcccctacaccagaaaaatccccagttctttggtccgcgtcagagaggcggcggcgatgtctgggcgcggcaagggcggcaagggtctgggcaagggcggcgcgaagcgccaccggaaggtgctccgcgacaacatccagggcatcaccaagccggcgatccggaggctggctaggaggggtggcgtgaagcgcatctcggggctcatctacgaggagacccgcggcgtgctcaagatctttctcgagaacgtcatccgcgacgccgtcacctacaccgagcacgcgcgccgcaagaccgtgaccgccatggacgtcgtctacgcgctcaagcgccagggccgcaccctctacggcttcggaggctaggctaggcgcctcttcgtagtcggggactggttaggggacatgtctctgtgtgatgctttctgaggtagtattgctgcaatagctgtgtaatccatcgcttctgcaatgaagcgctttgaagcatgctacgtatgttgtgtctgtgggtgattgtatttctggtagtaacagtgattcttcctgaattttggataatacaagctcattcgcagtagtttctgatgtaatcatgtcttatcgtttgagagatgaattgcttttggcagcctttgctggtattctcatgctttttttatgcattaggatattagaggtctgttgagttcgcaattatttagttttttctatcttttatttaaatttggtcgacttagcttacgtaaaatttgagcagcagacaggccctagatgcatcaattgcgtgaataatgttctttcttccagtgttggctacttaccaagcctctctatttcgtttccttcgagttgcatttcagttttcaaaggcctaggagtaatttgaaacatagaaaactgaaatgcaactcgtaaaaagtgctgaatcacagcggagcggtcgtgcaatttgttgtcaaaatacgtgagaacaacgctccccagactgcatatcaagactttggaagcgggacaaattgtctcgaatcttttgaaacgaaattgtctcatcaagccacgttttgttctgtctgttacactaattttgttttggaaaggttcagttccggctgtactgtttgttgagaacttgttctcaaatgctatgaattagaacaaggcaatataaaatgttaaatatcaatgtccttcgtccgtcgaagcattatctccacaaagatttaatgtatttcggacgaaggtcacgagcataatattaaagataatacagggtaatgtaaaacgtaaaacattaaagataaatatattggaaataaa

SEQ ID NO: 104354 - DNA, 267 bp, Zea Mays
atgtctgggcgcggcaagggcggcaagggtctgggcaagggcggcgcgaagcgccaccggaaggtgctccgcgacaacatccagggcatcaccaagccggcgatccggaggctggctaggaggggtggcgtgaagcgcatctcggggctcatctacgaggagacccgcggcgtgctcaagatctttctcgagaacaccgtgaccgccatggacgtcgtctacgcgctcaagcgccagggccgcaccctctacggcttcggaggctag

SEQ ID NO: 104355 - DNA, 261 bp, Zea Mays
atgtctgggcgcggcaagggcggcaagggtctgggcaagggcggcccggcgatccggaggctggctaggaggggtggcgtgaagcgcatctcggggctcatctacgaggagacccgcggcgtgctcaagatctttctcgagaacgtcatccgcgacgccgtcacctacaccgagcacgcgcgccgcaagaccgtgaccgccatggacgtcgtctacgcgctcaagcgccagggccgcaccctctacggcttcggaggctag

SEQ ID NO: 104356 - DNA, 1076 bp, Zea Mays
ataaataaccgtcgtatgcctatgcacttctccaccaccaccactggacgtcagcctagcaattagctcatcgactccagattggagaactcgacaccatgaaggtgctgatcgttgcccttgctctcctggcgctcgctgcgagcgccgcctccagtacaagcggcggctgtggctgccagacaccaccgtttcatctaccgcctccgttctatatgccgcctccgttctatctgccgccgcagcagcagccgcagccatggcaataccccactcaaccaccgcagctaagcccgtgccagcagttcggatcctgcggcgtcggcagcgtcggcagcccgttcctgggccagtgcgtcgagttcctgaggcaccagtgcagcccggcggcgacgccctacggctcgccacagtgccaggcgctgcagcagcagtgctgccaccagatcaggcaggtggagccgctgcaccggtaccaggcgacatacggtgtggtcctgcagtccttcctgcagcagcagccgcagggcgagctcgcggcgctgatggcggcccaggtagcgcagcagctgacggcgatgtgcggcctgcagctgcagcagccaggtccctgcccttgcaacgcagctgccggcggtgtctactactgaggaaactatgtactgtagtaataatgtaatggagccgctggctagctacctagctcgctagtttactcatttagcggcgatgagtaacgtagtgtcacccatcaccatgggtggcagtgtgagcaatgacctgaatgaaccattgaaatggaaaggaataatatataaggaaaaaagatgattggaaactgatagttggttctgagtcttgctatcgaggatgggagatacaactcttttatttaaggagggatgagagaaatgttggtggtcactaaaaaaaggaggggtgttgggggattgtcgaggcaaaaagaaagtatactaatattttcgatatgacagtttcatggacatagagtgagatattcaattcggagaccgttggagatactcctgcaagacctcaaattattagggctcctt

SEQ ID NO: 104357 - DNA, 2938 bp, Zea Mays
aaagttttgtaatatcttaaattatcaagcattaaacatttgcaccattgttttatgtgtcagcatcctttaaacaagacaaaatgataggcagctcacaggttttatcacaccctgtgctagagagcggtttttgtgtacacacaggggagggggcatggatgtctggaccatccgattccatcaaaaaacaacctaagccagactaatgagaccttaagttctaatcgctaagtacaaaacttcctaccgaatgtcaatactttcttctgatgcagaataaagtagctactagtgtccatagttgttaaggcgtcgcctaagcgctaaggcgaggctcaggcccaaggcgtcctgctcgccttactttcttggctaaggcgacgctttagggttcagggcgtcgccctagcgcatcataggaagataaggcgccgccctgcggacgccttggaccggattcatagggttgaagaggttttgcaatccccaatcctttctgttcgttgtccacgtaccagagaaggacgcggttagggcttcagtgctccaggtgacggcggctctcagtgtccaccggcggcggtggctctcaattcaccggcggtagcgctcccctgccgcgggccgcgagcccgcgacctctccctccccggcgaagtccccttccactgctccctggtgaggctccgcccccctccccctctgctgatctgctctctgcctctctattctcttctctcccccatctccctttgtattcagttcatttcagttactgctgttagcctgttattcagttcagttagtcccatttccctttgtaggtcagcgatggagagcgcaggctctgctcccgctgcctctgctcttgtggatgcaaacactgaccctatggtagatccaaagcacagagcaaagtctaatgatcctggatggaaatatggatattggacagagattgggaatcgagataaggtcacatgcaacctttgcaagaccatgacaatggtaggaatcaagaggttaaaagaacatcttgccggtggttatgcggacacattaatgtgttctaagactacaactgagattagaaaagatatgaaggcatatttcaagaggtctaggcctattttccttgatgatgatgatcatgatggtcaggggcagcaaggggaagaggattccaccacatctatgcaacaacctagctcggggacagctgccaaaaggaagagagctgcatttcagtttagaacagctgcacagccacagacatcaaacaaggaaaaagaaaaagggaaaatcacaaccttgcttcgaagaactcccgaacaagttgtggatgagaggcgatcctcaaggtcacaccaccaaaccaccatggaaacatgcactaagtctaaggctgacagagattatgtcaacaagcaatgggctatgtggttctatgagtgtagtgtacattttaatgccattaattctagacagtttcacattgcttgtgaggccactgctcaatatggtactggatatgttcctcctagtattcatgatgttaaagagcctttacttgctgagtgtgtgaaagatatgcacccaaaaaggaggaaccgattgctacacaaaaggctaaatgacttagtctttgtatcatactgccggaagatgcaaaataggttccaaaagaggagggagacatgtggcacaagttatgacccattagtgcttgaagattttgattgggacaatgagtgggtacactcatcggttatacacgctggtagggatgatggtgagcataacttgacatgggaacaagttgataatgccattggagcatctgagtcccttcgaggccgcaactttccaagacaagctcgtatgcatgcaaacacctaccaaaggcgtagtacaatgagggcacaagaagaacaaggtgaggatgatgaaaatgattcaagcaatgaagtggtggatccacaagatgacattggtgtgagtgctagggatgaagcaaacgaggcggaagatggtggagaagagaatcctacaccccatgatgagtttgatgatgacttttgagattgaggcttgagagatgagagtgttatctactctactagactactactactactattgttatctattacttatgttgaacgttatgtctatgatgttggtttatgttgaacttgcactcctatttgctactataatactattatccctatctatttgagactatattcctatatattctgttcttattgcctttttttattagtaaggagtcgcctcgccttacgccttatcgcttaaaaggtgaaaagggggtcgcccgccttaccgccttaacaactatgctagtgtctacacatagcagcataacttttcactttcatgcaccatacaagcatgaagacttccattaaaacaaaccaaagtgattgcaggcaacagcctggatgttgagggcaagagcctggatgttgagggcaccagccccctgggcaccatacaattatcaccccacgataataaggtagctagatatgtggtgtgaatagaccaaatgatgaaacaatgaatattgcaaatgatgtgctatgattttatgtaaggatatcaccatcactgcttatccagtatttttctatacgtaagtgtgccttggtgttgcacatctaatccgaatttgttctatgatccttaccaaaaatatctgtgattaagagcataaatgtaacattgcatagatcagacttaatattacataagggcaaacctagtaccagaggctcccacatgagtagggtctagggaaggaataaaccgaggcatgctttccccccggcaaatatggagaggatgcttcgaatccatgaactggtgactcagtgagacagctatcctcaatgcaccaggtctgccc

SEQ ID NO: 104358 - DNA, 1251 bp, Zea Mays
atggagagcgcaggctctgctcccgctgcctctgctcttgtggatgcaaacactgaccctatggtagatccaaagcacagagcaaagtctaatgatcctggatggaaatatggatattggacagagattgggaatcgagataaggtcacatgcaacctttgcaagaccatgacaatggtaggaatcaagaggttaaaagaacatcttgccggtggttatgcggacacattaatgtgttctaagactacaactgagattagaaaagatatgaaggcatatttcaagaggtctaggcctattttccttgatgatgatgatcatgatggtcaggggcagcaaggggaagaggattccaccacatctatgcaacaacctagctcggggacagctgccaaaaggaagagagctgcatttcagtttagaacagctgcacagccacagacatcaaacaaggaaaaagaaaaagggaaaatcacaaccttgcttcgaagaactcccgaacaagttgtggatgagaggcgatcctcaaggtcacaccaccaaaccaccatggaaacatgcactaagtctaaggctgacagagattatgtcaacaagcaatgggctatgtggttctatgagtgtagtgtacattttaatgccattaattctagacagtttcacattgcttgtgaggccactgctcaatatggtactggatatgttcctcctagtattcatgatgttaaagagcctttacttgctgagtgtgtgaaagatatgcacccaaaaaggaggaaccgattgctacacaaaaggctaaatgacttagtctttgtatcatactgccggaagatgcaaaataggttccaaaagaggagggagacatgtggcacaagttatgacccattagtgcttgaagattttgattgggacaatgagtgggtacactcatcggttatacacgctggtagggatgatggtgagcataacttgacatgggaacaagttgataatgccattggagcatctgagtcccttcgaggccgcaactttccaagacaagctcgtatgcatgcaaacacctaccaaaggcgtagtacaatgagggcacaagaagaacaaggtgaggatgatgaaaatgattcaagcaatgaagtggtggatccacaagatgacattggtgtgagtgctagggatgaagcaaacgaggcggaagatggtggagaagagaatcctacaccccatgatgagtttgatgatgacttttga

SEQ ID NO: 104359 - DNA, 95 bp, Zea Mays
aaaagtcacacacgccaagctagaatctctattttacgaggagagtgtataaaatacaataaatgtaataaatcatttatcttctcataggactt

SEQ ID NO: 104360 - DNA, 2115 bp, Zea Mays
cacgcgaggcggaaggggaggcgagtggcgcgggccccactgcagctactatctcctttggcgtcgctgtccagtagtgcgtcagcggctcagcgcagcgtcgcttccaattataagtagcgtggccagctaccatctccccaacctcgcctccccccactccttccctccctccctcgctcacccagtggggcagccaaagccgagccgcaaccgcaaagatcttgcgcggcctcctttccccagctcgtcactgtgccgctcgtgccatccaccctcggttcacccaaccaacaatccatccgccaccacaccccgctgcggcgatgtgcggcggcgccatcctctcgggtttcatcccgccgtccggggtgccggcggcggcagcggcggccaagaagaaacagcagcggcgtgcgacggcggacctgctgtggccggggcccggcaagaagggagcgccccgggaggaggacttcgaggccgacttccgcgagttcgagcgcggcctcggagaggatgacgacgtggacggggccggcgacgaggtccaggagcttcctctgccggagccggcgaggctcgccttcgccgccgcggttggggcgccgcgcactgcagttgacggcgtgatgactccaaaggatggtgaaggagacatgcctactaccgctaccaactcagcagcaaataagcgcaggcggaagaaccagtacaggggaatccggcggcggccctggggcaagtgggcggccgagatcagagaccccagcaagggcgtgcgcgtctggctcggcacatacagcaccgccgaggaggcggccagggcgtacgacgccgaggctcgcaggatacgcgggaagaaagccaaggtcaatttccgggacgaagcggcggcagcagcaggtgctcagaaggcaccagccgcaactactccaactgcttgtggcaacgcagcgaggctaggtcctccacctccaccgccgaagttccgtgctgacgaggttttcgggaacatgaacggtggcactggcagcaacgatctgttcgcgattatgttcgcgttcagtgacagtagtagtaaggtcgttcgtgtggagccaggtgagggcgccgccggtttcctccccgcagatctgttgcccggcagtaagaggtctgcggctaacatgctgctgctctccgaccagagcagcgactcgtatggctcttgtgacttggggtgggagtgggactgggacgatgacaccatgacctcagactacgcctcagtctttgctccagctgctcccagtaacgttgtgccagcatggtacacgcaaggtggaccggtgtcgaagagaacgaggagcagctacggctacggtgcggccatgccgggcggctttgaccctgagacgaactaccagtaccagccgttgccttatgtcgtcgagagcagcccgtcagacggcgcgtcgacggacgacatggactgccttcaaatgatgcgggctggtgatgttccacaggatggggcgagcagtggtggtggtggcggcgacggcggcgatatctggagccttgacgagctgctcatggccgctggcgcttactgagaaaagctatgtgcatcgcattcgcatgtgctagacggctacttgctgtgccgtgaatggagtgtttctcagcttcgttttgcttttaattttttgttatgccaggtctcctgcttgtgcttgtggtgatgatgcaggagagccatggtgggtactatgcttttgctgccagtggaactgtaagacaatgtttatatagtatctatactatgttggtgcgtcgatggttcatggttggttggaagcgagtttgagactgattcagtaatttaccttgtctacatatatgcctgatcaactcgattgcgcgtactgcgatactgcatgttactaatgtgtatgtggtgtgcctgtactatagactgcaggtctttgtctggaagcactcgatctcgctttctacgcaacatttcttttctgtttcttgggggaatggtaggtgccagccaaggccgatggtctgtgtcaccagaaatcgagaaagatctagatgacctaaacaaggttgctgtttgcc

SEQ ID NO: 104361 - DNA, 903 bp, Zea Mays
atggatgatcgtggtggcgctagcagcagcgggagcagcagatggcgtgggtgtcgcgacaaggagagcagctatggccaccaccaccactggcctcctccgcactcagctagatgcctctgcctctgcctgctgctctcgctcaccctcctgctcgccgccgccgccgcgctgctggccgtcttcgtcacgaggctgaagaagccggccttctacctgcagtccatccagatggacaggtccttcagcctgctgacgtggtcgtcgaacccgaaccgcagcgcggacgacgggacggcggcgccgtgcgcggtggcgtcgctggtgttcgcggcgcagaacctgaacggggtcgggatacggtacggggcgacggtgctggacgtggcgtacgcgaacgagtcggtgggcgccctggacgtgccggcgctctaccagcccccgcggagcgccaacgtgacggtgctcgtgcacgccgtcctcgcgcagcggaacgtcacccggctcctcgtgggcgagctgtcggcgcagaggaggtacatggaggtcagggtcgccggccgcgtcgacgcccggacgcacatcatgaacgtccctcttcccaaagttcagttttcgctggattgtagatttggagctaactacaccgaaattgtgctacgggagggaatcgagtccgtgatgacacgcaaggctctcgtcgtaccttcgctgcctcacctctcgcagaagtgctctatcaagattagcttgaggccgcgacgagcaaagggaacaagtcttgacgatttattaggctgctgatattaaagattcacagattatttttttacttagggctagggtggtaggggagaagaattcttttcagtgtctcaagatgtaaatacacatgatctggtc

SEQ ID NO: 104362 - DNA, 1000 bp, Zea Mays
tccacctttgccattgccacgagcagacgaccttcctcgcctcctctgctctgtcaagcttctcgcgcgcgcgttctctctctctccatccacttcttgatcgagagacggcaatggcgaagggcgggctgagcaagctcaagtgcatgctcaagaggtggcactcctcgagccggatctcgcgcacgccgtcagggtgctcggcgcgctcctcgcacgacgtcggcgacgctggcgccggcttcgctctggagaactcgtggaggaagggcgtggctgcctcgtccgtcttcgccttcggcggcggaggcacggggtcggcgtcgttccacggcgccgacggcgtgcccccgggcctccacccggtgtacgtcggcaagtcgcgccgccgctacctcatcgccgcggacctcgtcggccaccccctgttccagaacctcctcgaccgctctggcggcaccggcgccggcgggaccgtcgtcggctgcgaggtcgtgctgttcgagcacctcctctggatgctcgagaacgccgacccgcagccggagtcgctcgacgagctcgtcgagtattatgcgtgctgatcgcctgctcacggtcacgtacggccatgtcggtccgatccacgatgccggcagcggcaccgagccgagctcgacggccggagtcaaggggtaattaattaatctggttcttttgtttaaggttagggggtagagttgtaatagactcaggattgcgagggcagggagtaagacgtgtggagatagttaaccttggggtgtttgtggtaattatctcgagatagcccgtgtaattaccgtgcacccaagagaatgctctcccggggcagttaattagtccttgatgtaatgtaatggcttgcatgttaatttcttcttctgtttctttgaagcgtaattgaataagattaggaatgggtgtatccatgtacattatatttcaccattgtatatgaagtccgtcctcatttctttgt

SEQ ID NO: 104363 - DNA, 546 bp, Zea Mays
atgggcgacgacgacggcgcgaaggctgcgacgggcgccaagcagatggtgcggctgcgagagctgctgcacaagtggcagcacctgatggcgctggcggatcagaagcagcagcgggaggaggaggaggatgaccacgccgccggcggcggcgtgccggaggaggcagtggcgccggcgatcccgccgctcgtggtgcggcgtctgcggcgcacggagacggcggagtccgtgtcggacgacgagagctgcggccacagcccggagccgccgccgccgccgccggacgttccccggggctactgccccgtgtacgtgggtgccgagcagcggcggttcgtgatcccgaccggctacctggcgcaccccgtgttccggctcctgctggagaaggccgaggaggagttcgggttccagcaccaaggcgcgctcgccatcccctgcgagacggaggccttcaagtacatcctccagtgcgtccagcgccacgacaggcgtggcgacgacgaagcggcgaaccaagaaccggcaatgcatcgtgcttag

SEQ ID NO: 104364 - DNA, 1151 bp, Zea Mays
tcctccaagaagaaaggaacaaaggagagagatctcgatccgcacacctcacgcctctcttcctctcgccccaaggacaacgaaaacatcaaacaagagaaccaaaggaaacagagcaagagcatcgctctcgaagcaaaacgcgcaccacgccgtcgccggccggccacttcgcacgtacgtaggacgcgcacgcaccggtgcatatatggggctcctgaaccagctgtgggacgacacggtggccgggccgcgcccggactccggcctcggcaagctccgcaagtacgcctccttctccccctcgtcgtcgtcgtcggcggcggtggcggcggcggcggcggcgggctccgcgccgcctccgggcgccgtgacgcggagcttgaccatgctgcggcggccggcggcgctgtccgtcgtcacgtcgccccgcagcgagtccagctccgcgccgtcgtccccgtcgcccgcaagcggcgctccggattcgcccttcggcgcagcgacgacgcccaggggagagggctggacgaagaagctgcgcgggaaagccaggatgggcggcggcggcggtgacgacgcccccggcacgccgaggagccccaccgtgtacgactgggtggtgatcagttcgctggacctctgaagcccaagccaagacgagaactgcacaaggaaacccaccaccaccatcaacacagctagcgaactgaaggagggagggggcagaggggccatggccatgtaatgtaacgaccaatctctttcagagcttctggtgacgtgtccagttactatatacatacatacgttaacggtgtactatgtgtcttgttgtaaatgtcacccctgcgaggtgttgccgattttgtaagctactacgtactactacgctcggcatgtcaccgtgtgcaagtgcaacacaagtttgtaaaaatgactagctagtagtagcaatgctgttgctgtacgagtaggcctccctctgctttgtacaggggtagtccaacaagtatatggtttgctggtgccatgtaaaaatgtatatagaatcctacgttcacgcccagcaaggatgcgtggttgagtgttctggactctggacaatactactatccaataacagccataccgtgtttttttcctgggcc

SEQ ID NO: 104365 - DNA, 513 bp, Zea Mays
tactatctccgtgttcttctaaaccatgtgacttgcgccacctcctatgtggatctaaggacagtagatggtgtcacgctaccaacttttcgtgaggcagcagagagaaggggactgcttgagtcggacaacacactggatgactgtctcactgaacgtgctcttttctagatgccatcggcgctgcgacgactttttgccacaatactggtgtactgtgagccaagtgacatggcggtactctggcagaatcacctagatgttatgtcagaggactatcaacacaggagtcagggtaaaactcatgttgagcagatggtattgattgacattaggaacatgttgcagtcaatgggaaaggacataaagacattccctcttcctcctatcatcgacacgtatgacgatgctattggtactgctagggaggtttacgaggaggaaagtatcgaaccgatagtgggagatgtggctctcaaagactctcttaacgaggaacagagggcctgttgg

SEQ ID NO: 104366 - DNA, 1858 bp, Zea Mays
actgtcttgcctgttgcctctgcggctttgcctgcgctcacggacggtcactggctcacgctcccctcgcctgcgtcgcctcgcctagacaagagacaagacgcctagtcgcctccgatcgaaatcgaatcgagtcgggtgggctcgggcccggtcttgttgtcttgtctcccagctaggaatagcgcaacgagatccctcgcgcgcgcggaccccggagaggccgagggagggtgacagggcgtgtcctcgaccgcgaggggaatgggatcggagggacgggcctggaacggcgcgggcatggccgccggcagcggctatggcggcggggtagaggcgaaagcgaccaccacggctgtgtcggccgcggcccccgcggaggttcccacgtcggcggcctccgtcgacatctcgctgccgctcctgaagatgtcgcctcgcatcatagctctctgcaaggaattggtcgaagggtggtcgtcgattgacagctcgctcttctccatcgagaccgtgtccgggggcatcacgaatctattgctgaaggtttctgtcaaagaagacaacggcaatgagtcttctgttactgttcggttgtatggaccaaatacggacttggtgattgataggaaaagggaattgcaggcgataccatatctctcagctgcagggttcggggctcggctacttggaatatttgagaatggagtagttcagtcattcatctatgctcgaacactgtcaccagcagacatgaaagaacctaaaatagcagctgaaattgccaaggagctacgcaaattccatcaagtagacataccagggtctaaagaaccacaattgtggaatgatatattcaagtttttgaagaaagctgcagcattgaagtttgaggataacatgaagcagaagagatatgaaaagatctcatttagagaaatacaagatgaagttcaagaacttaaggatctcttggacattctgcgcgcgcctgtggtttatgcacacaatgacttgctttcaggaaatctgatgctcaatgatttggaagggaagctatattttattgattttgagtatgggtcatacagctaccgtggctatgacattgcaaatcatttcaatgagtatgcaggatttgattgtgactataatttgtacccagataaagatgcccagtatcacttcttcaggaattatctacacactgatagacctagtgaggtggatgcacaagatatggaagtactttatgtggaaacaaacactttcagactagcatcgcacatttactgggcattatgggcccttattcaggcaaaggtatccccaattgactttgactatcttggatacttcttcttgcggtatggtgagtacaagaaacaaagggagtcctgcttctccttggcacaaagctttctctccgagctaaaaaatggctagagcctgagaatctgttcacgagtttatactggtgtacgcatgctcggagcgggtacgcgttgtgatcatcgactgctacccagaaactctattatagcggttgtagcagcccctcattgttgtatctgatgttaggttcatcattgtctaaggactagtttggatactctagtatcgagctcaattcatgtgtatgagatggattcgggtgtaacttaaactaatttacacactaatccaactcaacacatgtggattggggtcaatactaaattacccaaacaaagcctaacagggaagtcaccagtggcaaattatgtacttatatttataataataaacacaatcctgatgggttgtgccctgttgaatttgttcttcgattaattctgccctgtgcaatctgttctgc

SEQ ID NO: 104367 - DNA, 1839 bp, Zea Mays
actgtcttgcctgttgcctctgcggctttgcctgcgctcacggacggtcactggctcacgctcccctcgcctgcgtcgcctcgcctagacaagagacaagacgcctagtcgcctccgatcgaaatcgaatcgagtcgggtgggctcgggcccggtcttgttgtcttgtctcccagctaggaatagcgcaacgagatccctcgcgcgcgcggaccccggagaggccgagggagggtgacagggcgtgtcctcgaccgcgaggggaatgggatcggagggacgggcctggaacggcgcgggcatggccgccggcagcggctatggcggcggggtagaggcgaaagcgaccaccacggctgtgtcggccgcggcccccgcggaggttcccacgtcggcggcctccgtcgacatctcgctgccgctcctgaagatgtcgcctcgcatcatagctctctgcaaggaattggtcgaagggtggtcgtcgattgacagctcgctcttctccatcgagaccgtgtccgggggcatcacgaatctattgctgaaggtttctgtcaaagaagacaacggcaatgagtcttctgttactgttcggttgtatggaccaaatacggacttggtgattgataggaaaagggaattgcagctgcagggttcggggctcggctacttggaatatttgagaatggagtagttcagtcattcatctatgctcgaacactgtcaccagcagacatgaaagaacctaaaatagcagctgaaattgccaaggagctacgcaaattccatcaagtagacataccagggtctaaagaaccacaattgtggaatgatatattcaagtttttgaagaaagctgcagcattgaagtttgaggataacatgaagcagaagagatatgaaaagatctcatttagagaaatacaagatgaagttcaagaacttaaggatctcttggacattctgcgcgcgcctgtggtttatgcacacaatgacttgctttcaggaaatctgatgctcaatgatttggaagggaagctatattttattgattttgagtatgggtcatacagctaccgtggctatgacattgcaaatcatttcaatgagtatgcaggatttgattgtgactataatttgtacccagataaagatgcccagtatcacttcttcaggaattatctacacactgatagacctagtgaggtggatgcacaagatatggaagtactttatgtggaaacaaacactttcagactagcatcgcacatttactgggcattatgggcccttattcaggcaaaggtatccccaattgactttgactatcttggatacttcttcttgcggtatggtgagtacaagaaacaaagggagtcctgcttctccttggcacaaagctttctctccgagctaaaaaatggctagagcctgagaatctgttcacgagtttatactggtgtacgcatgctcggagcgggtacgcgttgtgatcatcgactgctacccagaaactctattatagcggttgtagcagcccctcattgttgtatctgatgttaggttcatcattgtctaaggactagtttggatactctagtatcgagctcaattcatgtgtatgagatggattcgggtgtaacttaaactaatttacacactaatccaactcaacacatgtggattggggtcaatactaaattacccaaacaaagcctaacagggaagtcaccagtggcaaattatgtacttatatttataataataaacacaatcctgatgggttgtgccctgttgaatttgttcttcgattaattctgccctgtgcaatctgttctgc

SEQ ID NO: 104368 - DNA, 826 bp, Zea Mays
ctccctatcctgaaacgccaatccgataaaaagcgcgcaccggcgtggcgcgcttcgcccccaggagccccgatcatctcccgctcccttccttcctcctcctcctcctcatggctctgtcgtccgccggctcgttcgtggcctgcagcctccggccaagcggagctagcatccatgccccgaggtcgccgccgcacctgaagccgggtgctgcggcggcgtcgttcacgaggacgccgcagcgccgggcgaacgcgaccaagggcggcgtgtccaccgtgtgcgagccgctgggccccgacaggccgatctggttccccggcagctcccctccgccgtggctcgacggaaggtaagtaagtgatgttagcagggtgggcatagaagagtctctcagatgtacgtaccggaggataagatggccagctgacatttctttgccatcgaattattgccctgcagccttccaggagactttggatttgaccctctcggactaggtgatcgacaccgtatttttttttcttcctccatgcaaaacaactagtagtagcgctgacgaacttaattagtgcaggttcggagccggagctgctgcggtggttcgcgcaggcggagctgatgcacgggcggtgggcgatgctggcggcggcgggcatcctggtcccggacctgctggcgcggtggggcttcatcgacgcggggttctcgtggttcgacgccgggtcccgcgagtacttcgcggacccctggacgctgttcgtgtcgcagatggcgctgatggggtgggcggaggggcggcggtgggcggactacctgaggcccg

SEQ ID NO: 104369 - DNA, 1977 bp, Zea Mays
ctccctatcctgaaacgccaatccgataaaaagcgcgcaccggcgtggcgcgcttcgcccccaggagccccgatcatctcccgctcccttccttcctcctcctcctcctcatggctctgtcgtccgccggctcgttcgtggcctgcagcctccggccaagcggagctagcatccatgccccgaggtcgccgccgggcgaacgcgaccaagggcggcgtgtccaccgtgtgcgagccgctgggccccgacaggccgatctggttccccggcagctcccctccgccgtggctcgacggaagccttccaggagactttggatttgaccctctcggactaggttcggagccggagctgctgcggtggttcgcgcaggcggagctgatgcacgggcggtgggcgatgctggcggcggcgggcatcctggtcccggacctgctggcgcggtggggcttcatcgacgcggggttctcgtggttcgacgccgggtcccgcgagtacttcgcggacccctggacgctgttcgtgtcgcagatggcgctgatggggtgggcggaggggcggcggtgggcggactacctgaggcccgggtgcgtggacatcgagccgcgcttcccgaaccgcaagaacccggtgcccgacgtggggtaccccggggggctgtggttcgactgggccaactggggccgcgggtccccggagcccgtgatggtgctgcgcaccaaggagatcaagaacgggcggctcgccatgctcgccttcgtcggcttctggttccaggccgtgtacacgggccagggccccatcgacaacctgctcgcgcacctcgccgaccccggccactgcaacatcttctcggcgttcacgtcccactgatccgatcttgcttcggagctggcggagagactgcgaaggattaaaaaaaagggcatcctgttgagggagaaagaacttcgcttggtcggtatcattttggccttgctggacatgtcaacattttgtttgtagtacctgcgtagaaatgtcaaaccacctgtacaaacgtacaaataccaccccagggatcgcgatgatgctagccagcagtccagcacacactagcttgtcctgaagatccatgcaacaccgtatacagaggaaatttatggacacggcaatgtaaacatcccccatatcctcgtcgtagcataacggtgtcatctacaatacaaatcctttatttattttacacgatatactgcggacaacattagcggtgttaaggtgattgggttgctaaaattagagggtgttgcttgaggattaaagctagtttgggagtcaaaaaaaccgaagcagatatgagggactagaatctacacattcaattttgtacatgcagccagtaaacaggagtattgacgacagtggacttgttccgttgttcgtagtatcgatgacgtcgattcctagctagcaaccaatctccgtgtggacaagtcacaagtggacactgaggctatccgcaaccgttacccctaaatttttccccctatatcactttttccccctatttttccctctattttttcatctcccgcagcggttccccctaaatactccccctataccccactaccactataaaatatcattttctataccaactgttgaatgcaattttgttgctgatgcagggacgtctgtagccaaaagtttaatacgcatctgcaggagaaagaaaagaaagaaaaagaaattatcatccagagaatacgtgggaaataagcaggaatacataaccaagatatttgccaggccatcatgcaaatccttggagttggcggccacaaagataggagtttgttgtaatcttttcctattatttagaataagttagttttatatccagttagagacgggatatataagcactattgtaagctgcaaagacgagagatcaacagttatcattttctttaatctactacatattccttt

SEQ ID NO: 104370 - DNA, 2021 bp, Zea Mays
ctgaaacgccaatccgataaaaagcgcgcaccggcgtggcgcgcttcgcccccaggagccccgatcatctcccgctcccttccttcctcctcctcctcctcatggctctgtcgtccgccggctcgttcgtggcctgcagcctccggccaagcggagctagcatccatgccccgaggtcgccgccgcacctgaagccgggtgctgcggcggcgtcgttcacgaggacgccgcagcgccgggcgaacgcgaccaagggcggcgtgtccaccgtgtgcgagccgctgggccccgacaggccgatctggttccccggcagctcccctccgccgtggctcgacggaagccttccaggagactttggatttgaccctctcggactaggttcggagccggagctgctgcggtggttcgcgcaggcggagctgatgcacgggcggtgggcgatgctggcggcggcgggcatcctggtcccggacctgctggcgcggtggggcttcatcgacgcggggttctcgtggttcgacgccgggtcccgcgagtacttcgcggacccctggacgctgttcgtgtcgcagatggcgctgatggggtgggcggaggggcggcggtgggcggactacctgaggcccgggtgcgtggacatcgagccgcgcttcccgaaccgcaagaacccggtgcccgacgtggggtaccccggggggctgtggttcgactgggccaactggggccgcgggtccccggagcccgtgatggtgctgcgcaccaaggagatcaagaacgggcggctcgccatgctcgccttcgtcggcttctggttccaggccgtgtacacgggccagggccccatcgacaacctgctcgcgcacctcgccgaccccggccactgcaacatcttctcggcgttcacgtcccactgatccgatcttgcttcggagctggcggagagactgcgaaggattaaaaaaaagggcatcctgttgagggagaaagaacttcgcttggtcggtatcattttggccttgctggacatgtcaacattttgtttgtagtacctgcgtagaaatgtcaaaccacctgtacaaacgtacaaataccaccccagggatcgcgatgatgctagccagcagtccagcacacactagcttgtcctgaagatccatgcaacaccgtatacagaggaaatttatggacacggcaatgtaaacatcccccatatcctcgtcgtagcataacggtgtcatctacaatacaaatcctttatttattttacacgatatactgcggacaacattagcggtgttaaggtgattgggttgctaaaattagagggtgttgcttgaggattaaagctagtttgggagtcaaaaaaaccgaagcagatatgagggactagaatctacacattcaattttgtacatgcagccagtaaacaggagtattgacgacagtggacttgttccgttgttcgtagtatcgatgacgtcgattcctagctagcaaccaatctccgtgtggacaagtcacaagtggacactgaggctatccgcaaccgttacccctaaatttttccccctatatcactttttccccctatttttccctctattttttcatctcccgcagcggttccccctaaatactccccctataccccactaccactataaaatatcattttctataccaactgttgaatgcaattttgttgctgatgcagggacgtctgtagccaaaagtttaatacgcatctgcaggagaaagaaaagaaagaaaaagaaattatcatccagagaatacgtgggaaataagcaggaatacataaccaagatatttgccaggccatcatgcaaatccttggagttggcggccacaaagataggagtttgttgtaatcttttcctattatttagaataagttagttttatatccagttagagacgggatatataagcactattgtaagctgcaaagacgagagatcaacagttatcattttctttaatctactacatattccttt

SEQ ID NO: 104371 - DNA, 1305 bp, Zea Mays
ctgaaacgccaatccgataaaaagcgcgcaccggcgtggcgcgcttcgcccccaggagccccgatcatctcccgctcccttccttcctcctcctcctcctcatggctctgtcgtccgccggctcgttcgtggcctgcagcctccggccaagcggagctagcatccatgccccgaggtcgccgccgcacctgaagccgggtgctgcggcggcgtcgttcacgaggacgccgcagcgccgggcgaacgcgaccaagggcggcgtgtccaccgtgtgcgagccgctgggccccgacaggccgatctggttccccggcagctcccctccgccgtggctcgacggaagccttccaggagactttggatttgaccctctcggactaggttcggagccggagctgctgcggtggttcgcgcaggcggagctgatgcacgggcggtgggcgatgctggcggcggcgggcatcctggtcccggacctgctggcgcggtggggcttcatcgacgcggggttctcgtggttcgacgccgggtcccgcgagtacttcgcggacccctggacgctgttcgtgtcgcagatggcgctgatggggtgggcggaggggcggcggtgggcggactacctgaggcccgggtgcgtggacatcgagccgcgcttcccgaaccgcaagaacccggtgcccgacgtggggtaccccggggggctgtggttcgactgggccaactggggccgcgggtccccggagcccgtgatggtgctgcgcaccaaggagatcaagaacgggcggctcgccatgctcgccttcgtcggcttctggttccaggccgtgtacacgggccagggccccatcgacaacctgctcgcgcacctcgccgaccccggccactgcaacatcttctcggcgttcacgtcccactgatccgatcttgcttcggagctggcggagagactgcgaaggattaaaaaaaagggcatcctgttgagggagaaagaacttcgcttgggacgtctgtagccaaaagtttaatacgcatctgcaggagaaagaaaagaaagaaaaagaaattatcatccagagaatacgtgggaaataagcaggaatacataaccaagatatttgccaggccatcatgcaaatccttggagttggcggccacaaagataggagtttgttgtaatcttttcctattatttagaataagttagttttatatccagttagagacgggatatataagcactattgtaagctgcaaagacgagagatcaacagttatcattttctttaatctactacatattccttt

SEQ ID NO: 104372 - DNA, 2802 bp, Zea Mays
gcgggctccgcctcctcgcgcgcgagcggggtgggagtggggggacggcgacaagtcggttagggttgcgcggccacgtaactgggaggtgaaaggaggcgaggcagcagccagcatggagggcttcgccgcggcggagctggaggccgcggagcggttggtcaagcggtgggactccacggcgtcggcggcttcctcggctggtaggggcggggacaaccagatgctgttcgacggcgccgccgaccgcgccgaggcggagcggttcctccgggcggtggacgacctccgccgcctggcgccgccgtcgccggcctctgtcggcagcccgcgccgcgcctcgtccgcgggcggcgtctgcaccgcagtggaggttgccatgactcggctcgaggacgagttccgccacgtgctgtcggcgcgcgcgctcgacctcgagatcgaggcgctcgccggcctcagctcgctttcgatggccagcggccggagtaactctgacgccacagaagcggccgctggggaggaagacgacggctccgtgtcgtcctccgtcggcaggcgcagcagctaccgctccctgcagagcatccgcgagattgacctcttccccgcggacgcaatctccgacctgcatgccatcgcctcccgcatggccgccgcggggtacggccgcgagtgcgtccaggtgtacgcctccgtccgcaagccggccgtcgactccgccctgcgccggctcggcgtcgagaagctcagcatcggcgacgtccagcggctcgagtgggacgctctcgaggccaagatccgccgctggatccgcgcggcccgcgccgccgtccgcggcgtcttcgccagcgagcgctgcctctgcctccacatcttcaacgacctcccgctgcgcacttccaccgctaccgccgccgccgccgcggctcccaccaaccacgacgcgcccttcgctgaggccgtcaagggcgcggcgctgcagctctttggcttcgctgaggccatcagcatcgggcgccgctccccggagaagctgttcaagatcattgacctccacgacgcgctctccgatatgttgcctgatatctccgacatcttcgccgactccaaggccgcggagtcgatatacgtgcaggccgccgagatcaagtcgcggttggtcgacgccgttcgtggaatactctcggagtttgagaacgccgtgctccgcgacccgtccaagactccagtgcccggcggcaccatccacccgctcactcgctatgttatgaattacagcaccctcatttcggactacaaggccaccctctccgagcttatcatctcgcggccatcagctagcccccaaactgctgctgaggaaaatgaggctacaccggccttccctgatctcgacccgcccgatcctgacagccagttgccccttgctactcatcttgtctggattattgttgttcttgaacacaaccttgagagcaaggcgtcactctacaaggatgcaccactgtctcatttgttccttatgaacaacgtgcactatattgtgcacaaagtaaaggattcagctgaacttagggggctaattggggatgagtatttgaggcgtctcacagggaaattccggcaggcagctacaagctaccagcgaactgcatggttgaagatcctgaattgtctcagagatgagggtctccatgttagtggtggtttttcatccggggtatccaaatcggcactacgggagcgattcaaggctttcaatgctgtatttgaggaggcacacagggtccagtctgcgtggtatgtgccagacacacaactgcgagaagagcttaggatatcagttttggagaagctgctcccagcatatcgatccttccttggaaggttcaggcatcacatagagaacagcaggcaccctgagttgtacatcaagtactcagttgatgatcttgagatagcaatggcagatttctttgagggatctccaccatcactgcataacaggaggagatctcatggatgaaagatggcttgaaaaatctcagtcttcttgtaatgtattctttaattctttggggacaggccaacaaatgcagttgggtcttttgttttgtcctcctgagacatatggttaggctggtgccaatgcaggctatagtgagggcgatagcgcccagcaggaggcgagagcgaggccggaggcgggcgagagcgacccggcgggcgctactgccaccgcccggcgataggcaggcgagagcggggcgacgcattggcgatgcgtcttcgcgggcgagagcgaggggcgacagtgaggtggcggcttctgattggtccacgtgtgctatagcctgaggctgtagcctgctgcagcctgtgcactggagcagcaggggcgagagtggaggcgagagctgacgtggcaggggcgagagggaggctgtgcattggactcagccttatagttggtgatgatttcttcgactagaggcaatctgaaacgggatcaggatcctgataacgctgtcaaaagccccatttcttcttccactgtaagcgatcttttttttttttcatttgttacacttgtttatattcttgtgagtagcgtgtttatataggaatgatcttttagacatgtaacatatatataagttgtaacttctgtatctgtttgacatttagctgagtgttgtatcatcgttttggtggttcacatgtatctgaagaatgctgcttgattgatgaggtgtaaaaaaagtaatgttaaggctatgcacatatgatgcaatgcca

SEQ ID NO: 104373 - DNA, 618 bp, Zea Mays
tagagatggcaatgggtacccgaaacccgaatacccgacgggttttacccgatatgaaggcgggtatgggatgatttctcttcccgcgagtatgttaacgggtaaaaacctctacccgttgggtagacggatacgggttggaactacccatacccgtctacccatgggtaaaatatacccgcatcaatacaactataaccatctaatagagcccatcttaactaaaatagaacccttctctagctatcatttgtctagataccaagttctgtaatcatatgatttgttacatgtgaagttgaagttgtttttatatgtttatttaatattttgagtgattggtatattggaatttaagactttcctagcgggtacgggttacccgacgggtaaaaatacccgcgtgggtacgagtatggataagattttatacccgcgagtatatatgggtaacccgacgggtagattttttttgatgggtacgggtatggaatggtactacccgacgggtatgtacctgttgccatccctaatcaagagatgccaagacattcataaccatgtttccaagtttcaaattagcatatatagagtcatagacatagcaatagtgtcaca

SEQ ID NO: 104374 - DNA, 1912 bp, Zea Mays
accacaccagctcgactactagacccttgaggccttgaccagccacttccaaactttagcatcactatatctcaacgccatcaagctgtctgtcatcagtcatcacggcacagcagcttctactggccttagctcgatcgttccaatggagcttccaccatgggcgtccttcctcggcatcgtgctagccaccgtgatgcttctgaaagccctcaccggccgccgcagccgccgcatgtacaacctcccgcctggccccaagccgtggccgatcatcggcaacctcgacctcgtgggcgcgctcccgcaccgctccatccacgagttgtccaggaagtacggcccgctgatgcagctccggttcgggtcgttccccgtggtggtcggctcgtcggtggacatggccaagttcttcctcaagacccacgacgtggtgttcacggaccggccaaagacggccgccggcaagtacaccacctacaactaccgcgacatcacatggtccccctacggcgcgtactggcggcaggcgcgcaagatgtgcctcaccgagctcttcagcgccaagcggctcgagtcgtacgagtacatccgcgccgacgaggtgcgcgcgctgctgcgcgacctgcacgcggcgtccagctccggccgcgcagtcatgctcaaggactacctgtccacggtgagcctgaacgtgatcacgcgcatggtgctcggcaagaagtacctggataaggaggaggcggccgccgccggcgggtcagtgaccacccccgaggagttcaagtggatgctcgacgagctgttcctgctcaacggcgtgctcaacatcggcgactccatcccgtggctcgactggatggacttgcaggggtacatcaagcggatgaagaagctcagcaagatgttcgatcggttcctggagcacgtcgtcgaggagcacaaccagcggcggcttcgcgaggggaaaggctttgtcgccaaggacatggtcgacgtgcttctgcagattgccgacgaccctacccttgaggtcgagctcgaccgggaaagcgtcaaagcttttactcaggacctcatcgccggtggcaccgagagctcggcggtcacagtggagtgggccatctcggagctcctcaagaagccggaggtcatcgccaaggccacggaggagctggaccgcgtcatcggccgcggccgctgggtgacagagaaggacatgcccagcctcccctacgtcgacgccatcgtcaaggagaccatgcgactgcacccggtggcaccgctgctggtgccccgcctcgcgcgcgaggacacgaccgtggccggctacgacatccccgccggcacgcgcgtgctcgtcagcgtgtggtccatcggccgcgaccccgcgctgtgggacgcgccggaagaattcatgcccgagcgattcctcggcagcaagctggacgtgaaggggcaggactacgagctgctgccgttcgggtccggccgccggatgtgccccgggtacagcctcggcctcaaggtcatccaggtgagcctagctaacctgctgcacggcttcgcgtggagcctccccgacggcgtgaccaaggaggagttcagcatggaggagatcttcggcctgtccacgccgcgcaagttcccgctcgaggccgtcgtcgagcccaagctgccggctcacctctacgccgagccttgatcgatgcgcgcgtgattctacagcatagttacctcttttgcgtcggttgtttgtccagagtgcgtacacttattgctcctgttgttgccgttactttaaactcctattagcttgcgtagtgccgtcgtgcgctgccttgtgacggaataatggtgtaaccaattttatatttataatagtacttctacacaacatagatatatatac

SEQ ID NO: 104375 - DNA, 79 bp, Zea Mays
tgatatcacgaatgaagtgataacgaatatcaatatgtttggatttctcagtaatcatctgatctttggtgagatgaat

SEQ ID NO: 104376 - DNA, 1448 bp, Zea Mays
ttgtcgcactaaaatattgccagtcccgcagtcgagatggccctacgccgccagctcgccctcgccgtcctcgccctggcggcaaccactgccgcggccaactccggcttcgcggactccaacccgatccgtcccgtcaccgaccgcgcggcctccgcgctcgagtccaccgtcttcgccgcgctcggccgcacccgcgacgcgcttcgcttcgcacgcttcgccatcaggtatggcaagaattacaagagcgcggcggaggtccagaagcggttcaggatcttctccgagagcctccagctcgtccgctctaccaaccggaaaggcctctacggctctactaccgcctcggcatcaaccgcttcgcggacatgagctgggaggagttccgtgcgacccggctcggcgcagcgcagaactgctccgccacgctcgccggcaaccaccagatgcgcgccgccgccgctgccgcgatgccggagacgaaagactggagggaggatgggatcgtgagcccagtgaaaaaccagggccactgtggatcatgctggaccttcagcactactggtgcgcttgaggctgcatatacccaggcaactggcaaggccatctctctctctgagcaacagcttgttgactgcggttttgcattcaacaatttcggatgtaaggggggccttccatcccaggcctttgaatacatcaaatacaatggtggtcttgacaccgaggagtcctacccttaccaaggtgtcaacggaatctgccagttcaaggctgagaatgttggagtcaaggttttggactcggttaacatcaccctgggtgctgaggatgaactgaaggatgctgttggtctggttcgcccggttagtgttgccttcgaggtgatcagtggtttcagactgtacaagaccggagtctacactagtgaccactgcggaactacaccgatggatgtgaaccacgctgttctggctgttggctatggtgtcgagaacggtgtcccctactggctcatcaagaactcatggggcgctgactggggtgatgagggttacttcaagatggaaatgggcaaaaacatgtgcggtgttgctacgtgtgcatcctaccctgttgttgcatgaggcacttccggattgtcacatggtctgtttggcatcaatattgcatgtttggcctaagcttggtggatgggttatacagaacgggaactccgttgtgaatagaaacccgttgtgaatagaaaccgtgaagggaaagaattacttagcccctgcgtgtacgtctcccccgtatggctgtgtaggtagattgtcggttcgggatccgaattactcgtaccgtcatacgtgtctatggcattttatttgtgaaacaaaatacccataaatcatgaaataatgtaccatacgcagattatatattgtcatgtaatttactca

SEQ ID NO: 104377 - DNA, 1244 bp, Zea Mays
atggagcgccgcggaaattgccacggcggcaagcacccgccgccgcgccaggcgcgagggcccggggagcgcacccggcagccgtccagcggcggctccttctcggcatcgctcttggacgccgtctaccgctccctcgacgacggcgatggtgcggacgtcgtcgttgacgccgcgcgtgggagtggtgcggaggagaaggcggccgcgacggcgcagttctggtgggcgaataaggaggcggccacggccagacccaggcagtcctcgtcgagcgcggacggggacaggcgacgccgggagacgggagctgcgcgcccgcgccactcggggtacgcgtcgtcgaccacgtcgtcgtccgactcgtcggctagctacagcagcttctcctgctcgtcggcgtcgaccacagacactgagtccacgtgccgccgccacagccccccgccgccgcggatgtcattgtcagaggaatccgccgccacagacgccgaggaggcaaccgcaacccctccaccgccacccaagagcaaaccgaagaagaaggccaggccgtgtttccccgtagcaagaatccgaccaccaaaggcctcggtgccatcatcatcgtcgtctggagcgcagccgccatcgccggcgacgttcgcgtgcgcccttaaggctctgttctcctcggtgcgcctccagaggaagcccaaggctccggctgcaacccctccgcccaaaatctcgcagccgcagccgcagccacagcctccgagcatgtcggcgacgagcactgcgaaggcggctgacgcgccggcggaaccgtcggtgcagaggacggtgaggctccgcccggaagccgaggtgtcggtggtgcggagaagggtggtggaggagctggtgcggagcctcgaggagctggaggcggacgaggaggggagcgacgccagctccgacctcttcgagctggacagccttcgtggcgccggcgcggacgagctgcccgtgtacggcacgaccagcctcgtggtggccaaccgcgcgatcgcccagggaccagctcgttgaaaagggcgccttcaagacatcgtcagtgttctctgcatttctgcatgttaataatgccccggtattttgttgcgagaaaaaaatgctgcagtatggtttgtactactaccctgtccatatttgaactttgtccttctctcaaatctgtatttttcgtgaaaaatgccaagttcctaaaaaaaagtgatcgg

SEQ ID NO: 104378 - DNA, 3906 bp, Zea Mays
cgactgacagacgcagcccacacggattaaaatttaaggcgtcagtgaaactttgcgtcgatcatttaaggcgcagccgcagataaacaaacgcccactcgcccctcgcgtcgcgccccctgccatcaaggccagatcctagcccgccattaatgccgctactagcccgagctccacgagatcagagaggcggcggctgggctgaggcccccgcaccgccgccgcccgccctcgcctcgggttctgcatgctctgcgcctcactctctgtcaccgcgcgtccgtgtccgtcaccagaccttggcggccgcgtagcgtaggatgctcacgtgcatcgcgtgctccaagcagcagttctccggcggcggcccgccactgcacgagccgccggaggacgacgatgtcgttggtggaggcgccggcaccagcgccggcgcggcgacgccgagcacacggcacgccatcaaggcgctcaccgcccagatcaaggacatggcgctcaaggcgtcgggcgcgtaccggcaatgcaagccctgcgcgggctcctcggcggcggcctcgcggcggcaccacccgtaccaccaccgcggcggcagcgccttcgggggctccgacgccgactcgggggcctccgaccgcttccactacgcgtaccgccgcgcggggagctcggcggcctcgactccgcgattgcgcagcggaggcgccgccctgtcgagtggcgacgccacgccctccatcagcgtgcgcaccggcaccgacttccccgccggcgatgacgacgacgacgagatgacgccagaagccactggcggatgtggtggcaaggacgacgacgccaaggagtgggtggcgcaggtggagcccggtgtgctcatcactttcgtctcactggcggaaggtggcaacgacctaaaacgcattcgattcagccgtgagatgttcaacaaatgggaagcacaaagatggtgggctgaaaactatgacaaagttatggaactttacaatgtgcagaagtttaatcaaactgtccctctcccagctaccccaaaatctgaagatgagagctccaaggaggacagcccggtgacaccaccactggacaaggaaaggctaccccgcactttccacagacaaggtggtggagcgatgggctcctcttcatcagattctctcgagcatcactcaaaccactactgtactggccgccaccaccaccaccaccaccatggacaccaatgctgtgattcaatgggcctggcatcaacgccaaagctgtcaagtatcagtggagccaaaacagaaacctcatcgatggacgcgtcaatgaggacaagctcgtcacctgaggagatcgacaggtctggtgagctctcggtgtccgtcagcaatgcgagcgaccaggagagggagtgggtcgaagaagacgagccaggcgtatatatcacaatccgggctttacctggtgggatcagagagcttcgccgcgttcggttcagccgggagaagttcagcgagatgcatgccaggctgtggtgggaagagaaccgagcgaggatacacgaacaatacctctgagaagagacgcccgacaccatcagcagcacgagcacatgaatagagctggcactaacacatccacatgcatttccagcttcatacgatgttttgctaacctaagaggtccggtttccggtattttacatttcgttcagtctcacgtgtggtggtggtggggtgggaggatagtgtacgtatttcacagtttcactactgaatctgtaggtctcgtttttcatcaataatgtatatctacctgttgtttcccataagacaaattagcatgcttgtgtttgtgttgtgtgcgctactttgctcttgtcactgtcttattgtactcgaactcttccagacataacaataatcaacccccaagttggcactgagtgccccaaactcaaaaccactttgtggtgggttgattgcgacgacagtgaacgcacaacgatatttttttttttgaaaaaagcaggcaggacaaaaacaggcaacggcctaacccagccttgaagcaaaaacccaccacgagcaaaatggtcctcgactataaacacagcctagaagaagataaaagagtggcagatgcctagccccggccaccatccatcaacgagcaaaattttaagcctgggccttgtctggctacacttttatccacaatcagatgaactggaatggaaaaaaaaatgtgtaccttttcgtactatctcatcctaacacatatgatatgaattatatgaattgagcgcctccttttgcaggctctttgtacacgaacggtttcgcttctcctgtgcgccactaccttacggatttgtgatggtgacctttcgccatccaacaaaagccaagttgctaacatagtacgtcagctatccacacactaaccacccgtttttcctgtcctaactaagcgaatcactttgggacttttggcaggctagtcctcaccaccaagtgccacggcaggtaaagtttacctctgcgattcctcactggcatgcttccttccactgcagtcgctgtcttctaccaagaaccacaagttctcaggcctggtttagagattttcattgaattctaaattcgagcacttaaacctcttctcactttgcacctgaaagccacgttagtatatgggatggggcacaagtgctgaagtgcccttgcttggatgatggggcaatgcttcggacgtctggaagatgaggcacaaaggtttggtttaattgtaacttaggtagaagacaatgtttggcgctctaacaaaagaacaacgggaaaggctaccaccggaacttcaaccaatccggcatgaagataacaatatcataaacaaagcataataaagtgaatcgttatcatgtcagagaaataatttcagacaattattggtgggaattttctaatcgaagtagagacattggcatagtgcaattagttgaaacatcatctatggtttttttaaaaaaaaatcgaacaaaaaaaaactcttaaaccagctacctaaatttgccaccttctccaataacaaactgaatgaggtggaataagaatgataaataagggtaaaatgacacaagtgcgtgtttccacaactccattccgacagctcaaactgcacccttgccttgtgtataaggccatgtttgaatgcactagaggtgatagatagctactaaaattagttgaaggcatcgaaacagtctagctaatagtttaactgttagaaacttttagcaaattagctcatagtttattgaaaggaaaaggttgtagggaaaacccctacagtacaaattttattattaataataatgagtacacagaggtacaaaaagagaaccgaaacaaagaacaaaaaaaaaacacactacaaccggctatcgagagtttagaaattaactcatacttacctagctaatttcactagcaattttttagccaactaactattagctctagtgcattcaaacaccccctaagaattcatgtataacatatcgatttcacttgcttgcaagctgcagaagtatcaggctacactgtaaactagtattaatgtctatcaagcatattcagattctgtcataaacctggttaagaaacagaaacagaatagagacggaataattgacacaaagcccatctgatgcttggtgtcatcgaataggaaaaaaatggatctatttgacatgtctgctgttaagcatggtgctagtataaacagaaaaaacacataccaattatactagaatcagcagtacaatatttgcaatcgtgagtataaatctatattcttgctcacaaccaggtgccagtaaatttacagacatcctaagcaaac

SEQ ID NO: 104379 - DNA, 1830 bp, Zea Mays
tcgcgccccctgccatcaaggccagatcctagcccgccattaatgccgctactagcccgagctccacgagatcagagaggcggcggctgggctgaggcccccgcaccgccgccgcccgccctcgcctcgggttctgcatgctctgcgcctcactctctgtcaccgcgcgtccgtgtccgtcaccagaccttggcggccgcgtagcgtaggatgctcacgtgcatcgcgtgctccaagcagcagttctccggcggcggcccgccactgcacgagccgccggaggacgacgatgtcgttggtggaggcgccggcaccagcgccggcgcggcgacgccgagcacacggcacgccatcaaggcgctcaccgcccagatcaaggacatggcgctcaaggcgtcgggcgcgtaccggcaatgcaagccctgcgcgggctcctcggcggcggcctcgcggcggcaccacccgtaccaccaccgcggcggcagcgccttcgggggctccgacgccgactcgggggcctccgaccgcttccactacgcgtaccgccgcgcggggagctcggcggcctcgactccgcgattgcgcagcggaggcgccgccctgtcgagtggcgacgccacgccctccatcagcgtgcgcaccggcaccgacttccccgccggcgatgacgacgacgacgagatgacgccagaagccactggcggatgtggtggcaaggacgacgacgccaaggagtgggtggcgcaggtggagcccggtgtgctcatcactttcgtctcactggcggaaggtggcaacgacctaaaacgcattcgattcagccgtgagatgttcaacaaatgggaagcacaaagatggtgggctgaaaactatgacaaagttatggaactttacaatgtgcagaagtttaatcaaactgtccctctcccagctaccccaaaatctgaagatgagagctccaaggaggacagcccggtgacaccaccactggacaaggaaaggctaccccgcactttccacagacaaggtggtggagcgatgggctcctcttcatcagattctctcgagcatcactcaaaccactactgtactggccgccaccaccaccaccaccaccatggacaccaatgctgtgattcaatgggcctggcatcaacgccaaagctgtcaagtatcagtggagccaaaacagaaacctcatcgatggacgcgtcaatgaggacaagctcgtcacctgaggagatcgacaggtctggtgagctctcggtgtccgtcagcaatgcgagcgaccaggagagggagtgggtcgaagaagacgagccaggcgtatatatcacaatccgggctttacctggtgggatcagagagcttcgccgcgttcggttcagccgggagaagttcagcgagatgcatgccaggctgtggtgggaagagaaccgagcgaggatacacgaacaatacctctgagaagagacgcccgacaccatcagcagcacgagcacatgaatagagctggcactaacacatccacatgcatttccagcttcatacgatgttttgctaacctaagaggtccggtttccggtattttacatttcgttcagtctcacgtgtggtggtggtggggtgggaggatagtgtacgtatttcacagtttcactactgaatctgtaggtctcgtttttcatcaataatgtatatctacctgttgtttcccataagacaaattagcatgcttgtgtttgtgttgtgtgcgctactttgctcttgtcactgtcttattgtactcgaactcttccagacataacaataatcaacccccaagttggc

SEQ ID NO: 104380 - DNA, 1181 bp, Zea Mays
atctcactctccgccactgcacccagcttcctcaaacttgcggtttactttcagagccccttgaacctgtacgtgttttcacgacctagcacctttgaatttgtcatggctgtttcctcacctagccctccctcttccatgtgtaggggagtgggttagatgagacaactatccgtgagatgttcaacaaatgggaagcacaaagatggtgggctgaaaactatgacaaagttatggaactttacaatgtgcagaagtttaatcaaactgtccctctcccagctaccccaaaatctgaagatgagagctccaaggaggacagcccggtgacaccaccactggacaaggaaaggctaccccgcactttccacagacaaggtggtggagcgatgggctcctcttcatcagattctctcgagcatcactcaaaccactactgtactggccgccaccaccaccaccaccaccatggacaccaatgctgtgattcaatgggcctggcatcaacgccaaagctgtcaagtatcagtggagccaaaacagaaacctcatcgatggacgcgtcaatgaggacaagctcgtcacctgaggagatcgacaggtctggtgagctctcggtgtccgtcagcaatgcgagcgaccaggagagggagtgggtcgaagaagacgagccaggcgtatatatcacaatccgggctttacctggtgggatcagagagcttcgccgcgttcggttcagccgggagaagttcagcgagatgcatgccaggctgtggtgggaagagaaccgagcgaggatacacgaacaatacctctgagaagagacgcccgacaccatcagcagcacgagcacatgaatagagctggcactaacacatccacatgcatttccagcttcatacgatgttttgctaacctaagaggtccggtttccggtattttacatttcgttcagtctcacgtgtggtggtggtggggtgggaggatagtgtacgtatttcacagtttcactactgaatctgtaggtctcgtttttcatcaataatgtatatctacctgttgtttcccataagacaaattagcatgcttgtgtttgtgttgtgtgcgctactttgctcttgtcactgtcttattgtactcgaactcttccagacataacaataatcaacccccaagttggc

SEQ ID NO: 104381 - DNA, 3147 bp, Zea Mays
atctcactctccgccactgcacccagcttcctcaaacttgcggtttactttcagagccccttgaacctgtacgtgttttcacgacctagcacctttgaatttgtcatggctgtttcctcacctagccctccctcttccatgtgtaggggagtgggttagatgagacaactatccgtgagatgttcaacaaatgggaagcacaaagatggtgggctgaaaactatgacaaagttatggaactttacaatgtgcagaagtttaatcaaactgtccctctcccagctaccccaaaatctgaagatgagagctccaaggaggacagcccggtgacaccaccactggacaaggaaaggctaccccgcactttccacagacaaggtggtggagcgatgggctcctcttcatcagattctctcgagcatcactcaaaccactactgtactggccgccaccaccaccaccaccaccatggacaccaatgctgtgattcaatgggcctggcatcaacgccaaagctgtcaagtatcagtggagccaaaacagaaacctcatcgatggacgcgtcaatgaggacaagctcgtcacctgaggagatcgacaggtctggtgagctctcggtgtccgtcagcaatgcgagcgaccaggagagggagtgggtcgaagaagacgagccaggcgtatatatcacaatccgggctttacctggtgggatcagagagcttcgccgcgttcggttcagccgggagaagttcagcgagatgcatgccaggctgtggtgggaagagaaccgagcgaggatacacgaacaatacctctgagaagagacgcccgacaccatcagcagcacgagcacatgaatagagctggcactaacacatccacatgcatttccagcttcatacgatgttttgctaacctaagaggtccggtttccggtattttacatttcgttcagtctcacgtgtggtggtggtggggtgggaggatagtgtacgtatttcacagtttcactactgaatctgtaggtctcgtttttcatcaataatgtatatctacctgttgtttcccataagacaaattagcatgcttgtgtttgtgttgtgtgcgctactttgctcttgtcactgtcttattgtactcgaactcttccagacataacaataatcaacccccaagttggcactgagtgccccaaactcaaaaccactttgtggtgggttgattgcgacgacagtgaacgcacaacgatatttttttttttgaaaaaagcaggcaggacaaaaacaggcaacggcctaacccagccttgaagcaaaaacccaccacgagcaaaatggtcctcgactataaacacagcctagaagaagataaaagagtggcagatgcctagccccggccaccatccatcaacgagcaaaattttaagcctgggccttgtctggctacacttttatccacaatcagatgaactggaatggaaaaaaaaatgtgtaccttttcgtactatctcatcctaacacatatgatatgaattatatgaattgagcgcctccttttgcaggctctttgtacacgaacggtttcgcttctcctgtgcgccactaccttacggatttgtgatggtgacctttcgccatccaacaaaagccaagttgctaacatagtacgtcagctatccacacactaaccacccgtttttcctgtcctaactaagcgaatcactttgggacttttggcaggctagtcctcaccaccaagtgccacggcaggtaaagtttacctctgcgattcctcactggcatgcttccttccactgcagtcgctgtcttctaccaagaaccacaagttctcaggcctggtttagagattttcattgaattctaaattcgagcacttaaacctcttctcactttgcacctgaaagccacgttagtatatgggatggggcacaagtgctgaagtgcccttgcttggatgatggggcaatgcttcggacgtctggaagatgaggcacaaaggtttggtttaattgtaacttaggtagaagacaatgtttggcgctctaacaaaagaacaacgggaaaggctaccaccggaacttcaaccaatccggcatgaagataacaatatcataaacaaagcataataaagtgaatcgttatcatgtcagagaaataatttcagacaattattggtgggaattttctaatcgaagtagagacattggcatagtgcaattagttgaaacatcatctatggtttttttaaaaaaaaatcgaacaaaaaaaaactcttaaaccagctacctaaatttgccaccttctccaataacaaactgaatgaggtggaataagaatgataaataagggtaaaatgacacaagtgcgtgtttccacaactccattccgacagctcaaactgcacccttgccttgtgtataaggccatgtttgaatgcactagaggtgatagatagctactaaaattagttgaaggcatcgaaacagtctagctaatagtttaactgttagaaacttttagcaaattagctcatagtttattgaaaggaaaaggttgtagggaaaacccctacagtacaaattttattattaataataatgagtacacagaggtacaaaaagagaaccgaaacaaagaacaaaaaaaaaacacactacaaccggctatcgagagtttagaaattaactcatacttacctagctaatttcactagcaattttttagccaactaactattagctctagtgcattcaaacaccccctaagaattcatgtataacatatcgatttcacttgcttgcaagctgcagaagtatcaggctacactgtaaactagtattaatgtctatcaagcatattcagattctgtcataaacctggttaagaaacagaaacagaatagagacggaataattgacacaaagcccatctgatgcttggtgtcatcgaataggaaaaaaatggatctatttgacatgtctgctgttaagcatggtgctagtataaacagaaaaaacacataccaattatactagaatcagcagtacaatatttgcaatcgtgagtataaatctatattcttgctcacaaccaggtgccagtaaatttacagacatcctaagcaaac

SEQ ID NO: 104382 - DNA, 1244 bp, Zea Mays
gccaacatagggtacccataaacgcaacagcagcagccaggcaggcgagagaaaagagaactcctggagccataggtgtgggcgtgtggctagcatagctgtaggtcatccttcttgcttggcaatgagcgagcaagacgggcagcacgtcgcggcaagcacgccggacacggccatcgagtccttctcacagctccccttcgtccgccccaagcccccgcagccggcgtccacgtccagtgcctcgtcgatccgactgttcggcttcaaggtcccacccgacgccgccgccacgtcctcgtccacaggaaccagcgatgctaccgcagccagcgccaccgtagcgggccaggcggcggtgtcgggtgccggtgcaggcgatggcggcggcggagggcgcaagttcgagtgccactactgccgccggaacttcccgacgtcgcaggcgctgggcgggcaccagaacgcgcacaagcgggagcggcagcacgcgaagcgcgcgcagtgccagagcgcgatggccatgcatcacgcccaccactaccctgaccacacccacgcgtaccccgccttcaccagctaccaccaccagttcggcatggcgcgctacgagcccccgccgcactacccctcgtggtccagccacctcccgcacgccgctccgcctttggtgcccagatactacggcgggtccggctccctgtcgcagcctatcaacggcagccccgtcccggctgccgctctctggcgggtcccggcggccgttagcgtggccgcgccacttgtgcgccaagagcggccgacgccactgtccttgtgcggacatgacgaggaggcattgacaggagcgagaagaggggatatatcagcagatgcaggacagggaggctcgcgttcttcttccacctcgtcatctacatcgtcgcggcatcaaccccgccgggcaggtgctgctgaaaacagagagaaccgtcttttcatgcggacggtagctagggcggaggcgttgctgtccacctagcgggaggcagagcagctgcatgcgagaactgcttgttctgaggtgaaggagcgcgagcttgcagagcttcgttccaaggccgagtggctcaaaggcgaagcaacctgcttgcgctcggagtgcgatgatgctcggggcgacgccgaacatgaaagctctcttgtgggttttggtggtttggatgataactcaattaaaggattgacatgtgtattgggtgttg

SEQ ID NO: 104383 - DNA, 263 bp, Zea Mays
aagataataactttaatggtacaaaactaaatataaaataatgataaaaaattcttaacatatttttctagaataagttatgatgtccttaatcacaaaaaatataaactttaaattcaacttgtatatggaaaaacaaaaagacaaatctttttatgggagatttgacttaccgtgtgtctagtttgttagaacctccttgtagacgatgttcttggtatatgtcccacaatctactgtgggattctttcttacacccttcc

SEQ ID NO: 104384 - DNA, 1960 bp, Zea Mays
gagcgacacatattccctcccaccgcccacacgctccccgaggcaggagcacaccgcacttgcattgcattgcattcactcgtccactccactccctactccggctccgcagtccgcactcgcaggccaccacctccaccagttaaaatagccggtcacccgctcagcacgcctcgtaatctcaatcgtatcgtccacctcaacaaaccttcgtccacgcttcgactcctgcaggagtgagggagagagtgatggagaggtgcgggagctgggactgcgacgcggcggcagcgcagaaggcggtaccggcgccgttcctgaccaagacgtaccagctggtggacgacccggccacggaccacatcgtctcctggggggacgaccgggtctccaccttcgtggtctggcgcccgccggagttcgcgcgcgacatcctccccaactacttcaagcacaacaacttctcctccttcgttcgacagctaaacacctacgggttccggaaggtcgtcccggagcggtgggagttcgggaacgagttcttccggaagggggagaagcagctgctgtgcgagatccaccggcggaagacgtcgacgtccgcggctccgccgtcgcctccgccattcttcgcggcgcctcacttcccgctcttccacccggacgccccgcaccaccaccaccaccaccagttcgtggggggaggagacgacggggctgtggcggccgcgcacgtcggcggcgtcggcgtcgccctcgcgttcccgcacccgcattgttggagggagccgccgcactccgccgcgccggtagccacgcggctgctagccctgggcgcggctcctccggcgccgtcgtccccgctgccggccgccgatgccggcggaggcgggcgcgcggccgtgctggtggaggagaacgagcggctgcggcgcagcaacgcggcgctgctgcaggagctggcgcacatgcgcaagctgtacaacgacatcatctacttcgtgcagaaccacgtgcgccccgcggcgcccagccctgccgcggccgcgttcctgcagggcctcggcctgcaggcgcgcaagaagcccgccgcggggccgctcaaccactccggtgggagcaccacgtccagcagctcgctcaccatcgcggaggaggagccctcgcccccgcccccgccgcagcaggccgacaagagcgccggaagcagcggcactgcgcggtctgccgccgaccgcgcgccgcccaccatgctcttcggagtgcacctcagcgccgcgcgaggcagcaagaggccggcttccccggaggaagaagacgaccagtcgcccacgtcgcctgctgggaagccacggctggcgctggagtgcgccggcttgagcctggccgtcgcggtgccctccgccggcgcctcgtcccctgctagcactagctagctaagctcactcaccttgcgcgcaacctgacgcgcgtttgcatgctgctgcatgcaaacgcaacggcgggcgtggccgttttgttgttctagctctagtttgatcgacgtgttccatttgaaccggtagatccagatgggttctctctcgttgatgtgtctagtgtctttcggttagggttcacgctagacttcctccactaattgcactgccgtgccaactgccaagcactctgagacgggtgccataacgccgttgatcctctggtgaacacatccaaaagctgcgtcttttttgtacagaagtagtactcgttagtcaattttacccgagggtgaagtgctcgtgctcgtagcagcagctcaggtagccgctgcctagcttgttccgatgcagcttgctattctgatgatttatttctgatgtgtggcagccatggctagcaatctttcggggagcggcgagtccggaaagacgaaagagagatctctcagctgtttcatttataaaaaccgcctttcctg

SEQ ID NO: 104385 - DNA, 1102 bp, Zea Mays
gcacaccgccggcgcccgcccgctatttgtgtccacggcgacgatctgcagcggcgatggctcggcgacgggacgacgtagcgctggccgccatcacctttgcgatcgtcgccttgtgcgcgcggtatgcgtcggcagtgggcaccacaccccagtcatccttcagctacagggagggtgacccgaccgggcctacaaaatgggccacattgcagaaggactgggatgtctgtgacagcggcaccgagcagtccccgatcgacgtcgccaaggtggaggtctctgaggatttagacccgctgcagcagacctacgagcctggcgacgccgtcatgcacaacagactccacgatttcatgctgaactggacaggagggaacggcggcctgacaatcgaagggaagaagtacaagctgaagcaggtgcactggcacgttccctctgagcacaccgtcaacggcacccgctttgacgcggagatgcacatggtccacgaggactccaccgacgccaagtcgaaagccgtcgtcgcggtgctgttcagcgccaaagcaggcaagtccagcaagctgctccgcgatctcaagccctacttcgagaggctcgctggtaaacagaacggcacggaggaagtgaagggccccgtcgtcgatccggcagcctggatagacaaggcctctggatactacgggtacgagggctcgcttacaaccccaccctgcactcaaggagtgctttggactatcatgagcaaggtagcagatgcatccaaggaggagatccactccatcgagtcggtgaaggaggcaaatgcacggccggctcagaaaatcaacagccgcgttgttcgctactacaaagcagcaggagccacagaagcgccggcgccggcgccggcgccagaagcaacctgatcgaggagaacgttagaacagtagctcaccctcccgagagtatgggttgaaaatctttggcgaattgatgtctcgatgcaaattaaacaggcatgccatctttgtgtaaacagaagttttacacactaagttccactcctatactactaccataattttagtaatgtaaatacttgaaagaattgctt

SEQ ID NO: 104386 - DNA, 1219 bp, Zea Mays
gcacaccgccggcgcccgcccgctatttgtgtccacggcgacgatctgcagcggcgatggctcggcgacgggacgacgtagcgctggccgccatcacctttgcgatcgtcgccttgtgcgcgcggtatgcgtcggcagtgggcaccacaccccagtcatccttcagctacagggagggtgacccgaccgggcctacaaaatgggccacattgcagaaggactgggatgtctgtgacagcggcaccgagcagtccccgatcgacgtcgccaaggtggaggtctctgaggatttagacccgctgcagcagacctacgagcctggcgacgccgtcatgcacaacagactccacgatttcatgctgaactggacaggagggaacggcggcctgacaatcgaagggaagaagtacaagctgaagcaggtgcactggcacgttccctctgagcacaccgtcaacggcacccgctttgacgcggagatgcacatggtccacgaggactccaccgacgccaagtcgaaagccgtcgtcgcggtgctgttcagcgccaaagcaggcaagtccagcaagctgctccgcgatctcaagccctacttcgagaggctcgctggtaaacagaacggcacggaggaagtgaagggccccgtcgtcgatccggcagcctggatagacaaggcctctggatactacgggtacgagggctcgcttacaaccccaccctgcactcaaggagtgctttggactatcatgagcaaggtagcagatgcatccaaggaggagatccactccatcgagtcggtgaaggaggcaaatgcacggccggctcagaaaatcaacagccgcgttgttcgctactacaaagcagcaggagccacagaagcgccggcgccggcgccggcgccagaagcaacctgatcgaggagaacgtgagccttgaagacgtaccacgatgcttctttgttcggcttcctatatatactcgaaagctcgtgtgctgagtattgacagtttctttggtgaaacaggttagaacagtagctcaccctcccgagagtatgggttgaaaatctttggcgaattgatgtctcgatgcaaattaaacaggcatgccatctttgtgtaaacagaagttttacacactaagttccactcctatactactaccataattttagtaatgtaaatacttgaaagaattgcttaaatataaatgtttaaag

SEQ ID NO: 104387 - DNA, 426 bp, Zea Mays
atgtacttgaacttacatatatcctcaaagaactcatcagcagcctcgtggcaattcttcatctgtgagattctgatgatcatcgtccgcagcttcacactgtacttcagaagcgactcgagagtgttcagcttctgttcagcattgagtggggagcgtacagtgatcagaacctcttccaaacaagggatgaggaaccttgaattcaaatttttcaggctatttttctggcacagggcagcgaacatggcaccatggatctcaaatttgcggagtttggggtggttgtcgaagaagtcaaccaaatcgacttccgggaacggctggagtgcgtccaggtcgccacagaactctatcttcatcactagatgcttcacctcgctagcgcactgcagcaccgagctcactgctccccagttccactga

SEQ ID NO: 104388 - DNA, 222 bp, Zea Mays
atgcccgcacaacgtgctaccccttcgcctgatccatccgccatagccgcgctgcctcgactcgtgagcatccgcaccgtccgccctttccatcgacgctgtggcgtgctggccaagcggcgccccgacgagcctcccctgccggtgctctactcgcccgacgtggcagccagcgcggccagccagcgcggcgaccgcacggccagctcgcgtggccgatga

SEQ ID NO: 104389 - DNA, 2512 bp, Zea Mays
ctggattatgcactaagcaagcgaaaagacaccaaagtgcgaaatgcacaattctccgtatattttgccagagactgacagcgagagcacatgtcggtcgagtagcgtcgccggagaaaaaaaagcactagtaaaccaaatgtccaaaacacgaggagcgtccatcttctccaactcaactgacagttgttggtcactcgcaccagccgcccagccggaaccggaagcggaaactgaagcgagggacccgggcaccggcgccggcacgattcactagatcgtaggcgcaggcgcgggtccgtctgtgacggacacggcggtggtggcgaggaggaggaggacttgaggagcgttggggtgagcgagcaaaccagatgcgctcggaatggggaagcccttcgatgtggagctcggcggcggcgcgggaggcctcgagatcgccggagccggaggcggtggcccatggggagggcgagtcttcggcgcgatcgggcgggcggtttcgttccggtgcgtcttcgtgctcctgctcgcggcaggggtgctcataccggtgctgttcctgctcgtgccctcgcgccagcaggggtacctctcagacgaccacgacgtgctcgctgctgaaatcaaagttggtttcactttggaaaagccagtgtcattccttacttctcacatagacaaactagggaatgacatatttgaagatattggtgtacctaatagcaaggtttccattgtttcaatgcaccccttgacctctaaatactttacacatatcgtttttggtgttcttccttatccaaaagatgcttcaataagtttaccggctctaagtgtgctgagatcatccttaatagagatgatgctccagcaggtgaacctatccttaacaccatcactgtttgggcacccatcttctttcgagctattgagattccctggaggaattacagtaattcctgcacagtctggttttacatgggtgaacacagaccccctattcaactttatgttgaacaactccatttatcagattttgggtaatcttacagagctcaaggatcagctgaaacttggattgaacttaaggtcatacgagaaaatatattttcagttcaggaatgagattggttcttcagttgaagctccagcaactattgtggcatcagtattagatggaagcagcaatcttttaccagatagattgagacaactagctaagctaatcagagaacctgatgcgaggaatcttggacttaatcactctgtatttggtaaagtaaagggtgttcagctgtcatcgtacctgcaacacaaaatctctggtttatctcctagcccatctccggctccatcgccatcacaatcaccttctccaagcatgccgacatccttgtcaccttaccctgcatcaagtctccctggtccagctttagccccttcatggagcagacacccttgctttccatgttttaggtgtaatccctctcctgctggtagttcaacggtaaaacctccttgcattgttagagaccccaggctacctccattaatgcattcaccaaagccacccattatgccttccccgccaaaatacctccctccagcagatccaccggttccttcccatgtagttcctcctcgccccttacctaatcccaatcattttccaaaagcagtttctagacccaattctcaaatgatgccaataccttcgccctcaagaccagtgtctcaacattggaaggccccaaggaaaaaagagaatagcagaacttcgaatttctctccaattgcgccatctccatatgctctccttcacacttgaagttatgcttgattggatgcctgggttgcttcgaatgttgggcatgcgtcatcaggaaaatctagccagaagagagggttcactatggttgcagttctgcttcaagcatgaccatgagtcgcaatcgtgggctatgatgcaaacaccaggctttgtttattggctaatgtaactatatgatgaattctaaagctcttcagatcaggttaattgtagatataggtctatacaatgctaattaaccagggtattacgccacgaaggtggctgccctacgcccttatcaaattttaagttctcaccgaagggttgggagcttatacagaggagaatgtaagcactctattactcggagtacacgttctgcaatattactggtaacgtattggccataatacaacatacagcttctctgcaagatttcatctgttctattgtggttgagcgtttaaccaatacaacatacagcttctctgcaagacttcatctctttggacataaagcaaagagaagacaagaaagcactattgatttcatcgcggtggagtaacttagagatggcaacgggactcgatcccagatttccagcgacattagaaaatagggatgcagaagtttcttccccacaaggatgtaaacagggaaaactttttctccaacgtggacgggaaagcattcttc

SEQ ID NO: 104390 - DNA, 2004 bp, Zea Mays
catcgacaccgagcgcccaagctccccagcccgaccccaacccctccgcgcggcgcgcggcgcccgcgcgcgtctcccgcccaggccaacgccaaccaaacaaagtccgttagccgcgaccgccagaccaccccgcccgggccgcggcgcaggatgcgccaacatcccccttgcctatagggcccacgcggcagcgagacgagacgagacgggacgggcaggtcggcgctgcgcacacggagctggtcactcacctccctgtctctcttctccttccctcccgcggtggttataagacccctccgccccgtcctctcctctcctctctgctcccgtcgatctgccatcctctgcctgccccgcttgcgcggcgcgtctgctctagtgatttgagacggagatccgccagagattgaggagagggagggaggcgccggggccggggagcggcggcggcgagggatggacggccacggcggcggggcgggggccggcaagctgacgcggacgccgtcctcgctgctgcgctcgcccacggtgcgcaactgctcctcgttccaggccgtggttgtcgacgacccggagcccgacgacaagaaggcgcaggcgcaccccaagcccccgccccaccacttgcaccccggtggcggccccgcccacccgcggctcgtcctcgcgctcccgctcgccttcctgctcgtgctgctcctcctccgcggcggcggcgacggccaccacctcgccctcctttcggcgtccgcggccgtcgcgctcgccgccgccgcgggggccgcgcgcctgctccggggacgtctgcgccgctcgccaggctccggctcggtccagtggttcatcggggacgacgacgacaagccgcagaagcgggcggacaaggccgccgcgccgcacggccgcgtcgtgcgggagggcgtcgagttctacagcaatggggactgctacgagggcgagttccaccagggccgctgcaacggcagcggcgtctacaacttcttcggcaagggcaagtacgagggcgactgggtcgacggcaagtacgacggctacggcatcgagagctgggcgcggggcagccggtaccgcggccagtaccgccagggcctccgccacggccacggcgtctaccgcttctacagcggcgactgctacgcgggcgagtgggccggcggccagagccacggcatcggcgcgcagacctgctccgacgggagctcctacgtcggggagttcaagtgcggcgtcaagcacggcatcgggagctaccatttcagaaacggtgatcggtatgcgggcgagtactttggggacaagatccacgggtttggcgtctaccgcttcgccaatggccactgctacgaaggctcctggcacgaaggcaagaagcagggatttgggatgtacacgttccggaacggcgacaggcgatcgggggactgggattctgggactctcaagacccccttgccccccgctgatccttccgtccagcgtgctgtacaggccgctcagcgtgctgcggagaacgcatttcgcctgcctagagttgatgagcaggtccacaaggcggtcatagccgccaacagggcggccacggccgctcgagtagcggcgatcaaagcagttcagaacaggatggatgggaagttttgcgatacctgtgtgtgaatcgctgcgtgcgagaccatgttctttttgtttctccttctaatctaactgtacattagggtagtgaaggacaataactaatcagagtgaggtcagacgaccggggcagcacaaccgcgtgctccgagtcagggttcatcaacgaacgggagcggacctggcaaaaaaaaaacatttgcgagaaacggctctgatcctgccatatcgccatggccatcggaggttcccttcctccttccttgcaacaagctgtaactgtacatagatccaagtgttgtatcaatggaagagcgagtttttccagcgccccttttcagtgct

SEQ ID NO: 104391 - DNA, 1651 bp, Zea Mays
atggatagaagaactttctttattttgtgtgagatgcttagagatgttggtgggctaaaggccacacgcaatatgaccatagaggagatagtggctcattttttgtatacattggctcatcatttgaagaaccgaacaattggaaggtttttctttcgaagcggcgagacagttagtagacagttcaacttatgccttctagctgttctaaagttgcaacatttgcttcttaagacccctgagccaattccagagaatagcactgataatacctggaaaaactttaagaattgtttgggtgcattagacggaaccgctatcaaggtaactgtgccaacacatctaaaaggaagatataggtcaaggaaagtttcctctgttttttcctacatacaatacttgtgaactaaaggacgatacaacagctcaattcttaggaatgtgaatcctatattttttctttgtttttactgcgttttaaaggagccctaagaatatacacataggagataatttcagggtatcaaggctgttttgatgtcatcgaccattaaaaaattaaaacaataagtatgtaatcctatattttcttttcactttatttctggcaactacatttatccaaatataaatagatatgatattgcacacataattcttattctcgaaacattggatgcttgttgctattccaccttctctgcttatatcctattccacatgtgtctgcttgtatctgctggtgatgatgtgtctttgttttttacagaataatccagatgcaaaagggttgtatggagtttcctttccttactatgatgaactttcaatggtatattccaaggacatggccacaggtgaaggtgcggaagacatgacagatgctgttcaaaacttggaagaagagttagttcgtgtaaatgctaatgatgaagaggatggagaggatatgacatctgtagagacaccaaggcgttctgttgactcaacatcatctagctccaagaagcggaagaaagagtggaaaggaaagaagacttcatcaagtgacccgcttcttgatgtgttcaatgaagtgagtggtgatctcaaggttgccaccatgtcaattggaaaaatggcgcaagctatggatcgtgaggcatccaaccaagagaaggcaagagatgaggatccacaacaaaagctaagagagaaggcgatcaatgaggtccggagacttgaatttactggctcagaagttatcaaagcagctggtgtgtttgttaggatgccagatcaaatggggatgttgtttgcacttccagaaccactgaggagggaatacattgtcgacatgctacgtgatgaagccgcaaggagagagagagagaggtcaaagtgaaggtgctggtctagatgttgaatgatggagctttggaagttgttgttggtttagttggtctcaatctgtttacctttagtgttcttcatatgttgttgttgaatgactgtgaatgatgataaaaactgaatttttatgatgttgaacgttgttgaatgttcacgaatggtattgactatggtattgtatctgtgggtagctttcaatgtggtttgttgaatgtcggtacctttcaatatggaaaaaactgaatttttatgagttttg

SEQ ID NO: 104392 - DNA, 504 bp, Zea Mays
atgggctccgccaccgtcggcgccctcctcctcggctccgcgcccgcctccggccccagcaatagcggcggggcgcccagcatagggctgcttgcatttaaatttgcactgcctcgaaatccactaggaaaggtgagttcagaagacacgggcgaggagtatggcggccccgtcgttcgcgccaagcggacgaggatgggcggggacgaggataaggtggtgacgcgccgcaggttggacttggacctgcggttccgtttccggtttgttggtggtgcatcggttgttcagggcctcgatcggtggcaaacgatcaggaacgagggtgcttgcctaagatccaatgtcaggtgcgatcgtccatccaaccttccatcctttgagatggaacgccagcttgttcatggtcacggtccaaacgcacatgcaagggatacaagccaccgatatatgatcatcctcgaacgccagcttgtcacagtgacggacccctcttatggttag

SEQ ID NO: 104393 - DNA, 3291 bp, Zea Mays
tttagtcaatcgttatgaactctcttctaatcgctcacttcattggtcgtgttgtaccaagacatatttgtatggagtaaacaataacatcagttagccaaatcaaaaaatatattatacagagagtagagacaatcaataaaaaatcttaaattttttgatggatagtttacgcacggacaaccgattagtatgatatatataaaccgcatcaaagcacagacacgaccaactggacagtgatatgatgttgccaagaccaaaaacccacctaaacctctccggcgtctgtcttccacagtgggacacataaaccatgcgcggtcgcatggacctcctcccgcgcctcctcctccgccgccacgtccaccgccgcgccaaaccagcgtccccatcgccccctccccttccccccaacccgccgcgcccgccgcagaagcccgagcccgtctccatccacggggaaacgtggcacgacagctatgcttggatgggcgcgctctccgacgccgccgccatgcgccacatggacctacacatggaggctgaggagaagtacgccgaggcctgcctcgccgcttgcggcgctgaccgcctcgcccggaagctccagctcgagatggcctcctgccttgcctcggactcgtgcacgccgcccgtccgctggggcccttggctgtactaccgacgagcggacgagggcaagcaataccccgtgctctgccgccgctccgccgcgctccatagcgaattcgtctcgtacagtgacccctccgcaggtttcgacttcacggctgggaagcgcatcgagcagaaattggtggattacaacaaggaggccgagcggttcggaggatactcatatgaggagctgtctgaagtatctccagatcacaggttcattgcatacacaatgtatgacaaagataaggactccttcactttaatggttagggacctagtaacaggcacacttcatgataaaccctgtgctgaccgggtgtcaaatatttcatgggctatggatgggaaagcattggtttatattgttacaaatgaggaaagaagaccatataggttgttttgtagcatgattggatccaacaaggatgccattctcatgttggaagaacctgatgagaatatttttctaaatatcagacatacgaaggattttcgatatataacgttaaatgtcttttcagatactcactcaaaggtgtatttaataaatgcttctaatcccctttcccaaatgacgcttgtatgggaaggggaatcccaagttcattgcattgttgaacatcatcgtggtcacctttatttgtttacagatgctgcaagagaaggtgtccctgttgattcacattatataatgcagtctgttgtggaatcttctgggccaaacagttggaagaatgttttagttgaggaacctggtgtcattcttgaagatgttgatttttgtgatactcatatggtgctaactctgagacaaggcagaaaactcagactttgttcagttaaattgcctctaactgaagatatcaaagtacctactcatctatcagatttgcgtccaattgacctgcctctccccagtgatgtgtgtcagattgtatctgggccgaattatgattattattcctcaacaatgcgtttcacgatttcatcacctgtgatgcctgatgctgttgttgactacaacttgctgaacggacagtgcaaatagtccaacaacaaacatgcttcatgagcgaacaccgagcactatatggggcttcttttgctgcaaatatgggcaggcaatcctcagataaagcagatttttcaaatgatgattttgttggttgtgcttggaatgagctctctgaatactatgcttgtgaatactatgatgttccatcaaaagatggtgttttggttccattaactttagtatactcgcggaagcacaagcaagatggaaatccaggattacttcatggacatggtgcttacggtgaaattctggataaacgttggcgcagtgaattaaaaactctactggatcgtggttgggtgattgcatatgctgatgttaggggtggtggaggttatggtaagaagtggcaccaagatggttcacgtaccaaaaaaatgaattctgtatatgattttgtttcttgtggagaatttcttcttgaaaaggctatcatacaagaaaataagcttgctggatggggatatagtgctggaggacttctggtggcctcggcaattaattgtcgtccagatttgtttcgtgctgctgttttaaaggtccctttcttggatgtttgcaacacccttctccatcctattgtacctcttacagccattgattatgaagagtttgggtatcccgtggattatgaggaattccttgcaatcaggaagtattctccttatgataacatccagaaggatgttccttacccagctctgtttgtgacgtcatcattcaatacaaggtttggtgtatgggaggcagcaaaatgggttgcaaaagtccgtgaatttactcaatatgatccagagaggccggtaattctcaacctgacaacagatgttgtagaggagagcaagtatttgcagaccagagaattatcattggagaccgctttcctcattaaaatggtctgcagtgtgtgaacaacatgtgtcttattattctgaatcaaaccctgttggtcaaatatgggaagctgaggcaacaatgtcagtcctctccatcctaggcacctgagctatttaatcgattaattggagctttatgagcttttgcagaattcatgaagaatttgtatgtccatatttcctaaatcatgaggtatctccagatgacatggttttatgccactacttacaatagtggcttgtgcctagtggtattatgctcatttgtgagtgagtccagatatcccgtggaacaagtccacaaacatacggttatagagcctctacattatactgcaatgaaatgttgataccctccatgatagtaaaagttgcctttgtatttggaagcatccaacttaatactatttaatagtatccgagcatgcaccgctccagagtcagaacagaacacaaagccagcttcttgttacaattgtagggatcatcagttgtatgcaggaccatccgattcttactgatattttgtcagtatggggatatgttgcaaatgtaccgcagtcgtgtaagcacgatatgtttgaagattcggttggaaaatattcatcctatgcaagtgaatctatggtacag

SEQ ID NO: 104394 - DNA, 757 bp, Zea Mays
ggaatttcgaaccggtaaaatagcagatcgccctcccactccagtcctcccggttttctagggtttaaagagcttgccgagcccgccgtgcgccggccggcacatctccactactttccgccatcgccggagccgaccccttcgtctccgcacgcggcaatggcattctccttcgcctcgccggctgcgtcgaaccctttccagacgccggcgacgccgaatccctttcaaacaccggctccggccacctcgcaggcgccatccctatcgccttcgccgttccagttcagcttccagcagcagccgcagccacagcagcaggtggcgccggcggcgcaacctccgcagccgcagccgcagccgcagccgcagaagctgatgctgtacacgacagatatgaaatctgcgggatacagcaccaagtgggaggagctgcacgccgagtcgcagaaggccttactccagatcgagtagggttcttcctctgaatgttcacttttccttcttttggtttccttgcacaggagcgcgcggttattgcttagatgtaactcgctgtcgatttacgcccacaactagaattgctccacccaattactaggccagattagtggaatcaaatgtgctctccactgattctttacggtgaaatgaatgtgtgatttaaattaaaggtattgtgggatgacgtatttaaattgttcccttcctgtatggggcaaaatgtttttttatttaaggttgctgtcataatcca

SEQ ID NO: 104395 - DNA, 1919 bp, Zea Mays
agatcgccctcccactccagtcctcccggttttctagggtttaaagagcttgccgagcccgccgtgcgccggccggcacatctccactactttccgccatcgccggagccgaccccttcgtctccgcacgcggcaatggcattctccttcgcctcgccggctgcgtcgaaccctttccagacgccggcgacgccgaatccctttcaaacaccggctccggccacctcgcaggcgccatccctatcgccttcgccgttccagttcagcttccagcagcagccgcagccacagcagcaggtggcgccggcggcgcaacctccgcagccgcagccgcagccgcagccgcagaagctgatgctgtacacgacagatatgaaatctgcgggatacagcaccaagtgggaggagctgcacgccgagtcgcagaaggccttactccagatcgaggacaagatacgggactacaaagacgagtgtgagaggttggaccagtgcagtcgcctttatgactcctcaatctcaaatgccaattttgagcttgatgcgagtcgcattgctcaggaacttggagggaccaccactgtaatggagagagagaaggcttccattcaagagttgatgaatgttgtcaatgaaatgatgtggaacacagaatttggtattaggtcatatctgatgttgaggccaagattcacccgtccaagtgctggagttgcaaatggcggttcttcaaatccttctgctggtgctccacccaatcagccagtggtagatttctacagtggagtcccaaagcgtccttccatttttatgcagcgcactgtcaacaagtttgagtgctatcttgcggagtgttgcaagtggatcggggagctagagcagcttgttcaaatggagacaaataaaagatcatcagattctctagaatctcttccaaaagttatgtcaaatgtgcatgattacttcatctatgttgcttctaaggtggaaaatcttcatcaacatgtcgaatcaatgaaaactgaatatctcaatgaacaacgccgcaccggcaacgggagcgatccatttctggaggcaaacagacgagaagcagctaaacaagaagcagctgccagaagggtccatccaacactgcatctgcctacccctgcgcagcccacggcacagatcgctgcaccagctacaagccaaccgcagcaaccttcctttccgtccgctgcgacttcctcaagcgccttctcaacctttagcactccggcttccgctccatcctcgtctagtctgtttgcaactccaacaactccagctccatcgggcaacctttttggtgcgccaggatcggctcagttgaccacaccatttgggacaccttccactcctacgttagcatcgacgccagctcctggatttgggactagcgctacatctaatttgggtgggacatctctattttctacaccgtttggaggtggagctacagcttcaggttccagctttggtggtgcatccaaaggaaggtcgaagccccggggacgacgctagatgtaaatggaccaacgtgaaacgaggatgctcctggttcacttgactgctcccctttccctctatcctatgcaaaatttgtgactacttgtcgccagcaattctagtggagttttaagtgacctattgcatgactactacctttaagcctttgtatcagatataccatcgcattagttgtcataaacttttaatctttgtgccccttcacagtctcttgcctgggtgtcagggtgtgctgtcacaacatagggctgaacaaatctagagttagaacatgccagctggaattccagtttcttctttgaacatgagcgttagcagctcgttccttggtagacaatctcgttctttaatgcacgtatttgatcgtc

SEQ ID NO: 104396 - DNA, 2217 bp, Zea Mays
aaaaaaaaaaaggaagattaacgagaagctgaaaaggctgatgcccagatatcatcagcgtctctcaaatcaccgagtacgacccggcgtttgcggccgctcgtttccatttccattccagaatcagatagctttccctttgttcagaaaccgcgagcaatgtctggtagtatttatacggccgcgcgtgctggacgggccaaccggccagggccagtctctacatcgaacacttcgttcagacggcggcggcggccatggcctctgctgcagggtctgaggaggcgtgcagggagatccgccgcacgtgcggcgcgccgcggcgcctgggcctcctgctggctccgcggagccccgccgagaggcagcagatcagggcggcgtaccgtgccaggttcggcgaggacctcgccgcgacgctgcacggcaccctggcggcccccaacaccaaccaggtggacgagctctccaagctgctctacctgtgggcgctggagccggcggaacgggacgcggtcgtggcgcgggaggcggtcgagggcggcgtgaccgcggccggctaccgcgccctcgtcgaggtgttcacgcgccggaagcaggaccagctcttcttcaccaagcaggcctacgcggtcaggttcaggaggagcctggaccaggacatggccaccgagccgtctcacccttaccacaggctgctgctggctctcgcggcgtcccgcaggtcgcaccacgacgacctcagccagcacgtggcgaaatgcgacgcgaggaggctgcacgacaccaagaacagcggcgctggtgctggttctggttccgtcgtcgacgaggctgtgatcctcgagatgttcagcaagaggagcatcccgcagctcaggctggccttctgcagctacaagcacatatatgggcatgactacaccaaggcactgaagataaacgggtctggcgaattcgaaggacccctcagagtcgttgtcaagtgcatctacaacccttccaagtactactccaagttactgcacagaagtatgctacccgcagcgactgatacgaggatggtaacgagggctatcttgggcagcgatgatgtcggtatagacgagatcagatcagcgttccagagtagttacgggaagagcctcgcagaatacatccaagaaaacttgcctgggagtgactacagggatttcctcgtggctgtggcgagtgcgtcagtggcacaatgaggttgtccatgcttgtagttgtagcagaggcatccctgagttgtccatggaagaaaaggaaagaaaaaacactgttttgcacgctgcaaaagtaagtcgaacaaggaaaacagcagtctcatgtgtgggatttcagtttgttataccattttatttacaattgctaggctcgacggtggaactaccagatctcatatgcaaaaaaaaaaaagatgaagataagcttattgcagagcactatatttcagacatcaggtcagatgagcttcatctttcggaagtactgttgtagatgccacagctgtaaaacagagactgcaatgcaaacaacaagagacagcatgctcagccacgtgaccctagaattcgtctgctcactgacgtccctcatgttagcttctctgcaccgagaacaacttcgttaaatagattgctattgtaccctggatatcagccaggtacgtggataatcacaacatgaagctagaaaaaacaaatggatgcacagacttggattttagtagcagcaggttgtcatggattgattggacagcaacttcgagcttgagcaactccagttcaactccctgattataaaactccatgtcatatggaaggggagtaaaacaagacaacagctggcagtataacgcctcattttttaatatacttcacctcgatcttttcctttttggcaacagaatcccagtctctactagccagcccaattttccagtcaaggtttagcttcaccactaaccctctgtcctcaccatcaattgagaagcaggcaaggtagttccctgcttctgctgtggtaaatgcaaattgccccatcgaaaccttctctttcttatgaacaatgtctccaaaaggggacgtaacctgaaataatgaccccccaaagaaatgtaagcatgttagacaactcccggtcaatgtccagttcctctcccagcaaagttaccagtatgttctctatgaa

SEQ ID NO: 104397 - DNA, 1726 bp, Zea Mays
taattaattacggtgtcaactactattttagttcaatttatcccccttaaactaattacgtcgtaacgccgttttagtctgatattgcatttgtagaggatatatcccgtgcaatcacttattttggtgcaagcgtgcaatcaaattatccagagcatccaatctagatccaacggtttcatatggaaggggttaaaagtaaaataggtactatgttttaggtggaatgggttaaatataaaataacagtcatcattagatctagatcggatgcaccagatcgcttgattgcacgcttgcaccaggataagtgattgcacatgatatgtcctcgcatttgtaggtccaaacgattggttaccttgacggagatggtaggctgggcgtggtggtgatcatagaggacggagtagtcgccgatgacaacaacgttggattggatctcctccgacacacacttagtccctgacggcgcaatctccagccataccgccccggcccccgccgccatccaccacacggccgccgccgccaccgcggcccacgcgccacctcgcgccatcgtctcttcctgccgcaccaccacaacgaacagccccaagcgccactacgtccatctcaacgcgattcgataggcccataaacatgcgtggcgcaacaggctcaaagaaaataccaagttgggctttattggacggagattgtttggcccagtgactctacccacctccagtttccacttagaaaagaataatttctcccgaaaaagggtgaagagcagaacgacgaggagattgcttggtgggaggagttggtgaggagaggtcgcgaccatggagaaccttgctctgctttggggcatcatcggcccgggcgtgtccggcgccatcttcggggccggatggtggttctgggtggacgcggtcgtttgcagcgcggtccaggtctccttcctccactaccttccaggtgagaccgggagccctaagattcgaggagtagcctccatttttcgcttgagagctttggggttcgattgatgggtgcgattccgttgggcatgggcatgggcattttgcagggatcttcgcttcgctggcggcgctcatgttcaattgcgtgaacaaggatgagatcggatacgactattactcaccctacggggacgattcagagtggagagtgaagctctggctttttgtggcatatgtcgtttcttttgtctgtttagctggatccgtgggtttattggtgcaagatgcactgacgaacaagggcccttctgtctggactggtgttgctggcgttctgcaatgtgttcttgtgttgataagcggcctggtgtattggacatgccactcagaagattaagggcgtaatgtcatgagcagacttgcaaggttggtcacagttgtgtgaaggaaattatttctggcaacatatgattttgtgtgatggaaatgacggacactgttcactgctgaatgggatgactagatgtttcatctgtgcatatctgacttttggaaaatgatgtttcttaacaccggtgcatgtgttagccccagcttcttgtgagttgccaatctgtgatgcggtcgtgatcatgcaaatcttttggctaaagctgaaaccggctgcagcaacaagctagtgctactatttacaccatgcctcctagtcaattacagttgacttcatttaagtcgagacgctgtctcggcct

SEQ ID NO: 104398 - DNA, 874 bp, Zea Mays
ttagaaaagaataatttctcccgaaaaagggtgaagagcagaacgacgaggagattgcttggtgggaggagttggtgaggagaggtcgcgaccatggagaaccttgctctgctttggggcatcatcggcccgggcgtgtccggcgccatcttcggggccggatggtggttctgggtggacgcggtcgtttgcagcgcggtccaggtctccttcctccactaccttccagggatcttcgcttcgctggcggcgctcatgttcaattgcgtgaacaaggatgagatcggatacgactattactcaccctacggggacgattcagagtggagagtgaagctctggctttttgtggcatatgtcgtttcttttgtctgtttagctggatccgtgggtttattggtgcaagatgcactgacgaacaagggcccttctgtctggactggtgttgctggcgttctgcaatgtgttcttgtgttgataagcggcctggtgtattggacatgccactcagaagattaagggcgtaatgtcatgagcagacttgcaaggttggtcacagttgtgtgaaggaaattatttctggcaacatatgattttgtgtgatggaaatgacggacactgttcactgctgaatgggatgactagatgtttcatctgtgcatatctgacttttggaaaatgatgtttcttaacaccggtgcatgtgttagccccagcttcttgtgagttgccaatctgtgatgcggtcgtgatcatgcaaatcttttggctaaagctgaaaccggctgcagcaacaagctagtgctactatttacaccatgcctcctagtcaattacagttgacttcatttaagtcgagacgctgtctcggcct

SEQ ID NO: 104399 - DNA, 849 bp, Zea Mays
ttagaaaagaataatttctcccgaaaaagggtgaagagcagaacgacgaggagattgcttggtgggaggagttggtgaggagaggtcgcgaccatggagaaccttgctctgctttggggcatcatcggcccgggcgtgtccggcgccatcttcggggccggatggtggttctgggtggacgcggtcgtttgcagcgcggtccagggatcttcgcttcgctggcggcgctcatgttcaattgcgtgaacaaggatgagatcggatacgactattactcaccctacggggacgattcagagtggagagtgaagctctggctttttgtggcatatgtcgtttcttttgtctgtttagctggatccgtgggtttattggtgcaagatgcactgacgaacaagggcccttctgtctggactggtgttgctggcgttctgcaatgtgttcttgtgttgataagcggcctggtgtattggacatgccactcagaagattaagggcgtaatgtcatgagcagacttgcaaggttggtcacagttgtgtgaaggaaattatttctggcaacatatgattttgtgtgatggaaatgacggacactgttcactgctgaatgggatgactagatgtttcatctgtgcatatctgacttttggaaaatgatgtttcttaacaccggtgcatgtgttagccccagcttcttgtgagttgccaatctgtgatgcggtcgtgatcatgcaaatcttttggctaaagctgaaaccggctgcagcaacaagctagtgctactatttacaccatgcctcctagtcaattacagttgacttcatttaagtcgagacgctgtctcggcct

SEQ ID NO: 104400 - DNA, 2280 bp, Zea Mays
atgtcaactcgtcagcaggttcctgctgtcaagtcacacgccaaaaatgctgaccaaagtgcctgggagtcctctcccactccgctacctatgtcatctgtctcccgcttctcagatcaagctaaagttgagcttgaaaatctcagcaccctccttcagattgttaggctttcagacacacccaacgttgccaatcgtggagccatcgtcgccggagtctgccaggaggaggcacaggcggcccctcctgtggtcgtccaggacgtagtttcggcgcggcaggtcgaggtaaatgaagcgattgccgatggtgtggatattatggggtacaaccagttggggccaattgatttagtcagtgcatctcattcacaaatgtctaagcgctacggctttatttatgtggatcgtgatgataatggcgaaggaagcctcacaagaacacgcaagaaaagcttcggatgggatattatgtttagacgaaatcttattacctctgccatcttattaatggcaccgttagccttttctgcacaatcattggctgaatcattaacggtggaacaacgccttgagttattagaaaaggcgttaagagaaacgcaaagcgaactcaaaaagtataaagatgaagagaagaaaaagtatacgccagcgacggtgaatcgtagcgtaagtacgaatgatcaagggtatgccgccaatccgttcccgaccagtagtgccgcaaaacctgatgctgtactggtcaaaaatgaagagaaaaatgccagtgagacaggctcgatttattcttccatgactctgaaagatttcagtaaatttgtgaaagatgaaattggctttagttacaacggctattaccgttctggttgggggaccgcctctcatggttcacctaaatcatgggcgattggttctctgggccgctttggtaacgaatactccggctggtttgatttgcagttaaaacaacgtgtctacaacgaaaacggcaaacgggttgatgccgttgtgatgatggatggtaacgttggtcagcagtactctaccggctggtttggcgataacgccggtggcgagaactatatgcagttctccgatatgtacgttaccaccaaaggtttcctgccctttgcgccagaggctgatttctgggtgggtaaacacggtgcgccgaaaattgaaatccagatgcttgactggaaaacgcagcgtactgatgccgcagcgggtgtaggtctggaaaactggaaagtcggtccgggtaaaattgatatcgcgctggttcgcgaagatgtcgatgattacgatcgcagcctgcaaaacaaacagcagattaataccaataccattgatttacgctataaagatatcccgttatgggataaagccaccttaatggtggcttcaacgaattctccttcctggtcgcgaataactctatcgccagtaactttgggccgttatgctggcgcaagtccatttaccacctttaatggtcgttattatggtgatcacaccggcggaacagcggcgcccactctgatttcgaatctattcgtgcggttgttcgcccggcctatatttgggaccaatataaccagacaggtgttgaactggggctatttcacccagcaaaacaaagatgcgaatagtaataaatttaatgagtctggttataaaaccacgctcttccatacctttaaagtcaataccacgggtatttctgctcagtgggccatagcagcggatatgccagccagcccggcacccactatcccggtgaaacagtatgtgactcaggtcaatgccgataacagcgtgacctttcgctactttgcccctggggcaaaaaatgtctctgtagtggtgggtgttccggttccggacaatattcacccgatgaccaaagacgaagcaggagtctggtcgtggcgcacacctatcctgaaaggcaacctgtacgagtattttttcaatgttgatggtgtacgcagcattgatacaggcaccgcaatgactaatcctcagcgccaggttaactccagtatgattctggtgccaggcagttatctggatacgcgttctgttgcgcatggtgatttgatcgccataacttaccactccaacgcattgcaatctgaacgtcagatgtatgtctggaccccgccaggatacaccggcatgggcgagcctttgccagtgctctatttctatcacggctttggtgataccggacgttccgctatcgatcagggcgtatcccgcaaatcatga

SEQ ID NO: 104401 - DNA, 2202 bp, Zea Mays
atggcgcggcggaggcgcgacccggtcgcggtggcggcgcggcccgggcagtttttggatgagatcacggcatcacgcacgcagcgcctcatatcgaacgcaagcactgcattcgcaataatgtcgccgtcccgggcgaagcgcaaggtggcacagatcagggagcaagccctctcggcggcggtcggcgacgtggtcgcgcggaccatgtccgcggtggcgggcaggtacgacgcgcacgcgagcgtggacgaccagctggagcgcctcgccacgctgctcgtcatggtgcacagcgccgtggacgaggccgagcgcgtgcacgtcgccaactggtggctccgccgctggctgtggaggctccgctacgccgcgctggacggcgacgaggtgctgctgtccatgaggcagcagcgagcggccgaggcggcggaggcgaccgcgatgacccagagtgcgggcggcaggctctggaacgccgcgacgcgcgtcgtcgtccggtccgcgaagagcctgctcgtgtcgtccaggagcggaggcaggggcggagggcccaatatggctcagtattgcttgagcaataccttgggctggcccactaagagagtaggtcatccgtctcagcctccaccgtaagcgccgtccccacgtcccgcactcccgccggccgcagtcccgctcctgccggcgcgctgcagcagctcggctgctcgcggtcgcaggccgcagcttgtcccgcccggcgcggcggcgcccaggctgaggctgctcgcgcgacattcctgctaggatccgaactaggatcgaggtggccgtgctcaacttcctcgccgcgctagcctccccttccttgccggccatctccgtcctccccctggaatttggtccctagccaattatcacgattcgtcatcagttattgcaagctgtatgatttctagttcagataaccttggtgaaatgtattgcgagcagtatggttagcactgaacaacccagtgtgttacagtattagtcggagctctgccaattgcagtcagcacagtgggttgctaaacgacgcctcgtcgatttatctctcacacaccttctgcaagaggtcactgacacaatttttatctctcaactgaaggtatatttttatttcacttgttcaatagtttttactttaatttatcattggtaactcatttctcctttttttctagattttattcgctacatagcatttgattgtaaataaattgtaatcaaaatgactattaaataagttattttttaacatctattacttattttgtcataaatttttattcttcgttatgttagcaacacctaacttttttggcgtcctccgccactgagcggaggcgacgtggatcggttgaggcgcacggtggagaggttggagcaggcttgcgccgggctaggcgacttcctcaagctgctcgagctggatatcatgaggtcgcaggcgccgccgccggcggcggctgcggctgctgctgctgctccagaaacacgcggctgcagccacgacggcgacccagtggaggatttcgtctccgacaccagcagccagccggacacaagcctcgacgacggatcagaatccgagcatgacgatgacctgagtacctgacctacattttgcgcgagcacatttcgaagcggactacattggctgcacggcagcgatcggcctgcagatcgtgacgcgaaagatccagcgagcggcgggcaagttgaggacgatgccgccagcccctgtgcctggcactgacattaacatcggtgattgcccggcaccagaacctgcagacacggcctggctgcgcgggatggtggccgacatccgcgaggccgtaagactcggcgacaggacggaggtcaacgccgagcgcaggtggctggcggagtggcgccgcgagctgcaggctgtggcggacagagctgaccgcgtgctgcttgcgtcgccgtcacctgtggcatccctgggtgctggaggagacgatgaggtggcgaggatggtgcggagtttggaaacagcggcagcacacctgagggcctacgtcacgctgctcaggtttgctgtcgtggttgttgaaagtagataggattttactagtgctaagaattttttaagtttgctagctgccaacatactctgcgttacaatgggatataaaattttgttttatg

SEQ ID NO: 104402 - DNA, 2052 bp, Zea Mays
atggcgcggcggaggcgcgacccggtcgcggtggcggcgcggcccgggcagtttttggatgagatcacggcatcacgcacgcagcgcctcatatcgaacgcaagcactgcattcgcaataatgtcgccgtcccgggcgaagcgcaaggtggcacagatcagggagcaagccctctcggcggcggtcggcgacgtggtcgcgcggaccatgtccgcggtggcgggcaggtacgacgcgcacgcgagcgtggacgaccagctggagcgcctcgccacgctgctcgtcatggtgcacagcgccgtggacgaggccgagcgcgtgcacgtcgccaactggtggctccgccgctggctgtggaggctccgctacgccgcgctggacggcgacgaggtgctgctgtccatgaggcagcagcgagcggccgaggcggcggaggcgaccgcgatgacccagagtgcgggcggcaggctctggaacgccgcgacgcgcgtcgtcgtccggtccgcgaagagcctgctcgtgtcgtccaggagcggaggcaggggcggagggcccaatatggctcagtattgcttgagcaataccttgggctggcccactaagagagtaggtcatccgtctcagcctccaccgtaagcgccgtccccacgtcccgcactcccgccggccgcagtcccgctcctgccggcgcgctgcagcagctcggctgctcgcggtcgcaggccgcagcttgtcccgcccggcgcggcggcgcccaggctgaggctgctcgcgcgacattcctgctaggatccgaactaggatcgaggtggccgtgctcaacttcctcgccgcgctagcctccccttccttgccggccatctccgtcctccccctggaatttggtccctagccaattatcacgattcgtcatcagttattgcaagctgtatgatttctagttcagataaccttggtgaaatgtattgcgagcagtatggttagcactgaacaacccagtgtgttacagtattagtcggagctctgccaattgcagtcagcacagtgggttgctaaacgacgcctcgtcgatttatctctcacacaccttctgcaagaggtcactgacacaatttttatctctcaactgaagcaacacctaacttttttggcgtcctccgccactgagcggaggcgacgtggatcggttgaggcgcacggtggagaggttggagcaggcttgcgccgggctaggcgacttcctcaagctgctcgagctggatatcatgaggtcgcaggcgccgccgccggcggcggctgcggctgctgctgctgctccagaaacacgcggctgcagccacgacggcgacccagtggaggatttcgtctccgacaccagcagccagccggacacaagcctcgacgacggatcagaatccgagcatgacgatgacctgagtacctgacctacattttgcgcgagcacatttcgaagcggactacattggctgcacggcagcgatcggcctgcagatcgtgacgcgaaagatccagcgagcggcgggcaagttgaggacgatgccgccagcccctgtgcctggcactgacattaacatcggtgattgcccggcaccagaacctgcagacacggcctggctgcgcgggatggtggccgacatccgcgaggccgtaagactcggcgacaggacggaggtcaacgccgagcgcaggtggctggcggagtggcgccgcgagctgcaggctgtggcggacagagctgaccgcgtgctgcttgcgtcgccgtcacctgtggcatccctgggtgctggaggagacgatgaggtggcgaggatggtgcggagtttggaaacagcggcagcacacctgagggcctacgtcacgctgctcaggtttgctgtcgtggttgttgaaagtagataggattttactagtgctaagaattttttaagtttgctagctgccaacatactctgcgttacaatgggatataaaattttgttttatgatgtttacaccgttaataataagctagcaatttatgttggatcctta

SEQ ID NO: 104403 - DNA, 1071 bp, Zea Mays
gaccccgcgttccgccttcgtttctctgcctctcgcctagtgtcgcggtccgacgaccggtgtcgccgccgtcgccgccgccgccgctctaacgccaggtgctgaggccttcgccagcctctttgccggcgacgaaaacccaccagatcttacagtcctttcaggatgaccaagtatacgaggaacaaaaaaagttcatcttctcacagtagttccagattcaaaagagtttccagaaaggagatgtcatttgcagtggagaaatacgcatggacaaatgcaacttgtccagtatgcatggaattcccacacagcgctgttcttctactctaaaagaagcctctgaggacccagatgcaatagagcttatgtgtcccctatgccgtggcgaggtcaagggatataccttggttgagcctgctcggaagcagctgaatcgcaagaggaggagctgcatggaagacggctgttcgtacatgggcacatacagagagctctgcaagcatgtccaaaagaagcaccctactgcaaacccacgagctgtggaccccttgcatgcttacagatggaagcggcttctatttcgaagttcattgcatgatatgatttgttcaactacttcagaggctatgcgaaggttttgttctcacatgctgcagattgaagaggttgtggctgctttgcgagagggtggtgatcatcgtggcgctaccaatgacgatcaactgatccatgatctcttgacctctcgctgaaatgtgagaacctgtgttgatcctgcaggcaatctttgcatgaatccccaacttggcacccctgccgattcacattttctgacccgacaaagcaaactagtcttcatctgtcctcaatgaaacagactgttaaagctttgatggatttattcattcacagtgataatggctggttgaatggcacggggctttttttcgtactcatctagcctctagtgtgtcatgcgatgcactgttcctgtgcaccctcccactgtatgactatgacataactgtttcttatggaacgcaatgtgttcctgttcataaaacgaaa

SEQ ID NO: 104404 - DNA, 1175 bp, Zea Mays
gaccccgcgttccgccttcgtttctctgcctctcgcctagtgtcgcggtccgacgaccggtgtcgccgccgtcgccgccgccgccgctctaacgccaggtgctgaggccttcgccagcctctttgccggcgacgaaaacccaccagatcttacagtcctttcaggatgaccaagtatacgaggaacaaaaaaagttcatcttctcacagtagttccagattcaaaagagtttccagaaaggagatgtcatttgcagtggagaaatacgcatggacaaatgcaacttgtccagtatgcatggaattcccacacagcgctgttcttctactctgttcgtcacatggcaatggctgccgtccatatatttgtgcgtccagctaccagcactcaaattgtcttgatcagcttgtaatgtcatgcagaaaagaagcctctgaggacccagatgcaatagagcttatgtgtcccctatgccgtggcgaggtcaagggatataccttggttgagcctgctcggaagcagctgaatcgcaagaggaggagctgcatggaagacggctgttcgtacatgggcacatacagagagctctgcaagcatgtccaaaagaagcaccctactgcaaacccacgagctgtggaccccttgcatgcttacagatggaagcggcttctatttcgaagttcattgcatgatatgatttgttcaactacttcagaggctatgcgaaggttttgttctcacatgctgcagattgaagaggttgtggctgctttgcgagagggtggtgatcatcgtggcgctaccaatgacgatcaactgatccatgatctcttgacctctcgctgaaatgtgagaacctgtgttgatcctgcaggcaatctttgcatgaatccccaacttggcacccctgccgattcacattttctgacccgacaaagcaaactagtcttcatctgtcctcaatgaaacagactgttaaagctttgatggatttattcattcacagtgataatggctggttgaatggcacggggctttttttcgtactcatctagcctctagtgtgtcatgcgatgcactgttcctgtgcaccctcccactgtatgactatgacataactgtttcttatggaacgcaatgtgttcctgttcataaaacgaaatcttgcccccttt

SEQ ID NO: 104405 - DNA, 1166 bp, Zea Mays
gaccccgcgttccgccttcgtttctctgcctctcgcctagtgtcgcggtccgacgaccggtgtcgccgccgtcgccgccgccgccgctctaacgccaggtgctgaggccttcgccagcctctttgccggcgacgaaaacccaccagtcctttcaggatgaccaagtatacgaggaacaaaaaaagttcatcttctcacagtagttccagattcaaaagagtttccagaaaggagatgtcatttgcagtggagaaatacgcatggacaaatgcaacttgtccagtatgcatggaattcccacacagcgctgttcttctactctgttcgtcacatggcaatggctgccgtccatatatttgtgcgtccagctaccagcactcaaattgtcttgatcagcttgtaatgtcatgcagaaaagaagcctctgaggacccagatgcaatagagcttatgtgtcccctatgccgtggcgaggtcaagggatataccttggttgagcctgctcggaagcagctgaatcgcaagaggaggagctgcatggaagacggctgttcgtacatgggcacatacagagagctctgcaagcatgtccaaaagaagcaccctactgcaaacccacgagctgtggaccccttgcatgcttacagatggaagcggcttctatttcgaagttcattgcatgatatgatttgttcaactacttcagaggctatgcgaaggttttgttctcacatgctgcagattgaagaggttgtggctgctttgcgagagggtggtgatcatcgtggcgctaccaatgacgatcaactgatccatgatctcttgacctctcgctgaaatgtgagaacctgtgttgatcctgcaggcaatctttgcatgaatccccaacttggcacccctgccgattcacattttctgacccgacaaagcaaactagtcttcatctgtcctcaatgaaacagactgttaaagctttgatggatttattcattcacagtgataatggctggttgaatggcacggggctttttttcgtactcatctagcctctagtgtgtcatgcgatgcactgttcctgtgcaccctcccactgtatgactatgacataactgtttcttatggaacgcaatgtgttcctgttcataaaacgaaatcttgcccccttt

SEQ ID NO: 104406 - DNA, 1768 bp, Zea Mays
tcttcccttcctgctgtgcgaaaccgagcacccaaaccctaacctaaggctatttggctatttgatgcctcctaacttcgaacttcttggttcttgcaaaacttatcggctgttcatcgatgtcccttggctgggtccagccctggtgcacacgatgcctggcttcctgttctgatagttagtataaagaagattttagaaatatcagacacaatattccacatgggcacatatgcctgtgtgatgggatttggtttgacagttttactatgtatcagtatcaccgctgatggttgatacatatgtttttgcatgtttcatgtaaaattcgtgtttctgcaatcacgccgaagttcttttaagtttctctgttattttgagttgttagtctctacttctttacaagtcgcaggacatttgagtagaggtccaatttaggcgcagtcacatggtgagaatgtgttggaattactgtaccttaaatttgttctgtttgaaatgccatttttccagtagcaaccataaatatccaagttgtccattgctatggggtttctaggaatataaaaaatggaccttcccaatctctgtggtgaaaataattatgcgtctctggtatatgcatgccaaatacatctgatttcctctgaagcagttcccgaaccaaaacaagaggttcgaagttggcagtaacagtgcccactgagtttctgatcaaaaccaggcatttctgtaacttatcttacagtcctttcaggatgaccaagtatacgaggaacaaaaaaagttcatcttctcacagtagttccagattcaaaagagtttccagaaaggagatgtcatttgcagtggagaaatacgcatggacaaatgcaacttgtccagtatgcatggaattcccacacagcgctgttcttctactctgttcgtcacatggcaatggctgccgtccatatatttgtgcgtccagctaccagcactcaaattgtcttgatcagcttgtaatgtcatgcagaaaagaagcctctgaggacccagatgcaatagagcttatgtgtcccctatgccgtggcgaggtcaagggatataccttggttgagcctgctcggaagcagctgaatcgcaagaggaggagctgcatggaagacggctgttcgtacatgggcacatacagagagctctgcaagcatgtccaaaagaagcaccctactgcaaacccacgagctgtggaccccttgcatgcttacagatggaagcggcttctatttcgaagttcattgcatgatatgatttgttcaactacttcagaggctatgcgaaggttttgttctcacatgctgcagattgaagaggttgtggctgctttgcgagagggtggtgatcatcgtggcgctaccaatgacgatcaactgatccatgatctcttgacctctcgctgaaatgtgagaacctgtgttgatcctgcaggcaatctttgcatgaatccccaacttggcacccctgccgattcacattttctgacccgacaaagcaaactagtcttcatctgtcctcaatgaaacagactgttaaagctttgatggatttattcattcacagtgataatggctggttgaatggcacggggctttttttcgtactcatctagcctctagtgtgtcatgcgatgcactgttcctgtgcaccctcccactgtatgactatgacataactgtttcttatggaacgcaatgtgttcctgttcataaaacgaaatcttgcccccttt

SEQ ID NO: 104407 - DNA, 1213 bp, Zea Mays
tattaagctatatttttttattcttgactatgtgataggtcagagtaattaaaaatatatataacttaccctgtgctagcaaacatactgttgtattatgatccagggtccttcagtttatagttgtaatatggacaaagtgaatttcttttaatagacttcatggcatctaacttgctattagatcttacagtcctttcaggatgaccaagtatacgaggaacaaaaaaagttcatcttctcacagtagttccagattcaaaagagtttccagaaaggagatgtcatttgcagtggagaaatacgcatggacaaatgcaacttgtccagtatgcatggaattcccacacagcgctgttcttctactctgttcgtcacatggcaatggctgccgtccatatatttgtgcgtccagctaccagcactcaaattgtcttgatcagcttgtaatgtcatgcagaaaagaagcctctgaggacccagatgcaatagagcttatgtgtcccctatgccgtggcgaggtcaagggatataccttggttgagcctgctcggaagcagctgaatcgcaagaggaggagctgcatggaagacggctgttcgtacatgggcacatacagagagctctgcaagcatgtccaaaagaagcaccctactgcaaacccacgagctgtggaccccttgcatgcttacagatggaagcggcttctatttcgaagttcattgcatgatatgatttgttcaactacttcagaggctatgcgaaggttttgttctcacatgctgcagattgaagaggttgtggctgctttgcgagagggtggtgatcatcgtggcgctaccaatgacgatcaactgatccatgatctcttgacctctcgctgaaatgtgagaacctgtgttgatcctgcaggcaatctttgcatgaatccccaacttggcacccctgccgattcacattttctgacccgacaaagcaaactagtcttcatctgtcctcaatgaaacagactgttaaagctttgatggatttattcattcacagtgataatggctggttgaatggcacggggctttttttcgtactcatctagcctctagtgtgtcatgcgatgcactgttcctgtgcaccctcccactgtatgactatgacataactgtttcttatggaacgcaatgtgttcctgttcataaaacgaaatcttgcccccttt

SEQ ID NO: 104408 - DNA, 762 bp, Zea Mays
atagcattcttggcgtcgctcgccataagaagctaaccgcgccacactggccccccctaccctgcatccctactgtatgctacgagactacgacactgctgtccctgcctgcaccctgatccagttcccggtagcataccaccatgggcctctgcatatccgtgtctctctggaaggagaagctctacggcgccgacggcagcagccggtcagtgcagtgtcgcgtcgtccatgaggttgccggcgtggagagtggtgactgcgagtgcgggaacttgggaagcgacgccgacgcgctgggggtagagcacaaggcggcggcggcggcggctccggcggccatgggcgtgaaaagcggtggagtggagggagctgccgctgccgtgtcgggtggcactcctgtgcggccgatatggcagaggagggtgctgatgggcgtcaagtgccagctgccgcggttcagcgggatggtactctacgacgagagcggccggccggtgtgcactggcgtccgggacagagctcgtgaccaggagaaacatgctgcagcgatttcagtgctgaaggacctgctttagtcttcgtcatcagaagcaggcggtggcaattctgttgatggaatgaatgtttggctaatctacatgtacacgcctttgttaatgggctgcacgtttttggtgaactatcatttgtatctcgtgctctggggcgccagctttttctcttccatactaaattatactccctccgtttaaaataata

SEQ ID NO: 104409 - DNA, 1123 bp, Zea Mays
atggccccatccccacgagccacgacggacgggacgagcggcgggcgggccggacggacgccgtgtcggcgtactgtgggcgcgcgtcctcggtcctcggcgatcgacggaggcgcgcgcccatgcatcgaacgaaccccatgcatggagatggcggcacaggacctcaccagtaaccccaccgacctttgtctgtgtccgtccgtctgtcccttccgttcacagttcacccttttctctcgaagacgacggggcgacccatcatcggtcgtgccctgcacggccgctcccccgtcccgatcccgatacagagcaccgaacgtttccttctgctgtcgagacggtacggcatttgtccatgggccctgcacgatcgatcggtcggtcggcactagagatggccaaacgggccgcccggcccggctcggcccgggcccggtgaagcccggccaaaaaccgggccgggcctgctgagacagcgggcttaattttctgtccaagctcggcccgcagtgggtctaaatgggccggcccggcccgtttagcacgaaaaaacgggccaaaaagcggactaaacgggccggtaagcacgttttagtgtaaaaaaacgggcttgacgggcttagaggtaaacgggccgtgcctagtttcctgtccaaacccgcccgcttattctaccgtgccgggctcggaccgggcccaaaaagcaggcttcgtgccgggctcacgggcctcgtgcttttttgccatctatagtcggcacttactttccagctgagcgtgttcgagacctgtgcatatatatatatactagtcggttggccgtgcgttgcgacgacttacaacaatacccatgttaactatctataaaaaaaatcaaaatttttattgattatcttcgctctccatataatatttttttatttggctaactgatgttattatttacttcatccaatatatttttgtacaacacgaccaatgaagtgagcgattagaaaagagttcacaacgactgactgaacgaacagagattataaaatgacataatttcaccatacagagaccaaataagagaaagtttgtgagctcaagtttctaaaataagtcacatgaactcaaa

SEQ ID NO: 104410 - DNA, 558 bp, Zea Mays
atgatggttatggagccgcgcccgggggtgtgcaggcgcgtgaagccggcgacggccttgcccgagatgcccggctggtccgcggacacgcgcggcgcgcacgcgaactcgcccacggggtgccgcaccggccgcgccggccgcatcaggacgcgcgcgttgatgtccgccagcgtcgcgccgccgtccaggccgtcgggcttcagcagcgcgaacggacgcaccaccaccacgcccgcgcccttccgccgcttgccgccgccgctctcggccgacgcctgctccgactcttcgcgtgtcgcggcacgtttcagagaggggccgcaggtcctcggaagcggcggggcccgcgcaggcccccgcgcggcgccccgccccggaagcggcaggccggtcccggccccggcggcgcgcgggtccccgcggcagctggaggaggacgagctgggcaggggctccgcctctgtggcgggggcctgctgctggaacgccgctctctccgctgccggcgcgggacccgccgagaaaatcgagctcaaggcctggtcatcatcatca

SEQ ID NO: 104411 - DNA, 1550 bp, Zea Mays
atgatggttatggagccgcgcccgggggtgtgcaggcgcgtgaagccggcgacggccttgcccgagatgcccggctggtccgcggacacgcgcggcgcgcacgcgaactcgcccacggggtgccgcaccggccgcgccggccgcatcaggacgcgcgcgttgatgtccgccagcgtcgcgccgccgtccaggccgtcgggcttcagcagcgcgaacggacgcaccaccaccacgcccgcgcccttccgccgcttgccgccgccgctctcggccgacgcctgctccgactcttcgcgtgtcgcggcacgtttcagagaggggccgcaggtcctcggaagcggcggggcccgcgcaggcccccgcgcggcgccccgccccggaagcggcaggccggtcccggccccggcggcgcgcgggtccccgcggcagctggaggaggacgagctgggcaggggctccgcctctgtggcgggggcctgctgctggaacgccgctctctccgctgccggcgcgggacccgccgagaaaatcgagctcaaggcctggtcatcatcatcacctgcacgacagcaggagaggttcatcggccgggtttaaaattggagagcgagtgacgaagaagattatacacgcactatatgactaatatactagtagtagaatcttgggcaggctggccgcaccactatctaaacacgtagaacccaaatctttcttctttttttcttcttcaaaagacgcgcccgcccgtgtcgcctgcctggtgattgtgcgcgcggcttgcaagtcagacgcgggcatcatgctcgtttacatgtactccagtgcaaagttgccactgcataatactcaatctagcattcatgattgttttaaacaatccatgcatccatcatggggccttgacagtaacgtgacgctaaacctagctctctgcgacctgacttgtcctctgcctccattggacccagaacaacccaccatccatggcgtggcgatgtacttggcgcgggccgcggggccaacaagacctaaaaaattaactaacaggtcccgtcgtgtccgtttgcagacaaacccgacgaaactgggtcgatttcagagtggggagcggaggaggagggttggattcaaacgggggcgctcacagtgaattgtgaaggagtcggtgggggtgcggtagccctgctcgtgcgtggcgctggcgcaggcgcagctggaattgaaggcggcctcctcctcctcctgctgcgccttgagcggcggctcgcccacgtcgccgtcgtggcagcccgcgtcccagaagttctgcaaggggacacccaacgacaacaacgagagagctttgatgagctagcggtggctcagtggtaagaattcagctctggctgctactgttactgttagtgctaatgctaagaggttgggtggtctgtttggtctcctcttccggagcgtcgtgatgtgacgcacgcaccaggagaaggtcgtccagctccccggggatcgcgacggccacgccgtgcgccgacggcggcggcggcggggcc

SEQ ID NO: 104412 - DNA, 416 bp, Zea Mays
gcccgtcctgaatgttgctgtagatgatgaagcacgacccggggaacctctggacctccggtctcgacaggagcttgctgaggcgtgtgctccagggtcaccttgctcgccatctcctactccatcttccgacttccgttgcctcccgtaattccagccgaagtgaacatggcccggtccgtaaacatgccgaggaacagatctgtaggatctgtcactgaagtcgttggcattgttgatgaggtacgctgcttgcccagcatatgcgaggaccagagaaggatatatgctacacagaaatgctatatcatggacaattcacaaggaaggatctcaaggttgcagtgtctatgaaaaataacctgaatacccttcttaccgaagtgaccaagatctgacaacatagcttcagcacc

SEQ ID NO: 104413 - DNA, 948 bp, Zea Mays
atggcggattccgggagcgacctcgtgcttgggcttgggatgggggtcggggtgcggagggaggaggaaacgcagagagggaggagggatagggaggcgaggagggagcttgagtttgagacggggaggtgcgcccggccgtcgccggagccggcggtgcgactcacgctcctgccaggcctggtgcctagccttggcctcccgtggccgctgtcgtccgagaccaatcgtgaggtgtcgacgcgtggcttcgacgacgtgaaccgggcgctgtccgtggccggtgctggcgcggaggaggacgaggcggccgtggccgcagccacggcggcagcatcctcgtcgcctaataacagctcgggctccttcgcgatggacatctccgcgcagggccagggccagggccaggaccaggcggcgcccgccgccgaccgcgcgtgctcgcgcgccagcgacgaggacgacggcggctcggcgcgcaagaagctgcgcctctccaaggaacagtccgcgttcctggaggagagcttcaaggtgcgcgccacgccgaacccgaagcagaagctggcgctggcgaggcagctcaacctgcgggcgcgccaggtggaggtgtggttccagaaccgcagggccaggacgaagctgaagcagacggaggtggactgcgagcacctgaagcgctgctgcgagacgctgacgggggagaaccggcggctgcacaaggagctagccgagctccgcgcgctcaaggcggtgcgccccttgttgcacatgcacctcccggccaccaccctctccatgtgcccctcctgcgagcgcgtcgcctccaccagctccgcggcccccgccgcgccggcgccagcgtcgccctcacctgctgctggtgctggcattgcggcgtcggccccggacccggatcagaggccctcgtcgtcgttcgcggcgtga

SEQ ID NO: 104414 - DNA, 2414 bp, Zea Mays
ccgttggattatcttcacctttcactccccctctttctgagatctgctttttaaacactgattgtatgatggtggttgcatgcagcctttggccgggttcgtgcgcctgacacagacacagatctggagacagatgggttggctacttcctcctccagtgcttctgcagcctttgccgagcggcaggacgacgaagcggaggagttgctgtgcggggtgaaggaagaggagtcggctcaggtacaagaaccggccaagaatccggcaggacgtcccaccccactaccccaggaaggggtcgaaacagcggccggccccggccttacttgacctcggcagcactgggttaattccacggagccacgttttctacaagtttcgtgattggtggtgtggggttgatgaacaaaggacttgaagcattactcatccggtcagacgtgtttcgtagaccttgacgctgagctatcggagttgggtttccaaaaaaaggtggagctctgagagagttccgcattcttctaaaggaagtaggagatacccaggaagcagcatggcattttcttacagcaatgggaggacattgccctcgaaatgggaggatgcagagaggtggatcttcagtcccaattccagcgacatgcgtggaagaactacggttgctcatggtcggaggccaaagtctaaaagtggccccctggggcctccaggaagacttggtggacagtattcatctgtttcttcggtgtcattgcttgatagtgagagagttggacctattacatcaaattctcatttttcagcaggagtactaatgccaggacatgtttgtggaggaaaaaatacaaatggggcctattcaggtagaccaattggtgacgaaatcaacattggagaaggagtcagaatttgtccactgaatggtgggtctcatcctattcgaactcccagagttcgcaagcgattagattctgcagtcgaatcatctgcttcattgcctagcacacaagaatctatccaagacgagcaggttgaaatcacagaagattcagcttcaactattgcctgtataatttccaggaaagatgttgcaacacagaccagcccagagctaagtaggtcctcttcacccaacaatagaccaacatttaatcgttccctgtcgacggaacaaatgaaagagagggggagctgtttctcagatcttgatatcagggatgttcagatggatgatcgagtgactctgactaggtggtcaaagcaaaatgtaacacggttgcctaacaagaattcaacaaacataatagagtggaaggaaaaagctgtggaatcaaaatctttgtcctggggctttgccgaagcgaagtgcatatccaagattggtagagaggacacaaaaattactgcatgggaaagtattcaaaaagcaaaagctgaggcagcaattcagaagttaatgattaagatggagaagaaaggatcatcttcgctggataagattttgaacaccctcaagtctgctcagagaaaagcccaggtgatgcttgagcatgagcttgatgcagtaacagcaaaccaagatggaaaaggctctaggaaggcaaaaaagggagcacagcgtagcaagaatggccaaatcagttccctgagtggctgcttcacttgccatgctttttgatacatgtaattccaaaactgagaatcaggatctgagaaattccttcgtactgcctacatcaccgtcatgttctccacatcgaaatctaggtgaacttcagatatctatcagatgtcagtacataatacgataatcccacagctggaaatcagactcggatctttccaagatgctagctgcaggctcttcatctgccatgatagggataatgcaatatctgcagtgccgctctgtgttagtttcgattctgccaatgagacagagaaaatggagcacgaaggaaaaggaggaacggttctgcgtacacctcatgtgcccggttgatgtctcctttatcattgtgtcattacctggcctgccttgtagctaggcactgctgatgtcgatcttgttgccaaaaaggctgtatggatcatacattcacacaaagtgcaattccattccaagatacagcgaaatcttcaggtacgaggagaaagcatggcctgcttgtgcgtgtgactagttgggcaccctgctgggtactggaatggaaccacgctcccttgttgcttttgtttggtacagtgctggttgttgctacctatatttgctttacagcagcgtcggtgtgtagctcttttaggaaactgagatgttggtttggcctggaaacttaacaatatcgtcacacacatatatgtacatatggggatgaagatatgatcgtcagtatgccatcctttaaaaaaaaaga

SEQ ID NO: 104415 - DNA, 1045 bp, Zea Mays
tttttttttaaacatcagtgtatatttacaccaacaaattgtgaaagctgataatctctacaatattataaggattggtagagaggacacaaaaattactgcatgggaaagtattcaaaaagcaaaagctgaggcagcaattcagaagttaatgattaagatggagaagaaaggatcatcttcgctggataagattttgaacaccctcaagtctgctcagagaaaagcccaggtgatgcttgagcatgagcttgatgcagtaacagcaaaccaagatggaaaaggctctaggaaggcaaaaaagggagcacagcgtagcaagaatggccaaatcagttccctgagtggctgcttcacttgccatgctttttgatacatgaatcaggatctgagaaattccttcgtactgcctacatcaccgtcatgttctccacatcgaaatctaggtgaacttcagatatctatcagatgtcagtacataatacgataatcccacagctggaaatcagactcggatctttccaagatgctagctgcaggctcttcatctgccatgatagggataatgcaatatctgcagtgccgctctgtgttagtttcgattctgccaatgagacagagaaaatggagcacgaaggaaaaggaggaacggttctgcgtacacctcatgtgcccggttgatgtctcctttatcattgtgtcattacctggcctgccttgtagctaggcactgctgatgtcgatcttgttgccaaaaaggctgtatggatcatacattcacacaaagtgcaattccattccaagatacagcgaaatcttcaggtacgaggagaaagcatggcctgcttgtgcgtgtgactagttgggcaccctgctgggtactggaatggaaccacgctcccttgttgcttttgtttggtacagtgctggttgttgctacctatatttgctttacagcagcgtcggtgtgtagctcttttaggaaactgagatgttggtttggcctggaaacttaacaatatcgtcacacacatatatgtacata

SEQ ID NO: 104416 - DNA, 790 bp, Zea Mays
gcaaacgcgcctccacccatacccgaatcccaatccaggttcgatcccccggtggcgaggacacccggcgccgatttgtccctgcagatcgaccggacaagctcctcctcgccatgggtgagtccgacctcgaggctgctccctgtatcagcgcccaaatcccacgcccggcgagatgagattgcttgggacggggcctcagcattggcctcgacccggatctcccctcagcgtcaggatgtgcacctttggacacggtggactgcggtgacacatttggctatggctgtgttggatctaaaagcaaggaaaaaatgcaatcacaaccagggatcaatttcaacaatcttatgttagtgctcacaggtgacaacggctgccgcgacaactcctcggtccaggtctccttgcccatgagccacaggcttcgacaaccaagaacatggtccatctggctcaaaatgccatactgcatattgattgatggccttgtcaaaggtggaaagatacaggaagcaaagattctatttaatgaaatgaaagaaaaaggagtcaaatctggggaagacaggctcacaggtgccatccgtggatctcaaccaagtgcagatttcgaagacatgagctgcgagatgatatacggctaggtgccgcctccgttggaagaggacccagcgtcgaagcaagcttgctacccgagcctatgttccatgtcgaccccgtctgccccggcctgtcccaagcttcagtagtggttcttgtagagcggttgtgtcgtccgagcgttgat

SEQ ID NO: 104417 - DNA, 1409 bp, Zea Mays
gcaaacgcgcctccacccatacccgaatcccaatccaggttcgatcccccggtggcgaggacacccggcgccgatttgtccctgcagatcgaccggacaagctcctcctcgccatgggtgagtccgacctcgaggctgctccctgtatcagcgcccaaatcccacgcccggcgagatgagattgcttgggacggggcctcagcattggcctcgacccggatctcccctcagcgtcaggatgtgcacctttggacacggtggactgcggtgacacatttggctatggctgtgttggatctaaaagcaaggaaaaaatgcaatcacaaccagggatcaatttcaacaatcttatgttagtgctcacaggtgacaacggctgccgcgacaactcctcggtccaggtctccttgcccatgagccacaggcttcgacaaccaagaacatggtccatctggctcaaaatgccatactgcatattgattgatggccttgtcaaaggtggaaagatacaggaagcaaagattctatttaatgaaatgaaagaaaaaggagtcaaatctgctatagttgaagtggacctattgtatcagtttatagataagaggggaagacaggctcacaggtgccatccgtggatctcaaccaagtgcagatttcgaagacatgagctgcgagatgatatacggctaggtgccgcctccgttggaagaggacccagcgtcgaagcaagcttgctacccgagcctatgttccatgtcgaccccgtctgccccggcctgtcccaagcttcagtaggtccatacatgcatgcacagagttttccggtcggacttgaaggattcaagttagatgtatacggaagtggtgaggactcgcaagaagttcaatccactgccaagaggttagatttgagtctcaattttttcaagggaagggatcatgctgataattcactctgtgggtgcaaggttttcaaaaatccgagcattagtgatgtcctgtgcacaacaacagcagaggctcttgcaatggggaaattcgtgatctgcgcagaacatccatcaaatgagtttttcatgtcatttccgaactgtttgacatacaagacttcagaggagtttgttgcgagagtgaaagaggcaatggatagagaaccccaaccgctaacccctgagcaaagatacaacctttcacgggaggcagcgaccgagagattcatggagtactcagaccttgaaaaggttctgaacaatgaggctgctcagtctgaacaaggtaggaaaagaaagaataaaagaacctcacagcctaatttgtcttcggtcttccgtgctcaccttcgagagatcaagggtgatgctgacagctcgttggacaggccgtggcagaagaaggctgagatcaagtag

SEQ ID NO: 104418 - DNA, 1559 bp, Zea Mays
atctaaaatattattaactaacattctctaagtgttagtttaaaatttgttaatgtttttaactaacatttcctaagtgttagtttaaattttttttggtgctgagctgagacagggacaggcaagcaggaggaaggggatggagtggcgccgttagcgaggcaaggttcagtctactcgttgacgttcgacagatcccagagcaccctcggcggggccgccgccagctgtggcggtagccgtggcatccccaagggtttcggctccgtgaacatggacgagctgctccggagcatctggaccgcagaggagacccaggccaaggcctccgcctctatcgcaggagcgagcgcggggatgccccccacgccgatgcagcggcagggatcgtcgctcacactgccccgcatgctcagcaccaagacggtcgacgaggcgtggagaaatctcgtgcgcgacgaaccgccgcagggggcggacggcggcggacaccagccgccccaccgccagtcaacgctcggggagatgactctggaggagttcttggtcagagctggcgcggtcaaggagaaccccgcttctgctcctccagcgccgccacccatggtgccgccgcggccggtacctgttgcccctaaaagctccgccttttttggggatttaccgggtgccgacgacgacgcagctacggcagcggtagggtttgcaccggtcggcatggtggatctggccctgataccgcccagggcggcaggcatgggaggcagcgccatggctgtgcaaacagcggtgagccagcttgattctgtcgggaagggatacagcgacctgtcgtcgctgacggagccgcaaactttttcgtttgaaagaatgattcgggggagaaggcatggaggcggagtggagaaagtggtggagaggcggcggcggaggatgatcaagaacagggagtccgccgcgaggtcccgagcgcgcaaacaggcttatacaatggagttagaagccgaagttcagaaactcagagagcagaatcaggaactggagaggaaacaggcagaaattatggaaatgcagaacaacgaggtatcagaaatgttgaaggatccattcggacggaagaaacggctgtgcttgcgaagaacgttgacggccccctggtgacgattgcctagaacagcacatgacttgcacttgctacgtacctgcaggggcgtttgggatctgtagataatttctctcctatagtgtagcgatgaacccatgaacatgaacataatctaaatgattgtactgttagctcccttctgccgcttacgtagtactggagtaccgtattggtggagtcgaaaactgacatgtaaattatgtacgtagtagagaacaaaatggagtgaagccggtcgcaagagttgtggcttcagtcatcctccagagcttgtgcagagttgcctaggttttgcatcttgctggcacatccagactccagagcttgtgcagagttgtctaggttttgccatcttccagagcttgtgcagagaatgaatgattttaaaagatcc

SEQ ID NO: 104419 - DNA, 1709 bp, Zea Mays
cgccgcaaagccattccatcctttaaatcgcccgaggcgacggggcgagcgactcatctccctccccagacaagcggcgacacgccagggcggagagcacacaccgaagcgggccgcggcggcggcgcaggcgcaggcgcttacatgggagtagaggcgggcgggtgcgggcggagggcggtcgtgaccgggttctacgtctggggctgggagttcctcaccgccctcctgctcttctcggccgccgccgccgccgcagactcttactagctagctagccacctcttcttcctcctccttgtaggtagtagtaggctacacaacaaccacatatatacatactaggtactagcaggcgagcgagattcgtgcaataatcaaggcagccagttattaatagttaatcgtcggcgccgagcgagagatggtggaggaaggcgccaccgcggcggcgtcgaggagcgggccggcgccgttcctgagcaagacgcaccagatggtggaggagcggggcacggacgaggtgatctcgtgggcggagcaaggccgctccttcgtggtgtggaagcccgtggagctggcgcgcgacctcctcccgctccacttcaagcactgcaacttctcctcctttgtccgccagctcaacacctacggtttccggaaggtggtgccggaccggtgggagttcgcgaacgagaatttccggcgaggcgagcaaggcctcctgtccggcatccgtcgccgcaagtcaacgacgccgcagccatccaagtacggcggcggcagcgtcgtgaacaccgcgttccctccgccgttgccccttccgcctcccgcgtcggtcaccacgtctggcggtggcggtgccggtggcgctggcaacgagcgcagctcctcgtcggcatcgtcgccgccacggacagacgacctgaccagcgagaacgagcagctcaagaaggacaaccgcacgctgtccaccgagctggcgcaggcgcgtcggcactgcgaggagctcctgggcttcctctcgcgcttcctcgacgtccggcagctcgaccttgggctgctcatgcaggaagacgtgcgagcgggtgccggtgacgacgccgcgccgcgccgcgcaatggtcagccagctagagcgcggcggcgaggaggggaagagcgtgaagctgttcggcgtactcctcacggatgccgcaaggaagagggcccggtgcgaggaggcggcggccagcgagcggcccattaagatgatcagaatcggcgagccgtggatcggcgtcccgtcgtcgggcccggggcggtgcggcggcgggaattaaggtaaggtatggttggaactgatgcgccacggccggccgtgtgacagctttattacagcgagcgcatgttcgagtcgtggatgctttttgtgcgtgtttgtatttgtcatccaaggtgaggttgatggcaaggataattccagtgctgtggtaaaactgtgaaggcagaacacagggcacaggagataaccgtaacgcatgttaaaagttaattatgggatgatttggaggtagcaagattgaaagtagggaactagggatgaccggatgagtagacggtctagaaagacaagcccatatgtttggaatggaatattatcgtttttatatgttttgttaatctgttagtatttgtttggctgcactctaatacatcatatatttcatc

SEQ ID NO: 104420 - DNA, 1654 bp, Zea Mays
cacacagccaaagtacaagactcacttgcatttttggcacaccagcacagaagaagaaaaaaaaaacaggcactgagctgagatggcgaagcacttggctgccatgtgcaggtgcagcctcctagtgcttgtactgctctgcttgggctcccagctggcccaatcccaggtcctcttccaggggttcaactgggagtcgtggaagaagcaaggtgggtggtacaactacctcctggggcgggtggacgacatcgccgcgacgggggccacgcacgtctggctcccgccgccgtcgcactcggtggcgccgcaggggtacatgcccggccggctctacgacctggacgcgtccaagtacggcacccacgcggagctcaagtcgctcaccgcggcgttccacgccaagggcgtccagtgcgtcgccgacgtcgtgatcaaccaccgctgcgccgactacaaggacggccgcggcatctactgcgtcttcgagggcggcacgcccgacagccgcctcgactggggccccgacatgatctgcagcgacgacacgcagtactccaacgggcgcgggcaccgcgacacgggggccgacttcgccgccgcgcccgacatcgaccacctcaacccgcgcgtgcagcaggagctctcggactggctcaactggctcaagtccgacctcggcttcgacggctggcgcctcgacttcgccaagggctactccgccgccgtcgccaaggtgtacgtcgacagcaccgcccccaccttcgtcgtcgccgagatatggagctccctccactacgacggcaacggcgagccgtccagcaaccaggacgccgacaggcaggagctggtcaactgggcgcaggcggtgggcggccccgccgcggcgttcgacttcaccaccaagggcgtgctgcaggcggccgtccagggcgagctgtggcgcatgaaggacggcaacggcaaggcgcccgggatgatcggctggctgccggagaaggccgtcacgttcgtcgacaaccacgacaccggctccacgcagaactcgtggccattcccctccgacaaggtcatgcagggctacgcctatatcctcacgcacccaggaactccatgcatcttctacgaccacgttttcgactggaacctgaagcaggagatcagcgcgctgtctgcggtgaggtcaagaaacgggatccacccggggagcgagctgaacatcctcgccgccgacggggatctctacgtcgccaagattgacgacaaggtcatcgtgaagatcgggtcacggtacgacgtcgggaacctgatcccctcagacttccacgccgttgcccatggcaacaactactgcgtttgggagaagcacggtctgagagttccagcggggcggcaccactagactagactagacccatattccgcccaactcctacagataattctcttttcaggtccattttgaacctggaaaagaaatttaagagaggctaaataaccggaatacgattgtactgagcttctttcagctaattattgaaagaagattataatgtttggatgtactattaattatgttggcatggggatttttgtaacctcttaaaacgaggaaataaagactgttcttattaagctgaactcccgctgacgt

SEQ ID NO: 104421 - DNA, 1075 bp, Zea Mays
agttcgaaaggttcaacttcaaacacactccaaactccaagcctcaataatctcgacctctgtaatgaccaagaagctcatctccatctccaccatggccgggaagcaaggttgcaaggagcagtccaatgatcggaggatccaggcttcgatccaaggagacgccaagagcgtggtggtggggttcggcggcaggctggtcacccgtgagcaggagcaggaggacgccatcatcgtcgcggcgctgcggcacgtggtgtccgggtacagcacgccgccgccggaggtcgtcgtcacggtggcgggcggggaggcgtgcgggacctgcggcatcgacgggtgcctcggctgcgacttcttcggggcgccggagctggcgcaggaggcagtgtcctgcggcacagggcaggtggcgacgacggcgtcggtcgggggcggggcagcggcggcggcgctgaggccccggcggcgtaggaacaggaacatgtaccgcggcgtgcggcagcggccgtggggcaagtgggcggcggagatccgcgacccgcggcgcgcggcgcgcgtgtggctgggcacgttcgacaccgcggaggaggccgccagggcctacgactgcgccgcggtcgagttccgcggcccgcgcgcgaagctcaacttcccgggccacgaggcgctgttccagggccacggcgacaccgcggcggcggcggacaccgagacactgacgccgtcgccgggagagtggcagctgggcggcggagcaggagacgagctgtgggaaggtctacaggacctcatgaagcaggacgaggtggaccgctggctcgcgccggttttcggcgccgcgtctagtttttgagctgttgtactgtgcacacacaagcgtggttactgacaggatcacagctagactgaccaccattcttttgctgtctattgaactagttggttcttttgtagcgtatttttttagggaaacatgattctttttttttttgccgtgtgttgattgggatatagagagtttttttcctctcttgatggaagtacttgggaagctatgttgatagactgaaca

SEQ ID NO: 104422 - DNA, 2061 bp, Zea Mays
aaacaaaacaaaagtcgcgagccgccggcaacagcagctgtccgtccgagtcttcgcttcgcttcgcttccatttcgtcgccgttgcacctcccatagtaatagtcccccattcaatccgctcggtccaaatccacgtcttttgtcgtggggtggtgtctggcattgcattattggaggatcgaaaccatcgccaccgcaccaatgatccccttctccgtcctcgccggcgccctcgtcttgctcgtcggcgtcgccgatgccctgcccgataagctgcggcgcgacgtcggacaaggtcgcggggaacgtgacatgggtcgccgacggggcgttcatccacgccggcaaggtggcggagctggactccccgggcgtcatgccgatgctctcctcgctcaggtacttcccgccggacgcgtcgtccgccgccaagtactgctacgcggtcccggcggcgatgcacgccaggtacctggtccgcacgacgtactactacggcgggttcgacggcggcggggcgccgccggtgttcgaccagatcatcgacggcacgcggtggagcgcggtggacacggcggggggctacgcccgcgggctcgccacgtactacgaggccgtggtggaggccgcggggaaggagctcagcgtctgcctcgccaggagcgccgccaccgcgcccggccggagccccttcatctccgcgctcgaggtggtgccgctcgaggagtccgtgtacagcgccgtcaacttcaccgcctacgcgctgagcaccgtcgcgcgccacagcttcggccacaacggctccatcatcggctatccagacgatcggttcaaccgatactgggagccgtacagcgacgggggcatcccggtggtggagagccaggcgagcgtggcgacggaggcgttctggaacaagcctccggaggccgtgttccggcgaggcctgacggcgagcagagacaagagcctggagctccagtggccgccggcgccgctgccggccgcgagctactacctggcgctctacttccaggacaaccgggggccgagcgcgctcagctggagggtgttcgacgtcgcggtcaacggccagcccttcttcgccggcctcaacgtctccacggcggggtgcatggtgtacggcgtcgactggccgctatccgggcagacaaggatcacgctgacgccggcgctggagtcccccgtcgggccgctgatcaacgcggcggagctcatgatggtcgtcccgctcggtgggaggacgcatcccagagacgtaatcggcatgcaggagctggccagaggattcacgaacccgccgtcggactggagaggtgatccatgcttgccccaggggaactcgtggactggtgtcacctgcaaccaagatccactggcaagagtaactgggctcaacctcacaaatttcagagttggaggatcgatatctaacaacattgccaatctgactgcaatttccagcatttggcttgtcgggaacaatttgaccggcccgattccagatctgaaccacctcctgcatgtagtctctttgtaagtataatatatataacgatgggtaacataatcaccagcagctaaatatatctggataatacgttgcatccattcctgattggaaatttgaaggcacctggaggacaacggactgacaggcccgctccctgaatcgctcggaaaccttacaagacttgaggaactgtccgtgcagaacaacagcctacaaggaacaattccaagcagcatcaggaacagagcggcggtggacccaaggtttaggttccagtacacacctgggaacaaccttagctaacaagtgcattacaggaaggcaaaaatatctgactgctgttccttacccaatttcgggtgcttcggaccattttccttcccttttttgaatcacgattttttgttgtacttcggaatgtatacttatctcttcccctgtaaagatgcatttttgtcatagaaaaaaaacgaggactatattttattgaacgagaaaacgagaaggcttattgctttagacgaa

SEQ ID NO: 104423 - DNA, 2044 bp, Zea Mays
aaacaaaacaaaagtcgcgagccgccggcaacagcagctgtccgtccgagtcttcgcttcgcttcgcttccatttcgtcgccgttgcacctcccatagtaatagtcccccattcaatccgctcggtccaaatccacgtcttttgtcgtggggtggtgtctggcattgcattattggaggatcgaaaccatcgccaccgcaccaatgatccccttctccgtcctcgccggcgccctcgtcttgctcgtcggcgtcgccgatgccctgcccgggtaccagataagctgcggcgcgacgtcggacaaggtcgcggggaacgtgacatgggtcgccgacggggcgttcatccacgccggcaaggtggcggagctggactccccgggcgtcatgccgatgctctcctcgctcaggtacttcccgccggacgcgtcgtccgccgccaagtactgctacgcggtcccggcggcgatgcacgccaggtacctggtccgcacgacgtactactacggcgggttcgacggcggcggggcgccgccggtgttcgaccagatcatcgacggcacgcggtggagcgcggtggacacggcggggggctacgcccgcgggctcgccacgtactacgaggccgtggtggaggccgcggggaaggagctcagcgtctgcctcgccaggagcgccgccaccgcgcccggccggagccccttcatctccgcgctcgaggtggtgccgctcgaggagtccgtgtacagcgccgtcaacttcaccgcctacgcgctgagcaccgtcgcgcgccacagcttcggccacaacggctccatcatcggctatccagacgatcggttcaaccgatactgggagccgtacagcgacgggggcatcccggtggtggagagccaggcgagcgtggcgacggaggcgttctggaacaagcctccggaggccgtgttccggcgaggcctgacggcgagcagagacaagagcctggagctccagtggccgccggcgccgctgccggccgcgagctactacctggcgctctacttccaggacaaccgggggccgagcgcgctcagctggagggtgttcgacgtcgcggtcaacggccagcccttcttcgccggcctcaacgtctccacggcggggtgcatggtgtacggcgtcgactggccgctatccgggcagacaaggatcacgctgacgccggcgctggagtcccccgtcgggccgctgatcaacgcggcggagctcatgatggtcgtcccgctcggtgggaggacgcatcccagagacgtaatcggcatgcaggagctggccagaggattcacgaacccgccgtcggactggagaggtgatccatgcttgccccaggggaactcgtggactggtgtcacctgcaaccaagatccactggcaagagtaactgggctcaacctcacaaatttcagagttggaggatcgatatctaacaacattgccaatctgactgcaatttccagcatttggcttgtcgggaacaatttgaccggcccgattccagatctgaaccacctcctgcatgtagtctctttgcacctggaggacaacggactgacaggcccgctccctgaatcgctcggaaaccttacaagacttgaggaactgtccgtgcagaacaacagcctacaaggaacaattccaagcagcatcaggaacagagcggcggtggacccaaggtttaggttccagtacacacctgggaacaaccttagctaacaagtgcattacaggaaggcaaaaatatctgactgctgttccttacccaatttcgggtgcttcggaccattttccttcccttttttgaatcacgattttttgttgtacttcggaatgtatacttatctcttcccctgtaaagatgcatttttgtcatagaaaaaaaacgaggactatattttattgaacgagaaaacgagaaggcttattgctttagacgaattttcataagagcaatgcgtgtacaacccatccgaacaacatctttatgaacaaaaggtcaatctttgagt

SEQ ID NO: 104424 - DNA, 2696 bp, Zea Mays
atgatccccttctccgtcctcgccggcgccctcgtcttgctcgtcggcgtcgccgatgccctgcccgggtaccagataagctgcggcgcgacgtcggacaaggtcgcggggaacgtgacatgggtcgccgacggggcgttcatccacgccggcaaggtggcggagctggactccccgggcgtcatgccgatgctctcctcgctcaggtacttcccgccggacgcgtcgtccgccgccaagtactgctacgcggtcccggcggcgatgcacgccaggtacctggtccgcacgacgtactactacggcgggttcgacggcggcggggcgccgccggtgttcgaccagatcatcgacggcacgcggtggagcgcggtggacacggcggggggctacgcccgcgggctcgccacgtactacgaggccgtggtggaggccgcggggaaggagctcagcgtctgcctcgccaggagcgccgccaccgcgcccggccggagccccttcatctccgcgctcgaggtggtgccgctcgaggagtccgtgtacagcgccgtcaacttcaccgcctacgcgctgagcaccgtcgcgcgccacagcttcggccacaacggctccatcatcggctatccagacgatcggttcaaccgatactgggagccgtacagcgacgggggcatcccggtggtggagagccaggcgagcgtggcgacggaggcgttctggaacaagcctccggaggccgtgttccggcgaggcctgacggcgagcagagacaagagcctggagctccagtggccgccggcgccgctgccggccgcgagctactacctggcgctctacttccaggacaaccgggggccgagcgcgctcagctggagggtgttcgacgtcgcggtcaacggccagcccttcttcgccggcctcaacgtctccacggcggggtgcatggtgtacggcgtcgactggccgctatccgggcagacaaggatcacgctgacgccggcgctggagtcccccgtcgggccgctgatcaacgcggcggagctcatgatggtcgtcccgctcggtgggaggacgcatcccagagacgtaatcggcatgcaggagctggccagaggattcacgaacccgccgtcggactggagaggtgatccatgcttgccccaggggaactcgtggactggtgtcacctgcaaccaagatccactggcaagagtaactgggctcaacctcacaaatttcagagttggaggatcgatatctaacaacattgccaatctgactgcaatttccagcatttggcttgtcgggaacaatttgaccggcccgattccagatctgaaccacctcctgcatgtagtctctttgcacctggaggacaacggactgacaggcccgctccctgaatcgctcggaaaccttacaagacttgaggaactgtccgtgcagaacaacagcctacaaggaacaattccaagcagcatcaggaacagagcggcggtggacccaaggtttaggttccagccatgcaatccagcccggaattactccgcagcccatgatccgtcagcagcatccccagcctgttgtcccaataggcccgtactgacccaagatatgaagatatctacctcgtgtcttgtccacctcctcaattatctcatcgttcctcgcgctcatcgcccactttgccgtcgatgcatttcccactcccgcctcttcgccggcgatgaccgccgcctcccacgtcctaacctcctcggcttctctatgacgactcctccgaacccctccccgctcctgtcctcccgcccgaacccctcccttcctctccaccgccgcccccggttcccccactccccggccgccgccaacaccaccggcgccgcatcggcgccggactggttccgccctcgccgtactccggactcggacccgtccatctccggcggccgcgtcaccgcgcgtgatcctggcgttcgcgtcaaggccaaggagggcgccgaggaggaaaaagataagaaggctaagaggaggagatggtgggagcgctggtcgggggacaaggagagctacctggtggacgatgtggagccgctccccatcccattgaccgtgccagagacggagcccatgtcgcgggaggagctggaccgccggctcagctgcgacgtcgagatcgatgaatgcaagacggtctcatacgagtggacaggcaagtgccggagctgccaggggacgggactggtcagctacttcaggaagaagggcaaggagaccatttgcaagtgtgtgccatgcgccgggattggttatgtgaggaaaattacacttcgtgaggacattcaaaagatagacgagctagacaatgagaaactaccatagtttgaaaggtctcaagtcattcggcctctgcaattttgtaaatgctgccgaagagcttgtgctcgcaacctacacattgactaatggttctttccactgcacatttactgttcaggcacgatactagcttggaggggttattctttaagcactgtaaacttttgtgttcaaaaaaaaacattgcaaacttagcaatggtgtctagtaattgtaccccttttatcttggttatttgctgatagatatgataacgatcgatacagaaaagaaaataataattgtatcccttttgtaaattcttttagcacgttggt

SEQ ID NO: 104425 - DNA, 1062 bp, Zea Mays
attgttctttttcagccacttggacttgggtgcagattcttgctccattaaacgagtagtgcacgacgatctagacgcctcgatctgatcgtcgcgcgatagatgccgttgtgctctcactggcagtgccctatttgtcgaccaccaaatctgcgcgcgtagagaataagctaagctgcaaaaggtcagaaaaaaaaacaggggtgtagatacaagccgtgataaacaacagccttgccaaattggcttgcttatataagagcaataggtctcaacaagttgctgcacacaggaaaagaaagggcatatcgaggaggtttttagggtggtggtggtgttgtgaggagctgctgccgctgctctccagtctccaccgatggcgatcaagaacatgacggtggcggcgacgacgcggtcgctggacgcggacatgacggtggacgagttcaaggagtggctgcggcggttcgacacggaccaggacgggcgcatcagccgcgacgagctgcggcgcgctctgcgtgccatccgctcccggttcacggggtggaggagcaggcagggcatcagttatgccgacacagacggcgacggctacatcgacgacagcgaggtcgatggcctcatcgagttcgcgcagaagaacctcggcctcaagatcgtcgcctactgatctcacatggagcgcggcgcgtggcgggcggggggtgggacgcactggctcgccatgagctatagctatagcgacaatgcaactcaccatcactctctccggctaaaataagagctgcttgatctatcatcgcttgtctgttaaaattgctttccatgtacttagtctattcgagttcgggatcacgcactagctctctacgctgttgttgtgtgatctatgtaaggtgtgtataatggtacccgtgcgtggctgccttcgtcggcttgcatagcctagctccggccgtgtcatgggtgctatgatgttaatttgtataactcattatgatgtacaatttatattttaaatattttttcatatgacaaaataaaagtaaatttgttcat

SEQ ID NO: 104426 - DNA, 246 bp, Zea Mays
atggcgctctcagacgtcggcaccatgtcggctaagcggggaggtggcggttgcttcttggttccagtccctcgggcactcgctctcttgcccgacaatgactgggcgcccaccaccctacgccatgtctccaactcgttgccaagccttcgtgaggttgtaggagagcagcatgatctaagtgaatgcataactctactcacaacaccaccaccactctaccgtgaaccaaacagtgccctctga

SEQ ID NO: 104427 - DNA, 563 bp, Zea Mays
ttgtgttcaaggtacaactatgacgtcgtcaaggacgctcccatggacggcggccggtacgagtgggtccgagtgcggcccggttaactgccagatccaatccaagaggtcgcctcgtgtcctctcctgtctgtctctacttctcttgtaacagtcgcttactacccgtgtaacgcttcgcttagctgtaactaaattatgctcacgagatgggattaatcatgtgaaggcccaaccttgtacgttagtggtgtgcggttaacgtgtccttccttagtccagagaggaaaaagctgtaacttgtcgctgttcttccatttgtcgggtctctgttcatactacatcaatgaaacagatattcaggcaggcccacagacacctctctcctcgagagctaaaacaggagatcgacaatgaaaacagctcgcaactcagctagcagaggacttcatttgagcagtcacctggctttattcgatttccttccagttttcgccacgtgccttgcaaaccaattccgaacatgcggcgtaactaaaataaaccttacgaaaaacaaaaaa

SEQ ID NO: 104428 - DNA, 1755 bp, Zea Mays
aattcaggagggaagagtgggtggacgaagtgggggaggatgagcgaggagaggccggtgccgcggcgggagagcccgtggggtctgcctgagggcgacacgcggcagcccaaggctcaccgctgcaacgaccgcgccgaggacgtcgtccaggcttgctttgaagggaacccattcaagacagttccaggcccatttaagctcttctggcaatgcatgcgctcaaaacctggggaggaaccaaccgagccctatacctacctgcagctagatcctccgagaagggtggaagtgaatctggagcaaacaggaagtgaaccttgaacgagcatgcctagtttagcatctcgtgcctatttgtcttcacctttcgagcagactttttcctcctagggatcacatcatgtgagcacaaagctgcatatgtttggatgtttatataatctacctaataaaccgtgatccccagagctgcctgtccaggctgccaactccttgaaatttgctgatgctggtgtaagaattgtgcccctttcttctgataaatggtgcacgcccaagtccacatgccgccagacatcagagctagtgcatctgaatggttgtgctcctgttctgaaacagagtgatccatatggtttttgtgtgtttgtccatactttcatatagcatactagtgtagccgtacagtttacaagctgtatataaggccatccatccattctccagttctcttggtgcatctgaactattttgtcttaagaggggcatttggccccttggttgccaaacacccgagtgaaaaaaaaatctcccagggaattgaagtgtcatttaaaatccccttggtgcattactttcctggcttttttgtccatttgttgccaaactagccctaactgttctttttaccccttccagcttccactatgggtctaagcagcagtatttcggtccagaaaaccttgtatgaggttttatctgtgagcgaagacgctacgtatgatgaaattcgtgcagcatacaggtctgctgctctgaacacacaccctgacaaggcacggacacctctcgagtcatgtgttctttccggtgagcaacaggaattttctagtgtgcagaaagcatgggaaatcctacgccatcctacatctagagcagactacgataagcagctgcagtcatccagacagaacatcgagatcatcgcatctgaagtccaagtcggggatatgatcattgagagcactgccgatgccgatactgtagagctgtcgtacccatgcaggtgcggtgattacttttccatcacttcgtgcgagcttagcgggatgggaatttccgtcagtggagatggagatggagaggtagagctgcaggcgtccgattctccgtcggcttccgttgttctgggctgcggctcttgttctctcaaaatacggttggttttatagatggaactccatgatatatattgtgtgcggctcagcaatgctcactttaaactttagcagccaccacatgtttctcaaacactatgcctcctggtctgccgaaatcaaaatagtgcagcttaaccttgcctgttcctatttccgggagagatgtcgagtttgtaacctgatggtggttgcgttgtgataaatgacgttttttgaccgttgttatcagctaaccaccgctgtcgaatccagctgctgggaaatccaaagttgttccggtggtggttattcggtagatgagatcttcagttaa

SEQ ID NO: 104429 - DNA, 1394 bp, Zea Mays
gtcatgcacgtccacatccctcgtctgaaaacccattctccgatctccagtccacacacatgggcgaccgatcgagctctaccatttatacccaccactcctcgtcgatcggatgaacgccggggaagaaacagctcgatccgtagcttagctgcaacacatcggtgatcgttccatgtgtgtgtgattattgatcagggagcaatacaatacaatgccttgcttggcgcaagagttccaccccaagctgccggcggccagtcactactgcaagtccttgtcgtcgctcatccgggagacctacgcgcactgccatgtcccctgcgtcaggacccccgccggcgccgggtggagctccggcgaggacagcgacgacgacaacgtcctcgacgaagcgcaagacaccaaacaggtgatcctccacgagatgaggagccggcagatgaagaggcggtccaggtgcggcgtggacgtggactcgccgacgctgcctctgtcgtcgagctctgctttcgcctggtcgtacaccccgctcgatccaagaaccgtcctcgacacggtgtcaagtcccaagacgtgcacgtgcgtcgtggtggagggaacggccgcggaggaggagcaggaggaggaggcagccgacgggggggactgcgacgcggacgacgagagcgaggcgttcttctccgtgaagagcttcttcacgcgcagcacgagccgggcggcgaccgtggcgtcgtcggcgtgcatgctgacagacccgcccccgccgacgctgcggtcgcccgaggcctgggagcgcttccgggactgcgaggggtggccgttcgggctgtgccgtcggccgcggccggccgtcctcccgctgccgccgctgcccagcacgccagccgactcgtggaagtggcgcaagagcgtcggtagcctcgccgcgagcccagctcctgcttacagacacaaaatcactactgctgctcctgctagcagtaaataaccgcgcgcccgttaactaacaaagaagaagcccgaaccgtccgtgtcgtcagcagcagcgacgctgctgggacgtggcgacgacctttacaagactgcagctagtagcctgcgtgcttgatgcttgttcgtcgtctagaatgcgagagttttccccacaaaattcctatgaacatagattttgcatgcttgttcgaggcggccttcatcttctggaagggggttttcaggtgtacgtgttctgaataatgaagtctagtgtacttttcagttcttgtgagttggacgctctagttcttttggtgcctctactcagagtcagagagccctcactcgatctccatcggtagtttcaatgggtgacatttctagttccagttcacaattttactccacgttttttc

SEQ ID NO: 104430 - DNA, 1095 bp, Zea Mays
aataagattggtatatatacgttgcgcgtagcccccggtcccagttctcggtccgttcacgcggttcgctaaaagcgctgcacccgtcacgttcttgcgcaggtgatcctccacgagatgaggagccggcagatgaagaggcggtccaggtgcggcgtggacgtggactcgccgacgctgcctctgtcgtcgagctctgctttcgcctggtcgtacaccccgctcgatccaagaaccgtcctcgacacggtgtcaagtcccaagacgtgcacgtgcgtcgtggtggagggaacggccgcggaggaggagcaggaggaggaggcagccgacgggggggactgcgacgcggacgacgagagcgaggcgttcttctccgtgaagagcttcttcacgcgcagcacgagccgggcggcgaccgtggcgtcgtcggcgtgcatgctgacagacccgcccccgccgacgctgcggtcgcccgaggcctgggagcgcttccgggactgcgaggggtggccgttcgggctgtgccgtcggccgcggccggccgtcctcccgctgccgccgctgcccagcacgccagccgactcgtggaagtggcgcaagagcgtcggtagcctcgccgcgagcccagctcctgcttacagacacaaaatcactactgctgctcctgctagcagtaaataaccgcgcgcccgttaactaacaaagaagaagcccgaaccgtccgtgtcgtcagcagcagcgacgctgctgggacgtggcgacgacctttacaagactgcagctagtagcctgcgtgcttgatgcttgttcgtcgtctagaatgcgagagttttccccacaaaattcctatgaacatagattttgcatgcttgttcgaggcggccttcatcttctggaagggggttttcaggtgtacgtgttctgaataatgaagtctagtgtacttttcagttcttgtgagttggacgctctagttcttttggtgcctctactcagagtcagagagccctcactcgatctccatcggtagtttcaatgggtgacatttctagttccagttcacaattttactccacgttttttcttcctagaaaa

SEQ ID NO: 104431 - DNA, 168 bp, Zea Mays
atggcgaacgacgatcgcgtggaggtgtggtctcatagacgctcggggacgaggagaggggtggacgatgacggtggtggcgcgaggggagggattgatggcggtggggacgcgaggaggggagggctaaaggatgatcaaataacattgttcattagatttgagtga

SEQ ID NO: 104432 - DNA, 1428 bp, Zea Mays
agatctccggatcgctgatccactagtcgagaatccagatctctcgcctgctcgctaccaaataccaaccacgaagaacaggaagaatgcccaaactgtcgtgtcgggtgctctttgcggctcttctcatcgcttcgctagccgctctgctcgtccggttcccgatccacaggctcctcaatccccacgccgccatggaccccgactccgagctcgagttcgagatgcccggcgtcttgcgtgtgtacaagaccggccgcgtcgagcgcttcgacggcaccgagaccgtcccgccctgccccgatggcgatcccgccaacggcgtcgcgtccaaggacatcgtcctggaccccgccgcaggcatctccgcccgcctctacctacccgcgggagtggatgccgggaagaagctccccgtcgttgtgttcttccacggcggtgcgttcatggtccacaccgccgcctccccgctgtaccacatctacgccgcctccctcgctgccgcggtgcccgccgtcgtcgtctccgttgactaccgcctagcgcccgagcaccgcatccccgccgcctacgacgacgcattcgcggccttgaaggcggtcatcgccgcgtgccgcgcggatggcgccgaggcggaagctgagccctggctcgccgctcacggcgacgcctcccgcatcgtccttgcgggggacagcgccggcggtaacatggcgcacaacgtggcgataaggctgcgcaaggaaggcggcatcgagggttacggcgacatggtcagcggcgtcgtcctcctgtacccttatttctgggggaaggagccgctgggcgcggagcccacggatcccggctaccgcgcaatgttcgatcccacttgggaattcatctgcggcggaaagttcggcctcgaccacccctacgtcaacccaatggcatcgccggaggagtggaggcagcttggttcccgccgcgtgctggtgaccacggcggaccagtgctggttcgtggagagggcaagggcttacgcagagggaatcaagaagtgcggctgggagggggagctcgagttctacgagaccaagggtgaggcgcacgtcttcttcttgcctaaacacggcagcgaaaaagccgtgaaggagctcgccctcgtggccgaattcgtccggcgctgttgaggtgcctttcgctttgtttgcccggacctggtgagtagttcagcgagagaaaaaaaatcgcacaattagtgacttttattcatattgcaagttaagcacagaggttcagtctcgattcagaatcctgatcttgaatttctgttgtgcatcgaaatttatcctgaacagtacatactgtaatttcgaagtgcaggctagcgagtggctaaatgtattgtatacttgaaaactgtccgatgtattgtatacttgaaaa

SEQ ID NO: 104433 - DNA, 1176 bp, Zea Mays
atggagaaaggaaaacacatccagccaccaacttatggcaaccttgtaactattctttctatcgatggtggagggattcgaggaatcattccagctgttgttctcacctttctggaatcagagttgcagaaactcgatggagaggaagccaggttagcagattactttgatgtcattgctggaacaagcacaggggggcttgtgacctcaatgctggttgcaccaaacaacacaaacaggccactttttgcagccaaggatattcaagcattttatatgaaccatgctcccaagattttcccacagcagaggggtccatttggtagggtaatgaggatattccgatcactgtcaggaccttcctatgatggtaagtaccttcatgatgttgtcagaaagaagctaggaatcaccaggctgcatgagactttaacagatgttgtaataccaactttcgacatcaagcggctacaacctattattttctcatcttatgaggttaagaatgagaagtacaacacaatggatgctctactatcagatatttgtatcagcacatctgctgctccaacttatcttcctgcgcactacttcaagacagaagattgccatggaaacaccaaggagttccatcttattgatggaggagtggctgccaataacccggctttagttgccattggagaagtaaccaagcagatattcaaggaaaacccagattttttcccaataaaacctatggattatggccggtttctggtcatctcactaggcacaggctcagcaaagtttgaagcaaactacaatgcacaaacggctaaatcatggggactgttgggttggttgcttggcagtggatccactcccttggtagatattttcacacaagcaagtgcagatatggtggatatccatatctctgctgttttcaaagcattacattctgagcaaaactatctgaggattcaggatgatactctgcaagggacgctgtcctcggttgatgttgcaaccaaggaaaatatggagaagcttgccagagttggagatatgctcctaaagaaacctgtctcacaggcgaacttggaaactggccatatggtgcctgcttgtcatagggcagagatgaccaatgaagaagctctaaagaggttagctttacctctacacctctaa

SEQ ID NO: 104434 - DNA, 1786 bp, Zea Mays
ccgccgccgcctgctttatttagcctagcttctgcccgcgagcctcttcttccctccctccactcgcgtccaaattctctcctcaccacaccacctctccctccgacgcacgggtgcatcgcagtgctagatagagtgaccatgcaggcggcggcggtgacggtgaatggcgcgggcgacgtgcagaagccccagcagcagccgatggtggtgggggcgccgccgccggcggccatggtgccgccccattgggttgccataccgatgccgccgcacccgatggcgccgccccagttcgcggcggctcaattcgtgccgttccacgccgtcgtgcagtcgccgcagctggcggcacctgtgccagcggtcgtcctgggatcgccggcgccgcatcaggccgggcaggaggagaacaagaccatctgggttggtgatctccatttctggatggacgagaattatctgcacaactgcttcggctacaccggcgaggttgtggcaattaaagttatccggaataagcagaccggacagtctgaaggatacggatttgttgagttctacagccatgctgcagctgaaagggttcttgaagggttttctggtcatattatgccaaacactgaccagccctttaggttaaactgggcatcgtttagcatgggagataggcgctcggatgttgcttcggatcattccatattcgtaggcgaccttgcttccgatgtcaatgacgccacactgctggaggttttctccagcaggtactcctctgtcaaaggtgccaaagtcgttatcgatgctaacactggtagatccaagggttatggcttcgtgagatttggagatgacagtgagaagacgcatgccatgactgagatgaatggtgtgtattgctcctctaggcccatgaggattggcccggcaactccaagaaaatcatcaggtacctctggatcaaatggctcatctgctcgaccagacggaggagatttgacaaacacaacagtatttgtgggcgggctcgacccagatgtcagtgaagaggaccttaggcaggccttctcccagtacggagaaatttcttccgtaaagattccagttgggaaacagtgcggcttcgtgcagtttgctcagaggaagaacgcggaagacgcgttgcaagggttgaacggcagcactattggcaaacaggccgtgcgtctctcatggggtcgcaacccagcaaacaagcagtttaggggcgacaatggcaacatgcagtggaagaacgggggcgtgtactacgcggcgcccccgttctacaacggcggctacggctaccctgcggcggccccgttccctgatccaggcatgtacgctgctccagcctacggcgcctacccgttctatggcaaccagcagcaagtgagctgacctggactactgcgccggcctcgcttggaaagctggggcctggcctggcctggcctggagcggctgttaggtgtagctcttggtagaagaagatgaagtagacgacgacggtttcttaggtgagctagatatatataccttgactagtctcgtatagtgcgttttgttacacgtgctagctagggtctagcgccacccaccgagtgtccgacacacctattgactggccacgtacggtatgtcgaaatcaacgacaaaaggaattttcgatgacctggagctgcatgctgccttgaagcagcagaacaataaagctaatggaatcctttgcccctgcaatatattcggtccggcttgagtctgctctgtg

SEQ ID NO: 104435 - DNA, 1547 bp, Zea Mays
cactcgcgtccaaattctctcctcaccacaccacctctccctccgacgcacgggtgcatcgcagtgctagatagagtgaccccagttcgcggcggctcaattcgtgccgttccacgccgtcgtgcagtcgccgcagctggcggcacctgtgccagcggtcgtcctgggatcgccggcgccgcatcaggccgggcaggaggagaacaagaccatctgggttggtgatctccatttctggatggacgagaattatctgcacaactgcttcggctacaccggcgaggttgtggcaattaaagttatccggaataagcagaccggacagtctgaaggatacggatttgttgagttctacagccatgctgcagctgaaagggttcttgaagggttttctggtcatattatgccaaacactgaccagccctttaggttaaactgggcatcgtttagcatgggagataggcgctcggatgttgcttcggatcattccatattcgtaggcgaccttgcttccgatgtcaatgacgccacactgctggaggttttctccagcaggtactcctctgtcaaaggtgccaaagtcgttatcgatgctaacactggtagatccaagggttatggcttcgtgagatttggagatgacagtgagaagacgcatgccatgactgagatgaatggtgtgtattgctcctctaggcccatgaggattggcccggcaactccaagaaaatcatcaggtacctctggatcaaatggctcatctgctcgaccagacggaggagatttgacaaacacaacagtatttgtgggcgggctcgacccagatgtcagtgaagaggaccttaggcaggccttctcccagtacggagaaatttcttccgtaaagattccagttgggaaacagtgcggcttcgtgcagtttgctcagaggaagaacgcggaagacgcgttgcaagggttgaacggcagcactattggcaaacaggccgtgcgtctctcatggggtcgcaacccagcaaacaagcagtttaggggcgacaatggcaacatgcagtggaagaacgggggcgtgtactacgcggcgcccccgttctacaacggcggctacggctaccctgcggcggccccgttccctgatccaggcatgtacgctgctccagcctacggcgcctacccgttctatggcaaccagcagcaagtgagctgacctggactactgcgccggcctcgcttggaaagctggggcctggcctggcctggcctggagcggctgttaggtgtagctcttggtagaagaagatgaagtagacgacgacggtttcttaggtgagctagatatatataccttgactagtctcgtatagtgcgttttgttacacgtgctagctagggtctagcgccacccaccgagtgtccgacacacctattgactggccacgtacggtatgtcgaaatcaacgacaaaaggaattttcgatgacctggagctgcatgctgccttgaagcagcagaacaataaagctaatggaatcctttgcccctgcaat

SEQ ID NO: 104436 - DNA, 192 bp, Zea Mays
cgtctgggcgtcgcgtcgccaagctggagtgctggacctagggcgcggctgcgcgggacttgcgtcggggataggagaatgtggcgccgccgccagagacggagagaccgagagggcttgcgaccttgcgtcggggatagctggatagggatagggtttgcgtctgaagtctggactcggcgtcgggctttt

SEQ ID NO: 104437 - DNA, 2049 bp, Zea Mays
tcagagcagaggaatctgcgctttgcttccgtcagtaaccttctttctcagctcaattaggcgcctctttttctcttttaatgatggtgtctgtgttcaggtgatggagaaggatccgaggaaggccgcgacaccggcgaagggaccggccaacgcgggcacccgggtcaccatgaacagaatccagtcgagagagcgcaagctcgcgctgcagcaagatgtggataagctcaagaagaagctgcgccacgaggagaacgtccaccgcgctctggagcgggcgttcacgcggccgctcggcgccctgcctcgcctgccgccgtatctgccgtctcagacgctagctcttctcgcggaggtggcggtgcttgaggaggaggtcgtccggctggaggagcaagtggtgagtttccggcaagggatctaccaggaggcgatcatcttctcctccaccaagaacgcccagctccccgacggccaagttcccgtgccggcgcagctcgtaccgtcgtacccggtgctgaattccgaggtctcaccggcgacagtgagccaaggtcctccagaccatcctcccggcgctcgtccgtcgccgcacagcggcgtggccaacggcaagcaaacgccacggaaccccgttgctacctcgccgagccaggatgaccggtccggggcagggaaagagaaccagtcgtgcagcaacacgccgagcacgagcagccgccagtcgccgtcgcagcagaagacgcccaagtgcagggcgacgccgcctgacaggcgcagggttactcctgctcagtgtgtagatggtgttcgcgtcgtccatgcagacaagccctgctgttgcgcctgaccgtaaacggcctgccgacgctgctgctggcactggcagcaactctgacaacgtgacgacgtcccacgacgacgcgagctcgagcgtgccgaacaaagtatcggaggagctgctccggtgcctgctggccatcttctcgcagatggggggctcggctgctggcggcggccgaggactaggagacgaggaccagcaggcgctgtccccgtcggtctccggctccagcgagagctcggcgtcgtcggaggcggacgcgtacccgcaggacccctacggcatcctggagctgggcgccagggacatcggcgcctacaagcggttccacgtggtcgacgccgcgtccttcgacggcaacggcgacacgcctctcgttcgtcggagactcaaggccttgctgcggaggctgtcgtcggttgacctggcggggctctcccatcagcagaagctggccttctggatcaacgtctacaattcctgcatgatgaacgcgttcctggagcatgggatacctaccaccccgcaaatgctcgtggcgatgatgcccaaggccaccgtgagcgttggtgggcgcacgcacagcgccatgtccatcgagcatttcatcctgaggctgccctacagcgccaagcaggtgaaggtgagccgggaaggggccaagtgcgacgacggcgacgtgacggcggcgcgcggcgcgttcgggctggagtggcccgagcccctcgtcaccttcgcgctctcctgcggcagctggtcgtcccccgcggtgagggtgtacacggcggcgcgcgtggaggaggagctggaggcggcgaagcgggagtacctacaggcggccgcgggcgtgtgggcggcggggaggctggcggtcccgaagctcctgcactggtacctgctggacttcgccaaggacgtggacgcgctcatggactgggtctgcctgcagctgccgccggagctgcggcaggaggcggtgcgggccgtggaggtcggccgccgcgccggcgccggcggccgcgtccgggtcctcccgtacgagttcaggttcaggtacctgttggcctcctgacgacgcgtgcgtactacggtagggagtagtgtagtgccgtgcgtactggaggtagtagtagtaatgtagtagttcgtgcgcaggtctttgcaataataaaacggagatgggattgactatgcagttttta

SEQ ID NO: 104438 - DNA, 1086 bp, Zea Mays
acccggccggaaacgatcgagagctagccagacgtgtgagctagctagcttgttggctgttgccgtgttcgcagcttcgcacgtactcgcgacttcgcaagccatcggcttcccgcctctcttcctttcaaaaaaaaagaaagaaacagctaaaggctcaagcaacacggtggtgcctgtcgggattgacgaagcagcggaggtggcgatggaccgggagtgctcaccgctggcagcaacgacgcggagcgggacgggcagaagccacagcgaggcggagcggaagcggcggcagcgcatcaacgcccacctcgccacgctccgcaccctcctccctgcggcgtcgcgggtacgtaagactgacgtcacgtccttgctcttcaggagctgaccgtacgtggcagttcatcatcgaactcgatagcgaacacggttacgtacgtgtgcgtgtacgaattaatcatgcagatggacaaggcggcgctgctaggggaggtggtgcggcacgtgcgggagctgcggggcgaggcggacgccgcggcggcgggcgcggcagtggccgtcccgggggaaggcgacgaggtcggcgtcgaggagggccaccagcaccgcttctgccacggcggggagagggccgccaggcgcgtcagggcgtgggtgtgctgcgccgaccgcccggggctcatgtccgagctgggccgcgccgtgcggtccgtcagcgcgagggccgtgcgcgcggagatagccaccgtcggcgggaggacgcggagcgtcctggagctggacgtcggcgggcggcaccacgatggcgagggaacgtcgacgtcgtcacggccagcgctgcaggcggcgctccgggccgtgctgctcagccgggaggagatgctcggcgccgagtgctacaagaggcagcgcttctcggcgcacctcgctagggtttacgacagtggcgccgtagaagtgactgactgatggagtgatgggagacggaagggaaggggtactgtgtgacatgtctcccatggtgctactcgtacttttttagttggaacatgtggaatatcacagaatttgcattgccgactc

SEQ ID NO: 104439 - DNA, 687 bp, Zea Mays
acggtggtgcctgtcgggattgacgaagcagcggaggtggcgatggaccgggagtgctcaccgctggcagcaacgacgcggagcgggacgggcagaagccacagcgaggcggagcggaagcggcggcagcgcatcaacgcccacctcgccacgctccgcaccctcctccctgcggcgtcgcggatggacaaggcggcgctgctaggggaggtggtgcggcacgtgcgggagctgcggggcgaggcggacgccgcggcggcgggcgcggcagtggccgtcccgggggaaggcgacgaggtcggcgtcgaggagggccaccagcaccgcttctgccacggcggggagagggccgccaggcgcgtcagggcgtgggtgtgctgcgccgaccgcccggggctcatgtccgagctgggccgcgccgtgcggtccgtcagcgcgagggccgtgcgcgcggagatagccaccgtcggcgggaggacgcggagcgtcctggagctggacgtcggcgggcggcaccacgatggcgagggaacgtcgacgtcgtcacggccagcgctgcaggcggcgctccgggccgtgctgctcagccgggaggagatgctcggcgccgagtgctacaagaggcagcgcttctcggcgcacctcgctagggtttacgacagtggcgccgtagaagtgactgactga

SEQ ID NO: 104440 - DNA, 745 bp, Zea Mays
gatatccatttgtttgttatcttgctcgattatgtcctaagttttatttgttgaaatcagtgatttatgtttattgtgtatgcaagaaatactagatgtttatctcttaatggctggttggaagtttttcttttgtgctccatacatatttgactcgacccatacacatttaccaggttttaataaatcctgaaacaaaagcaagaaggaccaacagggtgctgctctcagagcttgtcaagccgcacaatgcgacatctcttgcccacaagacacctgtgcatatgatggaagcaagagcatgtacactgcaagcgagatgtcgttcaaatcattggagttcgttgtcaagttggggaaggagggccgaaaaatcaattgatcaattgtcagcgaagggacacgctatatgacgcaatccaagcactggatattgtcttgagtcaccttctctcaattatgtaactcttttttggtccttctccaagaagttttggtgatgaggacattgcggtgggctagagtgctggagaggatattaaccgagcttccgtccaactcaaatgggcctctcattgaacattggtaaatgatcttatccaaaaaaccaacatgtacaaaattccaccaaagaattgttcgatttcggttgtctcaatattgagggctctgactgaacggctttatggtggtgcgccattgttgtttcgacatttatatctatttcaacggagctttgcatatc

SEQ ID NO: 104441 - DNA, 968 bp, Zea Mays
gaaacgttcaggcacacgcggcgctgcagtatacaacgaagcgagtgtggaaaagcaaggcagcgcgacgaagcggcgccgccagctccccaaaacctccccagctgccacctcctctgcctccctgcgtcccccgagcaaagcagaacaaggggggaaaaagttgacatacgcttgcagcgatggcctttgccgcccgcgccgcgctcgtgcgcgtcctccctccgcgaccatcgccgacctcccaaccgaagcagctcaagcaaggtctaggcggccgcggcgggtcctcgctcgccgttcgggcgaaggactccgatgacttcggggcccttctgtcggagaagctcgatgcgcaggcgcctgagaagcgggatgggcgggatggttttgggagggaggcgagtagcgtggaggaggagaaggaggtgcagggcgagccggcttcgtggggtgtgctcaaccagatcggcgtcgagttggactctgacaaatcatattctgctctcatatatggcacatctgctcttgttgcaatttggatatcatcaattgtggtttctgcacttgattcagtccctttggttcctcaagtgatggaagttgttggtcttggcttcacaatttggttcacatcgagatacctgatatttaaggagaaccgtgatgaacttttcacgagagtcagctccatcaagaagcaaattttggggtctcatgagaactgagcgtctctcttacgttctgttctgttaactggtactgtgttttattgaagatgtttttttttggaataaacagtacatttttttgtttttcgcctgcatttttttactaatcgaaaggtaagtgcactgtactcttttcgttgattccaactaattttaggtgagtgtagggctgcgatgacctaaagtgcgactttctttgcatgctttgcggggcccgctgaggcggctatcaattgt

SEQ ID NO: 104442 - DNA, 2238 bp, Zea Mays
accttcacgaagacatccccggcccactagcgatccgtgcaggcgctgccatccaccacctctccctcggcgtcgcactagcgtccccaacttcccctacgccgtcggtcgcacgtgctgagcgcctgacatggtgacacccacggaaactggtagttgctcccccgtggtgataccgagcctgcctctggcaagtggggtgccccgtaccccaggcggctgacgggtggggcacccaggtgacccgactgacatggaccatctcttcctcctcctccgtcttcctcccctaaccccagataaagccaagcccagcgaggccaccaactccacctcgtggactccttccccacaaaactaaaccctcgcttcggaggcgcgtgaacccaagaccgacaggcgaacgaagcgagggtcctcacaaccaccatcccctgctgcaacgacgccgccggcgatggcgtccatctccggcgcggcggcgccgccatcttccgccgtgtgccggcttcggctgcgccggcaccttctgctccggccctcccacctccgcctccgcgcgccccactccatcgccgacctctcccgctcctccaattccgccccgagcccggcccgcccagcgctgggctccggcccggagaacggcagcggcggcgtccgcgcggtggagaaggacccgatcaagctgtgggagcgctacgtcgagtggctctaccagcacaaggagctcggcatcttcgtcgacgtcagccggatggggttcacggaggagttcctgcggcagatggagccgcggatgcagcaggccttcgtcgacatgcgggagctcgagaagggcgccatcgccaaccccgacgagggtcgcatggtgggccactactggctccgcgacccggccctcgctcccaactccttcctccggaacaagatcgagaccgcactcgacagaatcctcgccttctctcaagatgtcgtctctggaaagattctttccccatctggtcgtttcacttcaattctctctataggaatcggagggtcagctttgggccctcaatttgttgctgaggcacttgcgcctgataaccctccactgaagataagatttattgacaacaccgatcctgctgggattgatcatcaaattgctcaactaggacctgaactggcaactactcttgtaattgtcatttctaagagcggaggcacacctgaaacccgcaatgggctactggaagtacagaaagccttcagagatgcaggtctgcaattctcgaaacagggtgttgcaatcactcaagaaaattctctgttggataacactgccagaatagagggatggttagctcggtttcctatgtttgactgggttggtggtaggacttcagaaatgtcagctgttggtttacttccagctgcattgcagggtattgatatcaaggaaatgctagttggtgcagctttaatggatgaggaaacccggaacactgtggtatcacattattaataacacggacaacttgcagtgatggcatgattatctatattgtgtcatgtcaaacatgtttatctttttattaacaggttaaagcaaatccagcagcattgcttgcattatgttggtattgggcatcggaagggataggcaaaaaggatatggttgtgcttccttacaaggatagtttattacttttgagtagatatttgcaacaacttgtcatggaatctcttggaaaagaattcgacctggatggcaaccgtgttaatcaagggctaactgtatatggtaacaaaggaagcactgaccagcatgcttacattcagcagctgagagaaggtgtacaaaacttctttgttacgtttattgaggtcttgcgtgacaggcctgctggacatgattgggagcttgaacctggagtcacgtgtggtgactatttgtttgggatgttgcagggaacccgttctgctctttatgcaaatgaccgggagtctatctctgttactgtgcaagaggtaactcctagagctgttggagcactgattgcactttatgaacgtgctgtggggatttatgcttctttggtaaatatcaatgcctatcatcagcctggtgttgaggctgggaaaaaggcagcaggagaagtattggcccttcagaaaagggttctgactgtattaaaggaggccatgtatggaacttctgacctgtgttctttctgtttctctgtgaagtga

SEQ ID NO: 104443 - DNA, 2289 bp, Zea Mays
cgatccgtgcaggcgctgccatccaccacctctccctcggcgtcgcactagcgtccccaacttcccctacgccgtcggtcgcacgtgctgagcgcctgacatggtgacacccacggaaactggtagttgctcccccgtggtgataccgagcctgcctctggcaagtggggtgccccgtaccccaggcggctgacgggtggggcacccaggtgacccgactgacatggaccatctcttcctcctcctccgtcttcctcccctaaccccagataaagccaagcccagcgaggccaccaactccacctcgtggactccttccccacaaaactaaaccctcgcttcggaggcgcgtgaacccaagaccgacaggcgaacgaagcgagggtcctcacaaccaccatcccctgctgcaacgacgccgccggcgatggcgtccatctccggcgcggcggcgccgccatcttccgccgtgtgccggcttcggctgcgccggcaccttctgctccggccctcccacctccgcctccgcgcgccccactccatcgccgacctctcccgctcctccaattccgccccgagcccggcccgcccagcgctgggctccggcccggagaacggcagcggcggcgtccgcgcggtggagaaggacccgatcaagctgtgggagcgctacgtcgagtggctctaccagcacaaggagctcggcatcttcgtcgacgtcagccggatggggttcacggaggagttcctgcggcagatggagccgcggatgcagcaggccttcgtcgacatgcgggagctcgagaagggcgccatcgccaaccccgacgagggtcgcatggtgggccactactggctccgcgacccggccctcgctcccaactccttcctccggaacaagatcgagaccgcactcgacagaatcctcgccttctctcaagatgtcgtctctggaaagattctttccccatctggtcgtttcacttcaattctctctataggaatcggagggtcagctttgggccctcaatttgttgctgaggcacttgcgcctgataaccctccactgaagataagatttattgacaacaccgatcctgctgggattgatcatcaaattgctcaactaggacctgaactggcaactactcttgtaattgtcatttctaagagcggaggcacacctgaaacccgcaatgggctactggaagtacagaaagccttcagagatgcaggtctgcaattctcgaaacagggtgttgcaatcactcaagaaaattctctgttggataacactgccagaatagagggatggttagctcggtttcctatgtttgactgggttggtggtaggacttcagaaatgtcagctgttggtttacttccagctgcattgcagggtattgatatcaaggaaatgctagttggtgcagctttaatggatgaggaaacccggaacactgtggttaaagcaaatccagcagcattgcttgcattatgttggtattgggcatcggaagggataggcaaaaaggatatggttgtgcttccttacaaggatagtttattacttttgagtagatatttgcaacaacttgtcatggaatctcttggaaaagaattcgacctggatggcaaccgtgttaatcaagggctaactgtatatggtaacaaaggaagcactgaccagcatgcttacattcagcagctgagagaaggtgtacaaaacttctttgttacgtttattgaggtcttgcgtgacaggcctgctggacatgattgggagcttgaacctggagtcacgtgtggtgactatttgtttgggatgttgcagggaacccgttctgctctttatgcaaatgaccgggagtctatctctgttactgtgcaagaggtaactcctagagctgttggagcactgattgcactttatgaacgtgctgtggggatttatgcttctttggtaaatatcaatgcctatcatcagcctggtgttgaggctgggaaaaaggcagcaggagaagtattggcccttcagaaaagggttctgactgtattaaaggaggccatgtatggaacttctgacctgtgttctttctgtttctctgtgaagtgattggttatgcatagtatttttggggcatatttctagttgtgatgctttgaaaatgcatttcgttgtatcactaggtgggactttgttttgaggaatggtgtggttcatcatattctcaccctcacttttttgtttggtttatggagttgaataggttcatctgccaccaccct

SEQ ID NO: 104444 - DNA, 1387 bp, Zea Mays
ccgaaaatgcccccgcctactctgcacgccggttcatacaaaaggggcctcacgtcacggcacacagcacgcagcacatcgctcactccgtcactcgctcctcctccactcctcgccttcctcggtcgcatcaagaacacgagcaggaaggagaagaggaggagtcctatcagagccagacagccaatcagtatctgtaccattaccgttcgggcaccagattaccaaaatcctgcagaggggaatggcgccgagcagctacgagatggcggcttccaccctgctgtgcggcgaggacagcagcagcatcctggacctcgaagcggggggccaggaggaggaggaggaggtgctgctggcgcggagcaggacgcgcggggagcccagcgtggtcttccccgtgccgtccgaggaatgcgtcgccggtttcgtggaggcggaggcggcgcacatgccgcgggaggactacgccgagaggctgcgcggcgggggcacggatctccgcgtccggacggacgccatcgactggatttggaaggttcacgcgtactacggtttcggccctctcaccgcctgcttggccgtcaactacctggaccgcttcctctcgctctaccagcttccggaaggcaagtcttggacgacgcagctgctgtccgtggcgtgcttgtccctggctgccaagatggaggagacctacgttcctccgtctctggacctgcaggtcggggacgcgcggtacgtgttcgaggcgaagacggtgcagaggatggagctgctggtcctcagcacgctcagatggaggatgcgagcggtcacccccttctcgtacatcgactacttcctccaccggctcaaagacggcggtgcgccgagcagacgcgccgtcctccgatccgcggagctcatcctgcgcgtcgcgagaggaacgtgctgcctgggtttcaggccctcggaggtcgccgcggctgtcgccgccgccgtggccggcgaggagcacgccgtggatatcgacaaggcttgcacccaccgcgtgcacgaggtacggcgtgtgcctgtccccggccacttctcgcgagtcttgtcgtcagattcaatgcgatgcgatgcaatacgttaagcgtgtaccgcatggatccaaatccaagtcgtaggtttgcagctgtacttgacttgtgcagctactgagctactactactaggcacacgcacctgcccaggtcaggtgcgtgagccgcatttacagccatggcgactgatgctttatttgttgctttgcgctgcatgcgggcggttgcaggagagggtgtcgcgatgcctcgaagcgatccaggccaccgtggccctgctggcgcctgcacagccgctgaaagctgaaggcccgagc

SEQ ID NO: 104445 - DNA, 1571 bp, Zea Mays
ccgaaaatgcccccgcctactctgcacgccggttcatacaaaaggggcctcacgtcacggcacacagcacgcagcacatcgctcactccgtcactcgctcctcctccactcctcgccttcctcggtcgcatcaagaacacgagcaggaaggagaagaggaggagtcctatcagagccagacagccaatcagtatctgtaccattaccgttcgggcaccagattaccaaaatcctgcagaggggaatggcgccgagcagctacgagatggcggcttccaccctgctgtgcggcgaggacagcagcagcatcctggacctcgaagcggggggccaggaggaggaggaggaggtgctgctggcgcggagcaggacgcgcggggagcccagcgtggtcttccccgtgccgtccgaggaatgcgtcgccggtttcgtggaggcggaggcggcgcacatgccgcgggaggactacgccgagaggctgcgcggcgggggcacggatctccgcgtccggacggacgccatcgactggatttggaaggttcacgcgtactacggtttcggccctctcaccgcctgcttggccgtcaactacctggaccgcttcctctcgctctaccagcttccggaaggcaagtcttggacgacgcagctgctgtccgtggcgtgcttgtccctggctgccaagatggaggagacctacgttcctccgtctctggacctgcaggtcggggacgcgcggtacgtgttcgaggcgaagacggtgcagaggatggagctgctggtcctcagcacgctcagatggaggatgcgagcggtcacccccttctcgtacatcgactacttcctccaccggctcaaagacggcggtgcgccgagcagacgcgccgtcctccgatccgcggagctcatcctgcgcgtcgcgagaggaacgtgctgcctgggtttcaggccctcggaggtcgccgcggctgtcgccgccgccgtggccggcgaggagcacgccgtggatatcgacaaggcttgcacccaccgcgtgcacgaggagagggtgtcgcgatgcctcgaagcgatccaggccaccgtggccctgctggcgcctgcacagccgctgaaagctgaaggcccgagcagcggccgcagcagagcctcttcctcctctgccaccgtgccgcggagcccgaccggggtgctggacgctggctgcctcagctacaggagcgacgacgcggctgcggctgcggctgcctcgcacgcgagctccgcctggcgcgacgaggacggcgactgctccccggctgtttgcagcaagaggaggaagactagcagatgatgattagtacacaccagtgatggagatggaaggatcgatcgaaaagcccattccgcgcgctgatcagtgatcgtcgatctccttgacagaaagtcaagtggttttgatcgcactgaccgaagagtctggtctgctctgggagcttttgactccggtttgaatcgaagtgcctgtaagccaggcaaaggaggcgcaagcgcaaccaaaagcaggacattttggacatggcggtccagcaaag

SEQ ID NO: 104446 - DNA, 201 bp, Zea Mays
tctttctagatcactgtacagaacggcgaaccagtgcttcttcagggcgtgtcatcgagagtacccaaacgggtaagcaattgacccaaccccccaacagagatggttgtagcatcccacggagatcaagaggtccctcttcttggacctgcctttgaagatccccttctcgtcattgcgccgacaagcacaacaaatcca

SEQ ID NO: 104447 - DNA, 467 bp, Zea Mays
atgaggcagtccctgacattggagatgctgagagcatgcagtcgcaccatatataggtggcgttctccgtcaagccgtcggtctccctataattcacatgttaagattttcctgccaatttgtttgctttctcagtatcttgataatcttagcgctagaagggtgcggcaaacatttgatacaagggaagaagcctacctcttttaccttgactatgcaaagttggctggtttaagtgtcaggacaaagaggtgtaattgcaactgctggtgtggtgtgattgcaaccccgcattaggtgtgattgcaactgctgtataattctacccaaatatctgttaaaaaatgtaaacaaaatgattgcaactgctggtgtgttgtaattgcaactactggtgtggtgtgattgcaactgctgagttgctctgatgtgattgcaagtactgaataactctgggaaattttgtt

SEQ ID NO: 104448 - DNA, 93 bp, Zea Mays
gttctctcgttgcaaccagtgttgcataggcaggttctattctatttccttcattgacatctatatagccaatttattcccttcaataccatc

SEQ ID NO: 104449 - DNA, 318 bp, Zea Mays
atggcgacggaatcggcggcggagatcgtctgccggctaccggaggagtgcgtggcgcacgccatctcgctgacggcgctcggcgacgcgtgccactcgtctacggtgtcgccggcgcccttcagggccgctgcggactccgacgccgcctgggcgcggttcctgccgccggaccacgcggacgacgtcctggcgtctgcacccgcgttgaggtgcactactggccaggaggaatggtggtcgccgcacaatacagagatgagcaatttgtttgtttgttcgtttacaatgattattgttatcgtttatttattgtaa

SEQ ID NO: 104450 - DNA, 1767 bp, Zea Mays
ttcatgaatcatgaatttgttccccctttgcccatgccggacgccccatttttggcgccgctgccaggagaccgaattatggcataatcacaccaaaacccgctcccttccaaaccttcccatcagtcaatcttacacccgaccgagcccctctctcttctcgttgccattcccgattcccaaacgcgcagcggcgcaggcagctgcgttcacgtgtccctccagccccgtagcgtagcgccatccagctccaagctgttgctacaagaagccgccacaacaaccgctccgaacggctcaccggccgggcggcgctcccatagtcccatgggagaagcgacctaacttttctcggattctagctcgagtctgcaggcggctgctgctgctggtggtggtttcttgagaggcgagaccctgaaagggatggcactggaggccgtggtgctatcccagtcccagttccagcaaggcagtcgctttgggtgcggtgccatggcagcaggaggggcttggagtgatctgttgtttagtggaacggaggggttgttcgagatgggtggcgccgccggccgcggctggaacgcggccgcgagctcgccgccgcagctcctgcaggagctgggtgacaacggtgctgccggctcactacctgtggcgtctgcggggagtgcgagtggcggcgccggtcaggatgccccggcaatggctgcggcagcggcgtccggaaggaggaagcggcggaggatgaggccagtgaagaacgaggaggaagtggagagccagcggatgatccacattgcggtggagcgcaaccgccgcaagcagatgaacgagcacctcgccgcgctccgctcactcatgccgccggcccacacgcaacggggcgatcaggcatccatcgtcggcggcgcgatcaacttcgtcaaggagctggagcagctgctgcagtcgctggaggcgcggaggcgttccccgcagtgcgctgcctacgccgtcgatcccgacgacgcggggccgttcgcggacttcctcaccttcccgcagtactcgatgtgcgccgtcattgcggccccagagaacactggccaccaccgtgagggcggcgccgtcgccgagcaggaggcgtccgggtcgaagccgtcggccgtggccgacgtcgaggcgacaatggtggagagccacgccaacctgcgggtgctgtcccggcgccggccgaggcagctgctgcgcctggtgctggggctccagggccaccgcctcaccgtgctccacctcaacatgagcagcggcgcccacatggtgctctactcgtttagcctcaaggtggaggatgattgccagcttacctccgtgggtgagattgcggctgcggctcatcacatcgtcgagaagattaatgaagagcaaaacaaggctgcagcttagaaattagaatagaatcaagagtgctttcctgcacgcaacctttttagctcctgtagcaagtgaagtgattcctttttgtgagaacgacgaataatgtatactaatcagcttacctcgtcttcgaaacagtaatatgtatgtgtaaccaacctatctttgtgcatagataatgtccatggccaggcatgcatgaacgagagctctggctacagaacaactccagttccaggccattcgatttttttgccattctactgtagcactcatttaatttgtgtcacggacatgtgaaaaaatttgcgacccacctccaaatagttaaaattttccccggttcca

SEQ ID NO: 104451 - DNA, 462 bp, Zea Mays
atggcctccacgctccccgtccgcacgcacaagcacacagggcatggcatggcgccgttgcagagggacaggtgcctgcaggggaggagcaccacgatggccggcctgaggcgacagcccaggcacgcgtggtctggcggcggcccgacgcagcgagggtccacgaatgccgacgccgacgactccgccaggccggcgtcccccgctgtggcggcgagctcctcgaccgaccagctgcgcgcgcaggccgaccgcggcagcctgctcggagagcgccttggcctgccacaccaccgcctcgcaatggctcgcacatgcagtgatatagatcttcaaaaatggctcgcacatgcagtgatcagaacaatgaaatataaatacaaaaatggctcagtgttcaacatacccttgccagaaaaccatactgaccaagcatctgaatgctccaaatgtccaacatag

SEQ ID NO: 104452 - DNA, 1028 bp, Zea Mays
ctgcaactcgagttatttttctgacactatcatcactaatttaatgctagcgtaggcaatgaagcacggaacctatagctgacctagcgagctgatcggctctactcccttctcttgttcctttcttctctccgggctcacctaccggatcatcctccatggccaccctcgccttgccgccgaccaccaaggctgccggccaggacgccacccaggaaagcctagcagagaatcctgccaaggacgccgcagatccgggcagcatggagtccgagtgggttcttctcggaaaatcggacatcgtcccggccgatgtggccgccgccgccgccgcggggcaccaccacctcaacttctcgccgctgccgatgatccctatctgggtgcagatggttctcgggggcgtggtttacacggctgtgccgttctacaagagggtgctgaaggtcgaaggtgaaacgttggccaatgtagaaactgcagtggaggtcgtggagcatgtcgccgaggtgacggagaagttggctgcagatgcggccagttccctgccagagaacggatccctgcacaaggttgccgtggaggtggagtgcgttgctgaagcggtggataaggatgcacatgaggttgaagcagtcatcgataaggttgaggaggtgagcgagaagatcgatgctacagtggaaccggtcatcgaagagcttgagaaggacctgataccgaaccccagatcctctagtggatcagatgcccagaaatgacagttcatgtaaattgggagggaaagctggcgtgtgcgtgtccctggctgtctgtaaatttgtaaatctctcttcgttgtttcctaatgccctatgcgtgtaaactgtaaatacaactaagatacctcatgaactgcaacgacgccacggaatagtaagacgtggtacatgattgtgtcattgtgtgtgtgtggctgtgcgtgctcgaatctggacatctgattgtcaaaagtactggcaacatttacttgcaaaccaaacgccatg

SEQ ID NO: 104453 - DNA, 804 bp, Zea Mays
gtagtaagcagtagctgcgaaagagaatcaacagggtattatacaaatggatgaacggagcacaacaccaccgagccagcccaaccaatctgtccgagccacggtcctacactgtagcaacacgaacgaacagatgccgccagtcctactgaatcgaatgccgaatggaatatggatattcggatggaagaaaaaaaatggtgaaaagaaaaaaaaagaaggaatcaacggctcaacacggataacaaataaattacagcacggggcagtgcagatctcccttctctcagtagaaggcggcggcggcggcggccacggcggcagcggcggcgaaccacttggcggcggcgggggagacggcggcggcggcgctgggggcagggggcacctcggcggagggcgtcggggcggggccctccgtgggcatcggcggggagctcatctcgggggtcggggcctcggccttgggcgccggggcaagggcctcgggcgcgggggcgggggccttgggagcgggcgccggggccgggggaggcgtggccggaggctgggcgggcggcgacaccggcgccggggcgggcggcggggtcgcgggcgtcggaggcggcgtcgccggcgggggaggagacgccttgggagccggcgtcggggtggcggccggggcctgcgccgccgcggcggcgaagagcattgccatggccagggccgcgagctggaagcgcgccattgcagccgagtaggcgagagagaagcttgatgagcgtgtgcgtgtgtgtgtgtgtactgtgatggtgtgtgcccggt

SEQ ID NO: 104454 - DNA, 195 bp, Zea Mays
cggaatctttctattgaggaatggaatttcagagatattctgcagcaaaaagtggctgatctgctaaacattcagaaaatttattggaagcagcgggcggctattaagtggatcactgatggagacatttgttctcgtttcttccatgcacatgccacagttaaacacaggaaaaattcaattgccactttgact

SEQ ID NO: 104455 - DNA, 522 bp, Zea Mays
atctcttgcgtctttgcaagacagttctggtacttcttgttgagcaggtctgggttgcctaatctttcaccgggcaacgctttttgcagcctagatgactggtggagcagggctgtggagaagattccccgtgatctccaatcaggtttcaattctatagttatccttggcgcttggagcctttggcgtcatcgcaacgactgtgtgtttaatgggcggtcgtcgagccttgcgaatactctcaccctcgctggcgatgagctcaggatgtggtgtagtgccggggcgaaagggttgaacctgctttcaactcttgcgtttatgcttgatcggggggatagtcttgtgtcatgtccagagtggttaagtgtggtggttgtgttgcgtttgttggtatgttgtgtcttgtggtgggtgtggtgcgtttgttggtatgttgtgtgcggcgtgtgtgtgtgcgtgtgttgtaccttcttctatctatctattaatggaatgatacgcagatctcctgcgtgttcg

SEQ ID NO: 104456 - DNA, 2297 bp, Zea Mays
ttaccgaatgtgattgtgactacaccgccactgctctgctcaacacggttcaccggtaatgatccccggttcctccgactgcaaccgggcgccacgtccgcacctccatctcgctttcagccgttcgtacctaggctacactacatgaaaggtcgctcttcagctgaaactgaagtctgaaaccaccgcccagcgctcgcctgtttctgcggccgtcgatggagctccacctcgccaccatcgcccaccgcccgcctttgccggtaccggcgcggggccaccacctccgccgccgcctccaccacctcccggctcctctctccttccaaaacacctactccccctccctttcctccccgcatcatcatcgcctttctcccacccttcgccgccacctccgcctgcctcttctcgcctcccaagcgcccaattctaacccggagcctgaacctgagcccgagcccactggtgcgaagctactgccgctcgtcatctccatcgccatcggcctcgccgtgcggttcctcgcgccgcggcccgtcgaggttagcccgcaggcgtggcagctcctctccatcttcctctccacaatcgcggggctggtgcttggccctctccctgtcggcgcatgggccttcctcgggctcacagccgccgtcgccactcgcacgctccccttcaccgccgccttctccgccttcaccaacgaggtcatctggctcatcgtcatttccttcttcttcgcgcgcgggttcgtcaagacaggcctcggcgaccgaatcgccacctacttcgtcaagtggctcgggagcagcacgctgggcctttcctacgggcttaccctcagcgaggcctgcatcgcgccagccatgcccagcaccacggcgagggccggaggcgtgttcctacctatcatcaagtcgctctcgctgtcggctgagagcaagcccaaccatccatcgtcgcggaagcttgggtcctatcttgtgatgacgcaattccaggcatctggtaactcgagtgctttattcctcactgctgcagcacaaaacctgttgtgcttgaagctagcagaggagcttggtgtaatcattgcaaatccatgggtatcatggttcaaagctgctagtttgccagctcttgtttctctgctagcaacaccatatttgctgtacaaaatcttcccacctgaaacaaaggacacccctgatgccccagcactggctgaaaagaaactgaagctcatgggccctgtgactaaaaacgaatcggttatgattggcacaatgattcttgcagtctccttatgggtttttggggatgctattggtgtgtctagtgttgtggctgcaatgcttgggctctccattcttctcgttctcggtgtgctagactgggacgattgcttgaatgagaaatcagcatgggatacattggcttggtttgcagttctggttggaatggcaggacaactcactaacctgggaattgtttcttggatgtcaaactgtgttgccaagctgcttcagtcgttctcattgagttggccagtggcattttgtgttctggaggcctcctactttctgatccactacctatttgcaagccagactggacatgttggagccttatactctgcatttctggctatgcatatagcggccggtgttcctagtgtgctgtcagcacttgctttggcattcaacacaaatctgttcggtgcaatcactcattatagtagtgggcaggctgcagtatacttcggagccgggtatatggagcttccagatgttttcaggctgggttttataacagccttggctaacacgttaatctggggagttgttggaaccatctggtggaaatttttgggtctgtactgacagtggcagacatgtggttgaccaaaattttcatttggcactggtcgaattgctcttgctcattgttaggaagggcagaatatctagttaactaccgttgctccctccggtcagctatcgctgaggtgatcagcagttagcaattacgcctgtgtcgtgcagttccttgttttctctttggttccgtagaagtccttgggcaatttttctgcggtatgttcctctctgatgcttatatacagtccgctctgtaaaagttgcgcggctgcactgaaagcagtgtacagcgttgcggccctcaaaaatgtgttcgctccattctacagctcccagctaactatgattctcaacttacagcttggaaccaacgaattctcacaaaacatcagcgagctcgtcggcttgatggtcgta

SEQ ID NO: 104457 - DNA, 1930 bp, Zea Mays
cgcctgtttctgcggccgtcgatggagctccaccacctcccggctcctctctccttccaaaacacctactccccctccctttcctccccgcatcatcatcgcctttctcccacccttcgccgccacctccgcctgcctcttctcgcctcccaagcgcccaattctaacccggagcctgaacctgagcccgagcccactggtgcgaagctactgccgctcgtcatctccatcgccatcggcctcgccgtgcggttcctcgcgccgcggcccgtcgaggttagcccgcaggcgtggcagctcctctccatcttcctctccacaatcgcggggctggtgcttggccctctccctgtcggcgcatgggccttcctcgggctcacagccgccgtcgccactcgcacgctccccttcaccgccgccttctccgccttcaccaacgaggtcatctggctcatcgtcatttccttcttcttcgcgcgcgggttcgtcaagacaggcctcggcgaccgaatcgccacctacttcgtcaagtggctcgggagcagcacgctgggcctttcctacgggcttaccctcagcgaggcctgcatcgcgccagccatgcccagcaccacggcgagggccggaggcgtgttcctacctatcatcaagtcgctctcgctgtcggctgagagcaagcccaaccatccatcgtcgcggaagcttgggtcctatcttgtgatgacgcaattccaggcatctggtaactcgagtgctttattcctcactgctgcagcacaaaacctgttgtgcttgaagctagcagaggagcttggtgtaatcattgcaaatccatgggtatcatggttcaaagctgctagtttgccagctcttgtttctctgctagcaacaccatatttgctgtacaaaatcttcccacctgaaacaaaggacacccctgatgccccagcactggctgaaaagaaactgaagctcatgggccctgtgactaaaaacgaatcggttatgattggcacaatgattcttgcagtctccttatgggtttttggggatgctattggtgtgtctagtgttgtggctgcaatgcttgggctctccattcttctcgttctcggtgtgctagactgggacgattgcttgaatgagaaatcagcatgggatacattggcttggtttgcagttctggttggaatggcaggacaactcactaacctgggaattgtttcttggatgtcaaactgtgttgccaagctgcttcagtcgttctcattgagttggccagtggcattttgtgttctggaggcctcctactttctgatccactacctatttgcaagccagactggacatgttggagccttatactctgcatttctggctatgcatatagcggccggtgttcctagtgtgctgtcagcacttgctttggcattcaacacaaatctgttcggtgcaatcactcattatagtagtgggcaggctgcagtatacttcggagccgggtatatggagcttccagatgttttcaggctgggttttataacagccttggctaacacgttaatctggggagttgttggaaccatctggtggaaatttttgggtctgtactgacagtggcagacatgtggttgaccaaaattttcatttggcactggtcgaattgctcttgctcattgttaggaagggcagaatatctagttaactaccgttgctccctccggtcagctatcgctgaggtgatcagcagttagcaattacgcctgtgtcgtgcagttccttgttttctctttggttccgtagaagtccttgggcaatttttctgcggtatgttcctctctgatgcttatatacagtccgctctgtaaaagttgcgcggctgcactgaaagcagtgtacagcgttgcggccctcaaaaatgtgttcgctc

SEQ ID NO: 104458 - DNA, 678 bp, Zea Mays
atggtgactcagtgagaaactgagaattctcaccattgcactaggcctgtttttttatataaaaaacaatgaaagaaaaaaacacgtcatgaataatactgtagaacagggatatctttttttaaagcgggcaagcggtccttcttttgtatatagagataaccccttgaaattggtatgcagattaacctgttacttttgttgtgcagccgggtatatggagcttccagatgttttcaggctgggttttataacagccttggctaacacgttaatctggggagttgttggaaccatctggtggaaatttttgggtctgtactgacagtggcagacatgtggttgaccaaaattttcatttggcactggtcgaattgctcttgctcattgttaggaagggcagaatatctagttaactaccgttgctccctccggtcagctatcgctgaggtgatcagcagttagcaattacgcctgtgtcgtgcagttccttgttttctctttggttccgtagaagtccttgggcaatttttctgcggtatgttcctctctgatgcttatatacagtccgctctgtaaaagttgcgcggctgcactgaaagcagtgtacagcgttgcggccctcaaaaatgtgttcgctccattctacagctcccagctaactatgattctcaactt

SEQ ID NO: 104459 - DNA, 2331 bp, Zea Mays
ttcggtgacggtgacgccagccccggcccttgcctgtctgcctacgcaggagcctacctgcttcatccggctctggttcgtccatctgttcaacctggcttcatgggcgcgtgacctgagcttaaccaccgcctcgtttccgcggtagggtttactagctggtgtccgttgctcggctagcaccgtagcacgcacgtatctccagcacacggtgacaaaaaggaaagctgcagcgagcattttcaggcaacagtggtaactattagtagtattattctctcatgcgatcaacatacatagtggctgtatggatggttaaccatggttgcctcttgaccgcactaccggcgtggcgtgacctaacctaacccgagctccctccctttcgcccccctgtctccctcgcccacgcacgccctttattaaggcacagaggacagcacacagtattgtgggaactgcatgctgagagcaaacccagaaaggaaaaaggaaaaaaagaaaacagagagaggggagagtgggagacggtcggagacagaggcctcactcctccacactctcagtcgtcttccagtcccagcgctttcttggatcgcgaggaaaccactcggggagtttgcagttgcagagaactgtatcggccgaagtggttgcacggtgtgttggccttggccatgcgccacggcagggaacagagacgagcagcagggaggcagcaatggaggcgctcattgaccctgctctcgctgtaaagatagtcccgcggtgccctccgaattccacttgatccaactctcgacatgaagcggccacgcggcgctactccctccctgtctgcgatgcccaatcatcaggaagatgacggctacggcgtgctcgggatggaggcggacgtggacgtggacgtggacgaggagatgatggcgttcggcggcggcggcggcggggagaagaagcggcgcctgagcgccgagcaggtgcgcgcgctggagcggagcttcgaggtggagaacaagctggagccggagcgcaaggcgcggctggcgcgcgacctcggcctgcagccccgccaggtcgccgtctggttccagaaccgccgcgcccgctggaagaccaagcagctggagcgcgactacgccgcgctgcgccgctcctacgacgcgcttcggctcgaccacgacgcgctccgccgcgacaaggacgccctcctcgccgagatcagggagctcaaggcgaagctgggggacgacgaggacgcagcggcgagcttcacgtcggtcaaggcggagccggcggcctcggacgggccggcccccgcgggggtggggtcgtccgagatcagtgactccagcgcggtgctgaacgacgcggacccgcccgtggcggaggcgccggcgccggcgcccgaggtgcagggcacccttcttgtcgcgccggctggccccgttgccggcgcagcggcggcgaaccatggcggggtgttcttccacgggagtttcctgaaggtggaggaggacgagacgggccttttagacgacgacgggccgtgcggcgggttcttcgccgtggagcagccgccggcgatggcgtggtggaacgagcccgcggaacactggaactgaaccgaggtggacgcggcagtgcagcgtagtagaatcgggatctcggacgagcggtggaggaataaccgaatagaggaattcggagcgataaagaaggggcttttctgcaaattttgtaaaacggggttttacctagccctactttttgtcaattctcgagcgtattagcagtagacagtagtagtagtctgggtcggaacccagtcaagctcagcgcctgggttgcgtttggactccagtgcagaattgcgtagaggatttagaggaagagcggagctgagctgagcgaggcaggagtaaaggacaacctgtatgtcactgttagtgggcccagtgccacgtgaaagtcaggcactgttggtgcccattgacggccggacttgccagcgacgcggatgggcgacgtgaacgtgtctgggccgagcagtgcgctcgctccctccccccaatgggccatggcctcttccgcgaaagcgtgctcccctgtaagtatctgatttggatgctagccaaggctgctggatgattacttcgattatctaaaaaatctgatttggatgctcgccgctagatcgttggctcgctgcggagggaatcggcagcggtgccgtcagattgtggaatgtgttcaacggttatctgttggattaatgtgggcttggcccaaattaatattcaataatagtcaatgctaatggcccacttt

SEQ ID NO: 104460 - DNA, 1852 bp, Zea Mays
attgtgggaactgcatgctgagagcaaacccagaaaggaaaaaggaaaaaaagaaaacagagagaggggagagtgggagacggtcggagacagaggcctcactcctccacactctcagtcgtcttccagtcccagcgctttcttggatcgcgaggaaaccactcggggagtttgcagttgcagagaactgtatcggccgaagtggttgcacggtgtgttggccttggccatgcgccacggcagggaacagagacgagcagcagggaggcagcaatggaggcgctcattgaccctgctctcgctgtaaagatagtcccgcggtgccctccgaattccacttgatccaactctcgacatgaagcggccacgcggcgctactccctccctgtctgcgatgcccaatcatcaggaaggtaacttccagcctcatctgttttattcccctttgcaggaatccattgttctggccttctctgggggtgggtgatgtcgtggcgggaatgcgtgcggaatgaagatctgagtccttgtgcgtgcgtgttcccagatgacggctacggcgtgctcgggatggaggcggacgtggacgtggacgtggacgaggagatgatggcgttcggcggcggcggcggcggggagaagaagcggcgcctgagcgccgagcaggtgcgcgcgctggagcggagcttcgaggtggagaacaagctggagccggagcgcaaggcgcggctggcgcgcgacctcggcctgcagccccgccaggtcgccgtctggttccagaaccgccgcgcccgctggaagaccaagcagctggagcgcgactacgccgcgctgcgccgctcctacgacgcgcttcggctcgaccacgacgcgctccgccgcgacaaggacgccctcctcgccgagatcagggagctcaaggcgaagctgggggacgacgaggacgcagcggcgagcttcacgtcggtcaaggcggagccggcggcctcggacgggccggcccccgcgggggtggggtcgtccgagatcagtgactccagcgcggtgctgaacgacgcggacccgcccgtggcggaggcgccggcgccggcgcccgaggtgcagggcacccttcttgtcgcgccggctggccccgttgccggcgcagcggcggcgaaccatggcggggtgttcttccacgggagtttcctgaaggtggaggaggacgagacgggccttttagacgacgacgggccgtgcggcgggttcttcgccgtggagcagccgccggcgatggcgtggtggaacgagcccgcggaacactggaactgaaccgaggtggacgcggcagtgcagcgtagtagaatcgggatctcggacgagcggtggaggaataaccgaatagaggaattcggagcgataaagaaggggcttttctgcaaattttgtaaaacggggttttacctagccctactttttgtcaattctcgagcgtattagcagtagacagtagtagtagtctgggtcggaacccagtcaagctcagcgcctgggttgcgtttggactccagtgcagaattgcgtagaggatttagaggaagagcggagctgagctgagcgaggcaggagtaaaggacaacctgtatgtcactgttagtgggcccagtgccacgtgaaagtcaggcactgttggtgcccattgacggccggacttgccagcgacgcggatgggcgacgtgaacgtgtctgggccgagcagtgcgctcgctccctccccccaatgggccatggcctcttccgcgaaagcgtgctcccctgtaagtatctgatttggatgctagccaaggctgctggatgattacttcgattatct

SEQ ID NO: 104461 - DNA, 1857 bp, Zea Mays
gcatgctgagagcaaacccagaaaggaaaaaggaaaaaaagaaaacagagagaggggagagtgggagacggtcggagacagaggcctcactcctccacactctcagtcgtcttccagtcccagcgctttcttggatcgcgaggaaaccactcggggagtttgcagttgcagagaactgtatcggccgaagtggttgcacggtgtgttggccttggccatgcgccacggcagggaacagagacgagcagcagggaggcagcaatggaggcgctcattgaccctgctctcgctgaatccattgttctggccttctctgggggtgggtgatgtcgtggcgggaatgcgtgcggaatgaagatctgagtccttgtgcgtgcgtgttcccagatgacggctacggcgtgctcgggatggaggcggacgtggacgtggacgtggacgaggagatgatggcgttcggcggcggcggcggcggggagaagaagcggcgcctgagcgccgagcaggtgcgcgcgctggagcggagcttcgaggtggagaacaagctggagccggagcgcaaggcgcggctggcgcgcgacctcggcctgcagccccgccaggtcgccgtctggttccagaaccgccgcgcccgctggaagaccaagcagctggagcgcgactacgccgcgctgcgccgctcctacgacgcgcttcggctcgaccacgacgcgctccgccgcgacaaggacgccctcctcgccgagatcagggagctcaaggcgaagctgggggacgacgaggacgcagcggcgagcttcacgtcggtcaaggcggagccggcggcctcggacgggccggcccccgcgggggtggggtcgtccgagatcagtgactccagcgcggtgctgaacgacgcggacccgcccgtggcggaggcgccggcgccggcgcccgaggtgcagggcacccttcttgtcgcgccggctggccccgttgccggcgcagcggcggcgaaccatggcggggtgttcttccacgggagtttcctgaaggtggaggaggacgagacgggccttttagacgacgacgggccgtgcggcgggttcttcgccgtggagcagccgccggcgatggcgtggtggaacgagcccgcggaacactggaactgaaccgaggtggacgcggcagtgcagcgtagtagaatcgggatctcggacgagcggtggaggaataaccgaatagaggaattcggagcgataaagaaggggcttttctgcaaattttgtaaaacggggttttacctagccctactttttgtcaattctcgagcgtattagcagtagacagtagtagtagtctgggtcggaacccagtcaagctcagcgcctgggttgcgtttggactccagtgcagaattgcgtagaggatttagaggaagagcggagctgagctgagcgaggcaggagtaaaggacaacctgtatgtcactgttagtgggcccagtgccacgtgaaagtcaggcactgttggtgcccattgacggccggacttgccagcgacgcggatgggcgacgtgaacgtgtctgggccgagcagtgcgctcgctccctccccccaatgggccatggcctcttccgcgaaagcgtgctcccctgtaagtatctgatttggatgctagccaaggctgctggatgattacttcgattatctaaaaaatctgatttggatgctcgccgctagatcgttggctcgctgcggagggaatcggcagcggtgccgtcagattgtggaatgtgttcaacggttatctgttggattaatgtgggcttggcccaaattaatattcaataatagtcaatgctaatggcccacttt

SEQ ID NO: 104462 - DNA, 572 bp, Zea Mays
aactatcaagctacaacctaataagtgctagtatggtacagagataaataagcagaaacagggaagcaccttcgtgttggcgaatctaaggagcccagtgaggaaggggaatctgagcatccctgtagaggaagacacgagcacggcatccacaccaccttccttcccggtcgttggcaaccagtagtgtggcaccacatggatgagacccctgcatcacaggcgaggggcaccgacgcgaaggccacgagggcgaagatgtcgatgggcagtcaaggaggaagcagacccctccagctccaggagatggcttgctggcgagtggtagccgccgccggcggacaagcagatctgcgaggagggcaggaggcacacgttatggggacagggtcagagtctgaagttttcacctgggagtctaggaccgaggtgagggaagacatggagctcagcgtcggggatggagccgtcgcgtcggggatggaggaggagtcgagggggagtggaggaggagccgccgtgtccgagagctccaaggctggcgacggctagggtttggaatgagggcggtt

SEQ ID NO: 104463 - DNA, 2291 bp, Zea Mays
aactagtctcacgtggtcatcactcaccgcgccgccgccgccgccaccgccagcaatggcgcgccgcctcttctgtgccacgagaacgctcctccttcctgccccagctcccgtgccggcgcccacctctgcgtcttctgcagcggccgcggaagcgtcggcctcgctcctgccactgctcccctgcaagcggagaaagaagctcctgaggaagctcaacagcccacgggtcgcgcctatcgagccggaggccgcgcgtcgcgttccggccctcgacgccgtgctcgaccgcgatacggccttccgcttcctccaccgggcgcgctcgttcctggcttccctcccgcctccgcaccggatcccccttgccgaggctggaaagctgtaccgcgagctcggcttcccccgcggccgcaaagtgtcgcgctccgctacgcgccacccgctgctgttccacctcccagtcgtggactccgttccgcacctcgcgctcacgccgttcatgtgctcgctcctcgaggaagagcgccgcatccacgacgacctcctcccttcgcgggtgctcgcagtcaggaagctcctcatgctcacagcccaccgtcgcgtgccgctcgcgaagctccaccactgccgcgctgtgctcggcctccccgacgacttccgcgaccgcgtccaggacttccccgacgacttccgcgtcgtagtcgatcccagggacggccgccacttcctcgagctcgcgcgctgggaccctgcgctcgccgtcagtgcgttggagcgcgacttcgtcgtggacgagcgccgcgtccggcgcacgttccgcttcgcggtcccacaccgccggttgatgccgcttgacgccgaggacgccgaccgcctcgacatggcgaccacgttcccgttggtctcgccgtacaccaacggcgcgctgctcaagccatggacgcccgaggcggaaaagtaccgcgtcggtgtggtgcacgagttcctgaacctgacgctggagaagcgagcgatgatccaccacatcgtcgagttcaaggaggagttcgggctcacgcggcacatgtacgagtcgttacagaagcagaaccgcgctttctacctcgccggcacagagatgaactgggccttattcctcagggacgcgtatgacgaaaatggcgtgctcaaggagaaggatcccctcgtgctgttcaatgagaagcttcagcactatgcgtgtatgagcaagatagattccagagagaccatgattgatactgcaggcttgactgaataaggtcagctttcagttggttctgccgccagaattcaattgtgcttatttgcagccagcactgaatggtctcaccaggctgatgagcaccttatcgccagcgaggagccgccctcattgagccatggctgcatctgttgctgcccgtgaatcatagactggatcagcgcatcagatcgtacaccgccacgtggcccattggaacgaactgtgactggactcggccaccggttgtcaggtacagtcacccaagacaatgctggctcaacctcgcgaccattcacatcttctttggtcggtgcaagcggcaattactgatcgtctcacacgcgaaggatgtccaacgtcgccgcctggctactaagtgggtgaaccaatggttgaactcattggcctttagatttgtgcaatggagttctgcaacatcaagattgatactggcaactctattgataagactgcaggcacaataaaggttggatcatgaagtgagatcaagctcttatggacaggtagcgaacttcttatccaatcttagcttattcccatctaatcacacgtgaagaaaaatattttgtttgactactgtaaatgtttaaggccatgaaaatttacaaatatgaaatagtcgtggtatatgtatgctattcaaaggagacttcgtctgctgttaactatttccttccgttgcacacatgtgagcttgcaagtgccacacttatggttttgaccacactgagatgcaatgcgaaaattaatattgtgtctatggtctgaaatgttcccccaacactactgaacaggctttgcagaaacatattctagcaatactacatgtttctcaagttcagttataatttcttcttaatggtaaagcatcaggtcattccgtgttctgtcattcccattcccgcactgtctttctcattcttccatccccgtaaagctcattcccattcccggctgtcattccgtgttctgcgtgcatccaacgcctagctaaaattaaatt

SEQ ID NO: 104464 - DNA, 919 bp, Zea Mays
aggcaccattcgcactctcctatcaattcaccagcaaaaatttcccagcgccggcctcgcggcagaccggcctccgtatcactgcgcaaccgatggcttcctccccgtggctgcgcaccgccggtgccgcccctgtcccgccgccagaagcagcagcagctgctgctaccgccgccgccacccccgccccgacgtcggagcaacaccgggttaaggaggaaggaaacgctgccgccgcgactgtaccgaagcaggaggaggccaagctccacttgccgcgggacaacgactctaacccaagagcatggacaaaaaatcaatagatatcaagcaatccttgcagcccgtctgaaggctaagtttttctctaagaaggcttttgacagagggaacatttttgaatcagaaaccattgttggaggtgaaacaattcggtcaagcaggtggccatgtacaagatcatttgcaaacccagaatttttttcccgcgacaagaacagccatgagaagggaaattctccatcttcagcagcagatttctctgccaagaacaactctccacccttggctggtgaagcctcaccaaagaataatgctagtgctttggtcacagaaaacaatttaacaactggaaatagacagcaatccaagaagaattgacctgatggattaatgtaggataatcaggttatgttctgttcttctgtagcctgagggtagcaacctgaagtatacacttagcaggaaaggcaaattgacgccaaaaatgtttgtaacctgctctaaattcagtttgttgtacctgttctagaaagcatctgtagcgaggaataccgttgtttacttggtatttaaattgatgtattatagactccctattgaaccattgattgctcaaatctgaaccccaaattttctt

SEQ ID NO: 104465 - DNA, 925 bp, Zea Mays
accattcgcactctcctatcaattcaccagcaaaaatttcccagcgccggcctcgcggcagaccggcctccgtatcactgcgcaaccgatggcttcctccccgtggctgcgcaccgccggtgccgcccctgtcccgccgccagaagcagcagcagctgctgctaccgccgccgccacccccgccccgacgtcggagcaacaccgggttaaggaggaaggaaacgctgccgccgcgactgtaccgaagcaggaggaggccaagctccacttgccgcgggacaacgactcagaagcagtaacccaagagcatggacaaaaaatcaatagatatcaagcaatccttgcagcccgtctgaaggctaagtttttctctaagaaggcttttgacagagggaacatttttgaatcagaaaccattgttggaggtgaaacaattcggtcaagcaggtggccatgtacaagatcatttgcaaacccagaatttttttcccgcgacaagaacagccatgagaagggaaattctccatcttcagcagcagatttctctgccaagaacaactctccacccttggctggtgaagcctcaccaaagaataatgctagtgctttggtcacagaaaacaatttaacaactggaaatagacagcaatccaagaagaattgacctgatggattaatgtaggataatcaggttatgttctgttcttctgtagcctgagggtagcaacctgaagtatacacttagcaggaaaggcaaattgacgccaaaaatgtttgtaacctgctctaaattcagtttgttgtacctgttctagaaagcatctgtagcgaggaataccgttgtttacttggtatttaaattgatgtattatagactccctattgaaccattgattgctcaaatctgaaccccaaattttcttta

SEQ ID NO: 104466 - DNA, 128 bp, Zea Mays
cagacttctcttgttttcaactttctataattattaatacaatcctgatgacatgttattgtgagattagcataaccaacgggtgcccaaaacgcaggtgcaattgcacccacaaaaggggatgcgac

SEQ ID NO: 104467 - DNA, 2548 bp, Zea Mays
ccatctctctctctctctctctctctctctctctctctctctctctctctctctctctctccttcccatgcttctcgccggaacatatagcataagaatctcccgtgtccgggcatctttccttttcctgccataggccgtgacgggagcttcttgcttgcgtgcttgttccgggccggctatcatattgcctgcctatgaagctctctgtctctggccaatggaggagctacttctcctctagcctttctcgtctctgattcgtccattgaccttgggtgacgtcggcgccacttctgcgccccgcgactcctcgcgtcttgtgtgagtgtgagtgctacaagcaagcgatggacatgaacgagagcggcgagacagggatggagcagggcaacgcgtcctccggcgccccggtggattggcagactcaattcaacgccgccgcgttctcgtgcgcgccgcagcaggttcccatgatggactccgccttcgcgtccgccggcctgtgggcgtccacctcccaagccatggcgctctccgacgtcgtcggcgccatgtcggccgcgcggggaggcgggttcttggcgccggtgcccggtttcctcccgcagggcctcggccatttcgccgtcgactccggcttcatcgagcgcgccgcgcggacgtcctgcttcagcggcggcggcggcggggtgatgggcgctagcgcagctgccttcggtgcggctggtcagaccgtgaacaacgcgttcagtggttcgtcagaggcgctgctgctggatcaccagaagaaggacgtcgtcggcgagaagggcgagccggagctcggccgcgacgacggggtgctgagcccggaggctgctggtggtggggactgctcgtccaaggggacgtcggactccaagaagaggagaaggcccaacgaggtggtgggaagcgatcaggtccagtcggccaacctgcccagcgccgactcggcgaacgagagcgtgcacagcatggacaaaggcgaggagagcagcccggcaacaaccaccgccggcgccgggcctggcaagtcgagagggaagggagagaaagaggtccccgagtctcagaaggaggactacatccatatccgagcccgccgcggacaggcaacgaacagccacagcctagcagaacggttgaggagggagaagattagcgagaggatgaagcttctgcaggaccttgttcctggttgcagcaaagtcactggcaaggcggtgatgcttgacgagatcatcaactacgttcagtccctgcaaagacaagttgagttcttgtcaatgaagctcgccacggtgaacccaaggcttgacctcaacatagaagggcttctatcgaaagaccttctccgcttccctggtgctccttcgtcctccctcgggtttcccccagaaatgatgcacccgcagctactacagctgtcgcagccaggccgcctggtccagggagccgccgccgccgccgccggcatggccaatccggacgtgttcaggagaatcatgcaggcgcagctgagcgcgaaagacgacagcggcggcgcctctcagatgctgccccacgggtcgttcggtggcgttgcgcgggcggcgtacccgtcgtcgtcgtcggccctggcgctggggtcccacgactacttgaggagcatgagcagggcgtcgcaacaggacgtgtttcaaatctgagcatgccagcttgcacgtagcagcagaggcttccttctccatctggacgtctggtcgacgaacatgcaggcgcgcagggccggcgtaagtgatgctgctactgttgtgctgtgctgtgctgtgctgggagcagcagcgctgcagttctagcccagcgtcacacggcggtgcgtcgcccgggtttttattgattgcgtttcagaaggaactgaggaaaagctcgtggagtccccccacccccgcggaacggaagcgctcggacggacggacggagggacgagcgatgcctttgcctgcctggatggctggaaattctgtctgggtggtcgcgtggtgcattcatggctggctggcgcccagtgcagtggccagtggcagtggcagtgggctgtgtgttggtagcgagcaaatgcgctgctgctgctgctgctccagctgcagcaggatgtaacgcgaggagccttggtttctgttagtagtttcagtgcctttttggctgcgtataatatagtttaagggtgcaagaaacactcgtaaatttcgggggcggcctggcgagttctccttgtgccacaaatcaaagaaaagaagggtgctacgtacgatcgatcatgcatgctcatggactctgtctcggtgtcggcttcctccctcgtagggctggaaacgagcctcggctcggctcgtccattccacgagctggtgaaagaggctcgactcgaccttggctcgcgagtctgctcggctcgcgagccatattcttatacttatcgttgcattatttgataaattaacattatataaatttgaaatatagaatcatcaaagactaaaaa

SEQ ID NO: 104468 - DNA, 569 bp, Zea Mays
gccaggttccaagtgaagaagaaacaattctttcgaaacttcattactattacactgtttggtgcagttggcaccttgatctcttttactctaatatcccttggcgctctaggactaatatcaaggcttaatatcggcgcacttgaactggaagactatcttgcacttggggcaatattctcggccacagactcggtttgcaccttgcaggtgttaagccaatatgagacaccattcttgtacaacctcgtgtttggtgaaggtgttgtcaatgacgcaactttgttgtgttgttcaatgcaatctagaactttgatcctggaaatatcagcggtgccaaattactgaacttcattggcagtttcctttatctgttcagctccagcaccattcttggagtagctataagttatatgctcttccacttctagctttgctaaagtttactgacatgtgtttttttttctgcagtctggacttcttagtgcttataccattaagaagttgtactttggcaggtttttacttgtaaagccctaaaattggtataataaaaaaaataaaataaa

SEQ ID NO: 104469 - DNA, 406 bp, Zea Mays
ggctactttcttttgagaagatgtttatcggtgtaatggttgctctctgaaaactaacgaaaatcttgaggttctacgaggcattcctgtcgagaggttgatgatagaaacagattctccatattgtgacataataaatgctcatgctggaagccagtatgtaaaatctgtctggccatccaagaaaaaagaaaagtatgagccagattcaacagtaaaaggtcgcaatgagccttgtttagtcaggcaagttcttgaggtagtggctggaagcaaaggaatttctgacatagaaggcctgagtagaactctgtaccacaacacatgcaggctcttctttcctcaggatcttgacgcgtctgctaatgcgcagcttgagagtggtactaccgtccaggattgctga

SEQ ID NO: 104470 - DNA, 92 bp, Zea Mays
atgcagctaaaggcgatggccggcgtggtcacggtgagccgccgcgcgcgacgttgggaggcagccagcacagcacagcacagcacgcgtac

SEQ ID NO: 104471 - DNA, 1166 bp, Zea Mays
ctcctcccactccccctctcactcctacgcgcacgcacagcaccgcgcccggcaggccgcactccgctccacgctctcgccccgcacaatgcgccgcctcagccgcgccgtggcgttcctgctgctgctccttcccctcgccctcgcggccacaaccacgatggcggcggccgtcgtggcgaaagctcccgctgcggcggcggcgcctccgaacgtgacggcggagatggccaagggcgggtgcaaggcgttcgcggacctgatcgcggcgtcccccgacgcgtcgtccacgtaccagtcggccgtggagggcggcatgacggcgttctgcccctccgacgacgccgtgagggccttcctgcccaagtacaggaacctcagcgcggacgggaaggcggagctgctgctgttccacgccgtgccggtgcactactcgctggggagcctcaagtccaacaacgggcccatgaacacgctggccaccgacggcgccgccaggagcttcaacttcacggtgcagagccagggcgacgccgtcacgatcaggacggccgccgccgccgcgcccgcgcgggtcgagtccacggtgctggacaaggaccccctcgccatctacgtcatcgacgccgtggtggagcccgtggagctcttcaagcccgcgccgtcgccgtcgccgacgcccgcgcccgcgcctgccgcggatgcgcccaaggctggcaacggcaaggccgccgcgcgccagcgccacccggcgcccgccgtggccgacgcgcccggccccgccgcggaagacgacgctgctcctgtggaccagaaggacgtcaagaagagcgcggccgatggcgcgccgtgctcccggtggtggctcgccgccgcgctggccgcggcctcggcattggtttagcgatccatggacggaagtgctttgtttttttttgtcttttttttgtttctccggtgttgatccattggcgtgtgatcgtggttgtggtggcgtgcttcgaggtttgtgtttttttttctcggtcgagagaaaatagtgtatgcgtgcttacgtattcgtgagtgagggtgaggctcagtgcgagtttatgaggaggtgtttgtatttttggttctgacggacgagtgaaatctgggcactggctgaattgccgcttgtgacg

SEQ ID NO: 104472 - DNA, 1602 bp, Zea Mays
atggcctcccacggaattcatgggggagcaggatacaccttttttaaaacgacttactgggagaagcacataaaagccagattcatttttgtattacggagaaaaaaggaattaatagagttccaaacctcggttctgcagtttctactaaaaaagcagtcatttatgttatctgtccccgaagcagttgcagtggtgaggttgctaagaatcgagaaggggaaagcatttgtagaccttttgaacgagaaagcaaatgattctggagataaagagataggatatgtgcagaggacactaggtttcagcacacgctatttggaggacagggatataagactggttaccgtcatagttgctggaacagtgcgctggaaacgctaccttgattatctaatcatgtcactatgcagtgaggagaaggttttcagggagatggagccactgcttctacagatattgagaattggctttttcgaaattctcaagcttgatgtacctgcttatgctgccgttgatgagaatgtaaggcttgctaaagtagctttaaggcctggtgctgggaatatggtgaatgcaattctgcgtaaacttgtattgctaaaggagacagactctcttcctcttccaaagatagaaggtgatgatcgtgcccaagctcgtgctctttctataatttattctcatcctgtttggatggtgagacgatggatacggtttcatggaaaagatgaagctctaagattgatgaattggaacaacagtgatcctcatttcagtctaagggtgaacacatcaaaaggctatactagggctgaccttgtaaaacgattggaaagtttacaggttcattatgaagaatcaattatggatgaatttgttcgcattcgggaagggatgcagatctctagcaataaaattgtaaaaatggatggttctatgcttctgattgctttagatgttattttgactgttataactgttggtcttgtagtgtctgtggttgatccacaacccggggaaacgattgttgattgctgtgctgcacctggtggaaagactcttttcatggcatcacggttgtcaggagaagggaagatatgggctctggacataaacaaaggtcgtttgagaatactcatggacgcagcaaagttacacggtctagatgatatgatcactgacatccatgctgatcttcgactatatgctaaggaaaccacagttaaatatgacaaagtattgttggacgctccatgctctggtctgggagtgctttccaagagggcggacttacgctggaatagacaatttgaaaatttggaagagttgatgtgtttacaagacgagcttcttgattcggcatcaatgttggtaaagccaggtggtatactaatttacagtacgtgttcgattgaccctgaagaaaatgaagagaggattactgcttttgttcagaggcatccggaatttgctcttcagagtgtatgtggatatgttcctagagaatttatcacagatgaaggtttctattcctcaaatccaactaagcactctatggatggggcatttgctgcacgtcttgtccggtcaacgcactaa

SEQ ID NO: 104473 - DNA, 1488 bp, Zea Mays
atggtggggaacaatactgttgcttccctcttctactattctttgctcatcatctgcgccgctgcttggcacgcggatgcgtcccaagcggatcgactgagagaattcatcaggtctaggaggaacagtcctagtgaggctgctgataagggcacgtttgaggttgccaacatagggcacagcgtagctagcagcctcctgagcacaagcagctactccgacagtgaacagagcgccctgaaggcagctgacaagatcactgcgctgccggggcaaccggacggcggcgtcgacttcgaccagtacgccgggtacgtgactgtcgacgagaagaatggccgggcactcttctactacttggtggaggcaccacaggatgcctcggcaaagccgctcctcctgtggcttaacggagggcccggatgctcatcgcttggctacggagcaatgcaagagctcggtccgttccgcgtaaacagcgacaacaaaacgctgagcagaaacaaggcggcttggaataacgtggctaatgtgatcttcttggagtcgccggcgggtgttggattctcctactccaacacatcctccgactacggcctcagcggagaccgaaggacagctgctgatgcgtacttgtttttggctaactggctggagcgctttcctgaatacaaaagccgtccgttctacatctccggggagagctacgccggacactacgtacccgaacttgctgccaccatcttaacccagaattcctacaacagcaggacggccataaacctccggggcatcttggttggaaatccacttctggattcgtatatgaacttgaagggtgcagttgcctactactggagccatgggttgatgtcggacgaggtctttgacaacataaccaggcactgcaagtatgacagttcagatggtgtggcatgcagtggcgctttggaggcggtagatcctggacagattgatccttacaacgtatatgctccgatctgtgttgatgcggccaacggagcatactaccccactggctacctacctggatatgatccatgcagcgattactacacctattcctacctcaatgacccagcagtgcagaatgctttccacgctaggacgacaagttggaacttgaactggacggacgcaccgatttccatggtgccaacagtcgcagggctgattgagaagaagctgcctgtttggatttttagtggcgattttgattccgtgtgcccacttcctgctacgaggttttccatccatgatcttaacctgcacgtcaccactccatggcgcccgtggacagtaaacatggaggtcggaggatatgttcaacaataccagggaggattcacgtttgcctctgtcagaggagctggtcatatggttccgtcttcccaggctgatagagcattagtattattggactcctttctgaaaggggtgctcccaccatacgtacaggagcagtaa

SEQ ID NO: 104474 - DNA, 483 bp, Zea Mays
acaacgacgctagggtttcactcgcagccgccgacgccaaaagcccgctcttctgccccaagccgcgacgccccacgacgccgctgcggtgccaccagagcggtggcttctccgacgctgggcgacgagagcggcctgtcgtcggcgtccccgcagccgccgctgttctacggctcaccgccacggcgagcgtcaaacccggtggtccacgacagtaggttcggcgcggactgcccgcccgtgcccgtgccggggctgtccgtgcaccggcccagcccgcggtcgtcggcggcggcgccgtccatgtcgccgcgcgggtgcacccgcgcgcggttcgcgttctagcccgcgaatagttaggtgaaatttcatggagaatctgtacaaaagagtggctagctactacacgagagtctggtctgagagaagcaacacgaggtcagtcagtggatgaacttagagagagacattcacacgctgaga

SEQ ID NO: 104475 - DNA, 965 bp, Zea Mays
acaacgacgctagggtttcactcgcagccgccgacgccaaaagcccgctcttctgccccaagccgcgacgccccacgacgccgctgcggtgccaccagagcggtggcttctccgacgctgaacgctctttccagggcgacgagagcggcctgtcgtcggcgtccccgcagccgccgctgttctacggctcaccgccacggcgagcgtcaaacccggtggtccacgacagtaggttcggcgcggactgcccgcccgtgcccgtgccggggctgtccgtgcaccggcccagcccgcggtcgtcggcggcggcgccgtccatgtcgccgcgcgggtgcacccgcgcgcggttcgcgttctagcccgcgaatagttaggtggtatgtcctagttcgtcaattaatgatgctttcttttttggtttttgatggggaattgtttttttctttgttgtccgtccgtccatgcaaccaagaaatttcatggagaatctgtacaaaagagtggctagctactacacgagagtctggtctgagagaagcaacacgaggtcagtcagtggatgaacttagagagagacattcacacgctgagagggttgataatttgtgatattttcctcctttttttcttcttcctgattttgtatattgtatatcctgctggattaacaaatactagcaaccacttatagtcagtcaacataggccatctactgccagtacctcttttcttctcatgagttgtagcagtttctgtttaattcatatgattgtaattacaatcatattttaagttactactatagtttctgtttaattacaatcatagtttctgtttaattaaaattcatatgattgtaattacaatcatagtttctgtttttgttatccatattttaagttgctactatagttcatatgattgtaaaatgattgtaattagttcaattcaatgagaaaaaaata

SEQ ID NO: 104476 - DNA, 870 bp, Zea Mays
acaacgacgctagggtttcactcgcagccgccgacgccaaaagcccgctcttctgccccaagccgcgacgccccacgacgccgctgcggtgccaccagagcggtggcttctccgacgctgaacgctctttccagggcgacgagagcggcctgtcgtcggcgtccccgcagccgccgctgttctacggctcaccgccacggcgagcgtcaaacccggtggtccacgacagtaggttcggcgcggactgcccgcccgtgcccgtgccggggctgtccgtgcaccggcccagcccgcggtcgtcggcggcggcgccgtccatgtcgccgcgcgggtgcacccgcgcgcggttcgcgttctagcccgcgaatagttaggtgaaatttcatggagaatctgtacaaaagagtggctagctactacacgagagtctggtctgagagaagcaacacgaggtcagtcagtggatgaacttagagagagacattcacacgctgagagggttgataatttgtgatattttcctcctttttttcttcttcctgattttgtatattgtatatcctgctggattaacaaatactagcaaccacttatagtcagtcaacataggccatctactgccagtacctcttttcttctcatgagttgtagcagtttctgtttaattcatatgattgtaattacaatcatattttaagttactactatagtttctgtttaattacaatcatagtttctgtttaattaaaattcatatgattgtaattacaatcatagtttctgtttttgttatccatattttaagttgctactatagttcatatgattgtaaaatgattgtaattagttcaattcaatgagaaaaaaata

SEQ ID NO: 104477 - DNA, 2419 bp, Zea Mays
gcgcatccttttaccaccaacttttgctttgacccgtcccaccctcgcacaccctttgtctcctttgcacttcgcctcgccgcctgaatctccataagcccccacaccaatcactggagggcggaggaatcgctctcagttccccccagtagccgcccacaggtactaagcagctccggtccgcgtcgcgccgtcgccatggctcagtcatgtgagtcttctacagactaggacttggggattgtgctgctactcagctgaaagtttatagaaggtggagaagttgtggtgtttccctacctgttagtctgcacttctttgttcctgatcaactgctccgacacgattgttgtcttctcaacctctcttgccaagcatggctgggcaaacggcaaaggcaaaggaagcagaaaaagatgacagacaagaacccggagctgagggggcgaaaaacaagctactgccgtctcaccagcagcaagactctccagcttctgtggcggacaatgattcttcaggtgtctcttcagttcctggcgatgagtcgcctgtcctggatggggattctggtgagttgaaagtggaggaaaacttggatggtaatgggagtaaggaaaagaaaacgtctcagaagagcagtactagtgacggctttgcttctgctaaagtgagtgatgggacaagtagtttgaggaagaccagtggtagtgcgacgatgagtacacgggccgatttcactgagagtgggaagagtagcatgtgccgtgtgagcacggccagtgacattagcgacgagagctcgtgcagcagcatgagcagtgccaccacaaagccacacaaggggaatgattcaaggtgggaggcgatccatgttgtgaagtccagggataatgttcttggactgaatcattttaggctgcttaagaagttgggttctggtgatataggaagtgtgtatctctctgaactgagtggtacacggagttactttgcaatgaaggtaatggataagacttctttggcgagtcggaagaagctgcttcgagctcagaccgagcgggagatcctacagtccctggaccatccatttctaccaaccctgtacactcattttgagacagacaagttttcatgcttagttatggaattctgccctggaggtgaccttcatactcttcgtcaaaggcaacctggaaaatatttctcagagcaagcagcaaagttctatgtggcagaggtactccttgcattggaatacctgcatatgcttgggattatataccgtgatcttaaaccagaaaatgtcctcgttcgggaagatggccacatcatgctatcagactttgatctctctcttcgctgttcagtaagcccaacggtgatcaagtctgcaaatcctggcctagatgcaatgcagaggaacaatgcagcatactgtgcccagcctgcttgcattgaaccatcctgcattcagccctcttgtgtagctccaactacttgctttggcccccggttcttctccaaatctaaatcaaagtccaagtccaagtccaagaaggacaagtcaaagcctgatgctccaaaccaagagaacctcttcccagagctcattgctgagccaactgacgctcgctcgatgtcctttgttggcactcatgagtacctggccccagaaataataaaaggggagggccatggaagtgctgtggattggtggacctttggcatattcttgtacgagctgttgttcgggaagaccccattcaaaggttcaggcaaccgggctacactcttcaacgttgttggccagcccttgaggttcccagagtccccaatagtgagcttctctgcgagggacatgataaggggattgctagtcaaggacccgcagcaccgacttgggtataagcgtggcgctaccgagataaagcagcatcctttcttcgagggcgtgaactgggctctgataaggtgtgcgagccctccagacataccaaagcctgttgagctcgagtgtcgcccaaagcaagtgccatcagcaaatggaaaggtcgcgccagcccctaaccaaaaggggccagataattatctagagtttgaattcttctagggaatttttttttgtgatttctgaactgaaagagtgcatctgggcagatgctgtgaaagaaagtgaaagatgatgagctactctaggcatgtgcttggctggatcttttttttttctgccattagactgtacgctcgtttcaggatatccgagttgttttttcctgctgaactgcttaactctagggtgtactcaatccatcatgtatgttgcaattttcagaacttgcctatggtacttgaaatggacttcagggctacttgctccagctctctgtgtaattgctaatatacattgtaattgatgctt

SEQ ID NO: 104478 - DNA, 714 bp, Zea Mays
aagagaatgggagggagggggaatacaagaagcgaaaggggaaagcaagcgacagcaaccctgcactactactactgctcctacaccttttttttcttcttctttggtttgctacgcgtacacggaaggccacacggaacgtgcagcacacagccgaggcgcgacgcgaccggggtgggtttttaccggatcactcgaactccgggtagcggagcagcggcgtctcgtcggcggggaggggcacgtgggcgcggcagagcgggcacgtggcgcgctcgtaccggagccaggtctcgaggcaggcgcggtggaagaggtggccgcaggggaggcggttcaccacggccctcgcccggaacccggccaggcacacgctgcagtcgtcgccgccgccgccgccgtccgcctcgcacgtcgtcgccgtcgacgccagcacctcgtacagcgccggccggaaggccctgaggaaccgctccgccaggccgggcgccgacgccgccagtcggtccccgccgtcgtccccgggcggcagcgcggcctgcaggtccaggaacaccagcgccgcccgcaccagccccgccagcgccgcgatcgagatcaccgtgttgtacaccaggtaccccagcaggctgtcccgcggctccggcatgctcgagatccccatcgccgtcggaggggttagatttggggattgtgtggcccgtggtggactgg

SEQ ID NO: 104479 - DNA, 115 bp, Zea Mays
ctgtacggggtctggggaagggtatctttaagcgccaagccttacccgcataatatgcagaggctggggctcgaacccgggaccttccggttacagacggtaggctctaccgctg

SEQ ID NO: 104480 - DNA, 2554 bp, Zea Mays
ccaaaataagcgcctgcccccagcggaaagcgaccgccccctctgcctccccctcctctcctccgtatagcggcggcaggcccgctggagctggcggcgagggcaatgccgcgagtccgccggcggtgccggggcgcgatgctgctgctcctcgtcgcgtcggtgctcgcgcccctcgtgctgtacggcggctcccccgtctctgtcgcgcccctcccggactccaccgtggcgagcggcgcgttcgacccggagggcgcgtccaatctggtgtggtcgcacatggcagcgtccgcggtgtctctggccaaaggtttgataactgaaaggctcggggagcacaaaaaccgtgtgctatcagcaactgatcactggcaggtggttgaggcagggagcaggaaccgtgcatctggaaaatcaggtactgctggggtcagggaggaccatcacttgccgaattcggaagaggaaggtgacctggttgtcgtggagagtggcagtgctaggtttgggcaggaggacgtcattaaggaggttgtgggaagccagagaagggcagatggatctggtgagcccggggatagcatggaggtggacgagcagaaggcaaaagaagttgggatagagttgcctcacgcaactgatgtgctgcacaaaaacgggtcagatggactagaaatgaacgatgtttctggattgcgcactgttggaatcctgaatacatcttctgcgaaggaaagtgacgttcatagtttatccaataagatgaaacatcctaatatttccagagagcagcaaacaaggacaagtaacagtaatgctgctcaccatgcaacaaatagtattactgatcaaaccacagctttgccagatgctacaattcgcatcatcaagaaccagcttacgacagcaaagatgtaccttggattgtttgcttctaggggtaatcatggcttcacaagggagctccgtgcacggatgagggatatacaacgagcactaggcgatgcaaggagtgatcggcaattacctcataatgtccacagcaaaactagagcaatggagcagacactggtgaaggtcaggaaaattcatgatggctgctcaagtgctgtgaataggctccatactgtccttcactcaacagagcagcaactcgaatcaaacaaaagacaagctaactatctagcacaagtggctgcaaaatctctacccaagggtctccattgccttacactgcggcttacaaatgagtactatttcactaactcaaagaataaagactttccctacgtggagaagctggaagaccccaaactctatcattatgccttgttttcagacaatgtattggctgctgcagtggttgttaactcaactcttgtccatgctaagaaaccagaaaaacatgtattccacattgtgacagatagtcttaactatgctgcaatgaaaatgtggttcctggctaatccctttggtaaagccgctattcaggttcagaacattgaagagtttacatggttaaactcaagctacagtccagtgctgaagcagttggaaacgcggtttatgattgattactacttcagaactgggcatgctaggcacgatgaaaatcccaagtttcggaaccccaagtacttgtcaattctcaaccatctgaggttctatctccctgagatcttcccaagacttaacaaggtgttatttctggatgatgatactgtagtgcagcgagacctaagtgcgctttggttggtagatctcaaaggcaaggttaatggtgctgtcgagacctgtagacaggacttccataggtttgataagtacctcaacttctcaaaccctcttattgccaagaattttgatccacatgcttgtggttgggcatatggcatgaacatgtttgatttgtccgactggagaaagcaaaacatcactgaggtctaccatacctggcagaagttgaatgaaaacaggctattgtggaagctaggtaccctccctgctggccttgtaaccttttggaaccgcacgttccctctcgatcgttcgtggcatcaattaggacttgggtacaacccaaatgtcaacgttaaggatatcaggcgagcggctgtcatccactacaacggaaacctgaagccctggcttgagattggattgccgaaataccgcaagtactggtcagcacacgtcaattacgatcaagtgtttctacgggagtgcaacataaacccctgaacagcaaatagtggtgcatggtttatatccttttcttttcaatgatttcttagaccaattctttgtgctctaggtaatttaaattgcctagagtgcttattctttgtaactgatgtctttcctgatgtaaaggtgccagcaggttggcggtaggcttggatcatacaaacagttagtagccaaaggcatatcccgttttgtgcttataaatgctaatatggtagataatttttgactgtatgtatgaattgaatgctatgttagatgccctcgcaaacagtacagtttgcgacgacccatttccact

SEQ ID NO: 104481 - DNA, 3422 bp, Zea Mays
atgctgccacggtcccgtgacgcggcaccgaggctcgcgtttctcgagccgctcgcctgcgcgttgcttctcctgctggtgtcgccgtgccactgcgtcaacgagcagggccaggcgctgctgcgatggaaagacagtctgcggccgccgagcggcgcgctggcgtcgtggcgctccgcggacgcgaacccgtgccggtggaccggcgtgtcgtgcaacgcgcgcggcgacgtcgtcggactgagcatcacctcggtcgacctgcagggtccgctcccgggcaacctgcagccgcttgcagcgtcgctcaagacgctggagctctctggcacgaacctcaccggcgcgataccgaaggagatcggcgggtacggcgagctgaccaccctcgacctcagcaagaaccagctcaccggcgcgatccccgccgagctgtgccggctcaccaagctcgagtcgctcgcgctcaactccaactccctgcgtggagccatcccggatgacatcggcaacctcaccagcctggtgtatctgacgctctacgacaacgagctcagtgggccgatcccggccagcatcggcaacctgaagaagctgcaggtgctccgcgccggagggaaccaggggctcaagggtccgttgccgccggagatcggcggatgcagtggcctcaccatgctcgggctcgcggagactggcgtctcagggagcctcccagagacgatcgggcagctcaagaagatccagaccattgccatctacaccactttgctctccggccggatcccggagtccatcggcaactgcaccgagctcaccagcctgtacctgtaccagaattctctctccgggccgataccggcgcagctcggccagctcaagaagctccaaacgctgctactctggcagaaccagctcgtcggcgcaattcccccggaactcggacagtgcaaggagctcacgctcattgacctgtcgctgaattcgcttaccgggagcattccggcgagtctgggcgggctacctaacctccagcagctgcagctgagcacgaaccaactcaccggcaccattccgccggagctctccaactgcacgtcgctgacggacatcgaggtcgacaacaacttgctgtccggggagatcagcatcgacttccccagactgcgcaacctcaccctgttctacgcgtggaagaaccggctcactggcggcgtgccggcgagcctcgcgcaggcccctagcctgcaggcggttgacctatcgtacaacaacctcaccggcaccatccccaaggtgctgttcgggctccagaacttgaccaagctgctgcttctcaacaacgagctgtccgggctcataccgccggagatcggtaattgcaccaacctgtaccggctccggctcaacggcaaccggctgtccggcacgattcccgccgagatcggcaacctcaagaacctaaacttcctcgacatgagtgagaaccacctcgtcggtcctgtgcccgcggccatttcggggtgcgccagcctcgagttcctcgacctgcactcgaatgctctgtcaggcgcattgccggacacgctgccacgcagtcttcagctcatcgacgtctccgacaaccagctcgccgggccattgagctccagcatcgggtcaatgctggagctgacgaagctgtatatgggaaacaaccggctgaccggcggcatcccgcccgagctcggttcgtgcgaaaagctccagctgctggacctcggcggcaatgcgttatccggtggcatcccgtcggagctcgggatgctaccgtcattggagatttcgcttaacctcagctgcaacctgctctcagggaagataccgtcgcagttcgccggccttgacaagctcggcagcctcgacctgtcccgcaacgagctctctgggagccttgatccactcgcggcgctgcagaacctcgtcacactcaacatctcctacaatgccttctctggcgagctcccgaacactccgttcttccaaaagctgcccctcagcgacctagccggcaaccgccatctcgtcgtcggcgacggctctgacgagtcctcccggcgcggcgccatctcgtcgctgaaggtagccatgtccgtcctcgcggcggcaagcgcgctgctcctggtgtccgcagcctatatgctcgcccgcgctcaccaccgcggcggcggtcgcatcatccacggcgagggctcgtgggaggtgacgctgtaccagaagctcgacatcgccatggacgacgtgctccggagcctaacggccgcgaacatgatcggcacgggcagctcgggggccgtgtacaaggtggacacccccaacggctacaccttcgccgtgaagaagatgtggccgtcggacgaggcgacgtcggcggcgttccgtagcgaaatcgcggctctgggctccatccgccaccgcaacatcgtacggctcctcgggtgggccgcgaacggcggcaccaggctgctattctacagctacctacccaacggcagcctgagcggcctcctgcacggcggccacgccgccaagggctcgcccgcggacgagtggggcgcgcggtacgggatcgcgctcggcgtggcccacgccgtggcgtacctgcaccacgactgcgtgccggctatcctgcacggcgacgtcaagtccatgaacgtgctgctcggcccggcctacgagccgtacctcgccgatttcggcctcgcccgcgtcctggccgccgcgagctcaaccaagctcgacaccggcaagcagccccgcgtcgccggctcgtacggctacatggcaccagagtacgcgtcgatgcagcggatcagcgagaagagcgacgtgtacagcttcggcgtcgtgctgctggagatcctgacggggcggcacccgctggacccgacgctaccgggcggcgcgcacctggtgcagtgggcgcgcgagcacgtgcaggcgaggcgcgacgcgtccgagctccttctggacgcgcggctccgggccagggcggccgaggcggacgtgcacgagatgcggcaggcgctgtccgtggccgcgctctgcgtgtcacgccgcgcggacgacaggcccgcgatgaaggacgtggcggcgctgctcagggagatcaggcgccccgcggcggtggacgacgcgaagcagccgtcaccgacgggcgccgccgcagcgcacgcggcggcagcgccggtgagcgcgcactcgaggggccaatcgtcgagccgctctttcgccgtctcggagaactctgcttgactggatgcaaatttttgcgagcgtagtgaacttagcaaattagcatcttttagcaaagtcgtaaaacagttgatgattggccgtaaacaggtgatgtcgtagttaggtgtaatctgctcttgtacatt

SEQ ID NO: 104482 - DNA, 210 bp, Zea Mays
atggcccagcagcctggctgcgctcccgggctgcagctcctgtgtttgcgtcgcttggcttgctcgggagccaggctgtgcgcgtgcaaattgagcctctcagcctggctccacagaaacgaggtcaagcacgagaacgcgcagtcgcgcacccccgcgtgggcgtcccggcgcttctctgctgagttgctgagtgctgacccgccctaa

SEQ ID NO: 104483 - DNA, 1036 bp, Zea Mays
accttcttcctcctacctctcgtaccatcgacacggcctctcgccaagcagcgcgcaaaacctctcccacccgatcctgctctctctctctctgctgccttctcgatcgtacgaggtactaccatataccatccaatgacgatgcatacgcatcatgcatgtgtgtcgatggcggtgattccttcttcttcttcctctgaattatggatttctgacgcggcgcagtgcgcgtgcatggacgaccagcggcagccggtgtgcaaggcgaagcgcggcgcgagggaggaggaggtccacgccgcgccgccggacttcccattcgaggaggccgcggcgacggcgggggagggcgacgacggcggggaggcgtcgcggcggccgccgggggttttccagttcccctggcaggagtgcagcggcgggctgggcgtgtccgccgcggggccgtgggagctgcgcgacgtcttcttccgctccctcgtcgacgggggcgccgcggccatcggcgtgccgggggaccggctggtgtctccgccgaccggcaggcgcgcgctcctcgagggggtcgacgcgtggctcgccgcggccgccgacggcgaggtggacccggtctggcggtccgcgctcatggccccgcggccgcgggccgaggacggagacggacggacgtcgtgggccctccccgcgcatgcttccggggtgagccccgcgtggcattgagtgcgctgcggcgccccccatcatcagccgcgtgacgctgacgtggcttcgagacagcagcgccgtggtggaccgtggtccgtggccgtgcccgtgggtgctagtatgattgtgatcaggatggagtaggcaaagggaccaaggaaaagtaaagaaccatggccaatggcaattggcaatcggtgatcaccttgtctttcgaatgtcctttccgttccatgttctattttatctgtacagctattatcgttagacgttctggcaacaacagcaacaacaacaaaatcaatgtattctttggaaagtcattccaaca

SEQ ID NO: 104484 - DNA, 561 bp, Zea Mays
ggaatggcgccctttccatcgacggatagcgaggatggctgcgcagactgttggtaactcagtatccaagtttctgtcgggcttcagcgatgggaagacagactcggcagcgagagtttctttcaagtatgggtgcacgaggggagtctttggcacgtcgtttttctttgtgaacggtttcctcgagcctggggcggatggcccatcgactacagcacgtggattggcatcctggacccccttgtttcccagaacggtgaacgggtcgagatgtttacttcgatgtaagtgattgaagtggccttgctacggaggatacggtcgtacagatgtttcgctagtgccgacggcggacaagcaaacaactattatgcaattgcaaactgtgtgtaagctctgcagtggtaaatagcatcccactttgctcgttggactgttaagctagcagttgtgtgctagctacaactagtatatcgggtaagtatgtgaagaaactcttgcattggagcctgcgatatgttaaacttcgcatgatcctatattcgcattcgctcttctcca

SEQ ID NO: 104485 - DNA, 2801 bp, Zea Mays
agctccggcgtgtctctctgaggagtgaggacgaagaggccccaccgtcacgtacgcctgcatgtgtccacgagtcaccgcaccggcacatagttgtcttgttgttgtacacgacgcacgcatccccgccccgccctcggccctggtgcatataaacaagtgttgcgtgatcggcggccaggccactgccccttccagtctcgccgtcgccggagataggccgccgccgccagccggaacgcaacaccgcagcggttacctgcagcggacggcaggaacctagtcctccactgctctgcctaccctacaatcgggatctcgcgggcttcattaggggggaaaatcgaccagcgagcgagtgcaagaagctcctgttcgatcgatctcgggagctccgatactgcgcgcaatcccaaatttgacacagagtcacagcaatgtcagtgagccatgccgacgagcacgagatatctctgtgcgaccccagctccgaggacgaccggcggcgccggaagatcgggtccctgccgctcaaggctatccacgcgctacggaagaagcgcgcccggcgtcgcgtcactgacttccggttccccgcggccatctccatcgaggacgtccgcgacgccgaagaggagcgcgccgtcgccgccttccgcgaccgtctcgccgcgcaccgcctcctccccgacaagcacgacgactaccacatgatgctgaggtttcttaaagcaaggaagttcgattccgacaaggcaatgcaaatgtggtcagagatgctgaggtggaggaaagagtttggtaccgacacaatcttggaggactttgagttcgacgagctcaacgatgtactccactactatcctcagggctaccatggcgtcgaccgtgaaggccggcccgtgtacattgagaggctcggcaaagttgatccgaacaagctcatgcagatcacctcggtggatcgctacatcaagtaccatgtgcaggagttcgagagggccttcagggagaggttccctgcctgcacactgtcagccaagaggcacattgactccactaccactatactggacgtccatggtgtggggttcaagaatttctcaaagaccgcaagggagcttgtccaacgtatgcagagaatagacagtgactactaccctgagacgctacatcagatgtatgttgtgaatgcaggcagtgggtttaagttgatctggaacagtgttaagggattcctagacccaaaaacttcttccaagatccatgttcttggttccaactaccagagcagacttatcgaagttattgactcaagtgaattgccaaaatttcttggcggatcatgcacatgcagtgagaagggtggttgcctcaggtctaacaggggtccatggaatgaccctgtcatcatgaagctaatacacagtatggaaggtggtagtactagagaaataaagcaagtttctgacggggacgaaagaagtggctcttccctaagggcagaaaacctgaagggcatgcttagtgacatatcaaatgctgaatctgagtcggatgttgatgacgttggtttaacagttgtccaaaagagtacggaccacagtttactaaccccagttcatgaagaagtcaaggggtcagatacttcgatattttgtagttctagcagtaagcatctcctagatacaactcctggagctcctcaggccacccctcaaatggagatgcccattcagttgacttgccgtaaatattttcctacctttgggtggctaaataatttagggaatgcttacattagtttgcatggtacatccgctggaaggactctggaaaaccttgctaccggactgatcacactcttgatcaggatatcatctttcttccacctttccgtctaccggcaagaaagatttatagaaaccgtccaaccctgtgccgcggcacaggaaccagaacctcaaagggaagaggacatgagtgcttgtttacgacgcctcaagaagctcgagtcactgtgtgatcacctcatgagcaaacctccggatatgccgaaggagaaagaacttgtattgatgcagtccttcgatcggataaaatccctcgaggctgaactggaggcgacgaaaaacgcgctgcaggctgcggtggaaaagcagatggaactggtggagacggtagaagctctgcagcaccaatcgaccagcgttaggaggagattttgctgttcataggagtagggttgtcgtcgtcgcgccgaagctgtctgggttagcaaataatgaacctgacgctgcccttggcatcttgtttttgctcgacttctgaagcgtcatgacgccaaacctgtcgctggctcggcacactgtatgcgcggatgcgtgtgaaatcgatcattttttttgtagctacactctggcttctgtgatctccagagcttgcaaaatgtcaaagctttcgctgccctactgctgcgtattgttgagccgtgtcatttgcccttggcatttcgaaccatccatagcgctagctatttttgaccgctcccctcccatttgagttcttgatcgactcccgcccgcgtgcaccggcgccaacctctgcccacgcggccgcgcccctccgcctccgcgtgtcactcccgcacgtttctgctcgcctggtagtaacccgaacgcgcattgccgcgccgtcaagggtcgatccgatcggggaggaggcgtgacaagagatgggtccccacggaggcattgcgctccgcgcagccgtactcgccgccgtccgcttcgccgccgccg

SEQ ID NO: 104486 - DNA, 723 bp, Zea Mays
caagtcagcatcccactatatacccaactccattaatcaagcggacacgttgcttgctcccaagatcaagcgcctcccgcctccagcactctaactcaggggacacgatcgccatggccgccacatcgaccgccgccgccgtgctgtccccgccgtccgtggccgggctccgcctggcgccgtctcccggccgggcgcgcgtgtcgttccgcgcggcgccggcgccggcgcggcggtccgtggcggcgcgcgcggagctgagctcggcgctggtgatcagcctgagcacgggcgtgtcgctcttcctgggccgcttcgtcttcttcaacttccagcgggagaacgtggcgaagcaggtgcccgcgcagaacggcaagacgcacttcgacgccggcgacgagcgcgccaaggagttcgcggccctgctcaagtccaacgaccccgtgggcttcaacctcgtcgacgtcctcgcctggggctcgctcggccacatcgtcgcctactacatcctcgccacctccagcaacggatacgaccccaacttcttctgagcggtcgtcgaggatgtattctacagacagccgtgtgcgtgcgtgtgtgcttgtcatgtatccgatcaaagtttggttaatttggacaagtagtgcaactgcagaataattggtatttgtatagtgcaccatgccaacatgaatttgatctgtctctgtcttcactattcag

SEQ ID NO: 104487 - DNA, 667 bp, Zea Mays
ctgctctcactgccgtaaaacatggcaactgcagttcacttacaccgcttctcaacccggtacgcaccagaaaatcattgatatggccatgaatggcgttggatgccgggcaacagcccgcattatgggcgttggcctcaacacgattttacgtcacttaaaaaactcaggccgcagtcggtaacctcgcgcatacagccgggcagtgacgtcatcgtctgcgcggaaatggacgaacagtggggctatgtcggggctaaatcgcgccagcgctggctgttttacgcgtatgacagtctccggaagacggttgttgcgcacgtattcggtgaacgcactatggcgacgctggggcgtcttatgagcctgctgtcaccctttgacgtggtgatatggatgacggatggctggccgctgtatgaatcccgcctgaagggaaagctgcacgtaatcagcaagcgatatacgcagcgaattgagcggcataacctgaatctgaggcagcacctggcacggctgggacggaagtcgctgtcgttctcaaaatcggtggagctgcatgacaaagtcatcgggcattatctgaacataaaacactatcaataagttggagtcattaccaagcgtttgaacgtactaaacacataccgagaaatatggtaaatcg

SEQ ID NO: 104488 - DNA, 2919 bp, Zea Mays
ggaaaaccctccatacttggtgggcctgaaagaacgcaaggccaatggccacatgcgagtagccaatggccccaaggccgaaatggcagccactgcaacgaacgagtcaatgctccagactcgccggcttctaggcccatttcgaaccttccggaagcgcggcacggaataaatactccgctacccctaacctcactccccctctcgatccggaaacctctcaaaccctagccgcctcctgcaagtttcagagctcaggaatctgcgccatggcgagtgagacggagaccttcgcatttcaggctgagatcaaccagctgctctcactcatcatcaacaccttctactccaacaaggagatcttcctccgcgagcttatctccaactcttccgatgcgctggacaagatcaggttcgagagtctcactgacaagagcaagctcgatgcgcagcctgagcttttcatccaccttgtcccagacaaggccacgaacacgctctccatcatcgacagcggcatcggcatgaccaagtccgaccttgtcaacaacctcggtaccatcgccaggtccgggacgaaggagttcatggaagctcttgctgccggcgctgatgtgtccatgattggccagttcggcgtcggtttctactctgcctacctcgtcgccgatagagttgtcgtgaccaccaagcacaacgatgacgagcagtacgtgtgggagtcccaagcgggcgggtcgttcactgttactcgtgacacgtcaggggagcagcttggcaggggcactaagatcacactgttccttaaggacgatcagctggagtaccttgaggagcgtcgcctcaaggatctggtcaagaagcactctgagttcatcagctaccccatctccctgtggactgaaaagacaacagagaaggaaatttctgacgacgaagacgaggaagagaagaaagatgctgaggaaggaaaggttgaggatgttgatgagaaggaagagaaagaaaagaagaaaaagaagatcaaggaggtttctcatgagtggtcattggtcaacaagcagaagcccatatggatgaggaagccagaagaaatcacaaaagaagaatatgctgccttctataagagcttgacaaatgactgggaggagcatctggctgtgaagcacttctctgtggagggtcaactggagttcaaggctgttctctttgttcctaagagggccccctttgatctctttgacaccaagaagaagcaaaacaacatcaagctctatgtgcgcagggtgttcatcatggacaactgcgaagagctgatccctgagtggctgagcttcgttaagggtattgttgactctgaggaccttcccctcaatatctctcgtgagactcttcagcagaacaagatcctgaaggtgatcaggaagaaccttgtgaagaagtgtgttgagctcttctttgagattgctgagaacaaggaggactacaacaagttttacgaggctttctccaagaacctcaagcttggcatccacgaggactcgcagaacaggaccaagatcgccgagcttctgagataccactccaccaagagtggtgatgagctgaccagcctcaaggactacgtgaccaggatgaaggagggacagaatgacatatactatatcactggtgagagcaagaaggcagtggagaactcccccttccttgagaagctgaagaagaggggctatgaggttctgtacatggttgatgccattgacgagtatgctgttggtcagctcaaggagtttgagggcaagaagcttgtctctgccaccaaggagggtctgaagcttgatgagactgaggacgagaagaagaggaaggaggagctgaaggagaagtttgaggggctgtgcaaggtcatcaaggaggttctgggtgacaaagttgagaaggtggtggtgtctgatcgcgttgtggactcaccgtgctgccttgtgactggcgagtatggctggaccgccaacatggagaggatcatgaaggcacaggccctgagggactcgagcatggcgggctacatgtcgagcaaaaagacaatggagatcaacccagagaaccctatcatggatgagctccgcaagcgtgccgaggctgacaagaatgacaagtcagtcaaggatctcgtgatgctgctgttcgagactgctctcctgacctccggcttcagcctggatgaccccaacaccttcggcaaccggatccaccgcatgctcaaactcggtctgagcatcgatgaggacgagcctgttgaggcagaggctgagatgcctcagcttgaggacgacgctggtgaaagcaagatggaggaggtcgactaagtgtcgcatcgcatgcttgccgtttatcttatccctagctaagctacctgtgatagcttaattttcactattgttcgaggtttttggcacgttatcggttgtcctgctggccaggctataagtctggtttatctgttatgtttaccctttttaacagtttgtcgttattattcgtaatggtaaaaatgtagtacatgttttgcccattgggttgtgtgagattgggacagacagatcagggtactacccctttttctctttgggtagcccatagtttgagtagtggtgaaaaaagaatggttaggattttaggcatgttgtagcaaatcggctatgccaggaaatgaaactggtttcgtttcccaattaaaccgaaatattataattcaactagaagagataggataaactgaagtgttataattcggcttagaggagataagttcatatttactctctgaagaaaactttataaaaatttcacagtgaggtaccagttttttcggcggccagcggccttctccagtggtagaaaaaaacacataccttgtcc

SEQ ID NO: 104489 - DNA, 1920 bp, Zea Mays
ggaaaaccctccatacttggtgggcctgaaagaacgcaaggccaatggccacatgcgagtagccaatggccccaaggccgaaatggcagccactgcaacgaacgagtcaatgctccagactcgccggcttctaggcccatttcgaaccttccggaagcgcggcacggaataaatactccgctacccctaacctcactccccctctcgatccggaaacctctcaaaccctagccgcctcctgcaagtttcagagctcaggaatctgcgccatggcgagtgagacggagaccttcgcatttcaggctgagatcaaccagctgctctcactcatcatcaacaccttctactccaacaaggagatcttcctccgcgagcttatctccaactcttccgatcagcagaacaagatcctgaaggtgatcaggaagaaccttgtgaagaagtgtgttgagctcttctttgagattgctgagaacaaggaggactacaacaagttttacgaggctttctccaagaacctcaagcttggcatccacgaggactcgcagaacaggaccaagatcgccgagcttctgagataccactccaccaagagtggtgatgagctgaccagcctcaaggactacgtgaccaggatgaaggagggacagaatgacatatactatatcactggtgagagcaagaaggcagtggagaactcccccttccttgagaagctgaagaagaggggctatgaggttctgtacatggttgatgccattgacgagtatgctgttggtcagctcaaggagtttgagggcaagaagcttgtctctgccaccaaggagggtctgaagcttgatgagactgaggacgagaagaagaggaaggaggagctgaaggagaagtttgaggggctgtgcaaggtcatcaaggaggttctgggtgacaaagttgagaaggtggtggtgtctgatcgcgttgtggactcaccgtgctgccttgtgactggcgagtatggctggaccgccaacatggagaggatcatgaaggcacaggccctgagggactcgagcatggcgggctacatgtcgagcaaaaagacaatggagatcaacccagagaaccctatcatggatgagctccgcaagcgtgccgaggctgacaagaatgacaagtcagtcaaggatctcgtgatgctgctgttcgagactgctctcctgacctccggcttcagcctggatgaccccaacaccttcggcaaccggatccaccgcatgctcaaactcggtctgagcatcgatgaggacgagcctgttgaggcagaggctgagatgcctcagcttgaggacgacgctggtgaaagcaagatggaggaggtcgactaagtgtcgcatcgcatgcttgccgtttatcttatccctagctaagctacctgtgatagcttaattttcactattgttcgaggtttttggcacgttatcggttgtcctgctggccaggctataagtctggtttatctgttatgtttaccctttttaacagtttgtcgttattattcgtaatggtaaaaatgtagtacatgttttgcccattgggttgtgtgagattgggacagacagatcagggtactacccctttttctctttgggtagcccatagtttgagtagtggtgaaaaaagaatggttaggattttaggcatgttgtagcaaatcggctatgccaggaaatgaaactggtttcgtttcccaattaaaccgaaatattataattcaactagaagagataggataaactgaagtgttataattcggcttagaggagataagttcatatttactctctgaagaaaactttataaaaatttcacagtgaggtaccagttttttcggcggccagcggccttctccagtggtagaaaaaaacacataccttgtcc

SEQ ID NO: 104490 - DNA, 1166 bp, Zea Mays
atggcatgttcatgtgtggttttgtacagctcgatctcaagattcccgaacacgatacgagcgacagctctttactagatcaatcaatggaggatttaaaatttttcggcggatcggagtgctgctgagccctagtgtgttctccccgttttggccttgccggttgccgcggggcggcggggcctctctatatatagcgccccggtctcgccgcattgcttcgtcactcgagctcgagcgatcccactcccgatcagcagctgatcgctcactcttgcagctcgatcattctttagctgctctagctctagccctagctagtagctagccactcggtcgtgtagtcatcagccttctgatcgtcacccatggccactgccgaggtccagaccccgaccgtcgtggcgaccgaggaagcgccggcggtggagaccccggctccgcccgccgtcgtgcccgaggaggctgcccccgccgccgaggccaaggtggaggagccagctgccccggcggagaccgagccagctgccgccgctgagcccgaggcggcccccgtggaggcggaggaagagacgccaaaggaggcggagccggagccggcggcggctggagaggtgaaggaggaagcggcagcgcccgctgccgagacagaagcagaaccagcagccgctgagcccgaggctgctgctgcggaggaggagcccgcggcggccgagccggccgctgaggagcccgagaaggccgagccggccgctgaggtggccgagaaggccagcgagtgaggccgtgcgccgtgcgcgcactgcggcggcggacagcgggtcgggagatcgatggctcagcgcgcgcgcgcctacatggcacgggcttgctgttcagtacaacgcgaacgtgacggtttctctccatctctgtgtgtgtgacagtgtgtcgtagctatagcagtggctgtcgcgtggactgcccggtgcggactgcgagtgacatgggctaaataaagtgtgcgtcgtctggtctggtggtggtagtggggcgcggtgccccatgtgtgccgctgcagcttgtgtctctgttttgcttcatgttctctgtctatctactctcatgtatggcagtttgggtgatcttctttatagatgcagccagttgttcatcggcaaacctgc

SEQ ID NO: 104491 - DNA, 1557 bp, Zea Mays
atgttcatgtgtggttttgtacagctcgatctcaagattcccgaacacgatacgagcgacagctctttactagatcaatcaatggaggatttaaaatttttcggcggatcggagtgctgctgagccctagtgtgttctccccgttttggccttgccggttgccgcggggcggcggggcctctctatatatagcgccccggtctcgccgcattgcttcgtcactcgagctcgagcgatcccactcccgatcagcagctgatcgctcactcttgcagctcgatcattctttagctgctctagctctagccctagctagtagctagccactcggtcgtgtagtcatcagccttctgatcgtcacccatggccactgccgagcctcctgcgttaataaccacggaggatgctaagattaatttgtactcgcgccgtgcgtgcacgtgtgcgcaggtccagaccccgaccgtcgtggcgaccgaggaagcgccggcggtggagaccccggctccgcccgccgtcgtgcccgaggaggctgcccccgccgccgaggccaaggtggaggagccagctgccccggcggagaccgagccagctgccgccgctgagcccgaggcggcccccgtggaggcggaggaagagacgccaaaggaggcggagccggagccggcggcggctggagaggtgaaggaggaagcggcagcgcccgctgccgagacagaagcagaaccagcagccgctgagcccgaggctgctgctgcggaggaggagcccgcggcggccgagccggccgctgaggagcccgagaaggccgagccggccgctgaggtggccgagaaggccagcgagtgaggccgtgcgccgtgcgcgcactgcggcggcggacagcgggtcgggagatcgatggctcagcgcgcgcgcgcctacatggcacgggcttgctgttcagtacaacgcgaacgtgacggtttctctccatctctgtgtgtgtgacagtgtgtcgtagctatagcagtggctgtcgcgtggactgcccggtgcggactgcgagtgacatgggctaaataaagtgtgcgtcgtctggtctggtggtggtagtggggcgcggtgccccatgtgtgccgctgcagcttgtgtctctgttttgcttcatgttctctgtctatctactctcatgtatggcagtttgggtgatcttctttatagatgcagccagttgttcatcggcaaacctgcaaagctttttgtgtaagtgcggcatcagttcagaacgccggatccacccaaggagcaggtcgggcctgcaactacaagcattccaccacgccatcatgctgggtccttgaacccaacggcgcatctctaggataggatgctcatgccactatttgtgatccgccagatctagtgactagtgagcgtcttctgccaacgtacggtaggctcgggcatggctgatggcgattagctaaggagatactactccatgatggtccatgacatgagcttgtttgacaataatgtttctcaaacctatacaatactttgcattgtcttaac

SEQ ID NO: 104492 - DNA, 1244 bp, Zea Mays
gtcactcgagctcgagcgatcccactcccgatcagcagctgatcgctcactcttgcagctcgatcattctttagctgctctagctctagccctagctagtagctagccactcggtcgtgtagtcatcagccttctgatcgtcacccatggccactgccgaggtacgtgtacgtagtgctcgatccatcgtagtagtctttggttcatgcatatgcacggatcggatcgtttggataatcccgaataccagctaataatgatgtttctctatctcatccatccgttcattcgatctcttctctttgatgagacagcctcctgcgttaataaccacggaggatgctaagattaatttgtactcgcgccgtgcgtgcacgtgtgcgcaggtccagaccccgaccgtcgtggcgaccgaggaagcgccggcggtggagaccccggctccgcccgccgtcgtgcccgaggaggctgcccccgccgccgaggccaaggtggaggagccagctgccccggcggagaccgagccagctgccgccgctgagcccgaggcggcccccgtggaggcggaggaagagacgccaaaggaggcggagccggagccggcggcggctggagaggtgaaggaggaagcggcagcgcccgctgccgagacagaagcagaaccagcagccgctgagcccgaggctgctgctgcggaggaggagcccgcggcggccgagccggccgctgaggagcccgagaaggccgagccggccgctgaggtggccgagaaggccagcgagtgaggccgtgcgccgtgcgcgcactgcggcggcggacagcgggtcgggagatcgatggctcagcgcgcgcgcgcctacatggcacgggcttgctgttcagtacaacgcgaacgtgacggtttctctccatctctgtgtgtgtgacagtgtgtcgtagctatagcagtggctgtcgcgtggactgcccggtgcggactgcgagtgacatgggctaaataaagtgtgcgtcgtctggtctggtggtggtagtggggcgcggtgccccatgtgtgccgctgcagcttgtgtctctgttttgcttcatgttctctgtctatctactctcatgtatggcagtttgggtgatcttctttatagatgcagccagttgttcatcggcaaacctgcaaagctttttgtgtaagtgcggcatcagttcagaacgccggatccacccaaggagcaggtcgggcctgcaactac

SEQ ID NO: 104493 - DNA, 917 bp, Zea Mays
gtcactcgagctcgagcgatcccactcccgatcagcagctgatcgctcactcttgcagctcgatcattctttagctgctctagctctagccctagctagtagctagccactcggtcgtgtagtcatcagccttctgatcgtcacccatggccactgccgaggtacgtgtccagaccccgaccgtcgtggcgaccgaggaagcgccggcggtggagaccccggctccgcccgccgtcgtgcccgaggaggctgcccccgccgccgaggccaaggtggaggagccagctgccccggcggagaccgagccagctgccgccgctgagcccgaggcggcccccgtggaggcggaggaagagacgccaaaggaggcggagccggagccggcggcggctggagaggtgaaggaggaagcggcagcgcccgctgccgagacagaagcagaaccagcagccgctgagcccgaggctgctgctgcggaggaggagcccgcggcggccgagccggccgctgaggagcccgagaaggccgagccggccgctgaggtggccgagaaggccagcgagtgaggccgtgcgccgtgcgcgcactgcggcggcggacagcgggtcgggagatcgatggctcagcgcgcgcgcgcctacatggcacgggcttgctgttcagtacaacgcgaacgtgacggtttctctccatctctgtgtgtgtgacagtgtgtcgtagctatagcagtggctgtcgcgtggactgcccggtgcggactgcgagtgacatgggctaaataaagtgtgcgtcgtctggtctggtggtggtagtggggcgcggtgccccatgtgtgccgctgcagcttgtgtctctgttttgcttcatgttctctgtctatctactctcatgtatggcaataaaaaaataataatgaa

SEQ ID NO: 104494 - DNA, 417 bp, Zea Mays
atggcgtcctctcctctggcaccaaccaggacctgctcgcccctagtgcccaagctgccccgccgcccctcgctcccatccccgtgtaggtctccccgtcgcagtgcgcggtggccgcgcttggcgtcagtcagagcgactccgggcagcagctggaccgcggcagcgacggaggagcacaaggagcggaagaggtgcctgagatgcggcggctcttaccgagacgaggagaaccacccgagcgcctgcgccttccatggccacgtcacaggcgagaaggggctgttctccctgtcgccgccgcaccagggcatcgacggggagtggagcgacaagagcgggatcatcgtgtaccgctggaacgacgaggggagccggcccaacacaggccgcgctaactggaagaggccgcgctaa

SEQ ID NO: 104495 - DNA, 491 bp, Zea Mays
agcaatcgaactcggcacggctgcaaagcgtaagcacggttggcctgtgacgagttttgtcctgccatggatccgcgacgtgcctgctgggagtgggagagctcgacggaggaagtgacgagaggccaccactgctgtccgtgcacgacgacaggcccgcggcggtgcgctccgcgcgctcaggtccgtgctcgccaacaggttcgtggccgtcgcgtcgggcccgctggcgtgcgcgctgctggtcagcgcgacggcgggggacctcggcgggcaacccgcggcgcgcaacatgctcgggttgctggcgtgggtgttcctgtggtggatggatcacggacgccgtggcgcccctgttcctctttccagcgttcgacatatcctcgacgtcatctgcctcgtcctcgggacgggagcttcatcctcgcgctcgccatcgagcagtacaggtacaacatccaccgccgccttgccctcaacgtacgtgcgcc

SEQ ID NO: 104496 - DNA, 501 bp, Zea Mays
atggcgtcctctcctctggcaccaaccaggacctgctcgcccctagtgcccaagctgccccgccgcccctcgctcccatccccgtgtaggtctccccgtcgcagtgcacggtggccgcgcttggcgtcagtcagagcgactccggacagcagctggaccgcggcagcgacggaggagcagaaggagcggaagaggtgcctgagatgcggcggctcttaccgagacgaggagaaccacccgaccgcctgcgccttccatggccacgtcacaggcgagaaggggctgttctccctgtcgccgccgcaccagggcatcgacggcgagtggagcgacaagagcggggtcatcgtgtaccgctggaacgacgaggggagccggcccaacacaggccgcgctaactggaagaggcgctggagctgctgccaggagcgcgaggaggacgcgccgccgtgccagcgcgggtggcacgtctcctacgacgacggctacaccctcttctag

SEQ ID NO: 104497 - DNA, 657 bp, Zea Mays
atgcgctatcgccaacccagacgccacctcttcctccccttctcccctcccgcgcctttaaagcctgaggaggttgctggtatcataaaggactttgatgaacctggtactcttgcaccaactggtcttttcgttggaggtacaaagtacatggtgatccaaggtgaacctggagttgtcatccgaggaaagaagctcaaaaatgaactaccgggcgacaaatattcgaaagcggagggagcgtcggtagtgacatctactaccagcgctggtattcagcttctgccagagaagcactgcgccgatgaagcttgtggagccatggcgggcagtaatggtcctgaaggagtgccagtagtgacttctgctgatgaccctccgacccgtgccgatattccatttctctgcaattcagttgatgaaacatgtgaagccacaggggacgacagtgctcccttggatgctcagatatgtacgggtttctctaagttgatcagcttggaggtgaagaaaggcctccagaagtgcgcgacgttcccaccctcgtctggtcagcctcagcaggaggattgttcatgctcccatgtaggtgatggcctcacgggtgctcctgctttctggcgatctgtgtccttacctgtgagtacctcatgttaa

SEQ ID NO: 104498 - DNA, 1879 bp, Zea Mays
gttatttctaactattaagtgttaattatctaatgtatttaatgaagtaacacagttagacttgcctaaagaggccagtgaagcttcactggctgcatagagaagtacttttttattatcatgtaaatgcatggttctttggaaccatttggcctatctgattaattattactataaccgggaatgggggcccgaggctataacccggactcctcgccctcgtacctcgttgctggcgaagagcgtcatcaatggcgagtggaggttcactacacagccgccggatcttggagcatcattcgcggtcttggcgcgtctacgcaactgtatcctaagggcgtcgaagaggagagacggtacgccggtggcgacaaggtacgatagatttgaactggagtgtggaggtatcgtcggccagtgccatcagcgatgggtggaggtttccgtcgagtcgaggaaggagcgcttcgtgtaaagtgccgtcaaggaagatgacgatggtggtagggatcgacgatagcgagcacaacttctacacgctgaagtgggcgcactgcagcacttcttcccgccgaccaagctgcaacactactgccttgttgtcgtcaccgccaagccctctgtcgcctccattgttcgccctgccaacctaggtatgcgaatctccaatccatgtgaggattcagagctagactagatgtagcttctgacctatatgattagttatatatgtattgtaattgatcagtgcaggcaccgcgaatgtgttgtcgtatgtggggagcagacagtcaacttgcatctaggtctaaataaaatagtagtgattaaatctttgaatctgtagatcaaaccatctcaagtaattttagttttgttatgaaaatttttagctcagatgaaataattgcattttgattattaagatttaacatacatctggttctatgaggaaggaaatcataagtggagattgaagttgatcaacttgacactcgaataaaagaatcaacaaatattgcaagtgctgaaagttgtgactgctcaagtccaattgctttatcacacaagttctggtggagatacttattctagaatcttcaaaagcatcaacgttagtgttcaagggactgattctggactttcaacttaatgcttctctacctgttgtcatactgaagctactgctcctggaagagcatcaccaacatatccctgatggccctctctgcttcatgctccaagcacttggatgttcaccttgaaatataattattaatagggactgtccaaatacttcagctaagcaaaatagcgacctccataaaaaagcaacctgtaactatctctgaaaattttgaaaaaaactgatggtaactgataagctgctgctagcaactaccgtcgcctatttgttttgtttcagaaagttaaggtgcatgaacctctgatatagcatttgacacactgtactttacacatcacccaggaggaactcttgtgtgggtgtgggtgtgggcagggctagaaggaagaaccatgcatgctactacattcatataatctttttcagagggagggcacattgtggcggctacgagagaccgattttcctgtgtggtggtgacaacgacaccgtggagccaagtcaatgtcggcaagctgatttttcagattggaacctatggttctttttaaagatcgaatatgttctagcatctttaaaagatttgtcagaatgtaaacatttgttttgaggtcatttaagcctcaaacaaaatttcttggacttatttcgttggagggaacgagacatctcgagatctaaatgtgtatagaacatatattttttatgggtatcaaatataattgtgtgtaa

SEQ ID NO: 104499 - DNA, 1994 bp, Zea Mays
gttatttctaactattaagtgttaattatctaatgtatttaatgaagtaacacagttagacttgcctaaagaggccagtgaagcttcactggctgcatagagaagtacttttttattatcatgtaaatgcatggttctttggaaccatttggcctatctgattaattattactataaccgggaatgggggcccgaggctataacccggactcctcgccctcgtacctcgttgctggcgaagagcgtcatcaatggcgagtggaggttcactacacagccgccggatcttggagcatcattcgcggtcttggcgcgtctacgcaactgtatcctaagggcgtcgaagaggagagacggtacgccggtggcgacaaggtacgatagatttgaactggagtgtggaggtatcgtcggccagtgccatcagcgatgggtggaggtttccgtcgagtcgaggaaggagcgcttcgtgtaaagtgccgtcaaggaagatgacgatggtggtagggatcgacgatagcgagcacaacttctacacgctgaagtgggcgcactgcagcacttcttcccgccgaccaagctgcaacactactgccttgttgtcgtcaccgccaagccctctgtcgcctccattgttcgccctgccaacctagtgcaggcaccgcgaatgtgttgtcgtatgtggggagcagacagtcaacttgcatctaggtctaaataaaatagtagtgattaaatctttgaatctgtagatcaaaccatctcaagtaattttagttttgttatgaaaatttttagctcagatgaaataattgcattttgattattaagatttaacatacatctggttctatgaggaaggaaatcataagtggagattgaagttgatcaacttgacactcgaataaaagaatcaacaaatattgcaagtgctgaaagttgtgactgctcaagtccaattgctttatcacacaagttctggtggagatacttattctagaatcttcaaaagcatcaacgttagtgttcaagggactgattctggactttcaacttaatgcttctctacctgttgtcatactgaagctactgctcctggaagagcatcaccaacatatccctgatggccctctctgcttcatgctccaagcacttggatgttcaccttgaaatataattattaatagggactgtccaaatacttcagctaagcaaaatagcgacctccataaaaaagcaacctgtaactatctctgaaaattttgaaaaaaactgatggtaactgataagctgctgctagcaactaccgtcgcctatttgttttgtttcagaaagttaaggtgcatgaacctctgatatagcatttgacacactgtactttacacatcacccaggaggaactcttgtgtgggtgtgggtgtgggcagggctagaaggaagaaccatgcatgctactacattcatataatctttttcagaggtttaagatatcaacactaatctgactttgattgtctgaaagaatttatcatgctgctgcttactgttttcggtagggggtcaatgcttactttagctgtgcaataattcctcaatattaaaccgagtttgatcaagtaccttgaagctacaagtagcagtgatttgacaggtttactactgcctgaaacatgattggagggcacattgtggcggctacgagagaccgattttcctgtgtggtggtgacaacgacaccgtggagccaagtcaatgtcggcaagctgatttttcagattggaacctatggttctttttaaagatcgaatatgttctagcatctttaaaagatttgtcagaatgtaaacatttgttttgaggtcatttaagcctcaaacaaaatttcttggacttatttcgttggagggaacgagacatctcgagatctaaatgtgtatagaacatatattttttatgggtatcaaatataattgtgtgtaaagcacgtacatagt

SEQ ID NO: 104500 - DNA, 1214 bp, Zea Mays
ctcgcccgctcgctccgcgctccctccccccctcccgcgcggatcacagacaggctcacggtcacggccggcctcccaattcgcaacctcgcctccgcctctcctcctacccctccgaaaaagcaagctccggccgggccgccaccaccaccaccgcgcgcgcgtgcacgcgctcccacacacagacagacagacagacagacagagtgagagacgcacggtggttcggggtctcccttctgccaggcgcacgaggagccatggcgcagcgcgacaagaaggaggagcccacggagctccgggcgccggagatcacgctgtgcgccaacaactgcgggttcccgggtaacccggccacgcagaacctgtgccagagctgcttctcggcgtcgaggtcgccgtcgtcccctacctcctcctcctcttccctggcgtccgcggcgtcgcagccgaggccagcagcgctcgtcgtagacgcggcagcggtggaggcgctggccgctccggcggccgcggccgtgggccaggctacggaagccgcggcgagggcgtccgcgagccggtgctccagctgccggaagcgcgtggggctgacggggttccggtgccgctgcggcgagctcttctgcggcgcgcaccggtactcggaccggcacggctgcagctacgactacaggggcgccgcccgggacgccatcgcccgggagaacccggtggtgcgcgcggccaaggtcgttaggttctgatgacgggaaggaaggaaggacacagcacaaaggctcgcagggcggagaaggggaggaggaaggcgtgcggacaaggtcttcggtgttattattattacgctgttcctttgattttaatctcctttttttttaaaaaaatatttgtcctatgggaatgggattgggagaagaggtggacgaagaatagtggagtaataataatggtggtggtgcagtggcggtggttgagggcccgaaacgatgaacagatgggttggattgggttgggtgtatgtatgtgtcacacgcaactttggacagaactattatactagtactaagcttctcgtctctccggttttcgtacagaaaacacaccagcacgaacggtgattgctcaatcattcaggctcgtataatcattcccgtattccccccccccccccccccccccccccccccccgctttgtaataagcatttcgcacgg

SEQ ID NO: 104501 - DNA, 1557 bp, Zea Mays
ctgccaccttatgatgagccgccccctacccgcctcggcgcttccttccccctccccgcccttggcaacaagtgcgtaacacgcgacgaggccacacacacagccgtgacagcccgcgctctcacgctcatgtcaatgacgccatccatggagatcgacctgcacgtcgtgcgcgcggcgcgcgtgctgggtcgtggcgccatgggcacggtattcctcgccgttgacggcggcaccggggaggcctacgcgctcaaggtcttcgacaagcgctccgctgcggcggcgtcgaggccggccgcgggcgccgacgcggcgcggcgcgcgcagtgggaggtgtccgtgctgtccaggctcgcgcacccgcacctgccgtccctgctgggctgcgccgagacgcccgacctactggggtgggcgctgccctactgtccaggcggggacctcaacgagctccgccacgcgcagcccgaccgcgtgttctcccccgcggccatccggttctacgtcgccgaggtggtgtccgcgctcgccgagctccacgccgccgggatcgcgtaccgcgacctcaagcccgagaacgtgctcctccgcgccgacggccacgtcatgctgaccgactttgacctctcacggcagctcccgccgcccaggtccccctccgcatccacgtccacgtcgtcgtcgtcgtgctcggcgacatcgtcgccgctgcctcagacccagacgacccacatgaagaacatcttcaagagaagcgagtccgctgtgaccgcgcccacctccggacaggaggaaccacgcaacctcgcctggtacctgagcaaaagcatcgacggcggcagcgaccaggtcaagaaggcgaaatcggccagggtaacgccggtggaccgcggcaaggagctgccgagcttctgccccgctgccgcagccgcagccggagagcggtcgttctcgttcgtgggcaccgaggagtacgtggcgccggaggtggtgcgcggcgacgggcacgagttcgcggtcgactggtgggcgctcggggtgctggtctacgagatgtcccacgggcggacgccgttccggggccggagccggaaggagacgttccggaacgtgctgctccgggagccggggttcacggcggacgcgcggcggcggtggccggagctaacggacctcgtctcgcggctgctggagaagaatcccgcgcggaggctgggtttcgccggcggcgccgacgaggtccgggcgcacccgttcttcgccggggtggcgtgggacctgctcggggacgtgtcccggccgccctacattcccgcgccgcccgatgacagtattgcctcctgcgaggggttcagcgtggcggaatacttcgataggcttcaccagcctccgctgtcgccggcgaagcactcgcccgaggaagagctcttgccggagttctgacaccggttgttcccgctcgagattcgtgctccctgttgtttccgttttgttgcaccatcaaagatcactatatcgttaaataatggatctcggtgatatgcgtgaacagag

SEQ ID NO: 104502 - DNA, 1450 bp, Zea Mays
attttatcccaggagaggtcgctgcgggcgagctggctcgctcacccacccttgcccgccgtttacggtttagccgcgtgctctctctgtctccctccctccctgtcggggacaattcggctaccgctgccgccctacgccaggttcccagctcttcgccaggcccttctccggcgacgagcacccaccaggccaccagttgacacttaatactacctgaatctaatgcttatcaatatgcctaatatttgctggcggagctttactttgtgcaacacatattctccatctaatcaactacaaggaggttgtactcaaagaatggatttatggattacttcttgctcacaagcagcgagacatcatgcaaggataggttcagttgattttcctgttaagaagaacgtgaagtcatcccaagtgcaaaacgcgacatgttttgttggtttagtgcggcagttgcagtgcagacggtcagcaaaaagccatatcctgaatgtaaagtctgatacagtagcccaccaaaaggtttctggtgtaagctggagtttggaaaatatgccacgaagaataggatgtgtagtctctggactaggttttgcagcgtatgggctggcgagtgctgagggtcctgttaacaacaacatagatagcactgaatctgccatgtcatcaacaaatttatctcatgggaaagaagttcacacagactattctgttactggcattcctggtgatggaagatgcctgtttcgttctgtggttcacggtgcctacattaggtcaaggaagcccatacctaatgaggatcatcaaagaaggctagctgatgagttgagaacaaaggtcgcagatgaatttatcaagaggcgggcagagactgaatggtttgttgagggggacttcgacacgtacgtatctcagattaggaagccacatgtctggggaggcgagccagagctgttgatggcttcacatgttcttcagatgccaatcaccgtctacatgcacgataaagccgctggtggtctaatagcgatcgcggaatacggccaagagcacgggacggaagctcccgtccaagttctttaccatggctatggccattatgatgcgctgcagataccaggagagggtggtccgaggtcaagactgtaacgttagtggctctgaatctaaatgaaccgaatgtaagtaaaatacaaaagaagaaggaaggccgaattgaaagaatcgaaagtggaagaactggacgtgccttcaaacaattagaagacaatcctagcaggttagatatttagaggtctacgaccataatagttgttctgttgccaaagggaatatagcgtggttgagagagagaaacatctggagaaaaaggaaaaaaaacaaaatatgcacctgttagatcagatagtagagaagaatcgaatgcggaatccattggctc

SEQ ID NO: 104503 - DNA, 931 bp, Zea Mays
attttatcccaggagaggtcgctgcgggcgagctggctcgctcacccacccttgcccgccgtttacggtttagccgcgtgctctctctgtctccctccctccctgtcggggacaattcggctaccgctgccgccctacgccaggttcccagctcttcgccaggcccttctccggcgacgagcacccaccaggccaccaggtttgttgagggggacttcgacacgtacgtatctcagattaggaagccacatgtctggggaggcgagccagagctgttgatggcttcacatgttcttcagatgccaatcaccgtctacatgcacgataaagccgctggtggtctaatagcgatcgcggaatacggccaagagcacgggacggaagctcccgtccaagttctttaccatggctatggccattatgatgcgctgcagataccaggagagggtggtccgaggtcaagactgtaacgttagtggctctgaatctaaatgaaccgaatgtaagtaaaatacaaaagaagaaggaaggccgaattgaaagaatcgaaagtggaagaactggacgtgccttcaaacaattagaagacaatcctagcaggttagatatttagaggtctacgaccataatagttgttctgttgccaaagggaatatagcgtggttgagagagagaaacatctggagaaaaaggaaaaaaaacaaaatatgcacctgttagatcagatagtagagaagaatcgaatgcggaatccattggctcaatggaaatgcagcgatttttttaatgcaaaatggtttacagaaaaaatctggagaaaaacaaaaacaaaatatgcacatcttagattgaatagcagggaggaatcgaatgcggaatctattggctcaatggaaatgcagcgatttttttaatgcagcgtggttgacag

SEQ ID NO: 104504 - DNA, 1381 bp, Zea Mays
ggctcgctcacccacccttgcccgccgtttacggtttagccgcgtgctctctctgtctccctccctccctgtcggggacaattcggctaccgctgccgccctacgccaggttcccagctcttcgccaggcccttctccggcgacgagcacccaccaggccaccagttgacacttaatactacctgaatctaatgcttatcaatatgcctaatatttgctggcggagctttactttgtgcaacacatattctccatctaatcaactacaaggaggttgtactcaaagaatggatttatggattacttcttgctcacaagcagcgagacatcatgcaaggataggttcagttgattttcctgttaagaagaacgtgaagtcatcccaagtgcaaaacgcgacatgttttgttggtttagtgcggcagttgcagtgcagacggtcagcaaaaagccatatcctgaatgtaaagtctgatacagtagcccaccaaaaggtttctggtgtaagctggagtttggaaaatatgccacgaagaataggatgtgtagtctctggactaggttttgcagcgtatgggctggcgagtgctgagggtcctgttaacaacaacatagatagcactgaatctgccatgtcatcaacaaatttatctcatgggaaagaagttcacacagactattctgttactggcattcctggtgatggaagatgcctgtttcgttctgtggttcacggtgcctacattaggtcaaggaagcccatacctaatgaggatcatcaaagaaggctagctgatgagttgagaacaaaggtcgcagatgaatttatcaagaggcgggcagagactgaatggtttgttgagggggacttcgacacgtacgtatctcagattaggaagccacatgtctggggaggcgagccagagctgttgatggcttcacatgttcttcagatgccaatcaccgtctacatgcacgataaagccgctggtggtctaatagcgatcgcggaatacggccaagagcacgggacggaagctcccgtccaagttctttaccatggctatggccattatgatgcgctgcagataccaggagagggtggtccgaggtcaagactgtaacgttagtggctctgaatctaaatggcaagttccggttcgatactttcttcctttgtacatgtacgtgcatacatacatactagtcactaacgcgcgcctagcgcgcgataggttgtataattttattaaaatgtgtgtatagcatgtattcgtaagagaaaaaaagattaagttatcagaaagtaagtaactatgttgggattcataagaaaacaaaaaaaagtatcttgtcataagaaaacagacatgaattaatt

SEQ ID NO: 104505 - DNA, 490 bp, Zea Mays
caccgacccccttcgctggtccctgcctggttctggctgccttcttccccctcccgtccgatcggtttcaccattcacggattcacccgtctgcgcgctccaaccgccgcagttcgtactggcgcggtggacagggagctagctaggcggggttgattgcagttggggaggcgggagtgtgtgtgtgatgtacggcgcgccggtgcccaaggacctcaacctaccagcagccctgccgcagccgaccagggccggtgcgaggacgccaccgcagcagcagcagcagatgagctccgcggggctgctgcgctacaggtcggcgccgagcacgctgctcggcgaggtgatgtgcggggatcaggacttccccgcgacggatggcggcggagggcacggaccaccggaccacgccgccacggacaacgtcctcgcgctctttctcgccgggcaccactcagaggcccgggactgcaagcctccccgccccgcc

SEQ ID NO: 104506 - DNA, 1165 bp, Zea Mays
aatcacgctctaggcgcctagctttccatttgcggagtgagctgatcgtgagcgattaatgcgccgccgcggctttgcagggtacggcggcatgctccgtgcgggcatgggcatggccggcggcttcaggaacggcgtcagcgacgcgcggctcaaggggcagctgagcttcccgtcccggcaggggtcggtgatgtcgcagatctcggaggtgggcagcgaggagctcgacggcggaggcggcggcagccccgaggcggccggcagcaacgccagcggcgcgccgcgcggctacgtcggcatcccggggtacccgatgggcggcggcacgtccggcgcctggtcggacgagccgtcgccgtcgccgacgtccggcgcgaagcgccgcccccgcgactccggtcccgcgccgcagaacgtgcagcagcaaccgctggcgccgcagctcagcctgcccagcggcggcaagccggcctcggcggagatggcggcgatcgagaagttcctgcagttccaggacgccgtcccctgcaagatccgcgccaagcgcgggtgcgccacccacccgcgcagcatcgccgagcgggtgaggaggacgaagatcagcgagcggatacggaagctgcaggagctcgtgcccaacatggaaaagcaaaccaacactgccgacatgctggatctggctgtggactacatcaaggatcttcagaagcaggtcaaggtgctgaacgacggccgcgccaactgcacctgctccggcggcggcaagctgcaggacccgttcaccagttagaaggagcagcagccggcgcgcgcgtagcagtgcgcggccatgcatggcccgccgcaaggccggcctgactgacgcctccgtgccggccggcggctaagctcgcttcgagcgctcctcctcgattggagtaagagtcgtcgaagtatagtagtatcagtgtacgtgttcggctttacatagttaactgaatgagtagtacgtagtctgttatacatgcaagttcattagcaggcaggccccacgtacgtataccagtgacacagctgcgtcagttatctgtggctcttgcagcatgtgtgtctctgtcatcgtttgcacttactgctcggatcctacgcgacacgtacatgcatatgtacgcatgcatgcaca

SEQ ID NO: 104507 - DNA, 1327 bp, Zea Mays
aatcacgctctaggcgcctagctttccatttgcggagtgagctgatcgtgagcgattaatgcgccgccgcggctttgcagggtacggcggcatgctccgtgcgggcatgggcatggccggcggcttcaggaacggcgtcagcgacgcgcggctcaaggggcagctgagcttcccgtcccggcaggggtcggtgatgtcgcagatctcggaggtgggcagcgaggagctcgacggcggaggcggcggcagccccgaggcggccggcagcaacgccagcggcgcgccgcgcggctacgtcggcatcccggggtacccgatgggcggcggcacgtccggcgcctggtcggacgagccgtcgccgtcgccgacgtccggcgcgaagcgccgcccccgcgactccggtcccgcgccgcagaacgtgcagcagcaaccgctggcgccgcagctcagcctgcccagcggcggcaagccggcctcggcggagatggcggcgatcgagaagttcctgcagttccaggacgccgtcccctgcaagatccgcgccaagcgcgggtgcgccacccacccgcgcagcatcgccgagcgggttcgttcgtgcctgcatccagccagccagctgcattccttggctgatactcttgaattctcgcttgggttttccagctagcccaatccgagaaaagaaagagagaagggggccgggtggggaataaaactcgaaactgattcatgtcgttgtcgctgtcaggtgaggaggacgaagatcagcgagcggatacggaagctgcaggagctcgtgcccaacatggaaaagcaaaccaacactgccgacatgctggatctggctgtggactacatcaaggatcttcagaagcaggtcaaggtgctgaacgacggccgcgccaactgcacctgctccggcggcggcaagctgcaggacccgttcaccagttagaaggagcagcagccggcgcgcgcgtagcagtgcgcggccatgcatggcccgccgcaaggccggcctgactgacgcctccgtgccggccggcggctaagctcgcttcgagcgctcctcctcgattggagtaagagtcgtcgaagtatagtagtatcagtgtacgtgttcggctttacatagttaactgaatgagtagtacgtagtctgttatacatgcaagttcattagcaggcaggccccacgtacgtataccagtgacacagctgcgtcagttatctgtggctcttgcagcatgtgtgtctctgtcatcgtttgcacttactgctcggatcctacgcgacacgtacatgcatatgtacgcatgcatgcaca

SEQ ID NO: 104508 - DNA, 1647 bp, Zea Mays
gcgcaaatttcccgaacccaaattccaacccccaaacggccaaaccctctgcagttcgtcgccatggttgtcggcgccttcggcgaggcgacaccgccaccggacctcccaccttcccgcgtgtccgtctcctcgccctcgccccacccccgccgacgctgcgccctcgcaagccgcttccaggagccggcggccccgcggcggcacgcatgggtttccctccagggtcgccttatcggtgccgacgaggcgtcgtgtgccgcttcagctgcaccgggcctcctcccggatgaagcggtagcgtgggagctcttcagcccgctccatcgcgtgcttctcgtcgccaccgtcgccgccgcatcctcccggtcccacgccgcccgccgcatcgaacagctacaacgctcgattcatcttagggatgaggtgctagaaagcatgcagcagaagctggatgatctgctcgtcgaaatgagctccctacaacagcagtacgtcaagtgcgatagttacatttccgaggaaagggaaattaatgagattgaaacaggtagcaaaacgataggatatggagaggaatctagatgttgtgtgtgcacgaagctagaggctgccactcctcagaaggcgaaggatctccgtgggacagatgatgctaggagtgatatggttgattgttctagtctagttttcatggatcatgaagagcgccgtttgtcagacctctcagacttctgccggagtgttgtgtcatcagttgataaccagataaattgggatagtcagatcaacaattgtacaatcttcagaaggaatgtgaagagaaagatgcaaccatcaaggaactagctgcagcagcacatgcatctagtacttctgatgcaaagagaattgcagagctgcaggaagttcttaaaaggaaaaacatggtgatctctaaattgaagaaagacatgtctgctctgaagcatatggttgttgaattgtcaagggctaaaagagtctcttctgccataagtccaatctgcactgatctgccagtgatgtcaaacaatgttctgtatgatatgagcagttctagctcatcagatccagaatccccagttgcactacgagaataccttgatgagcatcttgttgatagcactccaggagatggtgattctagacggagttgtgaagtatctgtagcaaaagcatctcttccatcaaaaacgtcatctgttcacaagctgcgctcaactagcccgttaaaagagatccatattaatccaaaagtagaaacaaaatcatttggcagacagaagcaacctacatcttctaatggagattttaaaaggattagacgacaaagtcagcaagatccaaggaataaagctacaagaagatggatgtagagtttagccatctagaagtcattacctgattggtaaacttgtcattaaattgacctgctgttcttatccgagcaaagctatgaatcatgtttttttgctttagtcaatctttgtataagtagttaagtactctaatgtttatttgttttatcctgtttctcttctttattcattgccattggtgcttctattcatcactagtgtaattaaacttatttttaaaaagaaaaaggaacatgataaacataat

SEQ ID NO: 104509 - DNA, 1752 bp, Zea Mays
cccaaattccaacccccaaacggccaaaccctctgcagttcgtcgccatggttgtcggcgccttcggcgaggcgacaccgccaccggacctcccaccttcccgcgtgtccgtctcctcgccctcgccccacccccgccgacgctgcgccctcgcaagccgcttccaggagccggcggccccgcggcggcacgcatgggtttccctccagggtcgccttatcggtgccgacgaggcgtcgtgtgccgcttcagctgcaccgggcctcctcccggatgaagcggtagcgtgggagctcttcagcccgctccatcgcgtgcttctcgtcgccaccgtcgccgccgcatcctcccggtcccacgccgcccgccgcatcgaacagctacaacgctcgattcatcttagggatgaggtgctagaaagcatgcagcagaagctggatgatctgctcgtcgaaatgagctccctacaacagcagtacgtcaagtgcgatagttacatttccgaggaaagggaaattaatgagattgaaacaggtagcaaaacgataggatatggagaggaatctagatgttgtgtgtgcacgaagctagaggctgccactcctcagaaggcgaaggatctccgtgggacagatgatgctaggagtgatatggttgattgttctagtctagttttcatggatcatgaagagcgccgtttgtcagacctctcagacttctgccggagtgttgtgtcatcagttgataaccagataaattgggatagtcagctaagtttcctggcagcagatcaacaattgtacaatcttcagaaggaatgtgaagagaaagatgcaaccatcaaggaactagctgcagcagcacatgcatctagtacttctgatgcaaagagaattgcagagctgcaggaagttcttaaaaggaaaaacatggtgatctctaaattgaagaaagacatgtctgctctgaagcatatggttgttgaattgtcaagggctaaaagagtctcttctgccataagtccaatctgcactgatctgccagtgatgtcaaacaatgttctgtatgatatgagcagttctagctcatcagatccagaatccccagttgcactacgagaataccttgatgagcatcttgttgatagcactccaggagatggtgattctagacggagttgtgaagtatctgtagcaaaagcatctcttccatcaaaaacgtcatctgttcacaagctgcgctcaactagcccgttaaaagagatccatattaatccaaaagtagaaacaaaatcatttggcagacagaagcaacctacatcttctaatggagattttaaaaggattagacgacaaagtcagcaagatccaaggaataaagctacaagaagatggatgtagagtttagccatctagaagtcattacctgattggtaaacttgtcattaaattgacctgctgttcttatccgagcaaagctatgaatcatgtttttttgctttagtcaatctttgtataagtagttaagtactctaatgtttatttgttttatcctgtttctcttctttattcattgccattggtgcttctattcatcactagtgtaattaaacttatttttaaaaagaaaaaggaacatgataaacataatgggaaatactaaaataatagcgatgtcaaaaattattcgatagtgaatttgtgaggtagattatgtaatctagaactgaaggtaaaagcacgaagatttata

SEQ ID NO: 104510 - DNA, 1707 bp, Zea Mays
caagagccagaaatatcttcgccactcctgcgcttttgcgctttttctccccccgcaccccagaaccagcacgccggtcctcctgatggccgccgccggcgagggcgaggctgagcgtgtgtcagcgctgctgcgggaaataacgggggagggcgggttcgctttcgttgcctcggcggagaaggcgggggcgggggacctgcgcgcggcggaggcggcgcgggagatggcgtgggagcagctccactcgggcccctggagcgaggtcggcaccgcctggagggacgcctacgcgctcgcctgcctcaacgtcgcgcggctccgcacccacgcggccagcggcggagatagcgaccgctccgcggcgctccgggcactcgacatggggctcatcatgggaggcaacctactgcgcgccgacctcgaggcggcactggcgcgcatctccgcggaagcgtgtggcggaagcgaaggtggcgagggggtcgtggataaggagaaccagaggtggagggaagcgctcgacaggaaccgagacatcgctgatgcactgaaaattcttccagcgaactctttatcctgtaagaaagttgagaggcgatcatgcatttccttggaggagttcatatgtaattactttttgcgcgacacccccgtcataattagtggcaccatcgaccattggcctgcaaggacaaaatggaaggacattgagtacctcaagaagattgctggagatcgtactgttcctgttgaagttggaaagaattacgtgtgtagtgagtggaagcaggagcttatcacattttctcagttcctggatagaatgtcgtcaactgtctgtccatcaaacttgacatatctggctcagcatccattgtttgagcagataaaagagctcagtgaagacataattgttcccgaatactgttacgctggtggaggtgcactccaatcacttaatgcttggtttggtccagaggggacagtgacaccattgcaccatgatccacatcacaatatcttagctcaggtattgggcaggaagtatattagactctatcctgctttcatagctgaggacttgtatccacacacagagactatgctaagcaataccagtcaggtagatcttgacaacattgatttgaaggagtttccaagggttgaaaacctggaattcattgactgcatattggaggagggcgacctgctttacatccctccaaaatggtggcactacgtcagatctctctccaccagtttctcggttagcttttggtggcgtgcagcagttcaaccttcaggaggctcatagcgtcaatttcatgtctcccatattatcaaaaccagattgcagaaaaccaaagtaacctgacaggaccctttgtttcaggtgactccgcttttgaatggatgtacacacgtcatcaccaatgtccattgttagttttacttttaccacagtgattaaaatgttgaaattgcttatatgccgaccatcatgctatcatgtgattcttgaaagcagaggttgaaggatgtcttcactgctacaatgtcaaattcttgaaattgtaaaggtggacttactagctccgagaatttaatttagatgtattctcgatctgactaaataggtagataaaagtattaatttttataacatcaaatatatattatataagtatgtttcattacgaacct

SEQ ID NO: 104511 - DNA, 99 bp, Zea Mays
gatctctctccaccagtttctcggtgactccgcttttgaatggatgtacacacgtcatcaccaatgtccattgttagttttacttttaccacagtgatt

SEQ ID NO: 104512 - DNA, 86 bp, Zea Mays
atgagtgcatcggatgtagtgtgtcatgttcctggtcgatgatgtattgtttattaatgagtcacctctcagacttattcacattc

SEQ ID NO: 104513 - DNA, 621 bp, Zea Mays
atgacctcggaggggcgaaagccgccgagccagaggaagcagcgctcggcggggctcctccagacgccggagatgaggtggaagacgtcgcctttgatggcgccctccttgatgcccaacatctcgtcgtggtgcgccaggcagctctccacgtacatctgcagctccccctccggcaggtgctgctgcagcgccgcccgaagctcgtacatcagccggtagtgctcctcctgccaccgcccgtactccacatcgaacatcgccgcctctagtgtatccccatatgtatggccgatggacgtgctgtcgatgccgccgatggggacgcctttgccgacgacactttggccagcgaggatgccgccgttggggaagaaaactccctgcaaaatatattttgcagagatcagttaaaaattcagccttcaggaagccaaataaaggccgagacaagatacaagcaccacatttgaattttcttttttttgggggtccctttctggttattatttgatcagttactaaacactaatcatacacctgatgagctcttgtagtgtgaagttcttgttcgagctgagctagcctgatcctgctggactcgagttgctggatgtaagc

SEQ ID NO: 104514 - DNA, 244 bp, Zea Mays
gcttcaaaagtgcaccattagttcatctaacagttacaaacttacttcatgtaaatatgccacttttttactatctactaatttatatgctttaaatgtctttttaagtcaaaaataaataaataaataccaaatgttgtcagaaaatagtgaaagagtctgtgttttgttcttttttgctacggacatttttggctacggacacatctattcttttttgctacggacacatctattctaaaat

SEQ ID NO: 104515 - DNA, 1151 bp, Zea Mays
gcaaccaatcaagcgtttactgttcgcattctaataacgagctcatatatagcatgctcagttgctcacacatactctcatgctactggaagcttgatctatgcagaaagaagcagggcaaaaatgaaaagaagtcgaaaacacaacccgccacgactcgcacggtcgcatggccaaatctaagcagagacctcacctgcactccacgcctgcctcggcagctcggcgcggggtgctcttccggcggctcccgtgatgccggaagccgctccgcttcgcggcctcgtcgtccttctcctcctcggtcgccgggtcgcagccgcgcttgggctgctgttgccgccgccgccgcctcttcttcttccctccgctctccggcgagaccacggccggcttcgcgtcctccatgggctcggccttggcagcgtcgtcctcctcgtcgtcggtgtcgtcagccgtgtggtgcttctgcggccgccccctcctcttgtaggctggcgtcacggtcacggcctcctcctcgccgccgctgccggcgtcagcatcctcgctgtggttagcttgcgacgtcggccgtttagccttccctccccttggcctgcccatccttcccggagcgcggaaaccctcaaactgctttggaccaatagggttgataagaacacatggttctaacaccaccaccagaaatactcctagtcgtagaagcgagatgacagatgaaacatctaccggctcctcctattttgacattcggatgatatcggggaagagagattgcagcgccatgaaatctatgcttgaagtgataaagatcagaaacagaaacagccacaaaggacactgctggacccatccgagataatgtttctgtatccaagaagacacataggaccaacacaaaagaagctccggagcacgaaataggtgcgctgaagaagagcataaacaagaacgagagagagagagagagaggtaacacgcggttcttacctgctacaggcggcggcgtcttggtcgacggtgagcgtcggaggtttcgcgcaggagctccgagagctttatctgagcagaggacggagatcagaaggccgcgcaagaactggttccgctgtcctgcttcagagagacgagggaggggggagatgctt

SEQ ID NO: 104516 - DNA, 2006 bp, Zea Mays
taaaacaatttattacgacgctgaggcattttctcgtgaaagaaaacgcactcccgactcccgagtgatcccgagtcccgacggccgacgcgcgcttaagggcttacggctaatccggcggctacgaaaggaaacatctaccccgttcaaccgttccatttcttctcccgttccgttcaccccccccgcgagctctatctttcgtggcgcagctcggcagctgggcggccgccccccgccggcgccacgccctaagctacgccaggttcccagttcttcgtccgtccttttgctaggtcttcgttggacacttaaacggcgacgagcaccgccagacgcgctggtgcctggatccggcgggagtgcttcaggttttgacggttcgtctctctcgttgtttccggcggggttatgaaggcggtgggatacagcccctacgacagcagcgggactgatgacgatctccctccagcacaaaatagaggactaagagggcgatctttcagtgggaatgtcgtagcatctgctggggcatttccttacatgagggcaaataatgatctggagagtgaaatacatcgggttgagcaagatgcatatactggtattcttagggcatttaaagtgcaatctgatgcaatatcctgggaaaaggagagcttgattactgaactcaggaaagaactgagggtttctgatgaggagcatagggagctattaaataaagtcaatgaagatgggaccatccgtcgaatgagggagttaagacaggcaggtggatccccaagtggtttgcatcatggcaacatggttttatatggtgcagaacctgggtccactaccaagaggcaaagggcatctcattcgattcctttgcaatcagcaggcctccagtcccctatgatgccctcccactcagtttcatctgcaaaatggggtcctttgcaagcaagaggcacgaaagcgaggacgcccattcctttggcgttaccatctgtggatccaagttcactaataaaccataaagtttatacaaggtggccagaagacaacaacttctatgaggccaccataacacgatataaccctgtgacgggtgagcatggacttgtctatgacatgggcacacaagccgagagttgggaatcagttagactttgtgatatggcacctgaagatataagatggggatttgatggacacctttcaaatcgtgatgtctggagcccttctggccctatgttgatgaggcacatgaccaacaatggtgctatggcaggttcaatcaagggaagagggaggttatcaataaatgagactataaaggactatgctccacctgaaaatggcaccaataggaattttgatcatgtcgacataccaaataccggaagtgttgttatggaggtgaagagggtattgttcaacccaaatatgcctgaaatcgagaaggcaaggaaacttttgaaagatcaggagcagtcattacttgatgcaattgccagacttgatgaagcatctgatagcgataatgaagatatggccatggaaggccgaatgggttctgctggggaaaggaatggcatcactacgtagttgcttctggcatgttggaattttggtagattaacatgcatttgtgtagcacctacctcgaccgcagaacaaggaaaccacattatggcaaaactgcatgccagaaaatggtgtcctggaaacggttgacgcctgaaatgggattttttggctacacaaaattgagcgcacgagcggcagagatgcaaatgttaaagaactgtttaagcgccattgcatggtgtttcctatgtagcaaactagaggcaactaaatgttctagttgatcattagcatggagcacttagcattcctgattcagtacaggtagatgtctaacactccagcataatatccaacttggctgttcttgtactctaatgtgaaaaaggattgttgtgcacgcttttcatgtaagcctcgagtgagta

SEQ ID NO: 104517 - DNA, 524 bp, Zea Mays
attcgccagctgatgcatcttacatggtgtattcatgcttcgtatatttccctgaccattttttgtgttacagaagatatggccatggaaggccgaatgggttctgctggggaaaggaatggcatcactacgtagttgcttctggcatgttggaattttggtagattaacatgcatttgtgtagcacctacctcgaccgcagaacaaggaaaccacattatggcaaaactgcatgccagaaaatggtgtcctggaaacggttgacgcctgaaatgggattttttggctacacaaaattgagcgcacgagcggcagagatgcaaatgttaaagaactgtttaagcgccattgcatggtgtttcctatgtagcaaactagaggcaactaaatgttctagttgatcattagcatggagcacttagcattcctgattcagtacaggtagatgtctaacactccagcataatatccaacttggctgttcttgtactctaatgtgaaaaaggattgttgtgcacgctttt

SEQ ID NO: 104518 - DNA, 2507 bp, Zea Mays
ccgtccgtgcacacctctctctctattgtgcgttgtcgatcccccgcgagcccgccctccctcacccccacgagatggtcgggagatccgccctcgccttgcctccgcgcaacaatcgtgcgcccactcctcatcgcaatccagtagctccggcctcgcctcctcaaccgcgcattcccctctcccacacccgcctcgttcgcccctaccgcgccatcaacgcgcctcccccgccgcacaccccgtcctccccatgccgaatcgtgatggttatgctccccacccacgcgccgcgtgcctcctccttccccgccgctcccacccgagatggttagctcccctccttctggtcccttcccctgcctcactgccagccagcgatggagcaaggccaggggattcgccggattcaccgagcgggctctggtggcggccggcgctgccgtcgtgtccgccattcttgtcaacccccttgacgtcgccaaggtacgccggtgaccctgtcgttgcctctttcgcttcctctcaactgccgcccctcaaccctcgacacttgcccacaactgtcgccattgcccgctcgccatggcgctaaaataaaccccctctgcggccgccccgtatcctctcgctgcggccgcgggctggggagcaccggccttggcatcgtcatagccgcgggagtcttcagcgccgccgcctcgttgctcctcgcctacttcttctggcagtgcaccgggaagggcaaaggaggccgccgtcgccacaggcgcggcaccagcgagtcgggcggtggggaagacgggagctggtggaccgagaggctgcgggcggcgcacaaccgcctggtcccggtctcgctgttccagaagcccatcgtgaaggtcaagctcgctgacctgatggccgccacccatgacttcagcactagccacatcgtggtcgccgggagctcgcaggcggggatagcttaccgagccgtgctacgggacgggtctgcgctgacggtcaagcgcctgcactcgtgcccactttcggagaaggcgttcagggcagagatgggtcgtatggggcagctgcggcatcctaacatcgtgccactgctgggcttctgtgttgtcgaggacgagaggctgctggtgtataagcatatggagagtggggctctttcatcggtgatgaagaagccaggggaagcgccgctggattgggcaacgcgacttaggatcgccgtgggggcagcaagggggcttgcgtggctgcaccatgggttccaggttccgcagattcaccagaatttgagctcgagtgcagtgcttctcgacgaggattatgatgctcggatcacggatgttggactcacaaggttggtccggatggcgcctggcgagggtggtgataccagtcctttcctgaacggggactttggggagtttggctatgttgctccagagtatgctagcaatccagttggtacgatgaaaggcgatgcgtatgcatttggggtgatattgtttgagcttgttagcgggcaggagtctgctgctgtggttactgacgtgacgggtgaaggattcaaggggacattggtggactgggttaaccagctcaaggcttctggtcgaatcagtgatgctattgataaaccattgcgtggaaagggccatgaggcagagattcaggagttcttgaagatagcttttgcttgcacccagccccgtgtgacggagaggcattcaatgtatcgggttttccacgctctgaagagcatcggagagggctgcgatgtcacggagcagtttgatgagttcccattggcctataacaaggatgattcagacgctatttagctgatgatgctgattgccaattcgattgtggaaatgtttggtcaggcttattgatgatatatatatttagccttgctatggacagaccggaagcataaatgagtgataagagaacaatatcgaggcaccaaatctagcgccggatgccgggtggtcaattacatcgttgcatcgacaggggatgtgataaccatgtaagctgtaatatcagtttacaattctgtatgttgttttaaagttactgttagtgcctgtagtatctgtgtggaactgcaattcttgatggccaaaatcctggtgtcacctttcgaagttccttcttggaacaaccagcttgctgttcagtcattggattggcactcaatgtttcattaccttcttggaaacttataggagggtcctgggtagttaaaaatgttctaatgtctctttagcttatactcttcttcataagaggcatatttatgggctttgaatatgtagctagaaatgttctgtttaaatgcttaagctttcaaagggtatgctatacacatctgggccttggaacatctcctggtctttgctctatattctaaaagctttctatttggaagcatcagctataggggaatggaactttcaacatcacctttctgtactatagttctttcagct

SEQ ID NO: 104519 - DNA, 1845 bp, Zea Mays
atggttagctcccctccttctggtcccttcccctgcctcactgccagccagcgatggagcaaggccaggggattcgccggattcaccgagcgggctctggtggcggccggcgctgccgtcgtgtccgccattcttgtcaacccccttgacgtcgccaagtgcaccgggaagggcaaaggaggccgccgtcgccacaggcgcggcaccagcgagtcgggcggtggggaagacgggagctggtggaccgagaggctgcgggcggcgcacaaccgcctggtcccggtctcgctgttccagaagcccatcgtgaaggtcaagctcgctgacctgatggccgccacccatgacttcagcactagccacatcgtggtcgccgggagctcgcaggcggggatagcttaccgagccgtgctacgggacgggtctgcgctgacggtcaagcgcctgcactcgtgcccactttcggagaaggcgttcagggcagagatgggtcgtatggggcagctgcggcatcctaacatcgtgccactgctgggcttctgtgttgtcgaggacgagaggctgctggtgtataagcatatggagagtggggctctttcatcggtgatgaagaagccaggggaagcgccgctggattgggcaacgcgacttaggatcgccgtgggggcagcaagggggcttgcgtggctgcaccatgggttccaggttccgcagattcaccagaatttgagctcgagtgcagtgcttctcgacgaggattatgatgctcggatcacggatgttggactcacaaggttggtccggatggcgcctggcgagggtggtgataccagtcctttcctgaacggggactttggggagtttggctatgttgctccagagtatgctagcaatccagttggtacgatgaaaggcgatgcgtatgcatttggggtgatattgtttgagcttgttagcgggcaggagtctgctgctgtggttactgacgtgacgggtgaaggattcaaggggacattggtggactgggttaaccagctcaaggcttctggtcgaatcagtgatgctattgataaaccattgcgtggaaagggccatgaggcagagattcaggagttcttgaagatagcttttgcttgcacccagccccgtgtgacggagaggcattcaatgtatcgggttttccacgctctgaagagcatcggagagggctgcgatgtcacggagcagtttgatgagttcccattggcctataacaaggatgattcagacgctatttagctgatgatgctgattgccaattcgattgtggaaatgtttggtcaggcttattgatgatatatatatttagccttgctatggacagaccggaagcataaatgagtgataagagaacaatatcgaggcaccaaatctagcgccggatgccgggtggtcaattacatcgttgcatcgacaggggatgtgataaccataagtaatattgctcgaaaatgtagagctgactcttgaagcctttgactaaatgcagctgccattcacgctgaaagcgcattctaacacggcatgatacactagcaactggaatgttgtcaacatcagcggcaacgacgacaacgccacatcgagaaacaacaactgtgggctagggagcacaatcccgtggtgcggtgacttgcccacgtttgccatgctgccttgatgcatggcacatcaacaagaagagcaccagtttggaaggctaattccgaaggaattgagatgtgcagagggagatgaagaatgtggagaaagacatcagggtagctactaagcgcaatgacatgttatctgcaaaggtacggtcag

SEQ ID NO: 104520 - DNA, 1551 bp, Zea Mays
atgctgctcggagtcatctcgctgctgctcagccagacggcacgcttcatatcggagatctgcgtgccgtcctcgctcttcaccagccgcttctacatctgctctgagagcgactaccaggacctgctgcgcaacacggacgccaaccagacggcgctcgacaagaacatgttcggtggccagcggctgcacgtctgtggcgagggccatgaaccttttgtttcgtacgagggccttgagcagctgcaccggtttctcttcatccttggtatcactcatgtgttgtacagttttgtaacagtggttctgtccatgatcaagatctatagctggaggaagtgggaaaccttagcaggtccaattgctgctgaggaattgaaagctaggagaaccaaggtgatgagaaggcagtcaacctttgtttttaacaatgcttctcatccatggagcaaaaataaaatacttatttggatgctttgctttttgcgccaattcaagggctccataataaggtcagactatttggcactgagtatcacaagctaccacattcatatgacttccataaatacatggtacggagcatggaagattattacaatgggactattggtatcagttggccactttgggcatatgtgattgtctgcgtattaatcaatgttcatggtatctctactacttattaaggctgtaagggtagcctccctttttttgttctgtctttttcattttcctgttttgccctttccattcccacccgcgcattgcattgatcaccaatcgcatcgcagcagcacaagcagcacgccgtgccgctccaaccgtcttgcttccccgcttagcttcccgccgcgccatggcgtcgaccaaggctcccggcgagaagcaccactccatcgacacgcagctccatcagctggtcccaggcaaggtctccgaggacgacaagctcatcgagtacgatgcgctgctcattgatcgcttcctcaacatcctccaggacctccatgggcccagccttcgcgaatttgtccaggagtgctacgaggtctcggccgactacgagggcaaaggagacacgacgaagctgggcgagctcagcgccaagctcatggggctggcccccgtcgacgccatcctcgtggcgagctccatcctgcacatgctcaacctcgccaacctctccgaggaggtgcagatcacgcaccgctgccgcaacagcaagctcaagaaaggtggcttcgccgacgagggctcagccaccaccgagtccgacatcgaggagacgctcaagcgcctcgtgtccgaggtcggcaagtccctcgaggaggtgttcgaggcgctcaagaaccagatagatccacatttatgcttatgtttattttatattttttgatttgaatatctaaactatgatgttctatgaaagatcattcttgaatttttgcctttaaattttcttgttaaatcttgtatactacactattaaatgagtgctcgtgcgtcacagtcccgagtttctctttaacgtcatcctggacggttcgt

SEQ ID NO: 104521 - DNA, 540 bp, Zea Mays
tgtatcaatcttttcagacaagtttgcattgtgagttgtgtgtgaccttcacaacaaggtggatctatacacgtattattatgggcatggatgcatatcgtgcggcaagccgatgcacccaagcagaagaaaccaagaacttccgacatgctgcattgggggcacaggttcagtacacggcatccattccagacgacagacaataagcaaccacctcacaatcacaacgcacgatttacacctacagcaacagcaagagctacacagtcttgacaccacctacaagctaccgctgcttctcaccgagtgagcttcggcctcgacgagtgcctcacgcgcctttagtcctttctgccagttctaccacggtcagacggtgtccgggggtctcgtcatttccagaacagaccggagaagccacctggctgtggctgctgctgctgctgcccatggccaccgctggcccctgcgtgcggcgggctcggcggggcgccactggacgactcgcttaggctcaatgtgcctctggacggcgggctg

SEQ ID NO: 104522 - DNA, 447 bp, Zea Mays
atggatgcgggcaccaatgccagcgacatggagccgtcggggccgtactttcttggccggccacgctttttcttggtccccggctcacccgcgccacccgagtgcacgggcgcgccaccattgcctcctacgccagccaagcttgaagcagacgcggcgctgccgcccacgggctggtatgtcgccgtcgcgggcggcacggagctcaccggggtgaagatggcggtgccgtccgtcgtgtacgccatgcgcaggccctgcgtgcccccggaggacggcggcgttgccggggtcttcggcagcccgaacggctcccttcccgccatcactccttgctccggagacgggctcacctccatcattccacaccgaacaggtgcgccgaagcagaagcggaactacgaatctggcaatctgcggctgtcttcagcgattttccttgactga

SEQ ID NO: 104523 - DNA, 2468 bp, Zea Mays
cggcggcgaagctatatgagagcgcccggccccaaatcaaatccccaaacccccgtcctcctcgccgctccgccgcgcggttgagcgccgacgagcgagcccaccgctgcctcgtccgccctatggatatggatgtccgccgcagggttccaccgccgcacgggagcgtccctaggcgccagcaggcgaccggggccgagggggagcgggtgcgtgtgcaggcgggtgatgcgctaccgctgccgatccggcacacgaacctcatcttctcggcgctgttcgccgcgtcgctggtgtacctgatgcgtcggtggcgggggaagatccgcgcctccacgccgctccacgtggtctcccccgccgagatcttcgccatctgcggcctcgtcgcgtcgctcatctacctcctcagcttcttcgggatcgccttcgtgcagtccgtcgtctccagcagcgacgacgacgaggacttcatcgtcgactcccgccacgcgcgggcgcgggcgccgccgacgcctgcgcagaccccgtgtgcgctgctggggagccccgccgccgcgacggagaaaatgccggaggaggacgaggagatcgtggccgcggttgtggcagggaagatcccgtcctacgtgctggagtctaggctgggagattgccgccgggccgccgggatcaggagggaggcgctgcgccggatcaccggaagggatatggacgggctcccgctcgacgggttcgactacgcgtccatcctgggccaatgctgcgagctgccggtcgggtacgtgcagcttcccgtgggcgtcgccggaccgctcctgctcgacgggcgccgcctctacgtaccgatggccaccaccgagggctgcctcgtcgccagcacgaaccgcggatgcaaggccattgccgagtccggtggtgcctccagcgtcgttttcagggacgggatgacgcgagccccggtcgtccggttcccgtctgcacgccgcgccgctgagctcaaggccttcttggaggacccagcgaactttgacaccctggccgtggtgtttaacagatcgagcagatttggaaggctgcagggagtgaagtgtgcgattgcaggaaggaacttgtacatgaggttcagctgcagcacaggggatgccatggggatgaacatggtctccaagggtgtgcagaacgtgctggactacctccaggccgacttccctgacatggatgtcatcagcatatcaggtaacttctgttctgacaagaagtcagctgctgtgaactggattgatggccgtgggaagtcggtggtttgtgaggcagtaatcaaggaagaagttgtgaaaaaggttctcaaaacaaatgttcaggctcttgtagaattgaacgtgatcaagaacctcgctggttcagctgttgctggcgctcttgggggtttcaatgcccatgcaagtaacattgtggcggccatcttcattgccactggtcaggaccctgcacagaacgtggagagttcccagtgtatcaccatgttggaagctataaatgatggcaaagatctgcacgtctccgttactatgccatctattgaggttggcacagttggtggaggcacgcagctggcctcacaatctgcctgcttggacctgcttggcgtcaaaggtgctaacagggaatccccagggtccaacgcgcggctcttggccacggtggttgccggtgcggtcctagccgcggagctgtccctcatctctgcgcaggccgctggccatctggtccagagccacatgaaatacaacaggtccagcaaggcccttgcagaggaaacagacaaacccaagaaatgttgaataatatcaagttgttgttttataaccctttgggagaacggagcgaaaagggtcccacaggatgattccttgcggcatgctcgggtggaaagggaaaaaaacccttctggcgaaaagagagaattcagtcgactcgtcatatttaccaagcggtgagacctgttgtggatcctggagtatgacctatttaattcgttgatgttgtcgttatagttcctctacactacactcgttgaccccgcctgcatctagttttgcccgtccatgggcggagaatctgaccatgggtttgtcccaagcttgcatcacagtggcgcatccagtgacccacgtgatctctgctttgccgcagaaaatttttgcggagcaactgccgggtgctttgtatttcagctttgtaaatttacttttatccagtcgttctgagtccaagccgtcagtgcagtcggtggtgtagttgattaaagtacgaaatgtaaatggaataataaaaataaagagctgtgttttgcatttatctaagaaatatatgtagagctgtgttttgcatttatctaagaaatatatgtggtaaaatggtacggtacgatgagagtgttttgtcattcctattttctgtgtcaa

SEQ ID NO: 104524 - DNA, 1457 bp, Zea Mays
gtgggattatgtgatgaccgacctggtttgggaaatatttgtgcagatcgagcagatttggaaggctgcagggagtgaagtgtgcgattgcaggaaggaacttgtacatgaggttcagctgcagcacaggggatgccatggggatgaacatggtctccaagggtgtgcagaacgtgctggactacctccaggccgacttccctgacatggatgtcatcagcatatcaggtaacttctgttctgacaagaagtcagctgctgtgaactggattgatggccgtgggaagtcggtggtttgtgaggcagtaatcaaggaagaagttgtgaaaaaggttctcaaaacaaatgttcaggctcttgtagaattgaacgtgatcaagaacctcgctggttcagctgttgctggcgctcttgggggtttcaatgcccatgcaagtaacattgtggcggccatcttcattgccactggtcaggaccctgcacagaacgtggagagttcccagtgtatcaccatgttggaagctataaatgatggcaaagatctgcacgtctccgttactatgccatctattgaggttggcacagttggtggaggcacgcagctggcctcacaatctgcctgcttggacctgcttggcgtcaaaggtgctaacagggaatccccagggtccaacgcgcggctcttggccacggtggttgccggtgcggtcctagccgcggagctgtccctcatctctgcgcaggccgctggccatctggtccagagccacatgaaatacaacaggtccagcaaggcccttgcagaggaaacagacaaacccaagaaatgttgaataatatcaagttgttgttttataaccctttgggagaacggagcgaaaagggtcccacaggatgattccttgcggcatgctcgggtggaaagggaaaaaaacccttctggcgaaaagagagaattcagtcgactcgtcatatttaccaagcggtgagacctgttgtggatcctggagtatgacctatttaattcgttgatgttgtcgttatagttcctctacactacactcgttgaccccgcctgcatctagttttgcccgtccatgggcggagaatctgaccatgggtttgtcccaagcttgcatcacagtggcgcatccagtgacccacgtgatctctgctttgccgcagaaaatttttgcggagcaactgccgggtgctttgtatttcagctttgtaaatttacttttatccagtcgttctgagtccaagccgtcagtgcagtcggtggtgtagttgattaaagtacgaaatgtaaatggaataataaaaataaagagctgtgttttgcatttatctaagaaatatatgtagagctgtgttttgcatttatctaagaaatatatgtggtaaaatggtacggtacgatgagagtgttttgtcattcctattttctgtgtcaa

SEQ ID NO: 104525 - DNA, 5975 bp, Zea Mays
atgacggcggaggggacggcgtgcaacggcgccggcgaggcgctgaaggcggaattcgcgccggagaaggtggtggccgtgtccctggaggagaagccggtcggggagcgcgagggcgaggacgtcggcgggccgttcttgatcgtgaacggcggcgattccgacgggcactccgagcctggctcagatctgggcaaggcgcccgacgaggaccctgcatccgaggaggacgacgtgcccaccttcaatgcagctccggacgcggccgtggccggagatcacgggaccgccgaagggcaagttggtgctcagggtgcggcactcggtgcttcgtcggcggacgggggtgatcgtgcttccgacgggtctgagggtagcgcggatgagagcagaggtgacccaagttccgattgtgttgccgaagtggcgcagcaggaggctgttggtgaagaggacagtggggcagctgctctggcgtcccgtgaatgcgaacctaccatcaccagtgctgactctgaggcacactatgtggattctgaggttgaagacaaggagggcacagtggatggtagtgctgttgttgatgccgttgaagcggtggtgcatcaggaagctagtacagagcaggatgaagatgctgctgtgatgtcctctggccatgatgatgccctaacgtctcccaagtcttgttctgctgccgtggagtccgaggttattagagaggatagcaaagaacagagtatcactgatggtgtggagccacagcagcagggtacagttggggcaagtactttggtggagaatgagcatctttgtgccgacatgatggctgattcatttgtagctgccaatgagcctgacagtcaagaggatgctgctgtgatgtcctctggccatgatgatgccctaacgtctcccaagtcttgttctgctgccgtggagtccgaggttattagagaggatagcaaagaacagagtatcactgatggtgtggagccacagcagcagggtacagttggggcaagtgctttggtggagaatgagcatctttgtgtcgacatggcggctgattcatttgtagctgctactgagcctgacagtcaagaggatgctgctgtggagtcctgcgggcacgatgatctgctaacttttactgagtctggttctgctgacattgagtctgaggtttatggagaggatagcgaacaaaaagagagcaacactgttgttgtggagatcgtggtgcagggcgtaggtagggcagatgtgctgatggcaaatgggcatctttgtgccgacacccaagctggttcttctgaagctactactgagcctgagaatcatgctaatggcagcaaactgactgatgttgcagaatcagtggagggggatgccggcagtggagaacaggatacaatggattcgtcgcaaaccaatgggcatatttatgttgccttgagtgctgattcttgtatagttccttctgagtccaaggcccattcctttgagacagatgggcaacgaactgatcagctacaagaggaagctccaaaacttgaagctgaagtattggagggagtgctaaaaccaactgaaaggaactgtgcaggtagtgttgagaaactcataggagaggaagttggcacagatgggcatgcaagcataggaggtacagctgatgcttatggggagcaagaagccaagcctatgcaggtagaaggtgaagtcacttgcggtattctcgaatttgaaaaagtggataaggatggtgaagagggtttgtgtgatgactacacggttggtgttgtttcttctaatgaggaaacagagcttcctatgaaggaaaaagtagatgaagctgtccccagtgttaatgttggtgggccagagaaagtaactgacaatacaagccaagataccaagacagttgattttattgatgaaatcacagcagagtcaaactttaaagctgaaaatatggttgaagtgaaaagtgcagctcgtgaagttgacaaaacagaggtaaaagatcttgcttttgctgatgaggctaatgtagctcctttacaccttcaacgtgactgtgaatctgttatggaaactatagagcatgagaaggtagaattaccaggtggttgtcaagctcatgaaattgtgtattcttcagaactagaaccgaagaaagagtttgagatgggggttgatggtgctgttccattgcaaggagctgcagcttctgttgcctctgttttccaccatgagccaatgtccattgatttgtctgagaatgatagcggtaaccattctggcccaactactgcgttggaatcctgtgaccatgtgcaaaatgaagagagcatatcccaagaaatttccatgaccactattgagcaacctatagctattgatcaagttgaacctgtcaacctgaatgtagatgaacttgtggttgatgatgatcaacctggttttgctccaaggtgtgaatctgctaggctggataaacctggatgtacttccaaaaaggatgattcaaatgagattgttgaagatagcaaatcactggaaaatcagttagaaatttgcaatgcagctactatgtctgatgagtgttcctccagaaatgcaaatgaagatccctctccaattaatatgtctgctgagtgttcctccagaactgcaaatgaaggtttctctccaattaatgaggcttctcatctagctgaggagtcttgcctttcagacaagtcatacaatgctatcagttatgaaaatggaaatgggcctgctaaatcttctgaggagcctgacaagtcatgcaatgctatcatttgtgaaaatgaaaatgagcctgctaaatcttctgatgtggttgaaaccagatgcgtggaagcattagcgccttcatctgttggcacggttgtcacggcagaacagaaggacaatggacaccgtgcttctggtgagtggcatggagataatgtgcaagtcattggacaacaacagaagatctacataattaaagttccaaagtttgccggtgatgatctctggaataagatccaggctgcacaggctcacttagaccacctgacccaggaaagagatgcaattaaccgtcgtaggcaaaagcaaaaggctgtatgtgatcaatacagggagaagcttgaggcagcacgtagagaagagcgggaagctaggactgcacatggagataagaagaatgatttaaataatgtacgttcggtactagggaaattgcaccaagcaaattcagctgaagaacttgatgagctgattgcgaagaaagagaggactatgcaacatgagaccatttctttgaaagaagaaaaacttttaattaaagagattaatgaattaaaagcccaacggaagcagctatccaccactatgggctcaaaggctgaaatcaatgaggcatttgaccaaaaagatcacattcatgaaaggcataaggtgttaaagaaggattctgatgttttattgaccaacctgaaattcctagaggaaaacacaagaaagattcaaaagtctttcgaagatgaaagaacaggtctcagaaaattaacagaggaacaccgagcagctaatgaaatacgtcaaaaggcctacattgaatggactgagcttagatcagagccctccaagaagaatgaatacttcttcaggtacagggatgaccggaatgcagcagaaattttcagagctaatggcgatataaatggacttaaatcacactgtaatagtcagattgagggagtcatggaaatgtggaacaaaaacgaggaattccgcaagcagtatgttgagtcaaacaaggttagcacactaaagagattagggacccatgatggacggaaacttggccctgatgaggaccctccagtcatatcaagcagaagaccaagcagcatctatccattgtctgcctcaagcccgggagtggccactttagcttcaataccagcacctgtggtagctgctccagctgcagtctctgccaaagaggactcatttcctgttttggaagccccccagaccagcaagcgcaccaagtcaaaagcatctgatatctgtgcccagaccgagaacaactctgttatagtatcggaggcagaggctttggaacagactttgaaagagaaagctcgtctattggaggaacaattggagttagctaggaaggcagaggagttggcacggaaggaggaggaattaagcaaagagagggctgccgctgagaaggagcggcttaggatggagcagaaggctaaggccaaggaggccgaggagaggaagaggcggaaagccgagaaggacaaggagaaagccgagttcaaagcgcgcaaggaagctgaggagagggagaagaagaaagccaagaaagacaaaaggagaggcacggcaccagcagattctagcctcactggtgacgggcacgccgcggccttggccacagcagacactgacagcaacgcatcggacaacccgagggaagctgaggctcctcaaccggcggcggctcccaagaggctgtctaggcccgcagcggcaatcaagcagctgaacagggtgcagcccatgccggcgccgctacgtaacaggggcagaaggagactgcggcagtacatcctgatcgcggcggccgtgctatcggggcttgcgttgttcgtggcaggcaactatattcccaggctcaagtcggttcactcctaagtttatctgtaggaaaggggtgctaatctgtcgcggtgaacctgggtgtgattcgtattatttcgattattctccggttggtttgtactattttttttttacctcatataggttggttgtgaaagatgggggtgcattgtgttaaaagttgttttacaggatggtggtgaaatcttcgttagaacatggataataattagtactatagattctttcttgtagtagccttagcgtatatgatatttactggatatgtcgttcgccctatcgctctgccttaaatatctacataaatacagacatacagtagaataaatagacacaaacactgtatgataaacttgaataaatatctgatcgcttttgctcaacatacgaattaagcttagattctcctgcttctgccaatgttctcgacgaaggcctccccaatgccctccccgatggcctcgatgaggccgccgatgaccccgaacagcgcgttgacggtgaccctggcggcggtggccagcgcgctcctcttctccggcggcacgacaccgtgcacgtagagcccgttcaccacgtccttggcgcacctggcgtggaggtagtagccgcagggcaggcactggtacgcgtgctgccccgcgcgcctcgtccgcctgcacgcctggcacacgaagctcgtctgctccgcgccgtcccgcgccaggagcagcagcgggtgctcgtgcacggccgggagctccatccgccgcgccatcgccgcgcagcacgggtgcatgtcgaagctgcacgacgcgcaccggaacgagaagcccctcacgggcttaccgcacacgtcgcacctgcagcggaggaagccgcccgacgccggcttcacgaagaagaggaggtgcgggtgcttggggtggaacgggtgctcgtgcagcgacggcggcgccagcgcgcaggactcgtgcagctggaagccgcaggcctggcacatgaaccgcttcccggcgccgtactccttgcaccccatgcacatgaacaggtgcgggaagtcgaaccgggccagccggtgctccgggtggctgaaatgcaccatctcggcctcagcctccggcccgtccacgacgcgatctctcgtctccggtgcatcgtcttcggacgacgacgatggcagccggtggccgctgagctcccttgagctcatagacacgcacctgctgttcacgctgttgcttttacctctacctgtaccattgccattt

SEQ ID NO: 104526 - DNA, 459 bp, Zea Mays
atgtcggcgaccagcttgtcgaggttggcatatgagcgccctccgggccgcgtcgcgcggagaccagtctgctgccactctcccacgcggcgctgcatctccattcccttctctccgcccagcggcgctgcatctccattcccttctctccgcccatcgcctctcggatcttctcctccaccgcctcccgccgaacgtcctggccgatctccatggccacgccccactccacgtacgtgtaccggctgttggtctgctgctccgcgaagaagggccagcacagcatcggcaccccggcgcataggctctccatggtcgagttccacccgcagtgcgtcaggaacacgcccaccgcctcgtgcctcagcaccacctcttgtgggcaccagcttgccaggtgtccgcggatggtttcaacaccggagaaggttaccttgtgatcgaagaaggggatggtga

SEQ ID NO: 104527 - DNA, 295 bp, Zea Mays
aagggttggagacccatatttatagccctagaggctgcactaccacaccttctcacacacactacacaacaggattgtcctctagatgctaaagagactacagaggacagtcaaaagcgactgttatcctctagatgctaaagcgactacagaggacagtcaaaaagcgactgctgtcctctagatgctaaagagactacagaggacagtcaagctgtcctctagatgctaaaggactacaaaggacagtcaaaagcgactgttgtcctctagatgctcaagacttattccatca

SEQ ID NO: 104528 - DNA, 1285 bp, Zea Mays
ttagaccattggaaatgcactttgtagtacttaacttggtgttctgaaacataagataggtgttctgaaacataagatatgaaattgcacttggtaatacttagtgtggtgttctgaaacagaagagaggtgttttgaaatagaagaaagagtacatatttgagcatatgtagagcccaggtacctcgctctacaacatcaaggattatctcgtcattcataagagttaaaggccctttcttcggtctttcactattaagacacaatttcatgttgcaaaaatcttcaatggatgatacttatgacgatatataagggatatcactattgagccacataagcttgatgaagagattgttgaatctaatcttgagcttgaagcagactttgtacagtctaaccatgatgatcgaccacaaaaggtacttcatatactagtgcaggaagaagggtgtgctagatggaaaggaaaccggtcaagctgatcgaataagaagaatagtatcttaactactccaaatccatccatgaaatggagaagattaatgctaagccacttcaaaaaaaggttgggtctagtcgttgttgtttttatactggcaaagggaatgcggagatacatcttgagaagaaaaaggcaatgatatggaggtgttttgtctttcattgataaaaacttcgaaatgagcaggtaatgaatgtcacatgaatatatttagctatttcaaatggaaaccaactttgttattgcactgacttttgttcataataaaaacacagaaggtaatggaaaatctacatgcaaatgttttgctaaagctttgattcataccttttttgtctctgatgatctggctgtgactattcctcttctttttttttacttttgcttcctcaagctgggtatgtgttggctatatgtgtgatgttgtgactcttcctcttctttttctgtttctactttctttattacctttatattctttgtgggttccactctggccgacatgcgcaggcaccttctttttttatatagctttagacccttttagcatgtgccacgtttcagatttccagagataccttgttgtatggatgatatctgacgaatgacattgtaacaaaggacagatcaacggtacatagatattatggtgacgtggatgctttccccagcggtgaaagtgtgctggtttcgttctaaaccagataagactagctattttttcctcctttacttaacaagacgagcccatcttgtttggttagcgattcgtaattcaac

SEQ ID NO: 104529 - DNA, 173 bp, Zea Mays
atgaactatttcgtgaacctaagactcaactcgaactcgaacggtcgaaccactacgtcgcctgcctcctcatcttcctgttgcatttctcctcccagttgttaaatccatccaattctaattcgaatagtaattgtgaaggagaacaacagagctgcacagatggcaaacaa

SEQ ID NO: 104530 - DNA, 796 bp, Zea Mays
atttattttgttgagacctagatacgggcccttgctctcctcggcccaccgatccacgccccgcacgcacacgacccgcagaccgcaccctgtcggcgagctcgctcccgttcccgtccgctgctctccgctcgacgccgccgtcttccgcgcagctagtgtctacactcccggcgacgatggcggaggacttggttttggacacggcgatccgagactgggtcctgatcccgctctccgtggttatggtcctcatcggcgtgctccgctactttgtctccaagctcatgcgctccccggcgacctctccgtctcccgaccccaagctcgttaaggaagggcaggtggtcatcagggcgaggaacctgaggaccaacgcacagttcatcccggccaaggctttcaaggcacgcaaggtttattacaccaacgaggaaaatggattacttcatgttccaaaggaagacgcgcagaaggctcaggcagccatgttttctgatccaaacatggccatggacatgatgaagaagaacctatccatgatagttcctcagacacttacatttgcatgggtgaactttttcttttcaggtttcgttgcagcaaaaatcccctttccattgactcagagattcaggggaatgctgcaaaatgggattgacctgagcactgttgatgtcagctatgttagtagccggtcatggtatttcctcaatttattcggcttgaggggtcttttcagtctgatccttggtgaagaaatgactcgaacggttgggcttctgggaagcaacac

SEQ ID NO: 104531 - DNA, 1181 bp, Zea Mays
atttattttgttgagacctagatacgggcccttgctctcctcggcccaccgatccacgccccgcacgcacacgacccgcagaccgcaccctgtcggcgagctcgctcccgttcccgtccgctgctctccgctcgacgccgccgtcttccgcgcagctagtgtctacactcccggcgacgatggcggaggacttggttttggacacggcgatccgagactgggtcctgatcccgctctccgtggttatggtcctcatcggcgtgctccgctactttgtctccaagctcatgcgctccccggcgacctctccgtctcccgaccccaagctcgttaaggaagggcaggtggtcatcagggcgaggaacctgaggaccaacgcacagttcatcccggccaaggctttcaaggcacgcaaggtttattacaccaacgaggaaaatggattacttcatgttccaaaggaagacgcgcagaaggctcaggcagccatgttttctgatccaaacatggccatggacatgatgaagaagaacctatccatgatagttcctcagacacttacatttgcatgggtgaactttttcttttcaggtttcgttgcagcaaaaatcccctttccattgactcagagattcaggggaatgctgcaaaatgggattgacctgagcactgttgatgtcagctatgttagtagccggtcatggtatttcctcaatttattcggcttgaggggtcttttcagtctgatccttggtgaagaaaacgcaactgatgatgcacagaagatgatgcaaatgggtggtggatttggatttaacccaacaatgagtttgggagcagagaaagacagcctggatatcatgcagcatgactgggctctacctaagatggagcggcacgcagaagatgtgttgaaacagttgctgaagaaatgactcgaacggttgggcttctgggaagcaacactcgcgtcgcgtcttccagtttttgttgaagccagtttggaccaggaattttaccatttctaaatgtattatttataactagctactataacacccttagaaggtggagaccgggtgttgtgatacttaatataagtagaaaaaacgtaattctgttactttattctcctgatatttatgagcatcgtttaagcactcgtgtggtgatttctttct

SEQ ID NO: 104532 - DNA, 2849 bp, Zea Mays
cacggccacagcgaccacgtgacacctctcacagtctcacctcgtcgtcctcgtcccttccgcggccagccaggcagtcaggccggctggccgaggcagccgtgcccacgtgcacgaagcagcgggccgtgacgtggtttggggcgagcaggtgaccggcgagtagaagtagaagtaggctagcaacctgcacgcctacccgtcccacgcacctcccgacttctccggttctcccttcttcatagcagccacccacgcatctcagcgccgaggcgagcgaggacctcgtggttcgtgccctgctcacctcgtgaggatgtggatcgcgagccggctcttcctcgcggcggcggcgctgctgatggctgtgcttctgctcgtcgcggggccggtggcggcgcaggacgcggcggtggagggcgtggccccgcctgcggaggagatcgcggcgaacgcgagggccaaggaggcggcggttctggccgccgagctagtgcagctcagggcgaagatctccgcgttagagtctcgcattgcagagcagaacctggagttcaagaccaagaatgatgcaatcgaaacactgaatatgattgtcaaggaaaagtcacagaagattgctactatgcagaatgaagtaacttccctcgaggccaaagggtctttagctgcagaggagcaggcaagcaaggccaatgcactggctattgagctcaagaagcagaccgagaagctcaagaaggatattacagaacaaaaaattaaaaaagcagctctggaggctagggctggcaatgctgataagaaggtgcaagagctaaatatgaagctggagaagctccagaggacaagcagtgatcaaaagcgcaggattcagaagactgaacatgctcttaaagctgctgaggaggagctgatgaaggctcagttggaaacaacaacaaaagtaaaacagcttagagaggttcatggagcctggttgccaccatggttagcgacacatgcagcccgctctatggaggtgatgtcaaatcactggaatgaacatgggaaacctgcctttgacagcttcttgcagaaggcatctgaaaaaacagtgcagacaaagaaatgggctgagcctcatctggaaactgctaagacaaaatggatgcctgttgctaaagaaaaatgggttaccttgaagaaacatgcaaagccctatgtccaaatggtctcagagaaatcattggaggcttatcaaacatcaagtgactttgtcaggcctcatcttgtaaatgcacatcaagttgttgatccctatttccaggaagccaagaaattatccaagccatatgttgatcaaattgctacagctactaaaccacatgtcgagaaagttagaactgctctcaagccttatactgaaagagcacgacatgtatatggacagtttcttgagacagctactacatatcatcagcaggctcaggcaactatctcggattaccttcaccggcatgagtttacaaaacagtttgtaactaaagagttggtgtggtatctggcttctgctttattggttacacccttctttgttttgtacacactcctaactgaaacattctgtaccaagaagaagaagaaaacacctcggagcagtaataccaaccatggtcataggagacataagcgccggcatgctgacaagtaaaacattgatcaaccatggtcattactttttttataacgatcttggaagcttgaccatttacctttcactgtaaatggtatagacactatcatccgtcatcgccgaaccttgttgtgtatccacgaactagaatacacacaagaaatgtgtttctgccccccatcgtgttgggagagttgtgtttttcatcagagtagggaccgcgagcttaaatctgtgggtgtcatttcataggttatttgttgtagcattgtgcttgagcttgtgtaattcatgattattttgtctcgcgtttgtggatcacttcagccactacattattctacagcttccactcggtgtaaaagttttatcttccacgctgggatgctgtggtttggagaaattctagtaccaagaaaaaccttagttttatatacaagagacatggaaaaggaggtctagactctgttccatcgtaactgcgctgcgtaagcccctaatctaccgcgaatccgcttgatgtttctaaggggaaatccaaatcgaagcaatcggcatgtcccgggcgcttgtcggagaaatttttggcaccattcgtccatcacgtaaccacatatagctcaaaattcaaaggtcgggtttgaagaaaacatacacgtttatcagaaactatcacacggacgagtacaccccatactcttatctagatccctgtatgagctcgatcagtaccaagcctgtttttgttgcacatgacatgcatgctgtcaacctatgctgctccgatctctacaagccaagagcccccaacaaaaaactgaaaaaaaagagaggataatttccagctactgatacaaacaacggactaaattgacacatcaaatcctaccgacctacatgatccatacaccaacattacgtcgttgttacgtttgtcggctgcatgcatgccattgccaagccacgccactactccgatccacagctactagctagacttggtacccgccggcaggccagtacctctccaccagctgctccacgtccaagccctggtaccgggccccggccgccgagtccgcgccgaaccctccgtccgcgccgggcacgatcacgcagccgccgagccccgccgcagccgccgtcgccatctgcttctgctggtggtgttcac

SEQ ID NO: 104533 - DNA, 2834 bp, Zea Mays
cacggccacagcgaccacgtgacacctctcacagtctcacctcgtcgtcctcgtcccttccgcggccagccaggcagtcaggccggctggccgaggcagccgtgcccacgtgcacgaagcagcgggccgtgacgtggtttggggcgagcaggtgaccggcgagtagaagtagaagtaggctagcaacctgcacgcctacccgtcccacgcacctcccgacttctccggttctcccttcttcatagcagccacccacgcatctcagcgccgaggcgagcgaggacctcgtggttcgtgccctgctcacctcgtgaggatgtggatcgcgagccggctcttcctcgcggcggcggcgctgctgatggctgtgcttctgctcgtcgcggggccggtggcggcgcaggacgcggcggtggagggcgtggccccgcctgcggaggagatcgcggcgaacgcgagggccaaggaggcggcggttctggccgccgagctagtgcagctcagggcgaagatctccgcgttagagtctcgcattgcagagcagaacctggagttcaagaccaagaatgatgcaatcgaaacactgaatatgattgtcaaggaaaagtcacagaagattgctactatgcagaatgaagccaaagggtctttagctgcagaggagcaggcaagcaaggccaatgcactggctattgagctcaagaagcagaccgagaagctcaagaaggatattacagaacaaaaaattaaaaaagcagctctggaggctagggctggcaatgctgataagaaggtgcaagagctaaatatgaagctggagaagctccagaggacaagcagtgatcaaaagcgcaggattcagaagactgaacatgctcttaaagctgctgaggaggagctgatgaaggctcagttggaaacaacaacaaaagtaaaacagcttagagaggttcatggagcctggttgccaccatggttagcgacacatgcagcccgctctatggaggtgatgtcaaatcactggaatgaacatgggaaacctgcctttgacagcttcttgcagaaggcatctgaaaaaacagtgcagacaaagaaatgggctgagcctcatctggaaactgctaagacaaaatggatgcctgttgctaaagaaaaatgggttaccttgaagaaacatgcaaagccctatgtccaaatggtctcagagaaatcattggaggcttatcaaacatcaagtgactttgtcaggcctcatcttgtaaatgcacatcaagttgttgatccctatttccaggaagccaagaaattatccaagccatatgttgatcaaattgctacagctactaaaccacatgtcgagaaagttagaactgctctcaagccttatactgaaagagcacgacatgtatatggacagtttcttgagacagctactacatatcatcagcaggctcaggcaactatctcggattaccttcaccggcatgagtttacaaaacagtttgtaactaaagagttggtgtggtatctggcttctgctttattggttacacccttctttgttttgtacacactcctaactgaaacattctgtaccaagaagaagaagaaaacacctcggagcagtaataccaaccatggtcataggagacataagcgccggcatgctgacaagtaaaacattgatcaaccatggtcattactttttttataacgatcttggaagcttgaccatttacctttcactgtaaatggtatagacactatcatccgtcatcgccgaaccttgttgtgtatccacgaactagaatacacacaagaaatgtgtttctgccccccatcgtgttgggagagttgtgtttttcatcagagtagggaccgcgagcttaaatctgtgggtgtcatttcataggttatttgttgtagcattgtgcttgagcttgtgtaattcatgattattttgtctcgcgtttgtggatcacttcagccactacattattctacagcttccactcggtgtaaaagttttatcttccacgctgggatgctgtggtttggagaaattctagtaccaagaaaaaccttagttttatatacaagagacatggaaaaggaggtctagactctgttccatcgtaactgcgctgcgtaagcccctaatctaccgcgaatccgcttgatgtttctaaggggaaatccaaatcgaagcaatcggcatgtcccgggcgcttgtcggagaaatttttggcaccattcgtccatcacgtaaccacatatagctcaaaattcaaaggtcgggtttgaagaaaacatacacgtttatcagaaactatcacacggacgagtacaccccatactcttatctagatccctgtatgagctcgatcagtaccaagcctgtttttgttgcacatgacatgcatgctgtcaacctatgctgctccgatctctacaagccaagagcccccaacaaaaaactgaaaaaaaagagaggataatttccagctactgatacaaacaacggactaaattgacacatcaaatcctaccgacctacatgatccatacaccaacattacgtcgttgttacgtttgtcggctgcatgcatgccattgccaagccacgccactactccgatccacagctactagctagacttggtacccgccggcaggccagtacctctccaccagctgctccacgtccaagccctggtaccgggccccggccgccgagtccgcgccgaaccctccgtccgcgccgggcacgatcacgcagccgccgagccccgccgcagccgccgtcgccatctgcttctgctggtggtgttcac

SEQ ID NO: 104534 - DNA, 2691 bp, Zea Mays
cacggccacagcgaccacgtgacacctctcacagtctcacctcgtcgtcctcgtcccttccgcggccagccaggcagtcaggccggctggccgaggcagccgtgcccacgtgcacgaagcagcgggccgtgacgtggtttggggcgagcaggtgaccggcgagtagaagtagaagtaggctagcaacctgcacgcctacccgtcccacgcacctcccgacttctccggttctcccttcttcatagcagccacccacgcatctcagcgccgaggcgagcgaggacctcgtggttcgtgccctgctcacctcgtgaggatgtggatcgcgagccggctcttcctcgcggcggcggcgctgctgatggctgtgcttctgctcgtcgcggggccggtggcggcgcaggacgcggcggtggagggcgtggccccgcctgcggaggagatcgcggcgaacgcgagggccaaggaggcggcggttctggccgccgagctagtgcagctcagggcgaagatctccgcgttagagtctcgcattgcagagcagaacctggagttcaagaccaagaatgatgcaatcgaaacactgaatatgattgtcaaggaaaagtcacagaagattgctactatgcagaatgaagccaaagggtctttagctgcagaggagcaggcaagcaaggccaatgcactggctattgagctcaagaagcagaccgagaagctcaagaaggatattacagaacaaaaaattaaaaaagcagctctggaggctagggctggcaatgctgataagaaggtgcaagagctaaatatgaagctggagaagctccagaggacaagcagtgatcaaaagcgcaggattcagaagactgaacatgctcttaaagctgctgaggaggagctgatgaaggctcagttggaaacaacaacaaaagtaaaacagcttagagaggttcatggagcctggttgccaccatggttagcgacacatgcagcccgctctatggaggtgatgtcaaatcactggaatgaacatgggaaacctgcctttgacagcttcttgcagaaggcatctgaaaaaacagtgcagacaaagaaatgggctgagcctcatctggaaactgctaagacaaaatggatgcctgttgctaaagaaaaatgggttaccttgaagaaacatgcaaagccctatgtccaaatggtctcagagaaatcattggaggcttatcaaacatcaagtgactttgtcaggcctcatcttgtaaatgcacatcaagttgttgatccctatttccaggaagccaagaaattatccaagccatatgttgatcaaattgctacagctactaaaccacatgtcgagaaagttagaactgctctcaagccttatactgaaagagcacgacatgtatatggacagtttcttgagacagctactacatatcatcagcagtaccaagaagaagaagaaaacacctcggagcagtaataccaaccatggtcataggagacataagcgccggcatgctgacaagtaaaacattgatcaaccatggtcattactttttttataacgatcttggaagcttgaccatttacctttcactgtaaatggtatagacactatcatccgtcatcgccgaaccttgttgtgtatccacgaactagaatacacacaagaaatgtgtttctgccccccatcgtgttgggagagttgtgtttttcatcagagtagggaccgcgagcttaaatctgtgggtgtcatttcataggttatttgttgtagcattgtgcttgagcttgtgtaattcatgattattttgtctcgcgtttgtggatcacttcagccactacattattctacagcttccactcggtgtaaaagttttatcttccacgctgggatgctgtggtttggagaaattctagtaccaagaaaaaccttagttttatatacaagagacatggaaaaggaggtctagactctgttccatcgtaactgcgctgcgtaagcccctaatctaccgcgaatccgcttgatgtttctaaggggaaatccaaatcgaagcaatcggcatgtcccgggcgcttgtcggagaaatttttggcaccattcgtccatcacgtaaccacatatagctcaaaattcaaaggtcgggtttgaagaaaacatacacgtttatcagaaactatcacacggacgagtacaccccatactcttatctagatccctgtatgagctcgatcagtaccaagcctgtttttgttgcacatgacatgcatgctgtcaacctatgctgctccgatctctacaagccaagagcccccaacaaaaaactgaaaaaaaagagaggataatttccagctactgatacaaacaacggactaaattgacacatcaaatcctaccgacctacatgatccatacaccaacattacgtcgttgttacgtttgtcggctgcatgcatgccattgccaagccacgccactactccgatccacagctactagctagacttggtacccgccggcaggccagtacctctccaccagctgctccacgtccaagccctggtaccgggccccggccgccgagtccgcgccgaaccctccgtccgcgccgggcacgatcacgcagccgccgagccccgccgcagccgccgtcgccatctgcttctgctggtggtgttcac

SEQ ID NO: 104535 - DNA, 287 bp, Zea Mays
caaattgtcgttagcagaaatctgcatctggcaaaccaaccctttgacattagtaagattggtttcaatgaatgacccattacttgtgaggcacttcagtggcagaaagtacatggaagctttataccgccatcaatctttccgcagccaaaatttacaatcctccacacgtatggacatgttcctttgaaactgcacacctaaaagggggccaggatgttacattttagttgactgctgtgcacgataggaatgtctgaaatttgttcaaaccgagtcatcgcaaa

SEQ ID NO: 104536 - DNA, 253 bp, Zea Mays
tttgggttgctgataaacctgtaatgtcattcaacgtcagtgtccaaacaacgactaaatcaattaatctattcacatcaaagttgtttgtaagaaacttaggcacacaatcgcttgttgttgacatccttactccgtggccaagatttgttagctaagcattcatatattattcatagcagaactaactggcctataaaattacacatttcacattggccatccacttggaaaattgcagtatgagtagcta

SEQ ID NO: 104537 - DNA, 1432 bp, Zea Mays
atgcccccaatgcattcccctttctccctcggattcacatcggttggcagatttgccacacccaaatcagtagcatgggagaaccgagagctcgccggctgtgcctgcttgctctggtgctcgtgcagtggcaccacgtctcggtggccatgacgttcactatctccaactactgcccccacccgatatggccggggacgctcgccggggccggcacgtcgcagctttccacgacggggttcaagctggagcctgggcagacggcccagctcgcggcgccggcggggtggtcggggcggatatgggcgcggacagggtgcgtgttcgacgcggaaggcgcgggcgtgtgccagacgggcgactgcggcgggcgggtggagtgccgcgggtccggcgccacgccgccggccacgctgttcgaggtcaccctggggcagggcggcggccagctggacttctacgacgtgagcctcgtcgacggctacaacctcccggtcgtcgcgatcccgcgggcgcgccagggcgcgtgcaacgccaccggatgcatggccgacctgaaccgctcgtgcccgacggagctgcaggtggactgcggcggcggcgccatcgcttgccggagcgcgtgcgaggcgttcgggcaggacaggtactgctgcagcggcgcgtacgggacgccggacgcgtgccacccgacggtgtactcgtccatcttcaagtcggcttgcccgcgcgcgtacagctacgcctacgacgacagcaccagcaccttcacctgcaaggccttggactacaccatcgccttctgcctcccgacctccgggataaagaagtcggatgcgatgtttctcggagctcagatggatggccagagcaccggcgatggcagtgccggtgcgccgccgatttacagcaacaatggcggttacaaaccgccgatctacaactacggcggcggaggttctcgttggccggcgacgacaacctcgtccgcgagcagcaaaagatgcatgcagccgtggctcttgctagtgctcgtctccttttctctgaaggcgctcggctgatcttgttcatgcaatgccttctcgagaagagtttgacgaagaaattaatggaagatcgatctgatgactggtgaacatgcatgttagcagttatggcttctggatcgacgaaaagaccgcccgatcgagaggctgaagagggccttttctggcatttagttctgtgccattcgagctgatgagagaaaccggctggctaatagctaagtattggttgggtggtagataagacattagctgatgatctaaacaatagctgattttcagcggctaactgttaggttctagtgaacaaagagaaaaatgttgtatagattcaaacgactttgtaaatcattggttcattttaattgcagtcagattgagat

SEQ ID NO: 104538 - DNA, 1919 bp, Zea Mays
ctaccagttgcagtagggttttagcttaaccgtccaatcccccatggaagtcgtctccaccccggccggcgccggcgccgccgcttcctcgtcctcttcctcctcctcctctaccccttccccctccaccaggcgccctaccaccacgctccgcttgctctgcccctccagccgcgtcgccacactccgcccctcacgggacctccacgtcgaccatccccccgtgggggatgaggccgtgctcgtcatctccgggccggacacccccgccgcggcggtcagggcatgggagcacgtggtgggccacagagtcgagggggacgaggcgatgggaggggaagaggaggagagggaggtgacgggcgccgtgggctgccggatgctggccgctggctggcaggtgggatgcgtcctggggaagggcgggaagacggtagagcggatgaggcaggagtgtggcgcccagatcagggtgttccggaatagggagcagctgcccccatgggcgccgccgggggatgagcttatccatataagtgggagcttttctcaagtacggaaagcactgttagcagtttcaacctgcctccaagataatcctaggccagacacacataatattccgattggaagaccatttgggcttccaggtagtggtactggatgtccccctggcatggatcctcattctcaaagaagttatttaccaccacacatacctgattaccacacaaggaattatccaagtaatgctggcccccctggtcctagattcttttttgaacaagagatagtgttcaggatgataattctgaatgagatggtgggaagcataattggaaaaggtggttccactattcgggcattgcaaagtgaaactggtgcttgtataaagatcttagagccagttgctgattcagatgagcgtgttgttgcgataactgcacgtgagaattctgacatgctgcattctccagcgcaagatgcagttgttcgggtgtactctaggatctcagaggcatctattgatagaagttctcatacacctgcaaggcttctcgttccatcacaacatattggttgcctgctaggaaaaggtggatccattatttcagagatgagaaagattacaggagctaacattcgaattttcgggaatgaacaaattccaagatgcgcacagcgaaatgatgagatggttcaggtcactggtagcttccaatccattcaggatgcattacttcatattactggaaggattagggatgtcatccttcccaagccacaccccagtggaggcatgcctccatatcctcctgttggaaacatcccagttcaccaatcaagacaagaacaacctcctccgcacctccatcccagtgggggtatgccaccataccctatgcatcctttcagacctgatgctcctatgggccactttgaaatgggtgatcatcggccacctcctgtacattcgatggaatatatgggtgctgatagaatgccatacttgtatggtgttgaacaaggaggtcctcgcccttttctagaacagccttcgccaagaacctgccctcctgaggcaccaaggacaaacagtgaagttcccagaaacatgtctgatgcagtgccagctacagatttcagaaagggaccagtggcaattgaaaaccaagtggctacaccaacaggcacaactgaagttatcattccttgcaattatataggctttgtctgtggaaacaatggcagtgaaattgaagaaatagagaagatgtcaggtgcttcaattacagttcatgatcctaaagctggcgacgcaaactcaaaagttgttatatgcggggatccccgaagaaacaaagaaggcacagagcctgattcatgccttcatattctgtggtctgtatcaaacataa

SEQ ID NO: 104539 - DNA, 2201 bp, Zea Mays
ctaccagttgcagtagggttttagcttaaccgtccaatcccccatggaagtcgtctccaccccggccggcgccggcgccgccgcttcctcgtcctcttcctcctcctcctctaccccttccccctccaccaggcgccctaccaccacgctccgcttgctctgcccctccagccgcgtcgccacactccgcccctcacgggacctccacgtcgaccatccccccgtgggggatgaggccgtgctcgtcatctccgggccggacacccccgccgcggcggtcagggcatgggagcacgtggtgggccacagagtcgagggggacgaggcgatgggaggggaagaggaggagagggaggtgacgggcgccgtgggctgccggatgctggccgctggctggcaggtgggatgcgtcctggggaagggcgggaagacggtagagcggatgaggcaggagtgtggcgcccagatcagggtgttccggaatagggagcagctgcccccatgggcgccgccgggggatgagcttatccatataagtgggagcttttctcaagtacggaaagcactgttagcagtttcaacctgcctccaagataatcctaggccagacacacataatattccgattggaagaccatttgggcttccaggtagtggtactggatgtccccctggcatggatcctcattctcaaagaagttatttaccaccacacatacctgattaccacacaaggaattatccaagtaatgctggcccccctggtcctagattcttttttgaacaagagatagtgttcaggatgataattctgaatgagatggtgggaagcataattggaaaaggtggttccactattcgggcattgcaaagtgaaactggtgcttgtataaagatcttagagccagttgctgattcagatgagcgtgttgttgcgataactgcacgtgagaattctgacatgctgcattctccagcgcaagatgcagttgttcgggtgtactctaggatctcagaggcatctattgatagaagttctcatacacctgcaaggcttctcgttccatcacaacatattggttgcctgctaggaaaaggtggatccattatttcagagatgagaaagattacaggagctaacattcgaattttcgggaatgaacaaattccaagatgcgcacagcgaaatgatgagatggttcaggtcactggtagcttccaatccattcaggatgcattacttcatattactggaaggattagggatgtcatccttcccaagccacaccccagtggaggcatgcctccatatcctcctgttggaaacatcccagttcaccaatcaagacaagaacaacctcctccgcacctccatcccagtgggggtatgccaccataccctatgcatcctttcagacctgatgctcctatgggccactttgaaatgggtgatcatcggccacctcctgtacattcgatggaatatatgggtgctgatagaatgccatacttgtatggtgttgaacaaggaggtcctcgcccttttctagaacagccttcgccaagaacctgccctcctgaggcaccaaggacaaacagtgaagttcccagaaacatgtctgatgcagtgccagctacagatttcagaaagggaccagtggcaattgaaaaccaagtggctacaccaacaggcacaactgaagttatcattccttgcaattatataggctttgtctgtggaaacaatggcagtgaaattgaagaaatagagaagatgtcaggtgcttcaattacagttcatgatcctaaagctggcgacgcaaactcaaaagttgttatatgcggggatccccgaagaaacaaagaaggcacagagcctgattcatgccttcatattctgtggtctgtatcaaacataattgatgacttgatcactgtgcagtaccatcgtcgtttatgttcttgaatctagagtagttcccatgggcagatttcagcccttgattggatgtacatgtaccgtcgctaccggggtggatgtaggtagggctgatgcatgccttgtacaaacaacgccgatgtacatttctgtagtcctgtgttttagtttgggggaatggcaccatggaatgtgatgggttggctgcacggacctctgtggaatgtttaaccccatgccatcattggttttcatgatttca

SEQ ID NO: 104540 - DNA, 848 bp, Zea Mays
tttttggacaaattaataaggtggggtattacagggggactgatgtttaccacttatttttagctttagtgttcacaaatgtattctttatgagtttttgacatgtgcagcctaatatggaacggctattttcagagtttatagaatcctgtacttggctgttaccattcccacatagcatttcattccgatttaggggctgtagtggttgaattactttcatggacaggcaccaaggacaaacagtgaagttcccagaaacatgtctgatgcagtgccagctacagatttcagaaagggaccagtggcaattgaaaaccaagtggctacaccaacaggcacaactgaagttatcattccttgcaattatataggctttgtctgtggaaacaatggcagtgaaattgaagaaatagagaagatgtcaggtgcttcaattacagttcatgatcctaaagctggcgacgcaaactcaaaagttgttatatgcggggatccccgaagaaacaaagaaggcacagagcctgattcatgccttcatattctgtggtctgtatcaaacataattgatgacttgatcactgtgcagtaccatcgtcgtttatgttcttgaatctagagtagttcccatgggcagatttcagcccttgattggatgtacatgtaccgtcgctaccggggtggatgtaggtagggctgatgcatgccttgtacaaacaacgccgatgtacatttctgtagtcctgtgttttagtttgggggaatggcaccatggaatgtgatgggttggctgcacggacctctgtggaatgtttaaccccatgccatcattggttttcatgatttca

SEQ ID NO: 104541 - DNA, 505 bp, Zea Mays
atgacgctcgcctccctcgcccgcgccctcggccggatttgtcagcagttagctgactgcggcagtgcggcatcgtcggcagcccttgggaagcccgtcgtggacgagactgtggattggagatacatcctcgccaggccgcagttccgacggctcttctcgaacgacactctaggaagaactacgagaactactaccccaagggtaaaaaggaggtgcagaaaggagatgggagcaaaaagtctgaatcgaagcgtcgagcagatttggaaggttgcagggagtgaagtgtgtgattgcagggaggaacctttacatgaggttcaggtgcagcataggggatgccatggggatgaacatggtctccaaaggtgtacagaacgtgctggactacctccaggctgacttctctgatatggatgtcatcagcatatcaggtttccccatgttataaattcttaaactccgtttgtgaatttgacctgctttgttgtgcatctgactg

SEQ ID NO: 104542 - DNA, 862 bp, Zea Mays
ttgcttgaatgtcatctagatataactgctaagatcaatcaagctctagtttgattctcatatattcatatatggactaatagtaatatggtcaagtcaattcacgattcctcatatcttattcactttggcttgaccaatcctcttaatcacttcaacctctattatgatcatatttatgcatagtgatttctcaggacttgtccatatattcaaaccaatatagagaccatattatatccatttgcattgtctcactggttatttgaccttgtgttgaaccttgttcactgatcattatacactattcaagtatgttcatcatactgaatttcctgttcaacacttagcaaacttgttagacctttaaatgtgttgttatccaaatcaccaaaactcacaaaagggataaatgcactttcaatctccccctttttggtgattgatgacaacacatttaaagcttacataagatttgataaataagattttgaatcctatgatatagtttcctccccctaaatatgtgcatttcagaaaataccaattttgtactcaaatgccaaaagcacatatttgggtcaaagtatggagacaacttatatcatactattcataggatgcagtgcgtcataaaataaacgtgatgctcatgacatagtatgcactaatcaactttctacatcttatgtttttcttatgacttcctttttttaattatttctcccctttttaaagtctacacttagttacataagactaaaggtaagctttaatgcacaacttctccccctttgtcataaatctccaaaaggatacaaagaatataaagggtagaaaatatgattaagcaagatgggaa

SEQ ID NO: 104543 - DNA, 976 bp, Zea Mays
atgtcgacggcggtggcggaggcgcggccgcgctacgggttccccggatccgggaaggggggcagcggcggcggcggcggcgggcatgggaaggaggcggacatggcggcggtcgggaagaggaggagcgacggcttcttcatagaggaggtggcggaggaagaggtgctgaccgatacctcctcggtcggggcgccgtcgccgtcgggctcgtcgatcggtgagaactcgtcgtcggaggccggcggtgacgacgtggacgaggaggtcgagagcaagctcaaggaagatgacgcgctggattgcttggacgcgctcgaggactccttgcccgtgaaggcctctcgagcttctactccggcaagtccaggtcgttcaccagcctcgccgaggccacgtcgacggtggcggcggccaaggagctggcgaagccggagaacccgttcaacaagcggcgccgcatcctggccaactggtccaggcgagcctcctgcagctcgctggccacggccgcctacctgcccccgctcctgggccccgaccacgccgtcgccgagggggacgagggcgaggaggacgactccgactccgacgacgtggagtgcagccagctgccgccgccgcaccgcggaaagaacgtccgggacgcgcgggcactgccaccccttagactcggcggtgctgggatgcggcggaggaacgggccgaatggcggcctcgggagcttcagatccccgaggtccttctcgctgtccgatctccacagcagcgctgagggggagtagtgattagcagccgcagatctgcttccagctctggcctcctctcttggccaccaccagtagagatgtagtagtagccacttactatatggttccggtgtataagatccaagtctgttgtgttcatcctcctggcttccgtttctttgacctcacaagtcacaagaagtgcatcgactgacctaacaaatact

SEQ ID NO: 104544 - DNA, 980 bp, Zea Mays
atgtcgacggcggtggcggaggcgcggccgcgctacgggttccccggatccgggaaggggggcagcggcggcggcggcggcgggcatgggaaggaggcggacatggcggcggtcgggaagaggaggagcgacggcttcttcatagaggaggtggcggaggaagaggtgctgaccgatacctcctcggtcggggcgccgtcgccgtcgggctcgtcgatcggtgagaactcgtcgtcggaggccggcggtgacgacgtggacgaggaggtcgagagcaagctcaaggaagatgacgcgctggattgcttggacgcgctcgaggactccttgcccgtgaagaagggcctctcgagcttctactccggcaagtccaggtcgttcaccagcctcgccgaggccacgtcgacggtggcggcggccaaggagctggcgaagccggagaacccgttcaacaagcggcgccgcatcctggccaactggtccaggcgagcctcctgcagctcgctggccacggccgcctacctgcccccgctcctgggccccgaccacgccgtcgccgagggggacgagggcgaggaggacgactccgactccgacgacgtggagtgcagccagctgccgccgccgcaccgcggaaagaacgtccgggacgcgcgggcactgccaccccttagactcggcggtgctgggatgcggcggaggaacgggccgaatggcggcctcgggagcttcagatccccgaggtccttctcgctgtccgatctccacagcagcgctgagggggagtagtgattagcagccgcagatctgcttccagctctggcctcctctcttggccaccaccagtagagatgtagtagtagccacttactatatggttccggtgtataagatccaagtctgttgtgttcatcctcctggcttccgtttctttgacctcacaagtcacaagaagtgcatcgactgacctaacaaatact

SEQ ID NO: 104545 - DNA, 725 bp, Zea Mays
gcaaaatgggatcttttttttattcaaaaggatgattttttgggggcctattaactggaaacgctttaaatttggttggtcaggaagggcctctcgagcttctactccggcaagtccaggtcgttcaccagcctcgccgaggccacgtcgacggtggcggcggccaaggagctggcgaagccggagaacccgttcaacaagcggcgccgcatcctggccaactggtccaggcgagcctcctgcagctcgctggccacggccgcctacctgcccccgctcctgggccccgaccacgccgtcgccgagggggacgagggcgaggaggacgactccgactccgacgacgtggagtgcagccagctgccgccgccgcaccgcggaaagaacgtccgggacgcgcgggcactgccaccccttagactcggcggtgctgggatgcggcggaggaacgggccgaatggcggcctcgggagcttcagatccccgaggtccttctcgctgtccgatctccacagcagcgctgagggggagtagtgattagcagccgcagatctgcttccagctctggcctcctctcttggccaccaccagtagagatgtagtagtagccacttactatatggttccggtgtataagatccaagtctgttgtgttcatcctcctggcttccgtttctttgacctcacaagtcacaagaagtgcatcgactgacctaacaaatact

SEQ ID NO: 104546 - DNA, 846 bp, Zea Mays
atggcgtcacccgtcgacgaggatctccccgggttgccgcccatcaagactacacctctgccgcccccggtgccgtcgtccgccacggccacgtcctcggcctcggcctcggcctcgtcctctccgtcgccggcgtcgtcggcggtggacagcgcgaaggccgcggaggaagaggatcgcgagccgtcgacgccgacgtcggaggggagcaggctgcggtcgcccgccgtgtgcccgccggcgccgcgcaagccgccggccccgcggctgcccgccaagcggaagccgccgcccgcgcccgtgcgggtgttcgtcgccgtcccgcgcgacctctccaccgtcttccggtcgctgtcccccaagaagcggatccgggtatcgtgatgccgcgatcgatccggccgtgatttgcctttgccaccggctttcctccaggctcggtcgatttcttggagagttcttccgagttcttggcttcttcttcttccggtcttccccctcgatcttttcttttctctcctctggtttactgctcctgctgcccacgggccacggccatggtataaattaaattatagtttttgttataaataacgtgtgtgttctttgagtattcgttcttttttctccttcttcttctttcttttgttgtgctagcgtgaggcagaagttgcagctctagaaatgaattgctgttactgaatggaagcagttcaaagaaacagaaaagctgtagcggaaattcacagagatcttgtaaattatgatacctgccagaactatctatcataatctgagttttgcttgctgccgaatctgtaaaattgtctgggaaattcagccatt

SEQ ID NO: 104547 - DNA, 141 bp, Zea Mays
atggggtccaggcacagtgcttgctctgccgaggctgggtgccgagattctttcgttttgcttttgttagtcacccctcttcggggagaggtactgtgtttatcaaactggagaaacctaacgggcggctatgacctctag

SEQ ID NO: 104548 - DNA, 246 bp, Zea Mays
accaggttgcctttggtgcaatctatgctcaggtaaataagaaggcgtcgaggcagttctccaggagttccaggacttcgacgagttcgaggattaggctagcgacctcccccagtcagctgcctgtggtgggtttatttacattggctacgtttcgattctgtgtactttgattcatattatgtaaatgactctagtctttaatatcatcatttattctttattgttattcgaagcattgtgcta

SEQ ID NO: 104549 - DNA, 3999 bp, Zea Mays
atggagccggacgacgaggcgctgaaggtggcgcgcggcccgccgcaccagcgccgcgggatctcctacagccagccactgacgcgggacgccgcgtccgcgcgccgcgccgcgctgcgcaagcacagcctcgacgacgagcacattctgcctgcctcccactccctcaactacccgctccaccacgatccctcgggcatggtgcccatggtctaccaccctccgctcccgccccaccagcaccaccccagcgcttcctactcctccaatacccgacgctcggccggcggcctcagcgagggctccatgacgctcgagcgcgccatgtcagagtacggcggtggccatggctccctcccggagttcgtcggcgcggggggcggcaagggcatcttccgtgtgccgcttcgcgccgccatgcacccgggccgtccgcccccgcttgaggtacggccccacccgctccgcgagacgcaggcgggctccttcctccgctcgctagccgccgagccgcagcgccgccagctctgggccggggccgagtccgggattagggtgtggtcgctcgacgaggttttcgccgagtggggcgccggcgcgcgccgcggcgacgaggagagtgcgcccttccgcgagggcatgcccgcgccgcccgcgctgtgcgtcgtcgtagacagggccaaccgcctgctgtggacagggcataaggacgggaggatccgatcgtggcgcatggacctcgacgcggccgccacggctcctgcgcccccggccgctggtgccggcgacggcggcgggagcgttggagggagtagtcacggcggggcaagcaataatgcgccagtgttcagggaagccctcacgtggcaggcctatggccggacgcccgtgctctccatggtcgtcacttcgtatggtgagatatggtcgggttccgagggtggaatgataaaggtgtggccttacgatgccattgccaagtccctgtcattgtcaccagaagagaaacatatggcggctttgttggttgagagagcctacatcgacctgaggaaccattgcacagttggtaatgtttgctcattgcccgcttctgatgttaagtacatgctagcggatcattcccgggcgaaagtttggaccgtgactagcatgacatttgcactctgggatgctcgtacaagggagttgctgaaagtatttgggatggatggccaagttgactcagcaaagctagagacacctgtcatgccagagcaacctatggaggaagagatcaatcctaatcctaaagcaaaaccttcgaagaaggacaagtcacaaggttctttgaacttcttccaaaaatctaggaatgctttaataggagcagccgatgcggtgcgcagggttgcaacaaaggggacatttgtcgaagataaccgcagaacaggagcggtggctcaagcaatggatggaacaatctggtcaggatgcacgaatggcgccattattctgtgggatggaaatgggaatagagtgcaagaattccatcatcatacttcttctgtgcagtgcataaaggcacttggagaaagggtgtgggtgggatatgccagtggcatgattcaagtcatggatgctgaaggtaactttattgcaggatggactggacatagctgtccagttataaggatggcaattggtggttcttacatttacacactggctcatcatggtggtattcggggatggccactaacttctccgggaccccttgacgatattatccgaactgaattgtctaacaaagagctgtcatacactagaatggagaagataaacataatggtagggagttggaatgtagcacaagggaaagcatctgctgagtcactaagatcatggttgggtagtgtagcatctgatgttgggttggttgttgttggattacaagaggttgagatgggtgcagggtttcttgccatttctgctgcaaaagaaacagtagggcttgagggcagcgcgaatgggcaatggtggatagacaatattggcaaagcgcttgatgagggaacatcattccaccgagttggttctaggcagttggctgcattgcttattgctgcatgggcaagaaagagcctaaaaccatatgttggagatgttgaagctgctgcagtgccgtgtggtcttggacgtgctattggcaataagggtggcgtaggattgagaataagggtatatgatcgtaaaatgtgttttgtgagtaatcactttgctgcacatctggaagctgtgagcagacgcaatgctgactttgaccacatttatcggacaatggctttcaacaaacctcatggatcgacagcttctgctacatctgtccaattgcacagaacagtgaatgtcaatggaaatcaggttgaagaagtgaggcctgacctagcagaagctgatatgattgtatttcttggtgatttcaactaccgtctttatggtatcacatatgatgaagcaagggacatggtttcacaaagaagcttcgattggctaagagagaaggatcagcttcgagcagaaatgaaagctggaaaggtattccaaggaatgcgtgaaggtataatcaaatttcctccaacatacaaatttcaaaagcaccaaccaggtcttggaggttatgattcgggtgagaagaagcggatacctgcttggtgcgatagggtactatatcgtgatagccgttctgtatcagtagctgaatgctcgttagagtgccctgtagttgcttcaatcacatcgtatgtggcatgcatggatgtcacagagagtgaccataaacctgtgaggtgtacattcagtgttgatattgctagagttgacgagttaataagaaggcaagagtatggagaaataattgaatcgaatggaaaagtacgctctttgttccatgatgcttgttttgttccagacactacagttagcataagcgaaatcacactggaaaatcaagagaatattgtattccaaattacgaataaatgcgaaacaagcaaagcagctttcgagatcctatgtgacgggcagtcaaccaagaaggaggatggaactaaatcagagcttcttcctagggcatcctttggcttcccactttggctcgaggtccaaccagccgtcggtctgataaaaccaggtgaaacggtggaaattacactacatcatgaagatttttacacgcaggaagaattcgtagacggaataccacagaactggtggtgcgaagacaccagggacaaggaagctgttctcagaataaatataacaggcagcagctcaaccgaaaccaagacgcacaccatcaacgtccaacatcgctgcccaccatcatcggcgccaccgccgatgatgaaccaaccggtagccaccgtgcctccgagcaatgtccttgccagcgaggggcactcgaagcgctcctccaagaagagccagtccaagcaccgggaacagcaacaacagcagcaggattacccgcagtttgggagctcggaggtacatgacctgtgccgcatgcggtgcccttgagacctgtacaagctactcctacatcacttcaaaggagtatggatactgaagttgtgtctatgaggtgggaattacgagttttaggtttctcacatcgaatccaagtcccggagggccccgcagaagggagagagaagcctgggagaggagttgctccggctctgtacatatgcttcactcgatcagctgcctctcatgtagcccaagcaaagagtctagagtcctgagatgacagtgctaataacttgttgttttattcttgttccttgttaagggctgttgtctagatagttgaagccaaggatatttgaacaatgcttgatgtaatatgttccatagaattaccttaggtttgttctctcttcacgcagcagttctaatgatcttgtacttcttgactgttgccattcttaataagaaaccgtccagtcatttgat

SEQ ID NO: 104550 - DNA, 1453 bp, Zea Mays
accaaccctagggttctcacggcgccataagagcctctcctctctccccggccgcccgctgccgctgcttgcgcctctctcgcccgcatcgccgcagggttcgcaaagatggcagtgccgctgctgacgcagaagatcgtgaagaagcgggtcaagcagttcaagaggccacacctcgaccgctacaagtgcctcaagccaagctggcgtaggcccaagggtatcgactcccgcgtcaggcggaagttcaagggatgcaccttgatgcccaacattggatacggctctgacaagaagacgaggcactaccttcccaacaagttcaagaagtttgtcgttcacaacgtctctgagctggagctgctgttgatgcacaacagcaggacatactgtgccgagattgcccacaacgtgtccacccggaagcgcaaggagatcgtcgaacgtgctgcgcaactggacatcgtggtcaccaacaagcttgccaggctccgcagccaggaggacgagtgaaatggccattatttccggttgtgatccgctggtgtgcaagatgttgctgagatccgagattcattctctgccatttttttatgcttatgttagacttttccaatggacaaaattctgttataagcggaagagtgatggcgaggaccatctagtttttgaccggacatcatgaagtatatgcagccttgtgcatgtaatggatctgatggtaatgaatctgtggctccgaagctacatgcatttttctgaggcgcaaatgttggcctgttcaaatgtagcctaatttattagttttcactaaccctagattctttctcttgatcaaaaagaaattctgtcctctcgagctccatcttagtgatcggtccgctagttcacgcaaattcgaagaagttatcacggacgagccacatgcagagaaacttgcacgtgtggttctggccgggctttccttcggtatctaataaccttgcagaatcggtatctaataaccttttctgctcgccgctggcgcatctctcctaactcttgcccttgcccatttattctggaataattttttaggagtactatttactttacttacaaacaatccagcgaaaattcagtttgggacgaatagaacagactatatcgagccaagagtattttcattactattgaaaatgatggataggtaaatccacaatcaatcatgtcctttaagtcgcatgttgctttctaccacatcgttttaaacgaagttttaccataacattcctctaatttcattgcaaaatggtatcaagaattgatccaatatggatggaatcatgaatagtcattgcttttgtatactaattcaaacctgttatctatggagaaaattggataaaagaaataagtatttatcggggaacactatgcaaagatacaatttatttaaacccatattctataa

SEQ ID NO: 104551 - DNA, 1450 bp, Zea Mays
accaaccctagggttctcacggcgccataagagcctctcctctctccccggccgcccgctgccgctgcttgcgcctctctcgcccgcatcgccgcagggttcgcaaagatggcagtgccgctgctgacgcagaagatcgtgaagaagcgggtcaagcagttcaagaggccacacctcgaccgctacaagtgcctcaagccaagctggcgtaggcccaagggtatcgactcccgcgtcaggcggaagttcaagggatgcaccttgatgcccaacattggatacggctctgacaagaagacgaggcactaccttcccaacaagttcaagaagtttgtcgttcacaacgtctctgagctggagctgctgttgatgcacaacaggacatactgtgccgagattgcccacaacgtgtccacccggaagcgcaaggagatcgtcgaacgtgctgcgcaactggacatcgtggtcaccaacaagcttgccaggctccgcagccaggaggacgagtgaaatggccattatttccggttgtgatccgctggtgtgcaagatgttgctgagatccgagattcattctctgccatttttttatgcttatgttagacttttccaatggacaaaattctgttataagcggaagagtgatggcgaggaccatctagtttttgaccggacatcatgaagtatatgcagccttgtgcatgtaatggatctgatggtaatgaatctgtggctccgaagctacatgcatttttctgaggcgcaaatgttggcctgttcaaatgtagcctaatttattagttttcactaaccctagattctttctcttgatcaaaaagaaattctgtcctctcgagctccatcttagtgatcggtccgctagttcacgcaaattcgaagaagttatcacggacgagccacatgcagagaaacttgcacgtgtggttctggccgggctttccttcggtatctaataaccttgcagaatcggtatctaataaccttttctgctcgccgctggcgcatctctcctaactcttgcccttgcccatttattctggaataattttttaggagtactatttactttacttacaaacaatccagcgaaaattcagtttgggacgaatagaacagactatatcgagccaagagtattttcattactattgaaaatgatggataggtaaatccacaatcaatcatgtcctttaagtcgcatgttgctttctaccacatcgttttaaacgaagttttaccataacattcctctaatttcattgcaaaatggtatcaagaattgatccaatatggatggaatcatgaatagtcattgcttttgtatactaattcaaacctgttatctatggagaaaattggataaaagaaataagtatttatcggggaacactatgcaaagatacaatttatttaaacccatattctataa

SEQ ID NO: 104552 - DNA, 525 bp, Zea Mays
atggacgtagtctttgggcggttcgactgccggcttcgagctcttccccttgcccttcttctgcgctttgacttcaaccaaggcgtcgctcgccgccgcctcctcctcctcttccttcggcttcaccggactgtcgctggcacccactactctgcacctcttcccgtccggacccttggcctccgcaacctgcaaaccaatatcgagaatggcggcaccggcacgtcaagaaccagcaagctaaattcaaagcacagtccactgcgcacagtcgtttcgtttccgcaccttgctcaagcaggcctccttgccaccggcggaccccgtgggcggcgccttgcgtttcctggcattgccgtagtccctagcgcgcgcccacgctgggtcggacaccgacgacccctccggagacccgccgccacaccctgcctccgcgggcaccccgaagaggcccccgccgccgccgccgcgtagcgtgtcgaggaacccggcgtccagcgcggcgaagctgagtgcaggggcgga

SEQ ID NO: 104553 - DNA, 803 bp, Zea Mays
gacatagcattagtgccaggattggttattgtttccaactgaacattatctgatcctactactaataatcttggtgatgcttcaggcatggtatgaagaatattctatcttccataaaaccttctacatttcttgagcatgtagactctgattctggttccaaaattaccaggcggggttcctgaagggttgaagcattcaagcagccaatcatcgcagtattgtcggcgtttcgaccccggggggtccctggactgacgagtaaattgtcgccgcgtgtcccagcccagatgggtcggcgccagacggagcacgaaggggggaaaaagggaggcaggcgaaaggggaaacccgcggccttcgtgttgtcctgcgcccaggtcgggtgcgcttgcagtagggggttacaagcgtccgcgtgggagagagcgagggactttacgcgtcgtcccgttctcccgcgcgaccaaccttctcgtacgagagccctggaccttccttttataggcgtaaggagagggcccaggtgtacaatgggagatgtagcagtgtgctaacgtgtctagcagagaggagctagagccctaaatacatgccgtcgtggcagccgaagaggttttggcaccctgttcatgtgatgtcgcggccgtcggaggagcgctggagccttgcggaaggacagctgtcggggctgtcgagtccttgctgacgtctccttgcttccgtaaggggctgagagccgccgtcatcatggagcacgcggggcgccatcattatttgtttaccggggtgagccagatggg

SEQ ID NO: 104554 - DNA, 1366 bp, Zea Mays
ggcactgtggcgtgccgctgtcaggcggagcataccgccgtgcggtgcagatccgggccacgtccttccgccgcgccggtcaaacagggctgctgcgggcgctcgcggctttataaagagcagaaaccttctgtaacccaaactcagcatccagactagagtactcccggtgccatctcctccatctccctattcctcctcagctcctggaccagacatggccgcaccttccggcacgatgcgcgccgtgcagtacgacagatacggcggaggagcacaggggctcaagcatgtggaggtgccgatcccgtcgccgaagaaaggcgaggtgctcatcaggatggaggccaccagcatcaacgtcgtcgactggaagttccagaacggcttcgcgcggcccttcatgcccaggaggttccctttcatctctggttacgatctagcaggagaggtcgtagagttgggtgctggagtgagcagcttcaaaccaggggataaggtgatcgccatcaacttcccgaacggcggagggctcgccgagtacgcggtcgcgtcagcgtctcgtacagtcgcaaggccgccggaggtgtcggccgtcgaaggtgtctgcgtgccgatcgccgcagtcaccgcgctccggtcgctgcggacagccggggtcacagtcacactggacgacccggctcgcgcccccgccacgcccaagaacgtgctggtcaccgcggcctccggcgccgtcggccacttcgccgtgcagctcgccaggatgggcggccacaacgtcacggccacctgcggcgcgcgcaacctcggcctggtccggagcctcggcgccgacgaggcgctggactacaagacccccgagggcgccaggctgcggagcccctccggcaggaagtacgacgcggtggtgcactgcgccgcgaaggggctcccgtggtccgtgttcaggcccgtgctcgccgcctcgggtacggtcgtcgacatcacgccagggttcgtggccgtcgtcaccgcgatcctccaggtggcgaccttctccaagaagaggctggtgccgctcatggtgacgcccaacaaggaggagatggagctgctgctgggcatgctgaagcagggtaggctcaagacggtcatagattcccagcacccgctgggcagcgctcacgaaggctgggccaagagcatgagcggccacaccaccggcaaggtcgtcatagagatcggagccgcgcaaccataataatagtgcagcagtatattgattcaaaaaataattatgtaatttttagatctagaatttctatattttttgttcatgaattatgtatttttatttaaaatttatgaatcgtgtatttttttt

SEQ ID NO: 104555 - DNA, 623 bp, Zea Mays
atgtgattatcagcgtccctgccaagtggggcagccgagcaagcaagcccacttcaggcgagtccatgaggaccatgaccacgaggcggaccagcccaagcccatgaacgcgaaaacaaaccctagccacgaggtcggcagtcggctcctcgaccggacgacgtggctgcgaatctgcaggaggaggaagaggtgaaatggtgaaggccgcgacgtggctcctcgatcggctcctctacgtactcaagcaggacaagggcaacgacgccaacaccgcgcgtgaccgacggcgaaggaggcgtgctccggccggtggcgccgccaacgccgttggaaacgatgatggcgaggagcagcacctcaacacctttctcgacgctgcgaatgcgtcgtccgcctcctcaagggtgcagttcaggaatatggcgtcgcgcgcgcggtgggtggaggaagccggcgctgcggaggtggtggagaacaggggcaagctgtggctgaccaccggtgtcactcgggccggcaagctgtactacaacgttgaggagaccgggtacgcgtacgccgactgtttgatgaactgtctgtatctgtgcagcgtttgattgtactggcccgatagcctt

SEQ ID NO: 104556 - DNA, 1270 bp, Zea Mays
atgtgattatcagcgtccctgccaagtggggcagccgagcaagcaagcccacttcaggcgagtccatgaggaccatgaccacgaggcggaccagcccaagcccatgaacgcgaaaacaaaccctagccacgaggtcggcagtcggctcctcgaccggacgacgtggctgcgaatctgcaggaggaggaagaggtgaaatggtgaaggccgcgacgtggctcctcgatcggctcctctacgtactcaagcaggacaagggcaacgacgccaacaccgcgcgtgaccgacggcgaaggaggcgtgctccggccggtggcgccgccaacgccgttggaaacgatgatggcgaggagcagcacctcaacacctttctcgacgctgcgaatgcgtcgtccgcctcctcaagggtgcagttcaggtgcgtgcttcgtttctcttgcagatgctttgctttttttctgtccgtgttggctcgtcctggtgggattgtgaccacgctgggttctgcggatctcggaacaggaatatggcgtcgcgcgcgcggtgggtggaggaagccggcgctgcggaggtggtggagaacaggggcaagctgtggctgaccaccggtgtcactcgggccggcaagctgtactacaacgttgaggagaccgggttcttggccgaaatgggtgccttgattcttctcaatgataaggatgagacgataggaattgaagatatctatgggaagcttgctggaggaaattatgggtgctcctgggataccttccaggcatataagcacttgaaatcacttggatatattgttggaagatttggtgttccctggacaatgaagcatggtggtactcatcacaccattgctccccagatcaatatacttgagactgatcagagcttaaatagagttgacggagcctccaatgacataaccaaattgctcaaggaaatacagattgacgggatatgtccatcttttgaagtttatctgccaaatagcaagttcaaaaagtcatccccagggtgccctagtttcctcttatgtctattaaggtaatagtagtcctttatcgactcagttaattttatgatcatagatccaatgcagtttcatttttctgcaattcatcttctgttgatctttcagtattttagtgtagggtaactaggtctatcttctaatcagggttttctttaattgtgtaattgtctgtctgtaaatatgaactcatatacaatgttagtacaatatcttcttgattggaac

SEQ ID NO: 104557 - DNA, 1839 bp, Zea Mays
atgtgattatcagcgtccctgccaagtggggcagccgagcaagcaagcccacttcaggcgagtccatgaggaccatgaccacgaggcggaccagcccaagcccatgaacgcgaaaacaaaccctagccacgaggtcggcagtcggctcctcgaccggacgacgtggctgcgaatctgcaggaggaggaagaggtgaaatggtgaaggccgcgacgtggctcctcgatcggctcctctacgtactcaagcaggacaagggcaacgacgccaacaccgcgcgtgaccgacggcgaaggaggcgtgctccggccggtggcgccgccaacgccgttggaaacgatgatggcgaggagcagcacctcaacacctttctcgacgctgcgaatgcgtcgtccgcctcctcaagggtgcagttcaggaatatggcgtcgcgcgcgcggtgggtggaggaagccggcgctgcggaggtggtggagaacaggggcaagctgtggctgaccaccggtgtcactcgggccggcaagctgtactacaacgttgaggagaccgggttcttggccgaaatgggtgccttgattcttctcaatgataaggatgagacgataggaattgaagatatctatgggaagcttgctggaggaaattatgggtgctcctgggataccttccaggcatataagcacttgaaatcacttggatatattgttggaagatttggtgttccctggacaatgaagcatggtggtactcatcacaccattgctccccagatcaatatacttgagactgatcagagcttaaatagagttgacggagcctccaatgacataaccaaattgctcaaggaaatacagattgacgggatatgtccatcttttgaagtttatctgccaaatagcaagttcaaaaagtcatccccagggtgccctagtttcctcttatgtctattaaggggtaaaccgccctcaagggttgaattggaagcagtggaaaataatttcagaggcattcctctgaagtatgctcatgtggataatggacgggtcagctttctctcctttgatgaagttacactccccagcttgccctgatgggtagcagcagaacatgtgaagtgataaatagtgtgtttggtttgaggaatgaagtgatccatcttcttctcactcctcacttttttatttggtttgtggaatagaatgggttgatctatcatcactccatttctcataagctaataattagtatatacatgatgagtgggttgattccaccaaaattgatggaatgaacttatgatgcatcatctcatgaaacatagagtgactccataaaccaaacgcaccaaaagggtctgagcttcagaacaatcttgtcagaaatgataaagggtctcagcttcagaacagtgtcttgagatgcattcgccgcaagcgcagggggggcaaagtatttcagtactaacttttgaacatactaaagtatggaattccctggagtctcacaatccagcgatctgttgtacactccagattgtatgttggaaggagaaatcatgtctagtcttcttgttcgtctctgatgattttgtttctgaggctgcacctgtgactttcggatttccaactgcaacaaatgctactctcttcctagttcctagcctcaggcttcaggtgctcgcgagtactgagggtgtcaggcactgaacaaacaccgctttcactttctagttgcctccccgtctgagaatctccggcatcattgcagtagatcattttatctggttgctccgctagagcaacgtctggttggcgagttcgctccttttagacttttcat

SEQ ID NO: 104558 - DNA, 1905 bp, Zea Mays
gcaagcaagcccacttcaggcgagtccatgaggaccatgaccacgaggcggaccagcccaagcccatgaacgcgaaaacaaaccctagccacgaggtcggcagtcggctcctcgaccggacgacgtggctgcgaatctgcaggaggaggaagaggtgaaatggtgaaggccgcgacgtggctcctcgatcggctcctctacgtactcaagcaggacaagggcaacgacgccaacaccgcgcgtgaccgacggcgaaggaggcgtgctccggccggtggcgccgccaacgccgttggaaacgatgatggcgaggagcagcacctcaacacctttctcgacgctgcgaatgcgtcgtccgcctcctcaagggtgcagttcaggtgcgtgcttcgtttctcttgcagatgctttgctttttttctgtccgtgttggctcgtcctggtgggattgtgaccacgctgggttctgcggatctcggaacaggaatatggcgtcgcgcgcgcggtgggtggaggaagccggcgctgcggaggtggtggagaacaggggcaagctgtggctgaccaccggtgtcactcgggccggcaagctgtactacaacgttgaggagaccgggttcttggccgaaatgggtgccttgattcttctcaatgataaggatgagacgataggaattgaagatatctatgggaagcttgctggaggaaattatgggtgctcctgggataccttccaggcatataagcacttgaaatcacttggatatattgttggaagatttggtgttccctggacaatgaagcatggtggtactcatcacaccattgctccccagatcaatatacttgagactgatcagagcttaaatagagttgacggagcctccaatgacataaccaaattgctcaaggaaatacagattgacgggatatgtccatcttttgaagtttatctgccaaatagcaagttcaaaaagtcatccccagggtgccctagtttcctcttatgtctattaaggggtaaaccgccctcaagggttgaattggaagcagtggaaaataatttcagaggcattcctctgaagtatgctcatgtggataatggacgggtcagctttctctcctttgatgaagttacactccccagcttgccctgatgggtagcagcagaacatgtgaagtgataaatagtgtgtttggtttgaggaatgaagtgatccatcttcttctcactcctcacttttttatttggtttgtggaatagaatgggttgatctatcatcactccatttctcataagctaataattagtatatacatgatgagtgggttgattccaccaaaattgatggaatgaacttatgatgcatcatctcatgaaacatagagtgactccataaaccaaacgcaccaaaagggtctgagcttcagaacaatcttgtcagaaatgataaagggtctcagcttcagaacagtgtcttgagatgcattcgccgcaagcgcagggggggcaaagtatttcagtactaacttttgaacatactaaagtatggaattccctggagtctcacaatccagcgatctgttgtacactccagattgtatgttggaaggagaaatcatgtctagtcttcttgttcgtctctgatgattttgtttctgaggctgcacctgtgactttcggatttccaactgcaacaaatgctactctcttcctagttcctagcctcaggcttcaggtgctcgcgagtactgagggtgtcaggcactgaacaaacaccgctttcactttctagttgcctccccgtctgagaatctccggcatcattgcagtagatcattttatctggttgctccgctagagcaacgtctggttggcgagttcgctccttttagacttttcat

SEQ ID NO: 104559 - DNA, 202 bp, Zea Mays
ctccctctaggcgactttcacgaccactactcactcgctgctgtggaagtctggcaggggtttcgcccggtttgccaacatcagggacgaccgcggcgccatgccgctacacctcgccgccatgcaaggccgccccgcctacatgcaggtgctgctggagaacgacgccattgtctccgttctcacaggctcctacaggtag

SEQ ID NO: 104560 - DNA, 573 bp, Zea Mays
acgctgttatctacgctgtctgacaagtcatctggccactcccttactgaccaattaactcgcatggctgagaatgactatctacttagcggtggccttgaaggtattggttctactggaaagaagtgtgaagtcgctcgccgaagaaatggtttagataccaacaagcgaaagaaagcaaaaaaagggcaacctgatgcaatagatggtgggccaacaggaagagagttgaatatcggacaagcaagtttccattcagaaccgagcaacgcttcaaaccagttcatcccagaccaattgatgcagggacattatgtgcttgaccacaatttcgggccaggtagctcgcagaaccttcacgacaatctgaaccaattcgatcaggcttcctcggctcctaccttgcaacagcagccgtttaccgggaatggtcaactgacccagggatatcctggtgatatgcatgcgttgcagtttgtggagccaaccccccagattgaccatcagaatggcgatgagggtcagtcgtcaataccagtgtgggattttctttgagctgcctgcctctagcac

SEQ ID NO: 104561 - DNA, 315 bp, Zea Mays
atgcccagcagggcgctgacgttcagtcagttgggcgccgcgacggacgggctcagctcgcagaacctgctcggagaaggcggcttcggacgggtgtacaaagggctcctcgaggacaccgaagaggaggacgctgccagccggccggggatcagtgacgtcgtcgtggcgctctccttcctcgccgacccacaatactaccatcccgaaggcacgggagctgagcacaagagcacacatagtgggacagataatgatagcagtcctcctagggctgaaatggtcagggcagacgacgacatgaagcatagatga

SEQ ID NO: 104562 - DNA, 499 bp, Zea Mays
gaagcagagccccccacggcgcgagctcgcaagcatacctggaggagattggcgattgtctcgacggtggccgtcttgttgatacccacctcgtagcagcgcacgatgaaactctccttgtaagagagcccgtcctccaggaggctccccagtcgcagccgctcggccaggctgggccgcgcgtcacccccttccgccttagccgccaccgccgtggcagctgcgtggtccggcgacgccgcctcgatcccggatacctgcggcgcaccccgcgtgcaccgcaccaccaccccgggtgcgggagacgactcccaccttccgtggtggcggagcggcgcgcggccgcattgcggtggcgcgtgacagcgcagcatgtgggagagcgggcgcgtcgtttcgaggaggctcgttgcccggccgccgccgcagccgacgacgacgacgatgcgcggttggagttttacacgggcggagcggactggggttggcggcttggcgc

SEQ ID NO: 104563 - DNA, 171 bp, Zea Mays
atggtcgccttgcatttaatgcgggctgagggcttgcttccatgtagggatggcaatgggtacggtgggcgggcgggtaatgggtatccactggatagcggatacccggcgggtacgggtatggatacagatccatacccacgaacgtttatgggtacgggtatgggttga

SEQ ID NO: 104564 - DNA, 1140 bp, Zea Mays
atggcggtgcggatccatggcgcccaccggagacctctcccttggcccttcaacactggatccctcggtatggcgccggagacggcgcccttcccaccttccccaccggatccggcgcccgctctatctcgaatgaaggcagtgatggagaccttcccaccttccccaccaggatgcgcgcacggaaacaagcaggtgaagggtttcatgtttgaaaaaccggttgatctgaaagtaggtgtgaaccatgtcgtattgttgtcatcaactatgggaatgaaggatagtggtggtgaacttgctgaagtaaagggcggcattcaggagtgcctaatccaaggtctcaacactgaaagcggtgttgatcagcttgttgaaatcatcaaggttctgggcacacccacacgtgaagaaattaagtgcatgaatccaaattataccgagtttaaattcccgcaaatcaaagctcacccgtggcataagatattccataaaaggatgcctgctgaagcagtagatcttgtgtccaggcttctgcagtactcaccaaaacttcgatcgactgctttggaagcattggtccatccgttctttgatgaactttgggatccaaacacccgcttaccgaatggtcgttttcttccgcctctcttcaattttaagccccatgagctgaagaacgtgccggcggatttcatggtgaaattgatccctgagcatgcacggaagcaatgtgccttcgtaggatggtgatctctggataagaggatgacggctcgatgattagctgaggaccaagttaatgtctgttagaaactgccggagatcgacattgccagatgtggtgtggtataagataggcaatatgtgtgattatttttttgttcgaggttatcaacccccttgccctagaaaagatgagaagatgttgatgtaacaagccctctgtgtttctgtaagtagatgagtgttgctgcatgccccctgggtacatgtatcggtttgagcagaattctgtttgcctgaatcgtgccatcaccacgcagggatccatcccttgtgtgacgatgttcagcacttcagcccaacatttgtttatggattcaggctattcgttcatttgtactcctcgcatcctat

SEQ ID NO: 104565 - DNA, 715 bp, Zea Mays
atcgttcacacgcgcaaacgccgggagccaccgcgatgtcgcccaagccggcgaagccgacacccgccaccgagttcgagtactgcgagctgtgccgccatcaccacgaccatggccggcgccatcgctacatcgtcaagcacaggagaaatctcgacgccgcgctcacctgcttccgctccaagctctccgacctccgccgcgccttcctccccggctccccctcttcccagccgccgcggacccgtctctggtgccccttctgctccattgacctcgtcgacctcgacagccgctccgctggtaacaatgccatttaccatatggcaagcagtgagcacctgaagggtgtgaaggatttcctgtggaagcacgggggacggatggatcaggtggtctcgcttaggatttcagaggatgtgcttgccaagtgggagaaaggccctgaatgcttgagcacaggaacgaagaaggggactgaagagctgattggaccatctctgaagcagataaaagatatccaaaatgaatatgcatgtgacagtttggatagttttgcacaaaacaatatcccatcttttagtaacactgcatcatatgttgttatgcctttacaaaattctaccaatggggcatatggctctattagtacagcgtgtcatggagcttccagttctggaagtgcttcacattctgctccatatggaactgtcgg

SEQ ID NO: 104566 - DNA, 1611 bp, Zea Mays
atcgttcacacgcgcaaacgccgggagccaccgcgatgtcgcccaagccggcgaagccgacacccgccaccgagttcgagtactgcgagctgtgccgccatcaccacgaccatggccggcgccatcgctacatcgtcaagcacaggagaaatctcgacgccgcgctcacctgcttccgctccaagctctccgacctccgccgcgccttcctccccggctccccctcttcccagccgccgcggacccgtctctggtgccccttctgctccattgacctcgtcgacctcgacagccgctccgctggtaacaatgccatttaccatatggcaagcagtgagcacctgaagggtgtgaaggatttcctgtggaagcacgggggacggatggatcaggtggtctcgcttaggatttcagaggatgtgcttgccaagtgggagaaaggccctgaatgcttgagcacaggaacgaagaaggggactgaagagctgattggaccatctctgaagcagataaaagcaatggggcatatggctctattagtacagcgtgtcatggagcttccagttctggaagtgcttcacattctgctccatatggaactgtcggcctgcccatcacaccttggggatcggccgaaacacataagctgcagggtgcactgtctacaaactggtttcacagcagtggtactgaaacaaaaggccatcagtctactgtctttgtgaatggcgcaagccaatcactttcttgttctgatcatatgttacctttgcgggttcaacaaagtcacactggaggaaatttgagcaatggctcaaaagcaaatgtgcatacgggtgctcctcctccctggttaaaagctaacgaacacgatccaaagaatttgtcactcaaaagctgtggtctttcttcccggaaagggaaattgaggaaactcaatccaaacagggttggtgctgcatgggcagaaagaagaagagctgagatggaaatggagaagcaaggtgaaattgttccagcaacatctgattctagttggctgcctaattttggtagtgtctggcaatctggcacaaggaaggaatcaaggaaagaatttgagaaaagccacaagattcatgacacgaagagcgaccatgacttatccttggagataaaaccatatatcagcaaacggatgcgtgtaggtgctgagaaagcttctgacaaagctgaagagcttggcagccacctaccgcagtaaacagatgtacaacccggtggatgtcgtcgcgtgggcgtctctgcggaaaaagccgccagggcgcgcggcttgattagcgattggtttggtttccatgtcaggtcgcgcctgggaagcccgccgcgagtacggaatgccaagccagtagtagtttttgttctcggcacgaagccatttgatgttcgttttgtgcgacggtttgcggcttgatcgcgattggcctcgtagcctttttgaccgaacgagagaagcagcagctctgcaaagctacctccaggttcattcgagacggtaggctgggagggatagcgtcattgcggccaatggttttcggttcttttccacttgtgcacgacgtcataaacccg

SEQ ID NO: 104567 - DNA, 2275 bp, Zea Mays
gactgcccagcgccccagttcctggctggccggctggctgtggcctgtggctgtgcctggtctcctcttcctcggtggtggcggtggcggtggacggtggtgctgctggtggtgttgcgctgcttgttcggttgttcctcactttcacttcctttttcctccacggctcccgtcacctaagcagcagctgcagcagcatatcccccgcacaccactcgcttcttcgccatcacccggtggctagctcttgcagcagctcatctcatctctacctctggctggcagtttatttctctcctccctatcagcataagctcagctcagctcagctcagcccagctccctgctgatctgcggcatttgacctgcctcccgtgcttgaaagcttgattggttcgttctgtgcgcggtggtggcccggggcaaataactccccttggtgcctggttggctcgttgccaccctccccgcggcagaagcggcctataggatgagagggacgggggaggaacccaacaaaaccggccgcgacactgtcctgaccgtggaagacacgcacacagagctccagctctgcactgcactggccgacggggaaacggtggagctcgcgcggtgttccattcatggattgggatctcaagatgccggtctcctgggacctgcccgacctggagcacgacgccatgccgccgccgccgcccgtctccgcggcttccaccgcggcggcgtcgggcattgccgccgcagctgccgcgccttcctccgcgacggcgccgagccgggcggagtgctccgtcgacctcaagctcggcgggctaggcgagttcggggcggcggacggcacggccacgaaggagccggcggctgcaaccgcagctccgtccgccagcccgatgaagcgcccgcgcttggggcccggcggcgccggcggggcgcagtgcccgtcgtgcgcggtggacggctgcaaggccgacctgagcaagtgccgcgactaccaccgccgccacaaggtctgcgaggcgcactccaagacgcccgtcgtcgtcgtcgccggccgcgagatgcgcttctgccagcagtgcagcaggtttcacttgctcctagagtttgatgaggccaagcgcagttgtagaaagaggcttgacgggcacaaccggcgccgcaggaagccgcagccagataccatgaactctgggagctttatgacaagtcaacaaggcttgttttcgagtgcagggacaaggttctcgtcgttcccggctccaaggccggagccaagctggtctggagtcatcaaatccgaggacagctcatactacacacaccacccggtgctcagcaacaggccgcacgtcgccggcacctccacgtcgccggcctactccaaggaaggccggcgcttcccgttcctccaggacggcgaccaagtcagcttcagcgcatcaggcgccgggacgctcgaggtctccacggtgtgccagcccctcctcaagacgaccgccgccgtggccccgccgccgcccgagagcagcaagatgctcgcccccgtgctggactcggattgtgctctctctcttctgtcatcccccgccaactcttccagcgtcgacgtgagccggatggtccagcccgcggagcgcatccccatggcgcagcccctcgtccccggcctccagcaccaccagttcggcggctccccggtgccggactggttcgccggctccggcgccgtccctgccgcgggcaccggcgggttcgcctgcccccacagcgtggagagcgagcagttcaacacagtcctagtgccgagctccgacggcggccacgagatgaactaccacggcatattccacgtcggcggcgagggctcctccgacgggacgtccccttcgctcccgttctcgtggcagtagcttaccgttgaagcgggcagtgttatgatcggtcagctgtatagcggtggtcatcacaccagttccctcttctttccgtgtttatttattctctgctccctcacgcactcccccgtgtcacttgctagtttcttagttttgcatgcctgatgcatgtagcctgaaaaaactctatcaaattagtgccagatttcctagttcccgtttgtttcattttattttgagaattggaatcttactaatgatttcctagttcccgtttgtttcattttattttgagaattggaatcttattaatgtaataggctattttttagaatgtgacattccaccactttacaaagttattgtataagcct

SEQ ID NO: 104568 - DNA, 1035 bp, Zea Mays
actttgaatttgaattgtttattacgggcattacgcattaccctggagtgtggactttaatttgttcataagatcatcccggctcctgagagattcgttctatctgattttccttggaattttcgtgatcttggtttcacttgctcctagagtttgatgaggccaagcgcagttgtagaaagaggcttgacgggcacaaccggcgccgcaggaagccgcagccagataccatgaactctgggagctttatgacaagtcaacaagggacaaggttctcgtcgttcccggctccaaggccggagccaagctggtctggagtcatcaaatccgaggacagctcatactacacacaccacccggtgctcagcaacaggccgcacgtcgccggcacctccacgtcgccggcctactccaaggaaggccggcgcttcccgttcctccaggacggcgaccaagtcagcttcagcgcatcagttcggcggctccccggtgccggactggttcgccggctccggcgccgtccctgccgcgggcaccggcgggttcgcctgcccccacagcgtggagagcgagcagttcaacacagtcctagtgccgagctccgacggcggccacgagatgaactaccacggcatattccacgtcggcggcgagggctcctccgacgggacgtccccttcgctcccgttctcgtggcagtagcttaccgttgaagcgggcagtgttatgatcggtcagctgtatagcggtggtcatcacaccagttccctcttctttccgtgtttatttattctctgctccctcacgcactcccccgtgtcacttgctagtttcttagttttgcatgcctgatgcatgtagcctgaaaaaactctatcaaattagtgccagatttcctagttcccgtttgtttcattttattttgagaattggaatcttactaatgatttcctagttcccgtttgtttcattttattttgagaattggaatcttattaatgtaataggctattttttagaatgtgacattccacc

SEQ ID NO: 104569 - DNA, 718 bp, Zea Mays
ccaccaccttaccggaaatggcaattgcgggacgcgcccccaatcactcaccacccctttcgtctcgcccttttaacccaatcccctctccacgactctccacccatctcctgagtcctgcctgcgctcgcctcagctcctttcttccccgccccttggcttttgcttggttgcatcgggccggtcgagccggagaggaaaagctagctagcagctaccagctctcggccggcggtggtagtctgcctgcagctggggttagctgcaagggttgggagctagccatggggaggggtcgggtggagctgaagcggatcgagaacaagatcaaccgccaggtcaccttcgccaagcgccgcaacggcctgctcaagaaggcgtacgagctctccgtgctctgcgacgccgaagtcgcgctcatcatcttctccaaccgcggcaagctctacgagttctgcagcggacagagcattaccaaaacacttgagaggtatgaaaaaaacagttatggaggaccagatactgctgtacagaacaaggagaacgagttagtccagagcagtcgtaatgagtacctcaagctgaaagcgagggtggataatttacagaggactcagaggaatttgcttggtgaagatctggggtcacttggtgtcaaagagcttgagcagcttgagaagcaacttgattcatccttaaggcacataagatccacaag

SEQ ID NO: 104570 - DNA, 1616 bp, Zea Mays
ccaccaccttaccggaaatggcaattgcgggacgcgcccccaatcactcaccacccctttcgtctcgcccttttaacccaatcccctctccacgactctccacccatctcctgagtcctgcctgcgctcgcctcagctcctttcttccccgccccttggcttttgcttggttgcatcgggccggtcgagccggagaggaaaagctagctagcagctaccagctctcggccggcggtggtagtctgcctgcagctggggttagctgcaagggttgggagctagccatggggaggggtcgggtggagctgaagcggatcgagaacaagatcaaccgccaggtcaccttcgccaagcgccgcaacggcctgctcaagaaggcgtacgagctctccgtgctctgcgacgccgaagtcgcgctcatcatcttctccaaccgcggcaagctctacgagttctgcagcggacagagcattaccaaaacacttgagaggtatgaaaaaaacagttatggaggaccagatactgctgtacagaacaaggagaacgagttagtccagagcagtcgtaatgagtacctcaagctgaaagcgagggtggataatttacagaggactcagaggaatttgcttggtgaagatctggggtcacttggtgtcaaagagcttgagcagcttgagaagcaacttgattcatccttaaggcacataagatccacaaggacacaacatatgcttgatcagctcactgatcttcagaggagggagcaaatgctgtgtgaagcaaataagtgccttagaagaaagctggaggagaccagcaaccaggtgcatggccaagtgtgggagcacggtgccaacttactcggctacgagaggcactctcctcaacagcaggccccatcacatgttggcaatggtttgttctttcatcccctggaagctgcagcagagccaaccctgcagatcgggttcgctcctgagcatatgaataacttcatgccaacatggctaccctgaagatggatcttgaggcaaaggaaataaataaagatgcggtggcagcatcatactctatgcaagctaagagtgacagctgtgtttcagtcacatatatgatctagtctgtgtgtcaatgtgtcgaaaaacatgtctgtgattttgttatatgaatgtaacgcgcaatgaaacatacaggactagctgcttgcttgacgatgcgtttgcgtgtatccgtataaattaaaggctataagccacatcgtatatgcgtactgcacatgcgtgcattatctaaagggcgtgattgaaagcctgcatagattctaggttaggttccacgggtgcaggtagcgtaatgtttggatgcctgtattggtctttggaccaagctggattcatggaactagaaaaaaaatataaaatattttgacttttttgaaatttaaacccactctcgatctatatagattcagagcaaaacgaaagtcataaaatagacgtgggatcagggttgagtgtatctagtgagccaggttgagttggtgcaggcacacaaatcaagaaagcgttttatttatattttttgttatatccttttaattgatatatctaattaat

SEQ ID NO: 104571 - DNA, 745 bp, Zea Mays
accccatctaaaaaaggccgcaaggcaaagagaaaacgaaacgcgaagcaaacccttttcggcgtccggcgtccccatccccaccccaccaggccaccacggcgggatgaggccggcgtcggacgcgcaccagtcgcggctgctctacgagctctgcgcgctcctgctgaccgtcctccgggcgtcgcctgacgacggggcggtggcgcggccgctgctgccgcgacatgtgacgcccgccggggtggcgtccatgctgctgggggcgtccatggcgctgatgctctgcggctcggtcaccttcatgctcggcttcttcctcatgccctgggttgtcgggctcggtttcctcttcctcttcgtcggcttcatcaccaacctctccgggatctggagggacatcatcctctggccctccgtcgcgtgctccgcatcggactcacccaaggaggcaccctccccatggcatatgttttccaagccttcatccatgtcgacgtgaagccaagtacaaagtaaggctcccacggaggtccacagaagcagggagttgttggagcagcagccattgccaacctatattttccttcctggacaacccttcttttacatgtgacaccgcagcaagttgccaagttttaaatggttttgtactgtgtctaggaggatacgggatacttgcttgtacatacggaaaagaaggtcgcgtctaaacatcacgtgcagcttataattgtttcagaaa

SEQ ID NO: 104572 - DNA, 2993 bp, Zea Mays
cgggcgcagggcacacggctagagcctaaaagggagggagggggaggcgcgcgagccgccaggacctgagagcggctgctgctggcgaatcgacctcctgggcccgggaagagattgggtactgtagagagaccgggtagagatagagaggccaggatgagagtggcggtggtaggcgccggcgtgagcgggctggcggcggcgcacgagctggcgaggagcggcggctcccgggtgaccgtgtacgagaaggaggactacctcggtgggcacgccaggaccgtggccgtcgaggacgccgacgccgccagcaccgtgcagctcgacctcggcttcatggtcttcaaccgggtaacatacccaaacatgctggagtggtttgaagggctcggtgtagagatggagatatccgacatgtccttctcagtgagcacggaattgggggccagcggcagcagatgcgagtggggcagccgcaatggcatctcaggactcttggcacagaaaagcaatgcactcagccctagtttctggcgcatgattcgggagatactcaagttcaagaacgatgctctcaggtacttggaggaccatgaaaacaaccctgatatggaccggaatgagactctcgggcaattcattcggtctcatggatattcacagttcttccaagaggcttaccttaccccgatctgtgcgtgtatatggtcatgcccatcgcaaggagtgttgggattctctgctttctttgtgctctctttctgccgtaaccatcatcttcttcagttgttcggtcgcccccagtggctcaccgtgaagggtcgttcgcactcctatgtacacaaggtaagggaggagttggaaagtatgggttgccaaattaaaaccagctgtgaaatcaaatctgtttcaagttctgagggaggtttcagggttacagtgtttgatggttcagaggagacgtatgacagaatcatatttggtgtccatgcacctgatgctctaaagattctaggagctgaagcaacacatgaagaattgaggatcctaggagcttttcagtacgtctacagtgatatatacctccactccgataaaagtttgatgccacggagtttgtctgcttggagttcctggaacttcctggggacgacaagcaagggggtttgtgtaacctactggctaaatctgcttcagaacatagaatctacaagcagaccttttctggtgacgctgaatcctcctcatgtcccagaccacgtctttcttaaatggtacactagccaccctgtcccatctgtggctgccgcaaaggcttctcttgagcttcatcacattcaaggaaacagaggaatttggttttgtggggcataccaaggttatggtttccatgaagatggactcaaggctgggaaagctgcagctcaagatttgcttggtaaggagagtgaccttttggtgaacccaaaacagatgatcccatcgtggtctgaggctggggcgcgtcttctggtaacaagatttcttggtcaatatgtgtctgtcggcaacttggtcttgcttgaagaaggaggcactatgttcagttttggtgaagtaggcaaaaaatgccatgtgaaatctgtcctgcgagtacatgaccccatgttttactggaaggttgcaactgaagcagaccttggcttggcagatgcctacattaacggttatttctcatttgtagacaagagagaaggtcttctaaatcttttcctgattctcattgcgaacagggacgcaaacaagagtagtagcagcgctgctggtaaaaggggttggtggacacccctgctattgacagctggggttgcctccgctaaatacttcctgcgtcacatagcaaggaggaattctgtctcacaaacacgtcaaaacatctctcaacactatgatctgagtaatgaattcttctctcttttcctggatccatcgatgacttactcttgtgccatcttcaagacggaggatcaaagcttagaggcagcccagctacagaaagtttgcctcctaatcgataaggctaaagtggagcgagatcaccatgttcttgagattggctgtggttggggcagcttagcaatccaattggtgaagcaaactggttgcaaatacactgggatcacattatcagtggagcaattgaaatatgcacagagaaaggtgaaagaagctggattagaggaccacataagcttcatgttgtgtgattaccgtcaaataccaactcagcgcaaatacgacaggatcatctcttgcgagatgatcgaaggtgttgggcacgaatacatggacgatttcttcggctgctgcgagtcccttttggctcaagacggcatatttgtcctgcagttcatctcaatcccagaagaacggtatgaggaatacaggcgcagctcagacttcatcaaggaatacatcttccctgggggttgcctgccttcgttagcccggatcacgtctgccatgtctgcagcatcaaggctctgcatcgagcaccttgagaatattgggtaccattactacccaacgctgatacagtggagggacaacttcatggccaataaggatgcaattttggccctgggcttcgatgagaaattcatccgtatatgggaatactacttcatatactgcgccgctggtttcaagtcacggacacttgggaactaccagattgtgttttctcgccctggcaacgacaaattaggtgacagcggtatacactccttaagcaagctttctggcagctaataatgcgaggatctatatatatgtggtggtagctggatcagtcggagcctacacacctgaacttgagcctttttatttgtgatcgaattggacacgcagtgctgtgtacacgtcgctaactaactgtacttgcagcggcggatcattccattgcttcgatccaatttgacgtttcatcactttctgtttctgttggcgcaacg

SEQ ID NO: 104573 - DNA, 300 bp, Zea Mays
atggcattaaagggattaaaatttaaatttgatggcatcaaaagcgacggcgaggcgcggcttgtggggaagggaataggaggcggcgcccgcagtggcatgtggatggagatagggcccgcgaacggagggagcggagcggctaaggttctcccgcgggaggcggtcgacgggagccaggtgaccgccacggtcatggccatggcgattggcgagggggcagagagggcctgtgcggtgcgccggtgcccgaaggtcagaacggacgggaaaggagccgaacggatgggatacggctga

SEQ ID NO: 104574 - DNA, 2083 bp, Zea Mays
aatgcgacctctgggaaacatccatgttggaatcgagcggagaggagagggagaaagggacggcctctgagtctctgaccggctgacgggctctgggcgagtgtgatcgatccagcatactccttacaaagcaccataaatgccccattaataccagaaggtgtctgtgcccatctccctccacccacctcttctctcaagcagcgagcgtactcatcagtccaatacaaatagagagagaaacgctcaacatgatagagagagaaaggggagggaggggcagataaagaacactgcaccatttgatttgtgtgctcctgcagtctacaccctcacttgctttcaaacgtgcacctcccctcttcttcttcttcctcctcccctcatctccttccaacaacgccataaccacagcttccctctcctcctctctcttgttgcacgaatatgacgccataaccacagcttccccgtgaacgacaaggagaagcagagagtgctacataggtacatgtagggtactataggataagaactatacagctaggaggtagcggagggaggagcacgccgccagcagtagggatgtacaagaaccagctccaagaactggcgcagaggagctgcttcagcctgccgtcgtacgtgtgcacgcgcgagggccctgaccacgcgccacgcttccgggcggccgtcaccttcaacggcgagaccttcgagggccccagcggctgcaccacgctccgccaggccgagcacgccgctgccgaagtcgccctcgcccgcctctccctccgcggcccgtccactaccctcgccgcccgggtcctcgatgagacgggggtgtacaagaacctgctgcaggagacggcccaccgggcggggctgaagctgccggcgtacaccacggtgcgatcgggcccgggccactcgccggtgttctcctccaccgtcgagctcgccggcttgagcttcgcgggcgaccccgccaggaccaagaagcaggcggagaagaacgccgccatggccgcctggtcctcgctcaaacagagtacgtcatcggcccaatcccgaaaacacaaaccttgcgcatatctttacgcgtcacggggcatcattaatggcccccgccatggtctttgcagtgccggaggctcgcaaggagcccggcgccggcgacgagcaggagcacgtggctgtcgccagagctctcgcggcgctgaagccgcgagacggcggcgacggaaaggcggcgccgcctctgcagaagcacagcagcaacggctcttcttcctccgctcttccgaacccgtcgctgtacagacaccaatggcggcctcggaccagtacccctgcccaagcccaacccctgccgccgaggacgggggccctgcccctgcagccgccggccggcccaaggatcctgcccccactgcatctgctacaacggccggcgtgcggctccagggacgccgcggcggcagagctggtgcggatgctggagcgcgccatggtgcgcgaccgggaggcaacgccgccttcgccgtgctactacgcggcgcctgccgcctcggcgtaccgccacggcagcgcgccgaggaccttcgccgcgggcgggttccacgccccggctgtgagcgtgcggtcggtgatcccggtgtgcgccgccccgccgccgcagaccccggtcaaggaggaaaggaatggcccggcgacaccctcaggcgcatgcaagagggcgtgagcgacgtggtcagcttgtgaagcgcagcaagagaagaagaaagaaagagcctggctctgttgttgcaggggagttttggatcacaactttctctgtagtctgtacagaagttgtgtacgaggtcaactactacgcatctccctcgctctctgtgtgtgtttgaccaggatctagatggtgagatcttcgtcagaaaggcagccatggccatgatgaggctgtgaagggttttaggtggacgatgaacatatatgaatatatagttgtactgttctagggcttcagtagaagccatgctaccgtgttaacaagcgcatcgtatcatcccttcggctcggc

SEQ ID NO: 104575 - DNA, 2079 bp, Zea Mays
aatgcgacctctgggaaacatccatgttggaatcgagcggagaggagagggagaaagggacggcctctgagtctctgaccggctgacgggctctgggcgagtgtgatcgatccagcatactccttacaaagcaccataaatgccccattaataccagaaggtgtctgtgcccatctccctccacccacctcttctctcaagcagcgagcgtactcatcagtccaatacaaatagagagagaaacgctcaacatgatagagagagaaaggggagggaggggcagataaagaacactgcaccatttgatttgtgtgctcctgcagtctacaccctcacttgctttcaaacgtgcacctcccctcttcttcttcttcctcctcccctcatctccttccaacaacgccataaccacagcttccctctcctcctctctcttgttgcacgaatatgacgccataaccacagcttccccgtgaacgacaaggagaagcagagagtgctacataggtacatgtagggtactataggataagaactatacagctaggaggtagcggagggaggagcacgccgccagcagtagggatgtacaagaaccagctccaagaactggcgcagaggagctgcttcagcctgccgtcgtacgtgtgcacgcgcgagggccctgaccacgcgccacgcttccgggcggccgtcaccttcaacggcgagaccttcgagggccccagcggctgcaccacgctccgccaggccgagcacgccgctgccgaagtcgccctcgcccgcctctccctccgcggcccgtccactaccctcgccgcccgggtcctcgatgagacgggggtgtacaagaacctgctgcaggagacggcccaccgggcggggctgaagctgccggcgtacaccacggtgcgatcgggcccgggccactcgccggtgttctcctccaccgtcgagctcgccggcttgagcttcgcgggcgaccccgccaggaccaagaagcaggcggagaagaacgccgccatggccgcctggtcctcgctcaaacagatgccggaggctcgcaaggagcccggcgccggcgacgagcaggagcacgtggctgtcgccagagctctcgcggcgctgaagccgcgagacggcggcgacggaaaggcggcgccgcctctgcagaagcacagcagcaacggctcttcttcctccgctcttccgaacccgtcgctgtacagacaccaatggcggcctcggaccagtacccctgcccaagcccaacccctgccgccgaggacgggggccctgcccctgcagccgccggccggcccaaggatcctgcccccactgcatctgctacaacggccggcgtgcggctccagggacgccgcggcggcagagctggtgcggatgctggagcgcgccatggtgcgcgaccgggaggcaacgccgccttcgccgtgctactacgcggcgcctgccgcctcggcgtaccgccacggcagcgcgccgaggaccttcgccgcgggcgggttccacgccccggctgtgagcgtgcggtcggtgatcccggtgtgcgccgccccgccgccgcagaccccggtcaaggaggaaaggaatggcccggcgacaccctcaggcgcatgcaagagggcgtgagcgacgtggtcagcttgtgaagcgcagcaagagaagaagaaagaaagagcctggctctgttgttgcaggggagttttggatcacaactttctctgtagtctgtacagaagttgtgtacgaggtcaactactacgcatctccctcgctctctgtgtgtgtttgaccaggatctagatggtgagatcttcgtcagaaaggcagccatggccatgatgaggctgtgaagggttttaggtggacgatgaacatatatgaatatatagttgtactgttctagggcttcagtagaagccatgctaccgtgttaacaagcgcatcgtatcatcccttcggctcggcaatctgcctgcctgcacacagatcttgaactctttcttggcttgtacaaaaaaaaaagaacacctcatatacataaataaatctttcctg

SEQ ID NO: 104576 - DNA, 110 bp, Zea Mays
ggtgcttagatggaaactaaaatattttatgcatttattttaacactaatcgaatgttatttagtctacaataacatatccactggatacccgatggacacggatacagg

SEQ ID NO: 104577 - DNA, 1329 bp, Zea Mays
gccttttcttctccactccactcatcacaaatctctctctctctctctacaagctccagctagactgtcctgctctgcttcggcgctactgtgcagtgtgcacagccagccagctctgcagcagagcagagtccggctgtgagccctgaccagagaggattcagtgccatggagagacctgcgcaggcgcccacgcagctgccgccggggttccggttccaccccaccgacgaggagctggtagtgctgtacctccgccggaaggccctggctcgcccgctgccggccgccgtcatccccgtcgtccacgacgtcgccgggctcgatccatgggacctccctggggcaagcgaaggggagggttacttctttagcctgcggcgagcgccggcgaccggccgtggcagccgcaggaggagagctgggagcgggtactggaaggccacgggcaaggaggagccggtgttcctgcagtgcggcggcggcggcgtaggcggcaagaggcagctgctcgtgggcggcaagacggcgctcgccttccaccgcagtgagccgtcgccgccgtcgtcgtcgcggacaggctgggtcatgcacgagtaccggctcgccgccgcgtcccgcggcgtggccgagcagaggaagaagaatgcgagccacggttgttgcgatgctgagccgggagagtgggtcgtgtgccgggtctttctgaagaagggagcaagaagaagcaggccgggccgggatggtaaccacagcagagctctgagacaccgcgcatccgctgcgccgccgcagctccgggaaggtgtgggaggacggcagccgttgctgttcccggcgccacagtcgccgtcctcaagctgtgtcaccggcgttaccgacttgtcagacgaagaagacgaagtcagcagcggcagcataacaagagtttgcacctcagagagaggcctgatggggattttaagtgttccctcccccctctctcatggtcccgtagcccaacctttttctggtaccatacaatgatgatgagttaagcacgagataatcaggtttaggcatgtccagcgcaggagtgatcccgaaatatcatatcaaatggatctggcaacctgagtttaaatcaggagcaatagtttctacgcttcatctgtgaagcagcatccactttgatttggaactagaaaatgggcgctgcaacctgcaacggcccgatggtgtgtaaaatctaaaaacgtagccaggcattctttaagatgtactatctccatcctaaaatataatttattttagactaaatatatttttattttaaaaattaaaaaaaaa

SEQ ID NO: 104578 - DNA, 1870 bp, Zea Mays
ctccaacggtgttggaccgcgggccgcggcccgcctagtaggccaacgtcgtgcgcatgctctcagtaaaatcacaccacgcgggggctttacctgcaaaaagcgcgcaaataaaaatctcacgcaggagacaaatccagtaatccacactttccttcgcctcctccatcgtggtcgcggccaaggccaacgaaccaattcctctaccattcctcctccctcctttcctgccattctcccatcccggcagggcgtctcctcctcctccctccctcctttccatcccgtttcttcgccgcctccatctccaggccgcgtcgaattcttccatccaccgcaccggtcgacgacgacgacgaggatgctgggcgcagcgaggaggcagcttggatccggtcccatgctgggacaggttttgcgaagactccgaccagcggtggcggctgaggtggcgaggggctactccgccgcggcgaaggagatgactgtccgtgatgcattgaactctgcattggatgaagagatgtctgctgatccttccgtttttctgatgggagaagaggttggagagtaccaaggtgcatacaagatttctaagggcttgcttgataggtatggtcctgatagggttcttgacacgcctatcacagaggctggttttactggcattggtgttggtgcagcttatcatggtcttcggcctattatagagtttatgacatttaatttctcgatgcaggctattgatcatatcatcaattcagctgccaagtcaaattatatgtcagctggtcagatatctgttcctattgtttttagaggaccaaacggagctgctgctggagttggtgctcaacactcacagtgttatgcagcttggtttgcacatgttccaggacttaaggttctcacaccatactcttcagaagatgcccgaggcttgctcaaagctgctatcagggaccctgatcctgttattttcctggaaaatgaattgctttatggagaatctttcccagtttctgctgaagtgcttgattctagtttttgcctaccgattggcaaagctaagatagaacgtgagggtaaagatgttaccattactgcgttctccaagatggttggctatgctctccaggctgcagagatactgtccaaggaaggaatcagtgctgaggtgatcaaccttcgatcaatcagaccacttgatagagctgctattaatgcatctgtcaggaaaaccaaccgattggtgactgttgaagaagggttcccccaacatgggattggtgccgagatatggttctctctagcccttaccctctcacacatttgtgtggtatctattattctaacacatgtttgttgcagcatgtctgttgtagaagaaagcttcgcgtaccttgatgcaccagttgagaggattgctggagctgatgtacctatgccctatgctgccaaccttgagagaatggctgttccgcaggtcgatgacattgtgcgggcggcaaagcgggcctgctacagggcagtaccaatggcagcagctgcctgattggtggacaagcctttctgttttccttccatcggttttcgctctctagccagaaacatgtagtattcataaggcgcaggcaaattggccggaacccagactccaagcgagctaattttgtagatctgccatggtgtgctttgtcccgttagtcgatatatgtggcgttatttctagattcaagtccatttgcttctctatgatttttgtacaccgctaaataatcttcttaagcccctgaatgaatgcaaaatatttaagatgttttaggaaaatactatggttttgtgaaataccttggtttaggagtaacat

SEQ ID NO: 104579 - DNA, 2088 bp, Zea Mays
ctccaacggtgttggaccgcgggccgcggcccgcctagtaggccaacgtcgtgcgcatgctctcagtaaaatcacaccacgcgggggctttacctgcaaaaagcgcgcaaataaaaatctcacgcaggagacaaatccagtaatccacactttccttcgcctcctccatcgtggtcgcggccaaggccaacgaaccaattcctctaccattcctcctccctcctttcctgccattctcccatcccggcagggcgtctcctcctcctccctccctcctttccatcccgtttcttcgccgcctccatctccaggccgcgtcgaattcttccatccaccgcaccggtcgacgacgacgacgaggatgctgggcgcagcgaggaggcagcttggatccggtcccatgctgggacaggttttgcgaagactccgaccagcggtggcggctgaggtggcgaggggctactccgccgcggcgaaggagatgactgtccgtgatgcattgaactctgcattggatgaagagatgtctgctgatccttccgtttttctgatgggagaagaggttggagagtaccaaggtgcatacaagatttctaagggcttgcttgataggtatggtcctgatagggttcttgacacgcctatcacagaggctggttttactggcattggtgttggtgcagcttatcatggtcttcggcctattatagagtttatgacatttaatttctcgatgcaggctattgatcatatcatcaattcagctgccaagtcaaattatatgtcagctggtcagatatctgttcctattgtttttagaggaccaaacggagctgctgctggagttggtgctcaacactcacagtgttatgcagcttggtttgcacatgttccaggacttaaggttctcacaccatactcttcagaagatgcccgaggcttgctcaaagctgctatcagggaccctgatcctgttattttcctggaaaatgaattgctttatggagaatctttcccagtttctgctgaagtgcttgattctagtttttgcctaccgattggcaaagctaagatagaacgtgagggtaaagatgttaccattactgcgttctccaagatggttggctatgctctccaggctgcagagatactgtccaaggaaggaatcagtgctgaggtgatcaaccttcgatcaatcagaccacttgatagagctgctattaatgcatctgtcaggaaaaccaaccgattggtgactgttgaagaagggttcccccaacatgggattggtgccgagatatgcatgtctgttgtagaagaaagcttcgcgtaccttgatgcaccagttgagaggattgctggagctgatgtacctatgccctatgctgccaaccttgagagaatggctgttccgcaggtcgatgacattgtgcgggcggcaaagcgggcctgctacagggcagtaccaatggcagcagctgcctgattggtggacaagcctttctgttttccttccatcggttttcgctctctagccagaaacatgtagtattcataaggcgcaggcaaattggccggaacccagactccaagcgagctaattttgtagatctgccatggtgtgctttgtcccgttagtcgatatatgtggcgttatttctagattcaagtccatttgcttctctatgatttttgtacaccgctaaataatcttcttaagcccctgaatgaatgcaaaatatttaagatgttttaggaaaatactatggttttgtgaaataccttggtttaggagtaacatgaaggcgctcaaagtgaaatcactaagctaatagatgacttgataattttaaacttcttgacacataataaaccttagagaacaaatgcgtaaaaatggaccaaggccgatttaaaataagattttgttgtttgctgatcaatatgaccatttagagatattatttgccagtaattttttttctatagtttaaaggcacaagtgaacttcgactaagataaagggatgattcggatggttaatacctcaaccaagacatcataagacatgtgaagaccaactagtac

SEQ ID NO: 104580 - DNA, 2579 bp, Zea Mays
gggaggaaaaaagaattctccacttccccactctccctctcccgctcgtggctcgtcagtgggtgggagtgtgcggggctagccgctagggtttccgcgagcccatcgccggccggccacggacgatccgggactccatccggcgcctgccctgaatcggcttcgcggggcgcaaggagcgagagaatgaagtcgtcgctgcggaagctgcggggcttcgcgctgcagcgccaggagcagcgggtggaccgggaccgcggccggggccacgccaccgccgccgccaccgcggcggacgagctcctcgcggctgcccaggatatggcagatatgagaagctgttacgataacttgctttctgttgctgcagcaattgcaaatagtgcatatgagttctctgaagcacttcaagaaatgggaacttgtttgcttaaaagagttacgccaaataaggatggaataaatgataaagttttgctgttgcttgggaaatcacaatttgaacttcggaaacttttagatagttatcgtgtgcatgttcttaacaccatcaccactccatcgctgtcgcttcttaatgaacttcaaactgtggaggaaatgaagcaccaatgcgatgaaaaaaaagaattgtatgaattcatggtaaacacgcagaaagaaaagggaaggtctaagaatgctaaaggtgataatggagcatcagagcaattgaaacaagctcaggaagattatcaagaggaagcaactctttttctattccggttgaagtcattgaagcaaggacagttccgaagtctttttacacaagctgctcggcatcatgctgcacagctaaatttgttccgaaagggagtcaagtcccttgaggctgtagagccacatgttaggctcgctgctgagcagcaacacattgatcatcagttcagcgcacttgaggaagaggattaccttgttgaggatgaaaatgatgacgattacaatggcagtcatgatggagagttatcttttgattatggagaaaataaggaagttgaggaatctggtaatgcttctaggaatcatacagagggtttttttaacagaagcaaagaagagtattcttctgttccacatgaaagacaaagaatcgtaagtcagtcagcaccactttttcctgagaaaaagctcaatacagaagagagaataaaagatttgcggcgttctgcaacaaggaagttgaatacttatgttttgcctactccaaatgacgttggagctacttctcagagagcatcaggaaatcctacttctgaacctctcgagagtaaaggtgccttccattcatctccactccactcatctgcagacataagagatttgggagacagtaatctacctagtcctacaagattgtctaacgtacagtctgtgctgaaagatagcaataccaataaaacagaaacaaggaaagtactcccagtgggtgatctggctttacctagctatcatgacctgaagacttctgataacaaaaaagtgaaaagagggtcattttctggcccaatagcttccagaccacggtcaacagagaacattgatgttatttctgcagcgcctaggcatagctcagcacatcagccagtgcacatgagagtatcccccggcaactcgccgccacccatttcctcaccgaagatcaaggaacttcatgagcttcctcgaccacctgttaatacatcaaaaaatatagcattccccagtttagttgcccactccgccccattggcaccaaatcctgcatctttgactcccaaagttcaagatcattttaggacaaaacaaacgctccaaagaactgcttcacctttaccaactccaccacctggatctatagcccgcagtttttctataccttctaggggtatttcagacagtaaagagacagaagatcaacacaagggagctgccagaatgagtctttcttctcttccttcagcacaaacattcttggaagatcgtcagccattgtcatcagctgctggatcggtcagcaaaacataggagtattctctattatcattatcaagcagctcgccgagccctcttcctgaaagaatgttgtacatattagcatttgaactctggccagtatcgcggaagaagttgggtgctgtttggttcacgaaatgtaacgtaaagggtaatggtaacggtttacactcgattacggacggtaacaagtttgaatagtccggtatcaaattttagtatggtatctgattacggttggactaaaacaaacatgatttaacgttatcacttacccattacgttacaaatatttgaaccaaacggtaccttggtgtttcgcgtgccctttggttggttaagatgtagcctgtgcaaataatgggttctgcggaaataaaatccccatttttctcacccatttgattgattgacgcgagatttgctgttgcgccgttgagcttgtttgccttgaagcgagttcagagtgccatctgtttcctgcagcttatgtaattatcacctggtttcctgtgcttatgtaatcatcatctatgtgtttgattgcc

SEQ ID NO: 104581 - DNA, 450 bp, Zea Mays
atgttgccgtgccacgatgcccagacacagcgagcttcaggtgcatgtatgtcagaagcagcagcagcagcactcgtccatcatgcagcagcagcaaagagcggccagccatcctttcaagaagccaaggcagcagtcatcatcttcgtggtggtggtggtggtgaccatgatgatggtgatggtggtcgttatggtggtggtgaccgtgatggtaatacccaccctgcggcggcggatagccgtagggttgctggccgtcgttaaagtagccctggtaccccggaggtggttgctgcggcggcgggtagtaaggcccctgcggtggagcctggggcggtgggtacggctgcgagtaccctggtggcggataggactccgggaccttctggtaactcatggctctgtcgtcgccctcgccgtgcctcgctctgatcgcttctcgctctag

SEQ ID NO: 104582 - DNA, 1165 bp, Zea Mays
acaaacaaggcccccaggggtcacgcatgtacgcccaaatctcgccggcgcccggtcccagacgaagacaagcccccgccactcctctcggcacagtgcagacacaccgccgtcgccacctgccatgtctgcgcgtcgccggggtccatgcgtccatgttcgtccagctccagcggcagggtggtggtggtggtggagtggactgtggactggtatcctggcggggatcgggacggagcccgcccatggcaccggcggcccccgcgcggggtcgatccatctctaggccggcaggcatgcagttggatcccccgcctccatggccatccctcgctgccgcatggcacccgtgtgcgcccgcgtgctgtcagctggagctggtgcatgcatcccatcggccgcggctgcgcgcctcagctagtgttcatgcgacgcgaccgatggggggcgcgctggagatcgctgatgtgctgcagtgatctgaagatgctttttattcggatcggatgtacagtacagtagctgctctcgctgtgatcggttggagctgtccgagtgggacatggacagcgacggggagcgcactgttgcgggcatggcatggctatatggccgagatggacgtcccgacgggacgccgatcggtcatcgatcgttgcagcctgcaggcgcaagaagattgacccagagcccaggcacgaggcatctcgcgctgaccggcggcaggacggaatgggagtcgggtggccggaggaggatcggtccgccgaccgccggtctatggacagctatcgaggcctcgcctcaccgcctggcatttcgcttgagcttgacagcctaaaagcgacggcgctagtacgaatggtttttaacaagcgaaaagcctcaggttttgtctctatgataatctgttctttctttgcggcgcattcaatgagtcgggctctcgcaagttgcaactgtggttgatttgcagctgcagtagcagtagtacagccttccgcgttaatgcgtctgaattggttcaggttactgtgcctgcggcagctgctgcatgccacagcaaatgtaattagcagcagcagtgcaggcatcatggttcatggcggtgtacccgctaccgctggattgttttgaccgacccgtactaacaataagtccaaaa

SEQ ID NO: 104583 - DNA, 1114 bp, Zea Mays
agaaaccggtttttaaaaactaagataaaaaaccagttttttataaactacaacgcttccaaacggtgccgtaatcgaccccaccgggccaccgttccttgccaactgccaagcatcaccgcgaaatctaataactcgttgctcttcgtcttcgctccgcgatcgatccaggagggggaagcagaaggagggatggcggagaacccgcagctgtttgggaatgggatgccggtgccgttctacagtgagatgttcgtcctcgcccgggatggcgtcgagttccacgtcgacaagatcccatcagctcctggtggtcatgtgaaaacaaaaggcacaatttacctgtctaatataaggatggtgtttgttgccaacaagcatgttggcaacttctttgcttttgatatgccactgttgtttgtgcacggtcagaagttcaatcagccaatatttcactgcaacaacatctctggattcgttgagccagttgttccagacaaccagaacagggccctgtactcaactcacaccttcaaggtcttgttcaaggacggcggctgtggtactttcgttcctctgttcctcaacctgactgcatctgtgcggcgctacaaccagtttgaaacccagtctgctgctagcatggcacctcgtgtggaccctctgcaagctgtgcagactcctgttgatgacatgatgcgtcatgcgtatgttgacccaaacgatcctaccaagatcttccttcagcaacctgcgccagaatcgcagctgaggaggaggaactaccacggcccagctgatgcaaattagcgcttggctggattggcagaactcatgctcaattaagtgctgtgtccatttgagcatttcacctatccttgtcgtttaccacaactgacttcaatattcgggtacccctgggtcctgtgaccttacatatatagtacataatgttgcgagttctcgcaatatgtaatgtacataagtggcgtgttcatatattattgctggagcctggagggtcaacttggatgtgggttgcttggatattgctgatctgctggtgctgcatgtttctctgaatctatcattgttcttgttcggggcttgtggg

SEQ ID NO: 104584 - DNA, 1002 bp, Zea Mays
agaaaccggtttttaaaaactaagataaaaaaccagttttttataaactacaacgcttccaaacggtgccgtaatcgaccccaccgggccaccgttccttgccaactgccaagcatcaccgcgaaatctaataactcgttgctcttcgtcttcgctccgcgatcgatccaggagggggaagcagaaggagggatggcggagaacccgcagctgtttgggaatgggatgccggtgccgttctacagtgagatgttcgtcctcgcccgggatggcgtcgagttccacgtcgacaagatcccatcttgtttgtgcacggtcagaagttcaatcagccaatatttcactgcaacaacatctctggattcgttgagccagttgttccagacaaccagaacagggccctgtactcaactcacaccttcaaggtcttgttcaaggacggcggctgtggtactttcgttcctctgttcctcaacctgactgcatctgtgcggcgctacaaccagtttgaaacccagtctgctgctagcatggcacctcgtgtggaccctctgcaagctgtgcagactcctgttgatgacatgatgcgtcatgcgtatgttgacccaaacgatcctaccaagatcttccttcagcaacctgcgccagaatcgcagctgaggaggaggaactaccacggcccagctgatgcaaattagcgcttggctggattggcagaactcatgctcaattaagtgctgtgtccatttgagcatttcacctatccttgtcgtttaccacaactgacttcaatattcgggtacccctgggtcctgtgaccttacatatatagtacataatgttgcgagttctcgcaatatgtaatgtacataagtggcgtgttcatatattattgctggagcctggagggtcaacttggatgtgggttgcttggatattgctgatctgctggtgctgcatgtttctctgaatctatcattgttcttgttcggggcttgtggg

SEQ ID NO: 104585 - DNA, 1503 bp, Zea Mays
tgaattacgatctttatgacttcatctctttccttatttagacaatttggagtatcatgtgggtagaagtagaactgttgtatgaggaaggagggactgtctaacataataatcttcataggctacaacaaaaatacaaaattcaggccatgtttggttttggttgagctgtggcttttgaaaagaaaaggctatggtaagctgtgggctgtgactgctgtgagttgagagttgcgagaaaacctgaaagttttttggttggagcagctatgggctgtgcagaagatgtaggctgtgtatgaaatacctgtaatacccctggaggcctggggaactgtttatatgcaaattgctcctaaaaaactaatatgttcactggtcgcatgtaattgactattttaaaagaaaaaattattgtttctaggttttgcatccatctcagcgatatgatccacataaatagaacaatacaaaagataaaggtctcatacaatacaatgatgccatccatcaatgtaattatccctctcttgcactaaccaaaacatcaaggtactgacatgtatcttgccatccatccatcaacataacatcctcatcacttgccttatcagaggaggatatatctccaggacaggatgcagaagacccactaacatgtacctttccaaacaacatatgcagaattaagagctcctggtggtcatgtgaaaacaaaaggcacaatttacctgtctaatataaggatggtgtttgttgccaacaagcatgttggcaacttctttgcttttgatatgccactgttgtttgtgcacggtcagaagttcaatcagccaatatttcactgcaacaacatctctggattcgttgagccagttgttccagacaaccagaacagggccctgtactcaactcacaccttcaaggtcttgttcaaggacggcggctgtggtactttcgttcctctgttcctcaacctgactgcatctgtgcggcgctacaaccagtttgaaacccagtctgctgctagcatggcacctcgtgtggaccctctgcaagctgtgcagactcctgttgatgacatgatgcgtcatgcgtatgttgacccaaacgatcctaccaagatcttccttcagcaacctgcgccagaatcgcagctgaggaggaggaactaccacggcccagctgatgcaaattagcgcttggctggattggcagaactcatgctcaattaagtgctgtgtccatttgagcatttcacctatccttgtcgtttaccacaactgacttcaatattcgggtacccctgggtcctgtgaccttacatatatagtacataatgttgcgagttctcgcaatatgtaatgtacataagtggcgtgttcatatattattgctggagcctggagggtcaacttggatgtgggttgcttggatattgctgatctgctggtgctgcatgtttctctgaatctatcattgttcttgttcggggcttgtggg

SEQ ID NO: 104586 - DNA, 2398 bp, Zea Mays
aaaccagttcgcgtccatcctcctcccctcccacttcgccatggaccccagcttccggttcgacccggacagctccgacgacgaggcggcgggtgctccaccgcggggcggcccggtgcagtcgccgtgggagttctcgtcgtacgcggagtccgtggcggcggagcacgcgcgccgccgcaccacctccatcgacgagaaaatctcgctcctgcgccaggaacgcgggaatcccgtcgttcccgatgactcggggagcgacgtgagcggcagcggggaggatgatagcgacgacgaggagatagagggggagagcggtgacgaggaggacgagctggaggagagcgaggatgagggcggggtcgaagggggcactgatgacgaggagattgaggggagtggcgatgaggaggcgatcggcgatagggagggcgatgaggacgggggtgacgagaagggaggaggcgagctgggagaagaggatgatgcccatgaggaagaagatacggtcgatcagaatgacacgagtggaccagttgatccttctaattttttctcttcttcggatcgggcatcatttcatgcaaattcattccttgagcttaacttgtctcgtccgctagtgcgagcttgtgaagcacttggctaccagaaaccaactccgattcaggctgcttgcattcctctggcattaactggaagggacatctgtggtagtgctattacaggatctggaaagacagctgctttctctttgcctgtgttggaacgtctactttttcgtccaaagcgtgtacctgcaattagggtgcttattcttactccaaccagagagttggctgctcagattcatagtatggttgagaagttagcccaattcactgatatcagatgttgtctcatcgttggaggtctttcaactaagattcaagaagttgctctaaggtcaatgcctgacatagttgtagcaacccctgggcgcataatagatcatctgcgcaattctctttctgttgggcttgaagatctagctgttgtgatccttgatgaggctgatcgcttgcttgaattgggcttcagtgctgaaattcaagaactgattcgtatgtgtcctaaaaggaggcaaactatgcttttctctgctacaatgacagaagaaattgatgaacttgtaaagctttcactaaacaagcctgtacgccttgaagctgatccttctctgaaacggcctgcaacattgactgaagaggttgttaggatacgacgagcacgtgagtcaaatcaagaagctgttcttcttgcactctgtttgaagactttcaagcgaagtgttatcatttttagtgggacaaagcaatctgcacacaggttaaaaataatatttggtctctctggcatgaaagcagctgaacttcatggcaaccttacacaggcccagcggcttgaggctctggaacttttcaagaaaaaagaagtagattttttgattgcaactgatgtcgctgctcgtgggattgatattgttggtgttcagactgtaataaatttcgcatgcccaagagatgtgaaaacttatcttcatcgtgttggccgcactgcgcgggcaggaagagaaggctatgctgtgacatttgtaaccgatgatgatagatgcctcttgaaagcaattgcaaagaaggctggttcacagctgaaaagtcgcattgttgcagagaaacctgtggctgagtgtgcacgactgattgagcaactagaaggccaaatttctatcatcattcgagaagaaagggtggaaagagaagcaagaaaagctgaaatggaaatcgcaaaggcagaaaatatgatagctcataaggatgagatatactcacggccaaagagaacctggtttgctactgaaagggagaagaaacttttggcagcagcggctaaagaatctttggatcacggtaagagtacctctggagttattagtgctaagaaggccgaagaccttcgtctaaaggagaaaaggagacgagaacatgagaagaatctaccaaggaagaagcgccgaagattggaggcccagcgtgagatgttggaagatgaggatgacgagaaaacaaaggaaaatgatagagggaagcaaccaatgaaaggccaatctctagtggatgctgcttaccgaaaggcaaaatcattgaaggcagccagcaaacgggcccctggtgcaaggaaaggaaagaaagagaagaatgaaaggcaacattctgagaaggctccgaacaggcatgaagagatgcgtgacctgttccaaaatgatatgagtgaatggaaacagggacgctcctcaaagaaaaataacaaatttgcgcccaaaaaatcaaggaactcttttaagagcaaagcaaggtat

SEQ ID NO: 104587 - DNA, 2522 bp, Zea Mays
cagttcgcgtccatcctcctcccctcccacttcgccatggaccccagcttccggttcgacccggacagctccgacgacgaggcggcgggtgctccaccgcggggcggcccggtgcagtcgccgtgggagttctcgtcgtacgcggagtccgtggcggcggagcacgcgcgccgccgcaccacctccatcgacgagaaaatctcgctcctgcgccaggaacgcgggaatcccgtcgttcccgatgactcggggagcgacgtgagcggcagcggggaggatgatagcgacgacgaggagatagagggggagagcggtgacgaggaggacgagctggagattgaggggagtggcgatgaggaggcgatcggcgatagggagggcgatgaggacgggggtgacgagaagggaggaggcgagctgggagaagaggatgatgcccatgaggaagaagatacggtcgatcagaatgacacgagtggaccagttgatccttctaattttttctcttcttcggatcgggcatcatttcatgcaaattcattccttgagcttaacttgtctcgtccgctagtgcgagcttgtgaagcacttggctaccagaaaccaactccgattcaggctgcttgcattcctctggcattaactggaagggacatctgtggtagtgctattacaggatctggaaagacagctgctttctctttgcctgtgttggaacgtctactttttcgtccaaagcgtgtacctgcaattagggtgcttattcttactccaaccagagagttggctgctcagattcatagtatggttgagaagttagcccaattcactgatatcagatgttgtctcatcgttggaggtctttcaactaagattcaagaagttgctctaaggtcaatgcctgacatagttgtagcaacccctgggcgcataatagatcatctgcgcaattctctttctgttgggcttgaagatctagctgttgtgatccttgatgaggctgatcgcttgcttgaattgggcttcagtgctgaaattcaagaactgattcgtatgtgtcctaaaaggaggcaaactatgcttttctctgctacaatgacagaagaaattgatgaacttgtaaagctttcactaaacaagcctgtacgccttgaagctgatccttctctgaaacggcctgcaacattgactgaagaggttgttaggatacgacgagcacgtgagtcaaatcaagaagctgttcttcttgcactctgtttgaagactttcaagcgaagtgttatcatttttagtgggacaaagcaatctgcacacaggttaaaaataatatttggtctctctggcatgaaagcagctgaacttcatggcaaccttacacaggcccagcggcttgaggctctggaacttttcaagaaaaaagaagtagattttttgattgcaactgatgtcgctgctcgtgggattgatattgttggtgttcagactgtaataaatttcgcatgcccaagagatgtgaaaacttatcttcatcgtgttggccgcactgcgcgggcaggaagagaaggctatgctgtgacatttgtaaccgatgatgatagatgcctcttgaaagcaattgcaaagaaggctggttcacagctgaaaagtcgcattgttgcagagaaacctgtggctgagtgtgcacgactgattgagcaactagaaggccaaatttctatcatcattcgagaagaaagggtggaaagagaagcaagaaaagctgaaatggaaatcgcaaaggcagaaaatatgatagctcataaggatgagatatactcacggccaaagagaacctggtttgctactgaaagggagaagaaacttttggcagcagcggctaaagaatctttggatcacggtaagagtacctctggagttattagtgctaagaaggccgaagaccttcgtctaaaggagaaaaggagacgagaacatgagaagaatctaccaaggaagaagcgccgaagattggaggcccagcgtgagatgttggaagatgaggatgacgagaaaacaaaggaaaatgatagagggaagcaaccaatgaaaggccaatctctagtggatgctgcttaccgaaaggcaaaatcattgaaggcagccagcaaacgggcccctggtgcaaggaaaggaaagaaagagaagaatgaaaggcaacattctgagaaggctccgaacaggcatgaagagatgcgtgacctgttccaaaatgatatgagtgaatggaaacagggacgctcctcaaagaaaaataacaaatttgcgcccaaaaaatcaaggaactcttttaagagcaaagcaaggtacaagcggaagtagaagactcggccatctccgggtttatattacattcccttgtttcaattttgactgactgatcctgaagaaatatctgggatccagatgtttgcagttaattcaagtttgctttaaacatattctcatatcatgtattgaaactcaccgttttctggggtctctta

SEQ ID NO: 104588 - DNA, 1344 bp, Zea Mays
ggttgttaggatacgacgagcacgtgagtcaaatcatgggacaaagcaatctgcacacaggttaaaaataatatttggtctctctggcatgaaagcagctgaacttcatggcaaccttacacaggcccagcggcttgaggctctggaacttttcaagaaaaaagaagtagattttttgattgcaactgatgtcgctgctcgtgggattgatattgttggtgttcagactgtaataaatttcgcatgcccaagagatgtgaaaacttatcttcatcgtgttggccgcactgcgcgggcaggaagagaaggctatgctgtgacatttgtaaccgatgatgatagatgcctcttgaaagcaattgcaaagaaggctggttcacagctgaaaagtcgcattgttgcagagaaacctgtggctgagtgtgcacgactgattgagcaactagaaggccaaatttctatcatcattcgagaagaaagggtggaaagagaagcaagaaaagctgaaatggaaatcgcaaaggcagaaaatatgatagctcataaggatgagatatactcacggccaaagagaacctggtttgctactgaaagggagaagaaacttttggcagcagcggctaaagaatctttggatcacggtaagagtacctctggagttattagtgctaagaaggccgaagaccttcgtctaaaggagaaaaggagacgagaacatgagaagaatctaccaaggaagaagcgccgaagattggaggcccagcgtgagatgttggaagatgaggatgacgagaaaacaaaggaaaatgatagagggaagcaaccaatgaaaggccaatctctagtggatgctgcttaccgaaaggcaaaatcattgaaggcagccagcaaacgggcccctggtgcaaggaaaggaaagaaagagaagaatgaaaggcaacattctgagaaggctccgaacaggcatgaagagatgcgtgacctgttccaaaatgatatgagtgaatggaaacagggacgctcctcaaagaaaaataacaaatttgcgcccaaaaaatcaaggaactcttttaagagcaaagcaaggtacaagcggaagtagaagactcggccatctccgggtttatattacattcccttgtttcaattttgactgactgatcctgaagaaatatctgggatccagatgtttgcagttaattcaagtttgctttaaacatattctcatatcatgtattgaaactcaccgttttctggggtctcttatgatctcgcgaactgtgttgccgttttgtagttcgtaccatcttaaattttagggttatttggtttctatagacttag

SEQ ID NO: 104589 - DNA, 473 bp, Zea Mays
cttttactaccttacataacgaaactagatttgcctgaatgatgtcatttttattatttagtctttagtgatatgaaaagaaactatgtgcttgtagatgtggttcactgcttacctatgtcattgttattagtgggctgtattcagctctaagcttgaagaatctcctacaggaaaatgatagagggaagcaaccaatgaaaggccaatctctagtggatgctgcttaccgaaaggcaaaatcattgaaggcagccagcaaacgggcccctggtgcaaggaaaggaaagaaagagaagaatgaaaggcaacattctgagaaggctccgaacaggcatgaagagatgcgtgacctgttccaaaatgatatgagtgaatggaaacagggacgctcctcaaagaaaaataacaaatttgcgcccaaaaaatcaaggaactcttttaagagcaaagcaaggtacaagcggaagtag

SEQ ID NO: 104590 - DNA, 695 bp, Zea Mays
cggccgccattaactaggccagtcgccctacctcgtcatattggtaggtaatccactgcgccgctggaaggaggctttgcggagatggaccgggtcggcggcggcgagaagcagctggaggattgtacagtgggcaatgctctaggaacttgcttcttcttctctgctgtaagcgctcttgctgttattcctgtggtcataaagaagaaatccttggctcccgcggccttcgttgtcaccacaggaaccatgctggacactatcgcaggcattagactgtgtgagctacagcatgctgagcggcaaatgaagcttttggaagcccagaaactttcggaggatgcttcagctgggagtgaaagctcttgattcctttggcagttctaacaagtgacatacatctcttgtttccaaacttgtgagttgttgctcagatgccaatttgacacctttttatttttgagtatcattcctacacgccaaaaaaaaaacgtgtaattgtgtgtttaagcaacgatcacttgttttcacgtcatcagtgcatgccaactgctagtagcctagtatggaacgatgggtgcgctactttgtgttgggtgctatgattaaaccttcacagttattggcggcctcaaggcataagcgatgctgagactgcatgacttggtgtaatctgtaagctcttatgtgcgcac

SEQ ID NO: 104591 - DNA, 1037 bp, Zea Mays
ataacaaccgcacagagacagactgcaaactagtttttgactattagataactactactttggacgtgtcctctgggaaagttgcttgaaggcatgcaagtttgcagtgagaacacaaaacccttttgaagggaatatactcaacgtctaacgatctcttggaataaaggcagtataggtactgtcctgcagatcagatgggcatctccaccaggacgtttgcaagcagaaaggtagaagatcacctttgaactttgaaagttctgacatcccgagggggcaaaaggcgccagggaatttctcccgcactgcaaacagcctacacccagatccagcttctgtggatgaactcttgccatgccagacgttggtcctccttctctgctccttctataatgttcaccagccagctggaaatgctgctaaagtcagtacataattttgagctgccaatagctaatcctggagtcctgggaccctatgctttcttgctgtctgcaaatttatttgtcacaagcttacatgattgaattctggcattgaattggatggttggcatcaccaattcgtcatgtcaattcttcaaatttacaatgcatgatggttctagtggtaagatcattgcaatgttttatgtaatgtggtggtggtatcactcgactggttgatccagattggttacacgtccttcgtttaagggtttgtttaggttggtggaattctgtgaatttttcttacagggaagtgaatgaagacgaggtgaacgtctgcggtacagtaagatgagtttggacaacgtgtgcggaaaaggacgagagctcgcttgcactccatcgatactgtctacaggctaaaggtaacaagaacgaggtcaaaggaaacgccaagcagcaatagctagcgtcttacaaaatgtcgattcgacacagaataatcaatccatacgttgatgtgatgccaaagtagaataaggctatagatgtaatattactcaatttccatgcggggctatttcgaccgggtggattcggcattta

SEQ ID NO: 104592 - DNA, 525 bp, Zea Mays
cttcttattcagttctgtttcgtgccaatcagacggcggccgcctcctctccccccgctgccgagctcacccttccgcctgccgcctgaacttgtctcgcccgcggcagatctgctccttccgctcgctgcaccgcaacccggataggagaccgcgcgcggtcgagaactacctggggaccaacgtcctcgaccagctccggtgcggccggcacacagctccacagatttggacagcgcaattacttaagctatttgtattcggatctgatccaaccctggtggtcagctggactcatcgcccatggagcacactaagtcaggccccagcagttggccagaactggccgacgtggtgccggtgccgcaggacgatgggcctagccctgtggtgtccatcgcctatcgagatgactttcgtgaggtcatggattacttccgcgccctctacctcaccggtgagcgaagccctcgcgctctccgcctcaccgccgaggccatcgagctcaaccccggcaactacact

SEQ ID NO: 104593 - DNA, 1465 bp, Zea Mays
gcctcctctccccccgctgccgagctcacccttccgcctgccgcctgaacttgtctcgcccgcggcagatctgctccttccgctcgctgcaccgcaacccggataggagaccgcgcgcggtcgagaactacctggggaccaacgtcctcgaccagctccggtgcggccggcacacagctccacagctggactcatcgcccatggagcacactaagtcaggccccagcagttggccagaactggccgacgtggtgccggtgccgcaggacgatgggcctagccctgtggtgtccatcgcctatcgagatgactttcgtgaggtcatggattacttccgcgccctctacctcaccggtgagcgaagccctcgcgctctccgcctcaccgccgaggccatcgagctcaaccccggcaactacactgtctggcatttccggcgccttattctggagtcactagattttgatttactagaggagatgaaatttgtcgaaaaaattgctgaatgcaatccaaaaaattaccaaatctggcaccataagagatggcttgctgagaaattaggacctggtattgcaaacaaagagcatgaattcacaatgaagatacttgctattgatgcaaaaaattatcatgcttggtctcataggcagtgggttcttcaagcgttggggggatgggagactgaattagaatactgtgaccacttacttaaggaagacgtcttcaataattcagcttggaatcagagatactttgttataacaagatcaccatttcttggtggccttgcggcaatgcgtgattcagaagtagactacacaattgaagctattctagcaaacgctcagaatgaaagcccctggaggtacctcaagggtctatacaagggtgagaataacctgctagtagaggacgagcgcatctctgctgtttgtttcaaggtcctgaagaatgattggacttgtgtatttgctttgagtttgctgctcgatcttctctgcactggtttgcagccttcagatgaacttaggtccactcttgaaacaataaggagctcccatcctgaaaccgcggatgatgatcctgcagccgctgtttgctgtatcctgcagaaatgtgatcccctgcgggtaaattattggtcttggttcaaggacactctttctcagatctcatgacttcacatgggttcaccccttgtccgcgctggtccgggctctgtgagatagacatgttttagatagtttcattggacacccaaacagagcggacagagtgtatggctgctaccttctccgtgactgaaagcagtgcttgtaacgattttgtttagtaaaatttgtgagtgttactgctccaaacaacaccttatgcaaccatatttgaatatttcacatgtaagcttgaatccaggtgtgtttgttaatgtattacaattgccatgggagcctaaatgagaccc

SEQ ID NO: 104594 - DNA, 1766 bp, Zea Mays
ccttgggtcggaaaaggccaaaaactcatcggcaacctccatctgaaaattctctcgcctgaacgtccaagcacaatcccgaaccctaaccagcgccccagctcgccgtcggcatgtccgccaggttgctccggcgagtcctccaggagcgtgaggccaccccgcaggacaccgacgtcgccgacgacgaccagtcggtggaggaggaggcttctcctccgcggtcctccgcgcggaacctcttcgatctcctcgacgacggaaacggcgacggcggcgaagaagatgaaaaggtacacatatgacccttcagtcagccatgtgcaggaattatttgaagccgccaaagcagcaaatgatctcaatgctattgcagctatattagggaaatatccatatcatccagaatcactgttgacatttgctgagcttttcaaatattctggagagcatcaatcatcagcagatgcagtggagaaatgcctatttgcattggagtgtgcttggcatcctttatttagcccacttcagggcaactatcagttgaaattcaaccatgacacaaataagccactgtttacagcactctttagtcacatgaaaaatctggataggcgtggctgccatcggtctgctttagaggtctgcaagtttctgttgtcactggacttcgatgatccaaagggttctctattttgcattgattactttgctctaagatcacaacagtacaaatggctggagcaatttgcagaagagtaccagtgtgataactccttgtggttatttccgaatttctcattttctcttgctactgcacggttttaccttgagtgtgatgcagcgtcagagggttctgatgatgctgacaaatcaacatctcttgatctcatgaagcaagctctgatgcttcatcctatggtgcttcgcaagatagttgacaaggctcctctgaaagactcatcatggacccaaatactcagaaatgtattctttggatcagcaaaaccgggaagcccttcacttgagcatatgatcaatatatatgtggaacgccattatatcatgtggagattcccagaactgcagaacttgctgaaagaggctgctcttttggtgattgaatcactaaagcaggataacagagaagccctggactgggcttgtgttagaaaagaagcattctcgtcagacaagaatgagtactctcatctgcttgtttcagacttcactgacacaacgccgtcgctcccaccagaagaactgcgaccatttatggtcggtccaggaatgttgcatgagatgccacctgttgaacaagaagctggacccgagagactccgtgctcctcgtgaagtcgctgggcgtaatcctgcagtagtcttccttgaatcactgctcccatgggtcgactatggtgacaatcatcaaggtgcaaatgacgacgacaacgacgacgaatgatcagttggatgtataaagtggcaaggactcacaattgcgcctgaattattgaatgtgacacatgattaagaaaagttgttgttgctcatagggtcacctcggtactatcaataaccaccacaagtctgcaagccaagtggtcttgtgtttttcatgatgggacagaggcctgaggttaagtatgtatggggatcgaccactaagttgccaaaacatgtataccaaattttagggatcgagtaccatccttgtctgagacttgactctatgctaattctgcaaacatagtgaaagggtttaat

SEQ ID NO: 104595 - DNA, 2352 bp, Zea Mays
ccttgggtcggaaaaggccaaaaactcatcggcaacctccatctgaaaattctctcgcctgaacgtccaagcacaatcccgaaccctaaccagcgccccagctcgccgtcggcatgtccgccaggttgctccggcgagtcctccaggagcgtgaggccaccccgcaggacaccgacgtcgccgacgacgaccagtcggtggaggaggaggcttctcctccgcggtcctccgcgcggaacctcttcgatctcctcgacgacggaaacggcgacggcggcgaagaagatgaaaaggaagatgaaacagaaataattcaagctgtgagctatacagaacagagacattctgtgcaaaagaaagcgaacgctgttcccgaaacaaacaaaaaatccaagaaaaagaaaaaaaagagcaaggcggagccgtcatcaacaaaggcaaaggatgcacagtcgttggagtcaattctggaagacttatgtattgaaaagaatccaatacaacaaagagctcatcagagtgacagggcagctggaaaggaatttgagacaaatgaagctactcatgtggcatcctctgttcttgcaatagacccaaaacatctaaagggtgaaaatgagatgaggcgcatttttggatcaaaggtagtggattcatttgaaaatcaacggagtatgccaagcagttcaaggcaagtacgtggtgctaggcgtgttgcccataatccaagaaaaactcttcttgtgtctccacctagctactggccaccatgggataagtcaataacaatggatcttcttgagatgaagaatggtttgaattacttcaggtacacatatgacccttcagtcagccatgtgcaggaattatttgaagccgccaaagcagcaaatgatctcaatgctattgcagctatattagggaaatatccatatcatccagaatcactgttgacatttgctgagcttttcaaatattctggagagcatcaatcatcagcagatgcagtggagaaatgcctatttgcattggagtgtgcttggcatcctttatttagcccacttcagggcaactatcagttgaaattcaaccatgacacaaataagccactgtttacagcactctttagtcacatgaaaaatctggataggcgtggctgccatcggtctgctttagaggtctgcaagtttctgttgtcactggacttcgatgatccaaagggttctctattttgcattgattactttgctctaagatcacaacagtacaaatggctggagcaatttgcagaagagtaccagtgtgataactccttgtggttatttccgaatttctcattttctcttgctactgcacggttttaccttgagtgtgatgcagcgtcagagggttctgatgatgctgacaaatcaacatctcttgatctcatgaagcaagctctgatgcttcatcctatggtgcttcgcaagatagttgacaaggctcctctgaaagactcatcatggacccaaatactcagaaatgtattctttggatcagcaaaaccgggaagcccttcacttgagcatatgatcaatatatatgtggaacgccattatatcatgtggagattcccagaactgcagaacttgctgaaagaggctgctcttttggtgattgaatcactaaagcaggataacagagaagccctggactgggcttgtgttagaaaagaagcattctcgtcagacaagaatgagtactctcatctgcttgtttcagacttcactgacacaacgccgtcgctcccaccagaagaactgcgaccatttatggtcggtccaggaatgttgcatgagatgccacctgttgaacaagaagctggacccgagagactccgtgctcctcgtgaagtcgctgggcgtaatcctgcagtagtcttccttgaatcactgctcccatgggtcgactatggtgacaatcatcaaggtgcaaatgacgacgacaacgacgacgaatgatcagttggatgtataaagtggcaaggactcacaattgcgcctgaattattgaatgtgacacatgattaagaaaagttgttgttgctcatagggtcacctcggtactatcaataaccaccacaagtctgcaagccaagtggtcttgtgtttttcatgatgggacagaggcctgaggttaagtatgtatggggatcgaccactaagttgccaaaacatgtataccaaattttagggatcgagtaccatccttgtctgagacttgactctatgctaattctgcaaacatagtgaaagggtttaatactttacggtgctgttagaaaatttaccccaggctaggaaaggctttcac

SEQ ID NO: 104596 - DNA, 1057 bp, Zea Mays
cgcggggtgggatcccgccggaacgttagggccactgccgccgatcgttttggagaagccgtccatgacgctgagcacggaggtattctagatgggagagatctcgatgggagacggtggcgttcgccggtcgatgcgtgggttaaccgcgctcgggatcgagggtgccgagaaacgaacaaagggagcagcaatggcggcggcctggtgttaagaggtgacctttttctttcttgcaaccgaagccgaagaggagagcgccacctatgggttgagatccaagccggctgggctgggtctcgtgggctagtatatgaaaaccaacggctaggatggattaagaagcgagacaacatcaggtcaaccgtccgatcccctcagagctaggagtggggaccaggggagctgggagtttgcggcttcagctgctgctgcgagcctgcgacctccgaggcggagctcaatggagttatccactcccgtcgggagctcccttgctagaactgcgaccatggccctcgttagccccagcttcaagataaccaatcaaatgtgtgccaggggtatgccacttgaatgccaatttcctcataggctaccatctgtagcttgttcaatgttgttaaacacacaaccttcacaacgaaccaaccataaagattgtggtttgcttcaggtgcaatgtacagaaaaccttatgcagtcgccagtatctttcagtgacttctctgtttcagtgtgtgctcaagaggatggtctgataaaggttagctaaaatttcacggtcatctctgtgtggaaggtgtcaatgaatccttaacagttttgaccaatgtcttcttggttttatctttccattgcctttcttacaaatgcagctacaggtaaatgtatctggcacaatgacagattctatctttgagaaagttttcacaaagaatgttgccgccgctcaaccccttcccggctttcgacgaatgaaaggaggtatacttctaaaacttttacaaccccagatttctgtccatcatttgacaattttaaattgcctaaaact

SEQ ID NO: 104597 - DNA, 101 bp, Zea Mays
caaccttattattaggcagatctcataggggcagggccgctaaagctagattcaaaatcgaactacttcctaaatatgagcaactattggagactaagtta

SEQ ID NO: 104598 - DNA, 1215 bp, Zea Mays
atggatgtccgaaaagtggaaacaattgtgaaacagaattgttactctgaatccggttggaaaggaagagtcaggtacatgtttgcatcattttggaacagaaaccatacatttagagcattgcagcgagctgtgaagaacttccaaatgatgatagaggctgagaaacaggaacgtgctcagtctgcattacgtgcacatagtagttcaagaaaaaatagcaagaaggagataaatatcccagaagattgtgctgcattaacaggacagttacaaccttttgtcaaagaagaagttttggtccctgtattcaatggaacttttccatctactgcagagcacttctttagtattcttttaagtgatgactcgaactacataacagagtatcgaacatttcggaaggataaagatataaatctgggccaatggcacattgcagatgagtatgatggccaggtgagggaacttaattgtaaatcaatatgccatagtccaatgtgccctccttattcagcgatgacagagtggcagcatatagttctttcagctgacaaaatggatctggtatttgagacagtacagcaagtacatgatgttccatttggttccttctttgaggtgcattgtaggtggtctgtgaaaactatcagttctagcctgtgcagtcttaacataagcgctggtgcacatttcaagaaatggtgcataatgcagtctaagataaagagcggtgctgtggatgagttgaagaaagaagtcaaggaaatgttagactttgcacaggggtatattctcaaagttaggtctccggaccaagagaacagtaatctcgcccaacaagacaacatggcaccggatgcagtgtctggcgatcaatgattatttcaggttgtgcctcctgatttagggtggggtgacagctgccatgacaacgaattatgatgttatacacagaagggcaggtggacctgtaactagtccacatgaaccacatctaacatgttaagctgacttccaaaagatggttggaccgtgtattgtgtgtgtaaacttctttttcctgtcattccgctatccattctggcagtttggctgatgtatatagttgtaaaaacaagtatagtgttgactgcggacggttcagtggtgcgttgttcgaagataaacaaagaaagaaacaaaagagaaatatttgcaccagaaccatcagaa

SEQ ID NO: 104599 - DNA, 579 bp, Zea Mays
ttgataaagaaaaaaaatatttacaatggaataaaaatacaaattgcttgaatgcataaagaccactaggcttgacatctgcacaaataactagaacacaaacaactgtatattcgtaagaaagaaccactacgaatcgaaatagtaaatctggttacagtttgacatgcagagtattagccgttaaaaggcaacaatatattcctactccatctggtgtcctattagttgtcgttttgatcaagacatgaatcaaacttataaattttgactacaaataactattttattatgtagttttgaaacacaatgtttatatacaccgatttgttataataagtacttttataaaagtataaatgttgagagtttatttgtattttaacaaaaaatattgatgaaagttatattttggagaccgtgtcgctgttctaaatgacaactaatagtacatcagatggagtaggttctaacatttcatcatctaaacatcaacaatatggttgtccaactagtccagaccttagctctttcagcaactctagccacatctagccatcatcttaccatccgatctgc

SEQ ID NO: 104600 - DNA, 2894 bp, Zea Mays
ctccacagtccacaccacagcccaacgcagccacagccagggggcaacgagtgaagaccgcggagcgggtgaggaccctttgacttgtttttcctggatgtgacgactgacgcgcgcggcctcggccctcggccggcattcccgcgtcgcagcagcgcggagctgcgtgtcccacgagcccggcctgctttgctccaatccgagccagcctttgcccccctccgtgcgcccacacaaggagagcggagaagaagtgaagaacccactgggcgcccggatttccgccgcgagagtgatgcgctcaaggatccgcatccgcgacaatggcttcgctggtgccgggcgtcctggtgaagctcctgcagcacatgaacacgggcgtgaaagtcggcggcgagcaccggtcctcgctcctccaggtggtcagcatcgtgccggccctcgccgggagcgacctcttcaccaaccgagggttctacctcaaggtgtcggactcgtcccacgcgacctacgtctccctgccagaggagcagcacgatctcatcctgagcgacaggatccagctgggccagttcgtccacgcggaccgtctcgaggcggccactcccgtccccatcctcagaggggtccggccggtccctggtcgccacgcctgtgtcggcacccccgaggacctcgtgctgaccgcctcctcgtcgaactctcacggcggcggcaagaacaagaaggcgcgaccgtcgaatgcgaaaacgaaggacgccagcgccagcgtcctgtcgctagacaaggaatcgagcaagctggagaagataaacgcctcgcgcaagcctaccgctaccggggcggaaaacaagaagccgacgctcaccagatccaactcttcgctgccaagagaagctctggatgggaggatcggtgatgacaaggtagcggcggttaagtcaaaaaaggtgaagccaggtgttactaggtccacaccttcgtcaccaaccagcgtctattctctgcctgcgtcgttcgacaggttctcgaatgacctgaagcagaggaacagagtgaaaggagcggagaataaagcttcgtcttcctctaggctttcattgttggaaaaggccgcttctgttttgaaggccactagtgccgccgggagagtgtcctctgctggcattccgatcggtagctctgtgctgagcattggatcgtcagggccaaaggccctgagaagaagctgggaaggaaacacggatgttaaagggaaaggaaaaccagaatcgaggacagccaaacctgacaggaagtctgatagcaagattccaatgactcctagacggaaatcaccagtggatgagaaggtggcgccacataaagatgacaacagtcagaaagctgctaggaagagcaccacaagtgctcccgcctcagacgacgctgctgacaaagcagtgaagaagaagcatattcctacagcgaagagaacttccgggggtttagggaactggagtgtcacaaatctagtgaagattcctcccagcagcagaaaactagcagacgttagcgcttcatggacatcactcccgccatcacttgccaagctaggaaaggagcttctcaggcacagggaatcagcacagatagctgctgttgaagccatgcaagaagcttccgctgcagagagcttgctgagatgtttgagctcgtacgcggaggtgagctccacggcggaagagcagaacccgcagccagccgtagagcagttcctcaccctccacgccgcgctctcgcgcgccacggtgatcaccgacaccctcgccaagtctgccacatctgcagcctcgccagattgctcggcagccagcgacgctgggacggtgtgttccgctaccgacgaggaggccgctgccatcacggccgagcgccggcgccgagctacgtcctgggtgagcgccgctctcgccacggacctgtccgccttcggcatctacaagctcaaaccgccccccgccaccgtgtcctcgccgctggccgtggtcgtcgtggacgagcccgcgaagctggcggcggccgcggctacgaaatcgtcgccgtcgccgaagtcgcggctgtcccccgcgaaggggaaggcgaggacgggcgctgctgcggctgcaggagcgctggccacgacgcccgcgccgccggagtgggagaggggaggaggggccgaggagaggggcgaactggcgacgcggctgggagaggagtcaaggggctggttcctcggcttcgtggagcggttcctggacgccgacgtggcggcgaccgcgcagtgggaccgcgagcgcgcggccaggatgctcccgcagctaaagcgtgtcaacgactggctcggcgagatcgggaagcgcagcgagaccgagacttcgtcgctgccgccggccgacgcggacggtgaggcgaccaccacgagcaccgcccccgtcccctcgaacggcggctgcggggtacctgaggaaacgatagagcggctaaggaagaagatctacgagtatctcctcaccaatgtcgattctgccgccgcgatgctcggaggcggcgggctggccgcgccgacgaatgggaagaaaggctgacgcgtgggtagaggtcctaattgggccgttagtagtgtgaaattttattgggccaaaaatgggctgggttaactaatgtaggcttcgtttctgttgtttctttgttgggctttgagcatttcagcttctcttggtttcttattttggtcacagaaaaaagaaaggcggtgagatattgacttgtatttatcactgatgtcgactgggtgactctggattatggagtattgctccattggatagttttctgcatttcgagacaggaaagtggttttctgcggaact

SEQ ID NO: 104601 - DNA, 667 bp, Zea Mays
ctttgatgattttctaggtgatttaaaggaaactgtttgatgcaaatcttttttctttagttttcattgtttctacactgaattgctcctgccacctgaacacttaatgttaattgtatatagatgaagattggtatgtctgatttagtcttttgatgatcatatgcattttaggtaattggttccgagaaggatagcgacagaatacctgtcattgacatcactcttaaggaggatgacacatggatgtttgctggccattcaagtgtttgattgaagatttcttatgactcgtcttatattcgttcttgcattcaaaattgaatgattaacttctgcagtgtacacaaaggctttttgttgacttgtatttctattaggtcatgtgtgctattattttgctggttttggagctatgtttacaggtgacactttgttcaatctatcatgcggaaagctttttgaagggactccacagcagatgtattcctcactccagaaaaatacaactctacccgatgatacaaaagtatatcgtgggcatgaatataccttgagtaattcaaagtttgccttgagtgtagaaccaggaaataaagcactgcaggaatatgctgcaaatgcagctgagttacgtaataggaatatacccacgataacattactt

SEQ ID NO: 104602 - DNA, 2015 bp, Zea Mays
agtaaaacaaaagcagccaagattgtgaaacgaaaacccctcgtgctcccctcccccgcccccatttcttcctgttccctacctccgtcccactcccacggttccaccccaccaccgatggcgaccgccgagcccggcccgtccccgcccgcgcccaagcccacctgcgccgtcacgttcggacgctccaccctcctcggccgctacctggccgcggcgctcgctgcctccggccgctggtccgccgtcgccatcctcgacccctccccaacctcaccgtccccgccgcccggaccgcctgcctcccacatcgtctaccaccacgacgtcgacttctcggaccccgcgcgcctcgtttcagcgcttgccggcgccgcggctgtcttccatgtggacgccaccacagcggccgcctccgggagcgacgggtccttcctctccctccaccgcctcgccgtcgagggcacgaggcggctcctcgcggcttgccgcgcggccggggttgggagggtggtgtacaccggctcagccgacgtggtcgctgctgttgcccgggatgtgataaacgcggacgaggactccgcgccctaccctgacaagttcgggaatgcgatgagcgagctgagggcgcaggtggagatgatggtgctgggtgcggacggggtggacggggtgaggacgtgcgtgctgcgacctagcaatcttttcggtccgggtgattccagcttggtgaggtttgttgctggatatgcaaggtctcccttgggcaagtttgtaataggcagtggcagtaacatgtctgactttacctatgtggaaaatgtggcccatgccaatatttgtgctgagcaagccttgtcttcaaatgcagcttctgtagctgggaagcccttttttgttaccaatgacgaacctatggaaacatgggagtttatgaattgcatgatggaagccatgggttgtcagaggcccaggattaatcttcctgccaagatgttattgtttgcagccttgttctccaaaatgattcatcacaggcttggttttcaaatgctttccacccctcttcttcatccagatacaatatacttcttgtcgtgtacgagaacctttaacacttcaagagccagaagattacttggataccacccaattgtatcattggaggatggaattatgagaactcttgggtcattttcagaactagcagataatttggggttgtcaagaaaacagggctcctgtggatcctcgaaggcagataagctgctaggaagtggaacagctgctgatattcttctttggagggatgaaaagagaaccttttcatttgtcacagtattgtttctgcttttctactggttcctgctttcagacagaacttttgtttcatcagctgccaaatttcttctagtgctctcgcttgctctctttatccatggtgtgctgccttcagaagtgtttggttttacagtcgagaaggtcacatctgatcattttgaagtatcacactcagcattgaggaattcacttatgtgtgtggcttctgcatggaatgggagttttcataaactaaggcttttagcagaaggtgaagactggagtttacttttgaaggtatttgcatttctgtacagcatcaaactaatgctgaactttcagttcagatttttgatgggacttgtactggcatccttgttcattgtcttcattgtctatgaacaatgcgaggaagaaattgacagtttggtggcaaacgcttctgtcaaagtcaagtggctaacagacagagtagtcagaaatttgccggcctttttgaaggcgtatatagcctagaggagacatctgaaggatgtctcgccaactcgccatggtgctcctatctgtaaaaaaccttagttcttttaagctaacatgtactgtgcgatttacccaaatgtttgactagcacttttatattcttgttcaagtttcaccttttttttaattgagaatcctttcccacccctttttac

SEQ ID NO: 104603 - DNA, 1997 bp, Zea Mays
ggagccagctcagaaaggagttggggttgggggcggggcggggcggggggcagacgaggagccgagccaagacaagccaaaccggcaacaggccaacagccaaaccattgcagtgcagtgcgcagcccatcatttcttccttccatgtcacagagaaaaaagaggcaagaatccaaagcacacattcccatcacaccacaccacgcttccagtgccacggcaggcacgcacagcctcccaggccatgccccgcctctctcgtgcttttctagcagtcgcagtcacagtaggacaaggacttgtccagttcagtggcttcagcgtccacaagcgcgttaagcactctcctcccctccccacctcgcaagcttgctcacttctgtcagctaagctaccccgtccccgtggcgactgggggacatcgtttccgtctccgggctcggcagccgcaatgctggcgcagctgctgctcgtgcacctcctcctcctccccgccgcgtcctcggccgaccaccaccgccattaccggggcagaagggcgctgcacgagccgctgttccctctggagagcacgcccacgctgccgccgccaccgcccgcgccgttcttcccgttcctaccaggcgccgcggcgccgccgacgccggtggcgccgccggaggttggctccgcctccacgccagccgacaccggcgcgggtgacgcgtcgtcgtcgccgcacccgacggcgccggccaacatttcgtccctggcaccgctgcccgtctcccacggcgcgccgctccgggccttcctctcatcccaccgcctcctcaccgtcctcgtcctggtcgtcgccgttgctgcggccgtgctcacggccgcgctcgtttacatcctcgcccgccgccagcgtcgtcactcacccaaggaggaagctgcagtgtacgcaaagccctcctctcttgcaccggccaaccccgtgccctacgacggtggcgaccagcatggccggggctcgacggccaccgtctccagcgccagctcgccggagctcaggccgatgccgcctttgccccggcagttccagcagacgcagatgaacttgtcgtcgtgttcaaaatccgttcttgacgccggagcaggaggtaagcgtccttcagagggtgctcctcctcctcctcctccaccacctcctccaccactgctgcctccaatgccaccggtgaaagacaagggcggcgccacagcagctactgctcctccggcgccgccgcctcctctgccgcgagccggcaacggcagcggctggttgcctcggcggcactccgagcgcccagcgaccacggtgatcagggcctcggcgagcgcagttcacccagaagagtctccagggcgcgcgccgtcagagaaaccagcggacgcggacgcggacgcggacgctctgccgaagctgaagccgttgcactgggacaaggtgcgcgcgagctctggccgaccgacggtgtgggatcagctgaaggcgagctctttccgagtgaacgaagagatgattgagacgttgttcgtctcaaattcgacatggagatcctccaagagtggaatcaaggcgccaaattccagttcgtgcagccaggagaacaaggtcctcgacccgaagaaatcacaaaacatcgcgataatgctgagggcgctcaatgcgaccaaggaagaagtgtgcagagcactcctagatgggcaggcagagagccttggatctgagctcttggagatgctgctgaagatggcgcctagcagggaagaggagatcaagttgaaagaatgcagggaggacgctgtgtcaaagcttggccctgctgaaagcttcctcaaggcggtgctcgcgatcccattcgctttcaagagagtggaagcgatgctgtacatcaccaacttcgatttagaggttgactacctcaagacctcctacaaaactcttgagctcctcctcctcgtcggaggagagctcggcgccctag

SEQ ID NO: 104604 - DNA, 1184 bp, Zea Mays
ctaagctaccccgtccccgtggcgactgggggacatcgtttccgtctccgggctcggcagccgcaatgctggcgcagctgctgctcgtgcacctcctcctcctccccgccgcgtcctcggccgaccactgctgcctccaatgccaccggtgaaagacaagggcggcgccacagcagctactgctcctccggcgccgccgcctcctctgccgcgagccggcaacggcagcggctggttgcctcggcggcactccgagcgcccagcgaccacggtgatcagggcctcggcgagcgcagttcacccagaagagtctccagggcgcgcgccgtcagagaaaccagcggacgcggacgcggacgcggacgctctgccgaagctgaagccgttgcactgggacaaggtgcgcgcgagctctggccgaccgacggtgtgggatcagctgaaggcgagctctttccgagtgaacgaagagatgattgagacgttgttcgtctcaaattcgacatggagatcctccaagagtggaatcaaggcgccaaattccagttcgtgcagccaggagaacaaggtcctcgacccgaagaaatcacaaaacatcgcgataatgctgagggcgctcaatgcgaccaaggaagaagtgtgcagagcactcctagatgggcaggcagagagccttggatctgagctcttggagatgctgctgaagatggcgcctagcagggaagaggagatcaagttgaaagaatgcagggaggacgctgtgtcaaagcttggccctgctgaaagcttcctcaaggcggtgctcgcgatcccattcgctttcaagagagtggaagcgatgctgtacatcaccaacttcgatttagaggttgactacctcaagacctcctcctcctcgtcggaggagagctcggcgccctagccgtcgggatgcaatgcagcactgattgtctgagcaggaatctgcatcctgcagtctagaagaagagcagtgcagcctcagacgtagtaggaccataatatactaaatattttgtacctggagaaggtagtttgtagagtaaagtaaagcctatgattcagcatgatgaacatcgtcctcccattagcctaccaaaggtgaaaacgggcattgtacatgattgtgcatgctgagaattattgttggatgatagctttttaac

SEQ ID NO: 104605 - DNA, 2025 bp, Zea Mays
ctaagctaccccgtccccgtggcgactgggggacatcgtttccgtctccgggctcggcagccgcaatgctggcgcagctgctgctcgtgcacctcctcctcctccccgccgcgtcctcggccgaccactgctgcctccaatgccaccggtgaaagacaagggcggcgccacagcagctactgctcctccggcgccgccgcctcctctgccgcgagccggcaacggcagcggctggttgcctcggcggcactccgagcgcccagcgaccacggtgatcagggcctcggcgagcgcagttcacccagaagagtctccagggcgcgcgccgtcagagaaaccagcggacgcggacgcggacgcggacgctctgccgaagctgaagccgttgcactgggacaaggtgcgcgcgagctctggccgaccgacggtgtgggatcagctgaaggcgagctctttccgagtgaacgaagagatgattgagacgttgttcgtctcaaattcgacatggagatcctccaagagtggaatcaaggcgccaaattccagttcgtgcagccaggagaacaaggtcctcgacccgaagaaatcacaaaacatcgcgataatgctgagggcgctcaatgcgaccaaggaagaagtgtgcagagcactcctagatgggcaggcagagagccttggatctgagctcttggagatgctgctgaagatggcgcctagcagggaagaggagatcaagttgaaagaatgcagggaggacgctgtgtcaaagcttggccctgctgaaagcttcctcaaggcggtgctcgcgatcccattcgctttcaagagagtggaagcgatgctgtacatcaccaacttcgatttagaggttgactacctcaagacctcctacaaaactcttgaggcagcatgcgaagagctacagggcagcaggttgttccacaagatactagacgcggtcctgaagacgggcaaccgcatgaacaccggcacgaaccgtgggaacgcccacgccttcaagctggacgcgctcctcaagctagtcgacgtgaagggcgtcgacggcaagacgaccctcctgcacttcgtcgtcgaagaaatcatcaggtccgaaggagccaacattttagccaccggccagacatctggtcaggcaggcgccctcgcagatgacctgcagtgcaggaaggtaggtctgaagatcgtggcgagccttggcggcgagctcagcagcgtgaagaaggcggcagcgatggactccagcacgctgggtagctgcgtctccaaactgtcctccggagccgggaggatcagcgaggtcctgcacttgagctcagcatcagaagacggctgcaagtgcaagaggttccgcgcctccatcggtgagttcctgcagaaggccgaggctgaggtcgccggggtgcaggcccaggaggaccgcgccctcgcccgcgtcagggagacgaccgagttcttccacggtgactcggccagagaggaaggccaccccctgaggatcttcatggtggtgcgcgacttcctcacggccctcgatcacgtctgcagggacgttgtgaaggtgaacgagcgggcagcggccggtgggtggtcgcggcgggtggggattgggaacacgcacgctcctccggtgtttggcgcggtgcggtcccggtccaccacctcctcctcctcgtcggaggagagctcggcgccctagccgtcgggatgcaatgcagcactgattgtctgagcaggaatctgcatcctgcagtctagaagaagagcagtgcagcctcagacgtagtaggaccataatatactaaatattttgtacctggagaaggtagtttgtagagtaaagtaaagcctatgattcagcatgatgaacatcgtcctcccattagcctaccaaaggtgaaaacgggcattgtacatgattgtgcatgctgagaattattgttggatgatagctttttaacaactgatgatcaagctcggtctcacgatagaaactagatagtagta

SEQ ID NO: 104606 - DNA, 550 bp, Zea Mays
tttctctctcttctctctctatcgcccacctctctccacctcctctccccaagccgcgccaccaggagttcgccccggaggaggcccagcccggaggcagtgcggcggcatggctggtggtggtggaggaccggggccgaggcgggtgaaggcggggagccgccgccgtgggtcaaggaggcgctcggctacaaccagcaggcgctcaccatgctcggcgtcggcaacgacatcggcgagaacgtcgccatgccttattgggtgacagacaattgaaaaagagaattgttcttttttatgggcgaagtgttgaagatggctttggtgaaggaaatgtcttgttagcatcaagtaagtggcgacatcacaacccctacaagcttgtgccttaaaacacgaggatacataagaagctggagtgcttttgtgaaggcttttgcgaatcacttgaagcgttaggacttttgtgaatgattttgtaaagtgtttgcaaatatgtgcaaaacataataacatatgtaggttttgtgaatgattttgttgtggtgct

SEQ ID NO: 104607 - DNA, 1494 bp, Zea Mays
gcactagctagctagatacggcctatgggcatggattcctacgccggcgagaacgagccgaaagtcggcagcggcgttggaagccacgtgctgctcctgccgtacccgagccagggccacgtccaccccatgctccagttcggcaagcgcctggcgtactacggcctgcgccccacactggccgtcacccgcttcatcctcgccacctgcgcgcctggcgacgccggcgtccgcctcgcggcggtctcggacggcttcgaccgcggcggcttcggcgagtgcggcgacgtggccgcctacctatcgcggctcgaggccgcgggttcggagacgctgggcgagctcctcgaggacgaggccgcgcggggccggcccgtccgggcggtggtctacgacgcgttcctgccgtgggcgcagggcgtggcgcggcggcacggcgcccgggccgcggccttcttcacgcagccgtgcgccgtcaacgtggcgtacgggcacgtgtggcgccgccggctgcgcgtgccggtggacggggtgctccgcctccctgggctgccggcgctcgacccggatggcctgccgtcgttcctcaaggtcgggaccggcctgtacccggcctacttcgagatggtcgtccgccagttccaggggctggagcaagccgacgacgtgcttgtcaactccttctatgagctggagcccgaggaggcggagtacatggcgtcggcgtggcgcggcaagacgatcgggccgacagtgccggcctcttacatcggcgacgaccggctcccgtccgacaccaagtacggacttgacctctacgagccgaccgccgcgccgtgcatcgcgtggctggacgcgcacccgccgcgctccgtggtgtacgcctccttcggcagcctgtccgacctcgacccgctgcagatgcgggaggtcgcgcacggcctcctggacgccggccggccgttcctctgggtcgtgcgcgcgtccgaggcccacaagctgcccgcgggcttcgagggcgcgtgcggcgggcgcgggctggtggtgtcgtggtgcccgcagctggaggtgctggcgcaccgcgccgtggggtgcttcctgacccactgcggctggaactccacagcggaggcgctggtgacgggcgtgcccatggtggccgtgccgcagtggacggaccagccgatgaacgccaggtacgtcgaggccgtgtggcgggtgggcgtgcgggcgcggccggccccgcccgacgacagcctcggcctcgtgcggaggggcgaggtggtcatgcgcgtcgaggaggtgatggacggcgacaagagcgccgagttcaggaggagcgccgacgtgtggatggctaaggccagggcggcgagcagggaaggcggcagctcggacaggaacatcgccgagttcgtggccaaatatgcacatcggacgccaagtgaatgaagtgatcatcagataaagaaaaagacgccttctagctttgag

SEQ ID NO: 104608 - DNA, 107 bp, Zea Mays
gaatacaataatggcccgtaggttcagatttctattcaaaactgtagtaagaccacatagcacttgcctatcttacacagggtatgaatgatatctctagaaaaaaa

SEQ ID NO: 104609 - DNA, 1635 bp, Zea Mays
tgtatctgcactgcccgcaggccgcagcgcacgcagctaagtgagcagccatggcagagcgagtttcacagcacatcgtccacgttctcttgctcccgaacccgacccaaggccacatcaacccgatcctcgagttcggcaagcgcctcgccgcgcaccgcggcgtccagtgcactctcgccgtgacccggttcgtgctcagcaagagcggccaatcgtccgccggtggcgccgtccacatcgcccccatctccgacggctgcgaccgcggcggctacggcgaggccggcgggatcgaggcgtgcacggcccggctggagtcggccgggtcggcgaccgtgggcgagctcctccggtccaaggcggagcgggggcggccggtgcgcgcgctggtgtacgacgcgttcctgccgtgggcgcagcgggtggggcggcggcacggcgccgcgtgcgcggccttctttacgcagccgtgcgcggtggacgtggcgtatgggcacgcctgggccgggcgggtggagccgccgctcccgctcggcgaggagcagctcgagccgctgcccgggctcccgggcgggctcaggccgtgcgatctgccgacgttcctgaccgataaggacgatcgcgcctacctggacctgctggtgagccagttcgtcgatctggacacggccgaccatgtcttggtcaactcgttctacgagttgcagcctcaggaatcggactacatggcgtcgacctggagagccaagacggtgggtccagcggtcccgtcggcgtacctcgacaaccggctgccggacgacacatcctacggcttccacctctacacgcctatgacggagacgacgaaggcctggctggacgctaggcccgcgcgctcggtcgtgtacgcctctttaggcagcatcgccaagccagacgcggctcagacggcggagatggcggaggggctgtacggcagcggcaaggccttcctgtgggtcgtcagggcctcggagagcgcgaagctacctgaaaacttcgccggcaggaccaccgaggagaggggcctcgtcgtgacatggagccctcagctcgaggtgctggcgcacccggctgtggggtgcttcgtgacgcactgcgggtggaactcgacgatggaggcgctgggtgccggcgtgccgatggtggccatgccgcagtggtcggaccagaccatgaacgccaagtacatcgaggacgtgtggcgcgtaggcgtgcgagtgcgcccggacgggagaggcgtggtgaggaaggaggagctcgagaggtgcgtgagggaggtgatggaaggagagaggagcttggactacatccggaacgctgccggctggaaggagaaggccaggagtgccatgagcgaaggcggcagctccgacaagaacgtcctagatttccttggcgcgcttggactgaaaaaataaatggccggggcagatgtctttgggacttgcttgtttcagcgccccctcttcagttattgttctctttcctgggcccttgttgttgtggaataatgtgcggcgttggctgcaaggtaaaatcagttgtgacagtgaagctaatttactgaaactgatatgctaaggtccgctaatatgaagctcgatttag

SEQ ID NO: 104610 - DNA, 2668 bp, Zea Mays
acgggtgaaaatagaaaaatcaggtgccggagactaccgaacgtgtgctcgcttccttcagccgtcgtcgtcctcgtctcctcgatgataagaaggggaggtggatcactcgaacctaataagtgagcttccaggccggggagagggactggccggcggaccgccgatggaaaactttggaggctcctaacttccaagataccaactagctcccagcctcccaccgtcttctttccacccttggctgatgctagggagatgggatttttggagctctaagacaaatagttctgctccttgcgccctgcgtgttcttgatctggcctctaagtttgttggctgttttctcgtgtttgaggtgatatctcgattctaaaaagctaccagatttcttctccctgtttgtatggacaaatttgggaatgaaccctagtctgtgtgcaaagcagccaaattggtgttcttgcggatcaaagctaaagctgcagcagttggtgaggatacaagagatgcagggagaaacaagagaagggcttgttagattctgcagagacactcttattggttgatattttttccatcaactccggccagatttgcggaacctcgcaattttaggagccatttgatcttggacatggagaagcaacccagcgtgcgacatggtgccctagagaaactgaagagcttccgggggatggagaagcagagaagcttcaagttcttgtccatggagaagcagcagagcttcaaaaggaacaaggacagccctgggaagcggggtgacaccgcgctccacctcgcggcgagagctggcagtgtcgcacatgttcagaagatccttgcggagtgtgatccagaactggtggtggagttagctggccgcacgaatcaagacggcgagactgcgttgtatgtgtctgctgagaaagggcatgttgaggttgtgtgtgagattttgaaggcttcggatgtgcagtcagccgggatcaaggccagtaacagcttcgatgcattccatattgcggcaaagcagggccatttggatgtcttgaaggagctgttacaggcctttccctcattagcaatgacaacaaattctgtaaatgccacagctttggacactgctgcaactcagggccacgttgacattgttaatcttctgctagaaacagatgcaagccttgctaggattgcaagaaataatggcaagacagttttgcattcagcagcaagaatgggccatgtggaggtggtcactgcactgttaaataaggacccggggattgggtttagaacagataagaagggacaaacagctctacacatggcttcgaaaggccaaaatgcagaaattctgcttgagttgttgaagcctgatatctcagttatccatgtggaggacagcaaggggaatagaccattgcatgttgcaactcggaagggaaacaccattatggttcagaccctaatatcagttgaggggattgaaatcaatgcggttaatagagctggagagactgcttttgctattgcagataaacaaggtaatgaagagctcgtcaacatcctgagagaggtcggtggaggaactgcaaaagagcaagtaaatcctcctaatccagcaaagcagcttaagcagacagtcagcgatatcaggcatgatgttcaatcacagatgaagcaaacacgccagaccaagatgcaattccaaaaaatcaagaagaggattcagaagctccacattggtgggctaaacaatgccatcaactccaacactgttgttgcggtgcttattgccaccgttgcctttgctgccatattccaactccccggtaattttctggaggacatgactcaagcacctgacccagacatgaccttggggcaagcattgatagccagtgatccagcctttataatcttcttggttttcgatgctttggctctctttatctcgcttgctgtcgtagtagtccagacatctctaattgttgttgaacagaaggccaagaagaagatggtctttgtgataaacaagttgatgtggctcgcatgcctctgcatctcggcagccttcatagcgctaacctacgttgtcgtgggtcgagacgacgagtggctggcctggtgtactatggcaattggcactgttaccatggtggccactgtcggttccatgtgctactgcgttgtcgctcacaggatggaagagaagagcttgaggaagatcaggaggacctccatgagccagtcatggtccatatcaattgactcggaagcagagctgatgaacagtgagtacaagaagatgtatgccctttaggatgatgtctgttcttgtcggctgagtcttgtatatattggtacccatttgcctgagaccagtccatggcattgagtgggattgactcaatcagaactatatttagtcctagaacatggcacctgtatgtaactgtagtcttgcagcctccagacatgaacataggggtgaagtctaggtgataggtgtagtcactttttttgttggcaaaatacaaatattgccaagcatgatgtccctatatcatgttttgtgtgggtgtggatggcagtgaaaaatgaaaatcattagattgtatctgtatggtagaatagtatggaataagttgtctttatgtcaaaa

SEQ ID NO: 104611 - DNA, 1165 bp, Zea Mays
gtgctcgcttccttcagccgtcgtcgtcctcgtctcctcgatgataagaaggggaggtggatcactcgaacctaataagtgagcttccaggccggggagagggactggccggcggaccgccgatggaaaactttggaggctcctaacttccaagataccaactagctcccagcctcccaccgtcttctttccacccttggctgatgctagggagatgggatttttggagctctaagacaaatagttctgctccttgcgccctgcgtgttcttgatctggcctctaagtttgttggctgttttctcgtgtttgaggtgatatctcgattctaaaaagctaccagatttcttctccctgtttgtatggacaaatttgggaatgaaccctagtctgtgtgcaaagcagccaaattggtgttcttgcggatcaaagctaaagctgcagcagttggtgaggatacaagagatgcagggagaaacaagagaagggcttgttagattctgcagagacactcttattggttgatattttttccatcaactccggccagatttgcggaacctcgcaattttaggagccatttgatcttggacatggagaagcaacccagcgtgcgacatggtgccctagagaaactgaagagcttccgggggatggagaagcagagaagcttcaagttcttgtccatggagaagcagcagagcttcaaaaggaacaaggacagccctgggaagcggggtgacaccgcgctccacctcgcggcgagagctggcagtgtcgcacatgttcagaagatccttgcggagtgtgatccagaactggtggtggagttagctggccgcacgaatcaagacggcgagactgcgttgtatgtgtctgctgagaaagggcatgttgaggttgtgtgtgagattttgaaggcttcggatgtgcagtcagccgggatcaaggccagtaacagcttcgatgcattccatattgcggcaaagcagggccatttgggtgagctttcattccttcataattaaatagtcgagttttaggtagtgtgaattggaattcttttatatacggattcactggtttgtactggcagttctgtgatcttctgtagtactcattctgcttgcaattggtatgtttataaaacttgacttgtatctta

SEQ ID NO: 104612 - DNA, 685 bp, Zea Mays
cgtaaggcagcggatctggttccgtctggctcggcccgtcaagccggctgccggtaggagcggaggagacggcgtctcgccgctcgcttcgtttccgccttccccctcccgcaagtcgccgccggctcgcattcgtggttccgcgtggggggtccgtggaaacgcgacaagagaggcggaagcgatggcgaagtcgtgcaaggggttggccatggagctcgtcaagtgtctcagcgagaccgactgcgtcaaggtgcagaaaaggccgtacaaggagtgcgctggggagaaggtgccaaacattaccagcgagtgcgttggcctgcgggagacctacttcaactgcaagaggggccaggttgacatgcgggcccgaatacgcgggaacaagggatactagtgatgtgcctgcaatatccacaatcagttttggtttctagccatgcttctgtgacattgaggtgtaatgataacatggtttagtttgcccgtgttctgtttttgataggtgaggggaactcacaacacacgtggcttcaattgatgaggggagtgcattcctgtctacattctatacatttgatattccctctgttttaaatgtttgacgttttgttactatgatctgtgcgtgtagcaaaagttaatctatggcccgtttggtttagccgtagattcctgaaaa

SEQ ID NO: 104613 - DNA, 679 bp, Zea Mays
cgtaaggcagcggatctggttccgtctggctcggcccgtcaagccggctgccggtaggagcggaggagacggcgtctcgccgctcgcttcgtttccgccttccccctcccgcaagtcgccgccggctcgcattcgtggttccgcgtggggggtccgtggaaacgcgacaagagaggcggaagcgatggcgaagtcgtgcaaggggttggccatggagctcgtcaagtgtctcagcgagaccgactgcgtcaagaaaaggccgtacaaggagtgcgctggggagaaggtgccaaacattaccagcgagtgcgttggcctgcgggagacctacttcaactgcaagaggggccaggttgacatgcgggcccgaatacgcgggaacaagggatactagtgatgtgcctgcaatatccacaatcagttttggtttctagccatgcttctgtgacattgaggtgtaatgataacatggtttagtttgcccgtgttctgtttttgataggtgaggggaactcacaacacacgtggcttcaattgatgaggggagtgcattcctgtctacattctatacatttgatattccctctgttttaaatgtttgacgttttgttactatgatctgtgcgtgtagcaaaagttaatctatggcccgtttggtttagccgtagattcctgaaaa

SEQ ID NO: 104614 - DNA, 580 bp, Zea Mays
gccgcaggttcccgttgcctgtttcaatccgatttaggcgtaagcgtagttagctgcggcggacatcacccgcaagctagtgccgggcgatgagatccagtatgggtgatactggctatttctattctcatgatgcggttgtgtgcaggtgcagaaaaggccgtacaaggagtgcgctggggagaaggtgccaaacattaccagcgagtgcgttggcctgcgggagacctacttcaactgcaagaggggccaggttgacatgcgggcccgaatacgcgggaacaagggatactagtgatgtgcctgcaatatccacaatcagttttggtttctagccatgcttctgtgacattgaggtgtaatgataacatggtttagtttgcccgtgttctgtttttgataggtgaggggaactcacaacacacgtggcttcaattgatgaggggagtgcattcctgtctacattctatacatttgatattccctctgttttaaatgtttgacgttttgttactatgatctgtgcgtgtagcaaaagttaatctatggcccgtttggtttagccgtagattcctgaaaa

SEQ ID NO: 104615 - DNA, 1059 bp, Zea Mays
gtcggcgcgccctcgcggcttcggggagagcacccagtgctggccgtgcgggcggacggtgagccccttgaccttggcgaagagcgtgacggcgcggcgcacgccgcggtcgtcggcggacgtgaagtagtcgtggccgaacatgacgccgccggggcggagcacggcccaggccaggttgatgtcggcccacgccgagtggaagtcgtggccggcgtccacctcgatgaggtcggcgtagacgccccactcgcagagcgcggcgagcgcggacgccgtggagaagggcagcggcaggacgacgcgcgccccctccgccgccacgacgttggccatgaactgcggcagcagcagcgcgtcgccgtgccgcggcggcggcacgtcgcggcggaagcggtcccggaacgccggccagccgcggaagtcgtcgacgcagaggatggccggggacagggacaggttcctggccacggccgccatgtgcagcgccgacgcgcccaggaacgcgcccagctccacgaccaccgccgggcgcaccgcctccatgagctccgcgaacaccgcccccgtcgacccccacccgcgcgggcgcgccgcggccgggcgcagcagcgccgccgtgcgctcgggcgggaaccccgcgtaggggctctcgccgccgaagagcctgtcgagcagcgtccgcaccacggcgtcgctcggcaccggctccccgcaccgctccctgaaccggaacaggtcgtgcggaggcgaccgcgggtagctcgacgcggcggtcccgttcgagttcgacgacgccgggaataaagcgtcggcgtgcggccgcgcgatcgtcgtcgcctgggactgggactgggactgggacggtctcggtggcggcggccgggtggacgacgacaggaggcccagcgagtagcccacggcgaagacgatcaggaaggaggcgagccgcgccaggtgcggccgcagcctgggcggcgcggcggaagcggacgacgcccccgccggtggacgtggcttcatgctggtcgcgcacgccacaaaggagtctcctttgcg

SEQ ID NO: 104616 - DNA, 1846 bp, Zea Mays
cgtaggcgtaggctgctgatgcgcggacgcgaaccagcccgagcgcccgtctctgattcccttttcttccctttaaaaacacgcaagaacctacccggtgacgctaccaaacgggcggggccgcaccgaccgaacctaaccgagagcacgagcatacccgtcccgactccgactgcagagcatcagccgaggagaaaagtcgggagaaacgcgcgtgacgtctgcccgcgtcgtatgcgccgcgctgccgtcgccgcgacgacgacgacgaccaggatggcagccgaggagatgagacgggcctccgcctcaacggccacggcggagatgccggcgtcgccggcgccggcgcaagcggggtcgaggtgggcgcgggtgtggccgcgcgcgctccggtggatccccacctccacggaccgcatcatcgccgccgagaagcgactcctcacgatagtcaaaactggatatgtccaggaacgagtcaacattggctctgctccacctgggtcaaaagtaagatggtttaggtcagcaagtgatgaaccaaggttcattaatactgtaacatttgatagcaaggagaatgcccccaccctggttatggtccatggctatggagcttcacaggggttcttctttcgaaactttgatgcccttgcaagccgttttagggtgattgccattgatcagcttggctggggtggttcaagcagacctgacttcacatgtaaaagtaccgaagaaactgaggcatggttcatagattctttcgaggagtggcgcaaggccaagaacctcagtaattttatattgcttggtcactcttttggaggatatgttgctgcaaaatatgcgctaaagcaccctgaacacgttcaacagttgattttggttggtcctgctggcttctcatcagaaacagagcatagctctgagtggttaaccaagtttcgagcaacatggaaaggcatgctaatgaatcgtctttgggagtccaattttactccccaaagggttattaggggattgggtccttggggtccaggtctagtacagagatataccagtgccaggtttggtacaagttctactggtgaattactaacagatgaagaatcggcattgatgacagattatatgtaccatacgttagctgccaaagctagtggagagctgtgcttgaaatatatattttccttcggggcatttgcaaggaaacctcttctgcagtgcgcgtccgattggaaagtgccgactactttcatatatgggcagcaagattggatgaactaccaaggcgctcagcaagcacggaaggacatgaaagttccttgtgaaataatcagggtgccgcagggtggacattttgtgttcatagacaacccttcagggttccactcggctgtcttctatgcgtgccgtaatcttctatcagtaaatggagaggagggattcacatttcctgatggcctaatatctgcgtgaagtggcatgttcaacaagcttgctcaacaacagtttacataaagcaaagatatacgattgtggaaatcattgcccatttccaccaatttgcttgtatacggattatgctgtgtatatattacataacaaatgtattagtatcatttaatgcacgatttgtgaaagggcctgagtttgtatttagcgaattttaggttggtttttttccctttttcttctttcagtgcgcttgctagtcaatcccatactataagccgtgatcattttttgtttatgtctcataatataaggcacatctcactacacacgtttatcgatgcagtgatatatagggaattaaatacaatttttggtttttaaa

SEQ ID NO: 104617 - DNA, 2083 bp, Zea Mays
gccgctggactggttgcgcaacctttctcatcagtcccctctctctggtctactcagacttcttcgatgagcctaaacccacatgctgctggtcgcgctgctgcacggggtaggagagcatggcgccggggggtggcacttcggcggccggcctcgtcgccgccacctcccggattgcctccctcggccgcgcgggcgacgcggcctccgcgcgcgccatgttcgacgccatgccgcggcgcgacgccgtagcctggaacgccatgctcaccgcctacgtgcgcgccgggcagccgcgcgacgcactcacgctcttctcccgcgcgcccgcgcccgacgcgttctcgctcaccgccgcgctctccgcggccgcggcactccgaagccccgtcgccggagcgcagttgcacgcccgcctcatccgagctggcctgcgggcgctactcccagtgggcaacacgctcgtcgacatgtacgccaagtgcgcccgcgctgacgacgcggcgcgcgcattcggtgagatgcgcgagcgcaatgcgctgtcctggtgctcgctcctgcatgcctacgtcgtgtcagaccacctgatgctcgcacaggaactgtttgatcaaatgcccaacagaaataatgtcgcctggaacacgttgcttatggggtattcgcgcagtggcaatgctaaccagtgcttgcttctcttcaacaagatgcgggcggaggggatggcctgtgatggggcaacactctgcattctcgctgatgcttgcaccgagctggcccatccatctgctggttctgcaattcacaaggttgcagtgcagagtggatggagtgcaatggccgaggtcagtaactccctgatttccctgtatagtaaattcagtttgcttgacgatgccgtgcggatctttgagtccatggaggtgcggacgattgtatcgtggaattcactgattgattcttacatgaagcttggctgtgtagaaaaagccacttctctattcagacgtgtacctgagactaatgtcatctcctggactgcgatgatcggaggcctcgcaaggaacggctgtgctgatgaagcactcgcgctatttattgtgatgctggcacacgaacacatccatccagatgacttcacatttgggagtgtgctgcatgcttgtgctactgcggcatctctagcaagtggaaggatggtccactgtagggcgttccgaagtgggtttgcggcctacttgtacgtggccaacagcttgatggacatgtatgccaagtgcggggatgtggagggtggtactaatgtgttcggtgccatcgtcaacaaggatctggtctcatggaacacgatgttgtttggatttgcaataaatggatgggccaacgaagcactggtggtgtacgacagcatgaaatcccatgaagtctgccccgatgaggtgacatttgcaggtttactcacagcctgtaaccactctggtcttctggagcatggggaaagcttcttcgagtcaatggtgtctgttcatggaattcagccaaagccagagcatctgtcttgcattcttgacatgtatgcaagatcagggaacattacaaaggctatggagatgttggatctttattcagaaacgattcgggcacataacagtgacatacgtgaagctctgcttagcgcatgctctttggaacacctgaatttcagggttgcgaggaaggcgatggaagacatggtagcgaccaagtctgcgggagacgtgggctatgtcatgctgtccaacttattctgtgccgctgggcagtggaaccaggctgagcaagtgcgaatagcaatggctgagcacggcatcaagaagacacctggttgtagctggatcgaagtccaaggtgctgttaaggtttttgcatcaggtgcacaagatcttgatcattcaggttctgtattggatgttattagcttgttggatgaagagatgacaaatagcatgtattttgatttgtagtcgtatgtataggtcatcagtcatcacagcgtcccgcactgtgagtgttattatttccaaatggaactttcttcgtttcc

SEQ ID NO: 104618 - DNA, 284 bp, Zea Mays
atgacttcatctctgccctgtgggcaaacgtctttattgttacagatgaccgagcgcctggcgctttccgacgcgcattttcggcggatagtcaattgatctatcaacgagccgggatcgttctggctgaccataaacgcgacatggtttacaaccgactggtttcgtcgttgcgttcgctgggactgacggattcggtcattatctgaacttgctggaatctaatcagcacagcgtgagtggctgcgtttatcatttcgctgaacaccaatctgacggctttt

SEQ ID NO: 104619 - DNA, 1612 bp, Zea Mays
gcgctcacgttttgctcgctctgccttcgcgttcgcattcgctctcgccgtcacaaaaacctcgccgccggcattccctagttcaccttcccctcgcaatgccctcctcctgaaccctagctccggctcagtaccatcctccacccctctctccgtcgcgatggacgaggactggagcaccgatcccgctcaccgccgacgtcgcctcctcttgccgacgagctgtcagacccagacccagaacccgccacagacacagcccccgctccccatggacctcgcctcccagtacaaccgacgctttgcaccgtcacttttcctcccaccgatggcgccccgcctggcttccagctccggcttctcggtcttcagcaactaccagagcccgccgacgctcgtgcccacggcggcgggcgccggatcgcatctcgctcggtcgctcccgaagctgcctcttttctccatggactctctaggtcttctcccgtactccaccaatcctgcggcgggggcggcggtcccgcgttccctgtcgtcgcctggcggctccgagcagcaagtgccgtccgcgtccggcctgccgccgcgcggggcggggcaccggaggtcccgtagcgatttcctcgtcgggttctcgcgcccgaatcagctctccctgccgatgactcctgcagctggggaatacaggtcgagggaagcctccgtactcgaggagctattccgctcgtacagggacccgaatctcagctcctccggggataacaacagtgaaaggaacgatcacttaggcagacaactcaccggccaaggcgcttggagccccggtgatagcagcgacaatgacgctgagagctgggcggctagtggcagcgcagccgcaggcaccagcgctagccatagccatactcgccattgccgcagcctgtcggtggacagcatcatgggcaatctcaactttggaggcctgggccaggtttctctgagactgccgcctccgtctccggtggcaggcgccggcggcagcctctcgcgtgctggaagtggggcatcgggcggtgcggttgcgactgcctcttctcaacctgccaacggagagttcagcgagtctgagatgaaaaagatcatggccaatgatcgccttgctgagctcgctcttgttgatcctaggagggtcaagaggattctagctaatcggatctcggcagcgaagtctaaggagcgcaaggtgaagtacatgggtgagcttgagcgcaaggttcgtgtgctgcagatggaaactagtacgttatcttcaaaagcagcatcgtcgcagagggaatgcgaggcacttagaattctgaacaatgagatgaagatcaggctgcaagcaatggagcagcaagcacagctgaaagatgctctgaatgaagcactgactgctgaagtgcagcgcctgaaacaaattgctggtgaggccagtgatcctcatgtgccgaatatgagccgcaagattgtcgaacagcagctgcagaagcagccatcggaggcccagctggctgagcagcagcagccacaggaatcagaggagttcaaagctcagcagaagcagtggaaccattaataagacgcgttt

SEQ ID NO: 104620 - DNA, 1055 bp, Zea Mays
gccaacaaaatctagttaatccgcgcacttataatgtacagacaccatggcgcagagcaccccaagagagctccaggaacctggcggtttatgtatgagcagttgagcacagagccacacagacatggcggagcagccaagcagatggcctcctagggctacgagttcactggcctgtctcctgtccacacaagtagcacaagcaccaacgacgagggtgacgcgagctcgctacttcatgttcagcaggcaggcaggcagaggatcgaagcagcaacctcacgcagctcccgctcctggctctggcacggccgccgtcctggacgacaggttctggagcagcgcgaggttctcgcggcggagcgcgctggccctctcccggagcctctcgttctctgcgatgatgcaccggttctccagatacagcttcaggttcaccatctccatggcctctgctcctccgtctcgcaacctcctcagcctcaacctgcatgcatgcgtacgtacgtgtggcgcgtgtgtggttgcaggaaactgttgctgctgggcagaggaatcttgagaaactcgaacagagcacgctagttacctcctccttctcctgacggccagcgtcttctttagctgccgctcgaggttgacgacgacaagagacgggtgctccttgccgctgccgctgctgctccagaaccaggagccggagcacatgttgctgtggacggccgatggcgtaggcggcctgctcctagctagattcttcagagctcggcgacttaatttggagatgaagtgttccaagggcttcaaggctatatataaagatagatctcgcctcgcctcgcctcgcctcagggcttgggtggtcgctttaggttttttgtttggtggtgcatgcacgcattgacgcgcgcgacgcatgtgagccgagagagagagagagatggaggcagcagggcagctagctcctcctctccatcatggagcatggactacggcatggcatgggccaatggatcttccggccgctaatcatttagcagcatatttccgtcgga

SEQ ID NO: 104621 - DNA, 678 bp, Zea Mays
atggcggagcagccaagcagatggcctcctagggctacgagttcactggcctgtctcctgtccacacaagtagcacaagcaccaacgacgagggtgacgcgagctcgctacttcatgttcagcaggcaggcaggcagaggatcgaagcagcaacctcacgcagctcccgctcctggctctggcacggccgccgtcctggacgacaggttctggagcagcgcgaggttctcgcggcggagcgcgctggccctctcccggagcctctcgttctctgcgatgatgcaccggttctccagatacagcttcaggttcaccatctccatggcctctgctcctccgtctcgcaacctcctcagcctcaacctcctccttctcctgacggccagcgtcttctttagctgccgctcgaggttgacgacgacaagagacgggtgctccttgccgctgccgctgctgctccagaaccaggagccggagcacatgttgctgtggacggccgatggcgtaggcggcctgctcctagctagattcttcagagctcggcgacttaatttggagatgaagtgttccaagggcttcaaggctatatataaagatagatctcgcctcgcctcgcctcgcctcagggcttgggtggtcgctttaggttttttgtttggtggtgcatgcacgcattga

SEQ ID NO: 104622 - DNA, 3725 bp, Zea Mays
gtgggtcaagcaagaaaaccattatcacgaaggcaaacaatacgagcagaagatctgtttcaaatgttgggttgtacttttgtctattttcatgaaaactccgaagggttaacatgtgtaataattatgtcatcataagaagtagtaaaacatgactgcataaggatctcagcgaaaagaatatctgaaaatagtcgctggtctacactaatcaatgtttcattcatagcaggaacacaatggcatctcacaatcaagaacataaaaattggggacagatacgtttgataatcatatcagcaaacaacaaacacgaaactgcacttttaacccaaaggaaatatcttacttcaagagactctgaattgtagaagaaatgccacgtgcaagcacacattgctccacctagaagtggaacctattcggcagaaatgaaaatttgtcagtcaataaaacgtaacataagcagtgtcaaaacagttggaaatttatgaacatatgaactccctaaatagcaaagttctgcaaatagaagaaatacataaaagtttcttctgctcaagacgacactgaagtgaaccgtttctacgacaaaatcttaaaacatcgcaatctgtagttctacaggcgggatagagaagaaccaccacacatttcttcagcaaacgatatcttagctacgacgaaatttacgctcaccatcccccacgagaggcctttccaacccttgagccccgtcttctcgccgtagtcccaaaccagccacatcgccgtcaccctgcaacgcaaatccccgtcagggattcagacattcactcctcacagagcttacaggcgcggaagcagttgttgctagccggtagcagagagaagcggcaccactcggcgacgctggagacgtggacggcccaggtgggcagcgagagcgcgttcgccggctcggacagcgcggcgagcgccggtggtgaggcggccgcggccgccgccacggcagcagctgccgccaggcccatcccacctgtcagacggactgcggaggacggtctccgctgcttacgtcgaggtggcggcggaggaccggagggcgctagcgttgccacgagccggagggatgccattggagccggaggttggcgctagcgctaccgtccgtgaacggtcaaaaatatcagtggcaacgtcagcactcgaacctgtcttgcggtcggtcacgtgcccctcacgcgctgcactagggtttccgcagcatatctaaatactggagcacccccgtccgatctccccctcttttccggctgcgccttcccctcgcagccgccagtcctcaacgccactatcagcagccaccgcccgttacttgtgatgtctcccgccctcgccgctgccgtggagcccatggccgtcgacgactccgcctccaagaaggccaagcgcaagcagctcaaagccgctgccgccgccgccgccgcggaggcagaggaggaggctgcttcggccaagaagaaagagaagaaggagaagaagcggaaagcgaaggagccgtcccctccgctcccgtcggccgcatcatctggcgaggagaagagcagcaccagctccgaggagacagcccccaccgcgaagaaggcgaagaaggacaagacgaagaagaatgtcgaggtctcgtcttcagcctcagatgacgacggcgagatcacggccggcagcgacgaggaccccgcggacccgaacgcgctgacgaacttcaggatatcggagccactgaggcagagcctcaggtccaaggggatcaaggcactgttccccatccaggccaccactttcgacctcgtactcgacggcagcgacttggttggccgagcgcgcaccggtcagggaaaaactttggcttttgtcttgcccatattggaatctttggttaacggggcaaataaggcatctaggcggactgaacatggcaggaccccaagtgttctcgttctgctaccaacaagagagctggccaatcaggtgcatgccgactttgagttttatggtgcaacatttgggctttctgcatgttgtgtgtatgggggttcaccttatcgtcctcaagaaatggcattgagaagaggcgtggacattgttgttggaactcctggtcgtatcaaggattttattgtaaaaggaactctcaacttgaaatgcttgaagttccgtgtccttgacgaagctgatgagatgcttaacatgggctttgttgatgatgtcgagctcattcttggcaaggtagaagatgctaccaaagtacagacacttctgttcagtgccactctgccagattgggtgaataagctctctatgaggtttctgaaagttgacaggaaaacagttgatcttgtcggtaacgagaaactgaaggccagtgcatctgttaagcaccttgctcttccttgtaacaaggcagcaagggcacaacttattccagatattatccgatgttacagccatggaggccgaaccattatcttcactgagacgaaggattctgcatcagagctttctggtttgattcctggatcccgtgccttgcatggagatgttgtgcaagctcagcgtgaagtcattcttgctggatttcgtagcgggaagttccaggttttggttgctacaaatgtggcggctcgtggtctggatattaatgatgtgcagcttatcattcagtgtgaacctccccgtgacgttgaagcttacatacaccggtcaggtcggacagggagagcaggtaatactggtgttgctgtcatgctttatgagcccagatataagtacagtgtcagcagactagaaagggaatctggggttaagttcgaacatatctctgcaccacaacctactgatgtagcacaatctgctggcagtgaagctgcagatgccattgcgagtgtgtcagacagtgttattcctgtcttcaggcagcaagcagagcagttgctaagctcttccactctgtctgcggctgacttgcttgccaaagctcttgcaaaggcagttggttacacggacataaagaaaaggtcattgttgtcttcaatggaggattacgctacactacatcttcaaactggcagacagatgtggtcacctgggtttgcttttactatattgaaaaggttcatgccagaagagaaacttgcagatgtaaagggtgcaaccctcacggctgatggaacgggggttgtatttgatgttcctgcagcagatgttgaagattacattcaagcttcggagaatgccgcacaggtgacaattgatgaagtccagcaattgccacccttgcaagagaagcagcagcagcagtcaagaggcaactcggggggaggaagatttggccgtggaggtggcgggagattctctggtggtggccgtgggggcggcttcggtggtggcggaagaggcagaggtggtggtggcggcagggggaggcggcggcaatagatttaacaggaggaattagaagctgctgcaatcttaacggacgtttcagtgacgtagttttgaggaagagggggagggaatattctcagttttggctgcaattgtatcgggttttgtttatttgttagcgttcgtcaacgagaatacgacacacatttttgccaacgcaagaattcgcgtttatctactcgaaatcaaccaacgtgttattactaagtaaagctataaacctattgttttaacttgac

SEQ ID NO: 104623 - DNA, 549 bp, Zea Mays
ccatccactgggtggcgtcgagcctcgcggggtagaacagggacgggtcctcccaccccgtgccccactcggagtccgtgaaggtgttcatgccgaagtggaagaacatgatcacctcgcggcgctgccatttcagctgcgccgccgacgggatcggcagcactggcagcggcgttggcgtcgcgcgccaagcctctgtcgtggagatgaggacggctacggccagcgccgcggtggccagggacagcaacgggctggccatcgtgtcgactgttgtcggtgcttctttgcccgggacggccatgtgtagcgaactaacgatatatactggccactgggcggcccaagcactgggagaagagatttttgctattatgggaaatggccgggtgggcttcgccataataaaattaatgccgcgatgttaggaaaaaatggaaaggaaacagtttatctcttcgctcgaatgggacgctgtcaccattgcacgacattgctcgaatggctgcgtctcaggtacaggtaactgatttctttcggctttggctt

SEQ ID NO: 104624 - DNA, 542 bp, Zea Mays
ggagaaaatgttgtgtagaagatccagtacaagagcatcatgactcagggcaccaataataggaaagagtagagaccagaacaactgatttgaggctaatggttgttggaggtgcggatggcgacatggtagatgaagctattgtggaatcgacaggacgcgtaggtgtgccagatgcgccgcgacatcgtcgccatcatctgcaaccaccaggacaccataacatcaggcacgaagacaatgaggacaatctgaatcgaataatcagtggaaatgtcccgtatccagttgatcaacatcaccttgacaatccacatgttaaagccaacttactctttcaggcacatttctccgaagcagaactgccaataagcgactatgtaactaccttgaaatcagtgcttgatcggagcatacgtatcatataggcaatgattgatgtatgcgccaatagtggatggctaatgagtgcattgacttgtagatgatcatacatgtgaattgcattggatcaactttcttttttcaactatataaaaaat

SEQ ID NO: 104625 - DNA, 1254 bp, Zea Mays
accctgcgcccctctcttgttctccgtttccccgcggcgtactcttcctgctcttcctccccctctgtttatctctctctcggtcctcccgtgtccatcgcgtgcgctctgtctccggtggcgccgcctccgccaccctgcaccaggtagccataccttcgccggagacgagcgcccaccagatcagattcgtggatatgtctgataatgagaaattggtgggggagggaaccacccgccgaggggcggactgggaagttgtcactctcacagcatctgcctatgaagcagcgccagggcctgttggaacggaagtaaagcctgttaacgaagatcaagagcgtagttcatccgatgcactgctcatgtctgaccactttgtgtttccgccgagtgaacacgagaacctgccaatacaaaccagttttgatgagatacatgctgagaaggatgtgcagaaacctagtaccagtgtggaggattatagtatcaagaatgatgttgggtctgagagagttcagtttgacgatgaagggaaacacctctcagatgatgatgtggagatgaaagatgacacccctgggtacggttcctctcacgctgaagatgatgcacatggttttgttgcccatggtgatggcattgagtctggtgaagattttgatgaaaaatcaggccaccctttagagctctcagacagcaagagctgtgatactggtgcctcttgcaaatgttggttgaagaagcatatgacatgcctgtataaccaaacaaaggaaacaaatgctatctggtctgtggtggttgcagctgcactagttggtattgtgatcttgggacgttggcacaaagataaattccaccttaaccagcttaagtggtgctctggctcagcagtgagaggatgatcaacaattggcttgttgaaaactcagatgagtcaattcaactgtcaccaaaatggttttggaatattgttgtgacggtgacgaaaaggagtatgttcaatgtaataatatgttcaactggaatttcacttgccacctacaatgagtgcctcgtgggcttctaagtcaaactcactcctgccatacacattatcttacagtttttcttgcaacctggcacatgatttttggttcctggcttcctgctacttgctgtggtgtatcatatatgttgactgatggctgtagaacatagtacaattgcatactgcaaagtctgttgaaattttggtggttctgcgagaac

SEQ ID NO: 104626 - DNA, 1413 bp, Zea Mays
atggaccgcaaagatgtcgggatcctcgccatggacatctacttcccgccctcctgcgtgcagcaggaggcacttgaggcccatgatggggcgagcaaagggaagtacaccattgggcttgggcaagattgcatggccttttgcagcgaggtggaggatgtcatctcaatgagtttgacggttgtcaattctctgctgaaaaaatacaagattgatcccaagttaatcggtcgcttggaggttggaagtgaaacagttatagacaaaagtaaatccatcaaaacttggctgatgcagatctttgaggaaagtggtaacagtgacattgaaggtgttgactccagcaatgcatgttatggcgggacagcagccctactgaattgtgtgaattgggtcgaaagtaattcctgggatggccgttatggtcttgtcgtttgcacggatagcgcggtttatgccgaagggccagctcgtccaacaggaggtgctgctgctatagcaatgctcattggtcctaatgctccaatttccttcgagagcaaatatagagcttctcacatggctcatgtctatgatttctacaaacctgatcttgcaagtgaatatccggttgttgatggtaaactatcccaaacatgctacctaatggctctagactcatgctacagacagttctgcaacaagtatgagaagattgcgggtaaacaattctcaatttgtgatgcagaatattttgtgttccattctccatacaacaagctcgtgcagaagagtttcgctcgactttattacaatgactttttgcgcaactgcagctctgttgatgatgatgctaaagagaagctccagtctttttcaaatttgactggtgaagagagctaccagagtcgcgacttggaaaaggcctcacaacaggtcgcgaagcacctccatgacatcaaagttcagccatcgactctgcttccgaaacaaattggtaacatgtatactgcatccctttatgctgcattagcatctgtgctatataacaagcatgatagtctgaatgggcaaagaattgtgatgttctcttacggcagtggtttgacatccactatgttttcattgaggctaaacaatggccagcatcccttcagcctatcaaacattgcttcagttcttgatgtcaccgagaagcttcagtcaagacatgagactttgcctgagaaattcgttgagacactgaagctgatggaacaccgatacggcgcaaaggacttcgagacgagcagagacacgagcctactgcagccgggcacattctacctcaccaaggtcgactccatgtaccggaggttctattcccagaagctgtccgaggaaacaggcggcgggaaaaccaagtgctgcaacggcctcgcaaatggccactag

SEQ ID NO: 104627 - DNA, 1006 bp, Zea Mays
tttcataatccagtttcattgccttcgtttagtcctgctaagtttctgcatctcaagaaagtaaattcggaaaatagatagatcctcattctgtaggtttaaagaaagataccaaattacatgtgggattagagccagagcaaattaaagtgacctgtcttatgagtacacatataaccggacatatacatggtaaaattatagtcttcacgtctctgatgagtttttactgaaaatactagaatcacatcagattattatagtactacaaaaaaaacaactaccagcattccaaccattattaggtacacaataccacacaacagatagtaaaccaatgctagctaccgcaattttgggagactaccggcgcccatgggcggaaccaggcagcacccccgctggtttctccctcccactcccctgcctcgctgtcatcggagcgctctgccgagtggctcgcgcgggcacaaggatggcggcagcagggaacagctctgctctgctctcccctctcatcctcgcccttgcccagccttgccctcgcccggctccatccgtcgtagggcatgtgctcgcatgccgcagctgtgagcggcgagccctcttctagacgtgcccctcggtgacggcatttcggagtctgtgtcagggtggtgcatgacagccggcaggaagctatgccggtggccagggttcgacggatctgagcctgtcggtctggatctggccctccctcaccggatctacgtcatggaggtggtggtccttgcaggaagaaggggtgggcctccttgcgcgtagtgaggcgcgtctagtggactagtgaggtgcgccggcacggctacgcggccggccggtttggcgtcgacgggccctacactcgtttggtggcatggcggtggcgaccagtggctcgggcaagcgcgggtttgaggctgaggcggcgtgcgacccgaggcttggccgtgtgttggagaatattttgggcgaaagccccggcaat

SEQ ID NO: 104628 - DNA, 2363 bp, Zea Mays
ccggcggtcggcgcaagtctgaactcccccacccaatctccgccacggccgacgggagagggcagggacggagagaaagagatgggcgtggggggcagcttctgggacctgctgaagccctgcgcgcggcacgagggcgcggggtacctacgcgggcgccgcgtcgccgtcgacctctccttctgggtcgtctcccacaccaccgccatccgggcgcgcttgccgcgggcacggagcccgcacctccggaccaccttcttccgcaccctctccctcttcgccaagatgggcgcgttccctgtgttcgtggtggacggcgagccgtcgccgctcaagtcgcaggcgagggcggcccgcttcttccgaggctccgggatggacctggccgcgttgccggtcactgaggcagagtccagtgcggccgcggcaccggtcaaaaagaggaatgctgcattcacgcgagccgttgaggagtgcgtggaactgcttgaatatcttggaatgcctgtattgagggcaaacggtgaagctgaagccctttgcgctcagctgaatagtgaaggtcatgtagatgcttgcatcactgcagacagtgatgctttcctctatggggctaagaccgtcgtaaaggtcctcagatcgaattgcaaggaaccatttgagtgctaccacatagcagacattgagtctggtcttggattaaagaggaagcaaatggtggccatggcgctccttattggcagtgatcatgatttgcatggggtgcctggttttggcctggagactgcacttcgttttgtgcagttatttgatgaggatgaaattttagataagttacatgaaattggtagaggggtgtatccattcgtagaaggatttgacaatgcacatattgatgatctcccatcatcgtccacaaaaagcccagttgttaaattgccgcactgctcacaatgtggccacccaggcagcaagaaaaatcatagcaaggatggctgcaattattgtttggtggattcattagagaattgcatggaaaaaccaactggattcaaatgtgaatgtcctagttgtgacgaggcacgtgagctaaaggaacaaagacgacatgaaaattggcaaatcaaggtctgcaagagaatagctgctgagacaaattttcctaacgacgagatcattaaattgtatctaagtgataacaatctggttgaagaaaagggtgttcccttgcttacttggaataaacctgatgttgaagctttggtagacttattaagttacaagcagaattgggagccatcttatattcgccaaagcatgctccctatgttatcaaccatatacttaagagaggttgcatcatctccatctacaccattgctcctttgtgaccaatatgaatttgattcaattcaacggattaagataaagcacggtcacccgtattacttggtaaaatggaagagagctacccgtggtatgaattctattatgtctagcaacaagccagtaatggagggagagacaagtagcgaggtagtgttgttggatgaagacgacgatttggatgcagtggtttgcgagtctcctgagttattagacgaacctgatgttccacaagtgcttattgatgatggctgctgctttgtattgacggatgaagacattcaacttgttggtgctgcttttcctaaggaaacagcaaggtttcaggaagaacagaggctgaaagaagcacgatcaagatcacggaaatccaaatcaagcttagcagacagtgcgtgcaagacacctgaaggcccgagacctagcggggtgcagcttagcatcacagagttctaccgctcgaagaaagcgcagaacgtagaatctgggaagaagccggcgggagaagggcacgccgcgaggggaggctcgagaaaatcgtccgacagggacctcgacaagagcctgccgaagtctgttcggcgccgcctcctcttcgattgctgaggactaggtagcctggcttttttttggtgagcactgcactgtaatcttggtgccactgctgtagatgacctagggaatgccttaacctattttagccggtgtagattgcgcgcggcccattttgtacagggaacagagcatcgtctttgtctaagaggaaatgaagcaggtcttagttcggaatggtcatctgaacctcatctttgtctaagtgcttgggaactcagcttcgattctaggaatgggatgcgtgccgctgctagagcaatagcttttttgttttatgtctgcttttgtgccggacaatagctgacagaattgatgtgatactacagtatgcacaacttttactcccttagttccaaatttag

SEQ ID NO: 104629 - DNA, 991 bp, Zea Mays
actttctcccctgtgtcccgttgctaaaagcttaaagagaaaaaccaaatcggacagtactgtggcccagcagcgcgcgcggggggcgtacgccggcggcgagatcctgcggtggcggggggatggcggcaaggaggcggggcccggcggagtggtggcgctagcggagtgcagctgctgggtgggtgtgtgaggggtttcggggtagttgggtgacaaggacatgaaggcgctgcggcgatccagcacctcgtcctccccgtcgtcctcctcctcgccgacggccgcgtcctccccgccgtcctcatcgtggatccacatccggtcgctcctcgtcgccgccgcgtcctcgtcctcatcctcgtcgtcctccgcgccggctgcgtcggggagcgcggtggctgtggtgtcggctgcggccgccgccccgtcttcttcctcgccggcgtcgtcctcgccgcactcggatcggtgggtttctcccttcggatgggcgaaaggaggctccattagggcttgaaatgcctctcatattcggttcttgttacatgagcttcatttggctgctgctgatctggttccgatccgtggaccctgaccgagcttgctgtgttgtaatctgtggtctggatgcagcctaggggtggtattaaatctccatggtcccgaaggaaaagaaaacgagcactttctcgtgaacagtgggagagtctgttttcagcaaatgggaagcttcgtgatggtgggaagaagtttctcaagaaagttcgcagcggtggcattgagccaagcattaggagtgaagtttggcccttcttactaggagtctatgatttgaatagctctgaagaggaaaggaactctgttaagataaagaaaagtgttcatttggctcgatgtaccatgtccgtatttccatgaagcaagagtgtgagactaagaaatatcatggagcacttgagcagaatccattgactttatctgtttagta

SEQ ID NO: 104630 - DNA, 2525 bp, Zea Mays
cgttgctaaaagcttaaagagaaaaaccaaatcggacagtactgtggcccagcagcgcgcgcggggggcgtacgccggcggcgagatcctgcggtggcggggggatggcggcaaggaggcggggcccggcggagtggtggcgctagcggagtgcagctgctgggtgggtgtgtgaggggtttcggggtagttgggtgacaaggacatgaaggcgctgcggcgatccagcacctcgtcctccccgtcgtcctcctcctcgccgacggccgcgtcctccccgccgtcctcatcgtggatccacatccggtcgctcctcgtcgccgccgcgtcctcgtcctcatcctcgtcgtcctccgcgccggctgcgtcggggagcgcggtggctgtggtgtcggctgcggccgccgccccgtcttcttcctcgccggcgtcgtcctcgccgcactcggatcggggtggtattaaatctccatggtcccgaaggaaaagaaaacgagcactttctcgtgaacagtgggagagtctgttttcagcaaatgggaagcttcgtgatggtgggaagaagtttctcaagaaagttcgcagcggtggcattgagccaagcattaggagtgaagtttggcccttcttactaggagtctatgatttgaatagctctgaagaggaaaggaactctgttaagataaagaaaaggaaagagtatgaaaagctgaggaggcagtgccaacaaattctgaatggctacaagggaaattcgttgaaggcaataactgaagttaataatgaggtgtgttctagtttagaaggtactgctgatggatcagaatcaccttgttttgaagatgccaatgctatacgtgctcctgtttcactcgaggagctgaagcctgaacagaatgaagttgaccaaccagagaacattccctgtgctgttgttgaatgtattgaagaagatgcagatgagttagcttatgcatatccatgcatagcagagtcagaatcatctgattctgaatcatccgatgaggatgaccctggaaggatgtccgtgtctggcgaggagaactgtgatccagatcctaaatttatcaggagcacttcattcaaggcagatctttttaggtctagcagaaccccagaggacttcgccacatggcaacgcattataaggttggatgccatccgatcaaacagtgaatggattatgttctccggcaaccaggctgaagttcccaaggagagagcattgcagtctgcagcatctgttgggttgaaagattatgatcacttagagcccagtatgatttatcacgcggctcgattagttgggttgcttgaagcatatgcggtgtatgatccagagattggctactgccaaggtatgagtgatctgttgtcacctatcattgcggtaatggaggaggacgatgaggcattttggtgttttgtgggtttcatgaggaaagcaaggcacaacttcaggctcgatgaggtcggaataagaaggcagttgaagatcgtctctcagattatcaagcgcaaagattcacacctgtataggcatctgcagaagttgcaggctgaggactgtttctttgtgtacagaatggtggtagttctcttcaggagagagctcacttttgagcagactgtgtgcttgtgggaggttatgtgggctgaccaggcagctatacgagccgggatcgggaggtccacctggggaaggataagactgcgtgctcccccaactgacgacttgctactctatgccatcgccgcttgtgtcctgcagaggaggaagctaataattgagaagtatagcagcatggacgagatactgcgagagtgcaacagcatggctgggcagctcgacgtctggaggctgctagatgatgcacatgacctggttgttaaccttcacgataaaatctgatctggtggtgagtgctgctctttgctctaacggcggagcaggtgtaagcctcaacagaaggaaaaatattgtggttcctttaccacctactgaaagtattctattatctgctattcattcccagcacggaaccaacttctaggtatagagaatgttgttaacttagagtgaggactcgagtgtcctcgcaaagaaaatgctgaaagattgtttggtgttagtgaggcactgtaaactgttcgttgtttaacttgttataggcaaaaacagagtttcctgggatggcactccatcaattttatgcatacgcgctcaagttaactagtttgaaatgtgcaaggcagtatggtttctcaacgcaagatttgtttctcgtgcgtttgactggtgttaaattgtcaccaccagatcctgccgccaatttaaatgtgccattactagggaaacattgctaaaattccggcaccaaactggacaagggctgaatttgatttttacttcatccatttcaaattgtaagtcgtttctgctatacttacattctaaattgtaagcctgcctttatgtatctaaaatatagtttatatctagg

SEQ ID NO: 104631 - DNA, 1926 bp, Zea Mays
atgaaggcgctgcggcgatccagcacctcgtcctccccgtcgtcctcctcctcgccgacggccgcgtcctccccgccgtcctcatcgtggatccacatccggtcgctcctcgtcgccgccgcgtcctcgtcctcatcctcgtcgtcctcgccgcactcggatcggggtggtattaaatctccatggtcccgaaggaaaagaaaacgagcactttctcgtgaacagtgggagagtctgttttcagcaaatgggaagcttcgtgatggtgggaagaagtttctcaagaaagttcgcagcggtggcattgagccaagcattaggagtgaagtttggcccttcttactaggagtctatgatttgaatagctctgaagaggaaaggaactctgttaagataaagaaaaggaaagagtatgaaaagctgaggaggcagtgccaacaaattctgaatggctacaagggaaattcgttgaaggcaataactgaagttaataatgaggtgtgttctagtttagaaggtactgctgatggatcagaatcaccttgttttgaagatgccaatgctatacgtgctcctgtttcactcgaggagctgaagcctgaacagaatgaagttgaccaaccagagaacattccctgtgctgttgttgaatgtattgaagaagatgcagatgagttagcttatgcatatccatgcatagcagagtcagaatcatctgattctgaatcatccgatgaggatgaccctggaaggatgtccgtgtctggcgaggagaactgtgatccagatcctaaatttatcaggagcacttcattcaaggcagatctttttaggtctagcagaaccccagaggacttcgccacatggcaacgcattataaggttggatgccatccgatcaaacagtgaatggattatgttctccggcaaccaggctgaagttcccaaggagagagcattgcagtctgcagcatctgttgggttgaaagattatgatcacttagagcccagtatgatttatcacgcggctcgattagttgggttgcttgaagcatatgcggtgtatgatccagagattggctactgccaaggtatgagtgatctgttgtcacctatcattgcggtaatggaggaggacgatgaggcattttggtgttttgtgggtttcatgaggaaagcaaggcacaacttcaggctcgatgaggtcggaataagaaggcagttgaagatcgtctctcagattatcaagcgcaaagattcacacctgtataggcatctgcagaagttgcaggctgaggactgtttctttgtgtacagaatggtggtagttctcttcaggagagagctcacttttgagcagactgtgtgcttgtgggaggttatgtgggctgaccaggcagctatacgagccgggatcgggaggtccacctggggaaggataagactgcgtgctcccccaactgacgacttgctactctatgccatcgccgcttgtgtcctgcagaggaggaagctaataattgagaagtatagcagcatggacgagatactgcgagagtgcaacagcatggctgggcagctcgacgtctggaggctgctagatgatgcacatgacctggttgttaaccttcacgataaaatctgatctggtggtgagtgctgctctttgctctaacggcggagcaggtgtaagcctcaacagaaggaaaaatattgtggttcctttaccacctactgaaagtattctattatctgctattcattcccagcacggaaccaacttctaggtatagagaatgttgttaacttagagtgaggactcgagtgtcctcgcaaagaaaatgctgaaagattgtttggtgttagtgaggcactgtaaactgttcgttgtttaacttgttataggcaaaaacagagtttcctggga

SEQ ID NO: 104632 - DNA, 464 bp, Zea Mays
gattatagcatatttaggcattgaactgcgcaatactactagtagtatgcgactacaatccaaaaccatccaaaccagcatatacatttgacgagtcttacagcgagtactaagaaaaagaaagaaaagagcacccaggaaaagagctaacagtacaagccaaagtatcacattcggcacctgatcgatacacatcaaagacagtaacatgaaaagcatatacccatgtcgaccgagtagtagcaacctgcaagcagaagcactttccatgtacagtagcgccagcccgccatgctattgctcacagtgagactgataccccaaccgacttctgaaccgcttgccggggcctcgccgtcacggccagcgccagcgggacggccatctcgcacgacagcttgagcacctccgacaggtcgacgggcgaggggagcagctcgaactcgtgcagcagcgtcgcgagc

SEQ ID NO: 104633 - DNA, 832 bp, Zea Mays
gacctccccccgtttcaatcaaaatggaaaaaagtttcctcccttcccctctcttctgaatccggcatcaccatgcagaacaccgtcgcgaacccttccactgcggccgccgccgctgcggcagggaacggcggcgtccaagcatcgggggctggaggggagcggccggaggacgcgtcgaagcagaacctggcgcaggtgacgagctccatccagaagacgctgggcctgctccaccagctcaacctcaccgtctcctccttcaactctgcctcccagctccccctcctccagcgcctgaatgcgcttgtggcggagctcgacacgatgcagaaactcgccgaggggtgcaacatccagtttgatcgacgatgggaagaaccccgacgagttcactagggacgtgctcaacagctgcatcgtcaaaaaccagatcaccaagggcaagactgacgctttcaagggcctacggaagcatcttcttgaggagcttgaacaagctttccctgaggacgtagaagcatacagggagatacgtgctacttctgctgctgaggcaaagcggttggctcagtcccagggtactttgcctaatggagatgtcaaagtgaaagctgagcattgagcgaatggtacgactacagagggcaagtttgttatctctgcttagttttggggatggctttgttaaccagaaacatgcatatctttctattgcacgtcccctgatcagtgaatgtgtacatactatcgtagcatgtgtggcccaatgtattcaacttaactaataacttcaaaaagatatccggagcatatcgaactacggatagct

SEQ ID NO: 104634 - DNA, 1100 bp, Zea Mays
gacctccccccgtttcaatcaaaatggaaaaaagtttcctcccttcccctctcttctgaatccggcatcaccatgcagaacaccgtcgcgaacccttccactgcggccgccgccgctgcggcagggaacggcggcgtccaagcatcgggggctggaggggagcggccggaggacgcgtcgaagcagaacctggcgcaggtgacgagctccatccagaagacgctgggcctgctccaccagctcaacctcaccgtctcctccttcaactctgcctcccagctccccctcctccagcgcctgaatgcgcttgtggcggagctcgacacgatgcagaaactcgccgaggggtgcaacatccaggtgcctatggaggtcgtcaatttgatcgacgatgggaagaaccccgacgagttcactagggacgtgctcaacagctgcatcgtcaaaaaccagatcaccaagggcaagactgacgctttcaagggcctacggaagcatcttcttgaggagcttgaacaagctttccctgaggacgtagaagcatacagggagatacgtgctacttctgctgctgaggcaaagcggttggctcagtcccagggtactttgcctaatggagatgtcaaagtgaaagctgagcattgagcgaatggtacgactacagagggcaagtttgttatctctgcttagttttggggatggctttgttaaccagaaacatgcatatctttctattgcacgtcccctgatcagtgaatgtgtacatactatcgtagcatgtgtggcccaatgtattcaacttaactaataacttcaaaaagatatccggagcatatcgaactacggatagctgagaccatttccttatttcttttcgttctttacaagaccattctgatactctgaaattgattgctccgaaacgcgagggtcctggagctttcaattggtgaacaattcctgaagcaggtaatgcattgctaaacaagtagaaggtgtaactgtctccacttatgaacgagaagatttttgtagtagcagttatctgatgccttgctaaattgtcgggtgattagtattgatacctacacgttgccgta

SEQ ID NO: 104635 - DNA, 728 bp, Zea Mays
cttctgaatccggcatcaccatgcagaacaccgtcgcgaacccttccactgcggccgccgccgctgcggcagaacctggcgcaggtgacgagctccatccagaagacgctgggcctgctccaccagctcaacctcaccgtctcctccttcaactctgcctcccagctccccctcctccagcgcctgaatgcgcttgtggcggagctcgacacgatgcagaaactcgccgaggggtgcaacatccaggtgcctatggaggtcgtcaatttgatcgacgatgggaagaaccccgacgagttcactagggacgtgctcaacagctgcatcgtcaaaaaccagatcaccaagggcaagactgacgctttcaagggcctacggaagcatcttcttgaggagcttgaacaagctttccctgaggacgtagaagcatacagggagatacgtgctacttctgctgctgaggcaaagcggttggctcagtcccagggtactttgcctaatggagatgtcaaagtgaaagctgagcattgagcgaatggtacgactacagagggcaagtttgttatctctgcttagttttggggatggctttgttaaccagaaacatgcatatctttctattgcacgtcccctgatcagtgaatgtgtacatactatcgtagcatgtgtggcccaatgtattcaacttaactaataacttcaaaaagatatccggagcatatcgaact

SEQ ID NO: 104636 - DNA, 856 bp, Zea Mays
gaggggggggggggctgtaaattttagcacttagggtttgcgttgctattgactgttgtctgggtcgtggcttaggaatgcgcttgtggcggagctcgacacgatgcagaaactcgccgaggggtgcaacatccagtttgatcgacgatgggaagaaccccgacgagttcactagggacgtgctcaacagctgcatcgtcaaaaaccagatcaccaagggcaagactgacgctttcaagggcctacggaagcatcttcttgaggagcttgaacaagctttccctgaggacgtagaagcatacagggagatacgtgctacttctgctgctgaggcaaagcggttggctcagtcccagggtactttgcctaatggagatgtcaaagtgaaagctgagcattgagcgaatggtacgactacagagggcaagtttgttatctctgcttagttttggggatggctttgttaaccagaaacatgcatatctttctattgcacgtcccctgatcagtgaatgtgtacatactatcgtagcatgtgtggcccaatgtattcaacttaactaataacttcaaaaagatatccggagcatatcgaactacggatagctgagaccatttccttatttcttttcgttctttacaagaccattctgatactctgaaattgattgctccgaaacgcgagggtcctggagctttcaattggtgaacaattcctgaagcaggtaatgcattgctaaacaagtagaaggtgtaactgtctccacttatgaacgagaagatttttgtagtagcagttatctgatgccttgctaaattgtcgggtgattagtattgatacctacacgttgccgta

SEQ ID NO: 104637 - DNA, 699 bp, Zea Mays
accgcgatgtctctttgtcgctgctctctctgcttcgtctgtccaatcgcgtggccccggtcccggccccggccccgcatcgtggatcgccggtctggcctcgccctcggccccgcgcgacgatttccacccggccggagctggacgcgcgcacgcgctcattcgggatggctcgtcgaagtggaggaagctccgcgacgacaaggcgcagttcctggaccgacgcttcgacctggaccatcctcgcgtcccagacattgcccatcacagtgcatcactacaaggcgtcaaggcctagcttcgtcggcttcttcgagccggagagcgcgcttcacgtccttgtccggtaccatgtcatttttttggcatacatctggcgcgagatcagcgacacgacgaacgcgagccaggtcgtgctgacacgtacatcatcgtcagctggaacgatcacttctttgtgctcaaggtggagagcaacttaataacatcgacatgcccggcgggcggctgcacgagagagtccttcctatctaaatttatggtttctttcttgtcaatctaagaaagaaaattagattggctcttctgtgttcatctccttcttcgagtcaatttgttttattgtcagtgttacgattttattgtttgggtggaaccaagatgagattaacgaactcatgaaattgctttagtgtaccc

SEQ ID NO: 104638 - DNA, 1211 bp, Zea Mays
tcaaaaatgctctccgccgcgtcgctgtccttcgctagtcgctgccacatcttctctcctcgtccaaagactccaagcttctgtgacctctgttctgctgccgcctctggtccacatctctctacgccgccgccccgccgtccaccgataccgcagcgctgggaaggatcacgggggagcggagcgaggcgggggacccgcggttttgtcgcccggatggcggcggagcgatgacactggcggcgggtgcggcgcggcgttgggatgcggacgatctgcgatgtgtgcgagagcgcaccggcggtgctcttctgtgcggccgacgaggctgcgctttgccggccttgcgacgagaaggtacacatgtgcaacaagcttgctagtcggcatgtgagagttgggcttgcagaccctaataaactggcacgttgtgatatatgcgagaattcacctgctttcttctactgtgagatagatggcacctcactttgcctgagctgtgatatgactgttcatgttggtggcaaaagaacccatggtagatacctgctcctaaggcaaagggttgaagagataaaccgggccatatggatgacgtgcctatggagatcaaagatcctgaaaaccagagagagcaaaacacgcccaaggagcaaatggcaaaccaccataacgtcaatgatccagtctctgatggcaattgcgatggccagggtaacattgattcgaaaatgatcgatcttaatatgcgcccggctcgtactcatgggcaaggatcaaattcccagactcagggggtggatcttagtgtgaacaaccatgactctccaggggtggtgccaacaagtaattccgaaagagacgccatcaagtaaacattggaagattggaatgtacatttcaactacatattctgttctataggagctcctgggggcagaaatggggttattcagtggtctctctgttatcactagtaagcgtatttctggcagagttggagctaataactgcatctcaattcggcttgtcgtgccctagacggtattgctgtccaattgcattctctttgcgattgttagaactctgtatagaagcgcagcggctgccgcctgtgctctggagccggagtattgtgtgccattagaaactgtacaaaagattaatagaccgctcatttttctctggtcgcacaagttcaattcagttca

SEQ ID NO: 104639 - DNA, 1396 bp, Zea Mays
tcaaaaatgctctccgccgcgtcgctgtccttcgctagtcgctgccacatcttctctcctcgtccaaagactccaagcttctgtgacctctgttctgctgccgcctctggtccacatctctctacgccgccgccccgccgtccaccgataccgcagcgctgggaaggatcacgggggagcggagcgaggcgggggacccgcggttttgtcgcccggatggcggcggagcgatgacactggcggcgggtgcggcgcggcgttgggatgcggacgatctgcgatgtgtgcgagagcgcaccggcggtgctcttctgtgcggccgacgaggctgcgctttgccggccttgcgacgagaaggtacacatgtgcaacaagcttgctagtcggcatgtgagagttgggcttgcagaccctaataaactggcacgttgtgatatatgcgagaattcacctggtatggtttttgattcatggatcccctattttacaattagtagattaataaatctttcaattgagtaggttcacattgtttccctgtcaatgtagctttcttctactgtgagatagatggcacctcactttgcctgagctgtgatatgactgttcatgttggtggcaaaagaacccatggtagatacctgctcctaaggcaaagggttgaagtaagtttttactctttagccggtctgggttgcttgttactccctgtatttatataattcttaagataggaagctacgattagtttccaggagataaaccgggccatatggatgacgtgcctatggagatcaaagatcctgaaaaccagagagagcaaaacacgcccaaggagcaaatggcaaaccaccataacgtcaatgatccagtctctgatggcaattgcgatggccagggtaacattgattcgaaaatgatcgatcttaatatgcgcccggctcgtactcatgggcaaggatcaaattcccagactcagggggtggatcttagtgtgaacaaccatgactctccaggggtggtgccaacaagtaattccgaaagagacgccatcaagtaaacattggaagattggaatgtacatttcaactacatattctgttctataggagctcctgggggcagaaatggggttattcagtggtctctctgttatcactagtaagcgtatttctggcagagttggagctaataactgcatctcaattcggcttgtcgtgccctagacggtattgctgtccaattgcattctctttgcgattgttagaactctgtatagaagcgcagcggctgccgcctgtgctctggagccggagtattgtgtgccattagaaactgtacaaaagattaatagaccgctcatttttctctggtcgcacaagttcaattcagttca

SEQ ID NO: 104640 - DNA, 1302 bp, Zea Mays
tcaaaaatgctctccgccgcgtcgctgtccttcgctagtcgctgccacatcttctctcctcgtccaaagactccaagcttctgtgacctctgttctgctgccgcctctggtccacatctctctacgccgccgccccgccgtccaccgataccgcagcgctgggaaggatcacgggggagcggagcgaggcgggggacccgcggttttgtcgcccggatggcggcggagcgatgacactggcggcgggtgcggcgcggcgttgggatgcggacgatctgcgatgtgtgcgagagcgcaccggcggtgctcttctgtgcggccgacgaggctgcgctttgccggccttgcgacgagaaggtacacatgtgcaacaagcttgctagtcggcatgtgagagttgggcttgcagaccctaataaactggcacgttgtgatatatgcgagaattcacctgctttcttctactgtgagatagatggcacctcactttgcctgagctgtgatatgactgttcatgttggtggcaaaagaacccatggtagatacctgctcctaaggcaaagggttgaatttccaggagataaaccgggccatatggatgacgtgcctatggagatcaaagatcctgaaaaccagagagagcaaaacacgcccaaggagcaaatggcaaaccaccataacgtcaatgatccagtctctgatggcaattgcgatggccagggtaacattgattcgaaaatgatcgatcttaatatgcgcccggctcgtactcatgggcaaggatcaaattcccagactcagggggtggatcttagtgtgaacaaccatgactctccaggggtggtgccaacaagtaattccgaaagagacgccatcaagtaaacattggaagattggaatgtacatttcaactacatattctgttctataggagctcctgggggcagaaatggggttattcagtggtctctctgttatcactagtaagcgtatttctggcagagttggagctaataactgcatctcaattcggcttgtcgtgccctagacggtattgctgtccaattgcattctctttgcgattgttagaactctgtatagaagcgcagcggctgccgcctgtgctctggagccggagtattgtgtgccattagaaactgtacaaaagattaatagaccgctcatttttctctggtcgcacaagttcaattcagttcatgcgtcgtgtatcgtgacacgtgttacaacaaggccacccgcttacacggtggaggcatttataagagttcgtggatatgaaat

SEQ ID NO: 104641 - DNA, 1867 bp, Zea Mays
tttctccgcagcaatagactggtcaccactcacgagagcagaaaacaaacaatgcctccttacctgctcgctgccggcgcgcttatcgtcttcctgtacatcatcaagaaccgcaggagcagaaagctcccgccatccccgccgtcgctaccgctgatcggccaccttcacctcatcggccgcgtcgcgcaccgatccttgctagagctgcaggttcgctatggcggcggcggcggtctcctcttcctgcaactcgggcgcagaccgaccttggtcgtgtccactgcggccgcggccgcggatctgttcaagaaccacgacctcgctttcgcctcccgcccacgcagcgtgggaggggataagctgatgtatgagtgcagcaacgtgtcgttcgcgccttacggcgagaactggcgccggggcaagaagatcgctgtggtccacctcctctctccacggcgcgtggaatcgttcgcgcccgtaagggccgccgaggtagccgcgctcgtcgcacggacacgccgcaccgcggaggctggggaggccgtggagttgagggagctcctgaacggctacgccaacgcggtggccacccgcgcggccaccggtgccgctggggcgacagcagagaagctgaaagagctgatggggaactccgagcccgaggcgctgatggcgggcttccaacccgaagacgtgctgccggacgcaccggcgaggttcgtgagatgggtgacgggcctcaataagaagctcgaagacttggtggagtcgtgggacaagttcctgtccgatatagtggccgcacacaaggagaaggggggtggcgacgcagaggaggatgaggacttcttggatgtcttgcttcggctgcgggaagaaggcgcagatgggctcgagctcacagacgatcgcatcaaagctaccgtcaaggttatcttcgcggaaacgctcttctagtatctcatcaaaaaaatgtttagtaccaataatccaatattgttcctctcatccgtactcgattcttgagtctgcaggacatgatagcggctgcaactgaaacatcgtcccaaacgctggaatggaccatggccgaactcattgccaacccgcgggtgatgagcaagctccaaggcgagatagcgcgagtcgtcagcgccgatcagacgaccatcgctgaaccggacctgaacaaaatggagtacctgagggcagtgttcaaagaggtgcttcggctccacccaccagcgccgctcctcgtcccgcacgaatcaacaacgcccgcggttgtgcagggctacgagatcccggccaagacggctctcttcgtcaacgtgtgggccatcgggcgggaccctgctgtgtgggacgcaccggacgagttccgcccagagcggttcgtgggcggcagtccctcggtggacttcagaggtaccgactaccagctcatcccgttcggcgccggccggaggatctgccccggcatcaacttcgcgctgccggtcttggagctcgcgcttgtcagccttctgcaccacttcgaatgggagctccccgccggcgtgggaaaagcggacctcgacgtgggcgaggcgccggggatgacgacgccgcggcggattccgctcgtccttgtccccaagtgcaggacgctcgttcagccagcgctgcagtagcgcgaggaatttcatgtgtctccatgcagtggcggaaccagaaatatttaagagcttgggtaaaaaataatacttatactgtaaatatgtagctttgtctaatttttacctgtgtttaactatattttactacttgttgtatgtgtataagttcactagcaataatggaggagcctatgctcttgccccca

SEQ ID NO: 104642 - DNA, 2281 bp, Zea Mays
tttctccgcagcaatagactggtcaccactcacgagagcagaaaacaaacaatgcctccttacctgctcgctgccggcgcgcttatcgtcttcctgtacatcatcaagaaccgcaggagcagaaagctcccgccatccccgccgtcgctaccgctgatcggccaccttcacctcatcggccgcgtcgcgcaccgatccttgctagagctgcaggttcgctatggcggcggcggcggtctcctcttcctgcaactcgggcgcagaccgaccttggtcgtgtccactgcggccgcggccgcggatctgttcaagaaccacgacctcgctttcgcctcccgcccacgcagcgtgggaggggataagctgatgtatgagtgcagcaacgtgtcgttcgcgccttacggcgagaactggcgccggggcaagaagatcgctgtggtccacctcctctctccacggcgcgtggaatcgttcgcgcccgtaagggccgccgaggtagccgcgctcgtcgcacggacacgccgcaccgcggaggctggggaggccgtggagttgagggagctcctgaacggctacgccaacgcggtggccacccgcgcggccaccggtgccgctggggcgacagcagagaagctgaaagagctgatggggaactccgagcccgaggcgctgatggcgggcttccaacccgaagacgtgctgccggacgcaccggcgaggttcgtgagatgggtgacgggcctcaataagaagctcgaagacttggtggagtcgtgggacaagttcctgtccgatatagtggccgcacacaaggagaaggggggtggcgacgcagaggaggatgaggacttcttggatgtcttgcttcggctgcgggaagaaggcgcagatgggctcgagctcacagacgatcgcatcaaagctaccgtcaaggacatgatagcggctgcaactgaaacatcgtcccaaacgctggaatggaccatggccgaactcattgccaacccgcgggtgatgagcaagctccaaggcgagatagcgcgagtcgtcagcgccgatcagacgaccatcgctgaaccggacctgaacaaaatggagtacctgagggcagtgttcaaagaggtgcttcggctccacccaccagcgccgctcctcgtcccgcacgaatcaacaacgcccgcggttgtgcagggctacgagatcccggccaagacggctctcttcgtcaacgtgtgggccatcgggcgggaccctgctgtgtgggacgcaccggacgagttccgcccagagcggttcgtgggcggcagtccctcggtggacttcagaggtaccgactaccagctcatcccgttcggcgccggccggaggatctgccccggcatcaacttcgcgctgccggtcttggagctcgcgcttgtcagccttctgcaccacttcgaatgggagctccccgccggcgtgggaaaagcggacctcgacgtgggcgaggcgccggggatgacgacgccgcggcggattccgctcgtccttgtccccaagtgcaggacgctcgttcagccagcgctgcagtagcgcgaggaatttcatgtgtctccatgcagtggcggaaccagaaatatttaagagcttgggtaaaaaataatacttatactgtaaatatgtagctttgtctaatttttacctgtgtttaactatattttactacttgttgtatgtgtataagttcactagcaataatggaggagcctatgctcttgcccccacttggtccgccaccgtctccatgcgtacggaggtttgtctattgaaaagttaaggatcaagcaaaattcaagaacactgattacaaaaaggaaagaaaaaaatcagcacaacaacacgtttgagtgctagaatcccagaaaagaaatcactctttagtcttttttttttttttgaaaatccttcactctttagtctttggccagaataatgagatgcccatgcatgacaattgccctacaccatcattagctgctaccagaatagaaattgttcatgtaagtgattgtaacagcgagtttaataaaacagccaacagccagaagtaagaacctctacagcctctctattagcccactcatatagttagctctccattattaatgtagtacctcatttatctctctcacaaactcaaactctcttggtttctgtatataagccgactgtaattaagacggctgagcctgcttctcctctttttcttcatctctcctcaacacaagcatttagcctgctt

SEQ ID NO: 104643 - DNA, 396 bp, Zea Mays
atgggcgtggcagaggtgaagggcaaaagggtggtggatctcaagatgggatccatcatgcgggacaaggtgcaggacaagtacacgcagtactggtccttctttcgcggccccaaggagacgaccaccaaggcagcggtggagaaggtgccgaccgtcgtcgacaccttttacaacctcgtggccgaaggcaggaggaaagacgaagagagggggaggcgtgaggatgagagaggttgggcaaaacgttcctatcgtccgctcccgctcgctcctcgccgccgaccagatctagttgctgttgtgacctacctcccctcccgcttgctggctgtcgccgatcgggtggccatgcccggcgtggaggaagacgacgcaggggatgacatgttgtag

SEQ ID NO: 104644 - DNA, 1906 bp, Zea Mays
cccgcagcaatagactggtcaccactcacgagagcagaaaacaaacaatgcctctttacctgctcgccgccggcgcgcttattgtcttcctctacgttatcaacaaccgcaggagcagcaagctcccgccgtctccgccgtcgctaccactgatcggccaccttcacctcatcggccgcctcgcgcaccgatccttgctagagctgcagcttcgctatggcggcggcggcggtctcctcttcctgcaactcgggcgtaggccgaccttggtcgtgtccactgcggccgtggccgcggatctgttcaagaaccacgacctcgccttcgcctcccgcccacgcagcgtgggaggggataagctgatgtatgggtgcagcaacgtgtcgttcgcgccttacggcgagaactggcgccggggcaagaagatcgcggtggtccacctcctctctccgcggcgcgtggaatctttcgcgcccgtacgggttgccgaggtagccgcgctcgtcgcacggacacgccgcaccgcggaggctggggaggccgtggagatgagggagctcctgtacggctacaccaacgcggtggtcacccgcgcggccaccggtgccgctggggcaacagcagagaagctgaaacagctgatggggaactccgcagcgctgatggcgggcttccaacccgaagacgtgctgccggacgcaccggcgaggtttgtgagatgggcgacgggcctcgataagaagatcgaagacatggccgaggcgtgggacaagttcctgtccgatatagtggccgcacacaaggaaaaggggtgtggcgacgcaggggaggaggctgaggacttcttggatgtcttgctccggctgcgggaagaaggcgcagatgggctcgagctcacagacgatcgcatcaaagctaccatcgaggacatgatagctgctgcaactgaaacatcatcccaaacgctggaatggaccatggccgaactcattgccaacccgcgggtgatgagcaagctccaaggcgagatagcgcgagtcgtcagcgccgatcagacgaccatcgctgaaccggacctgaacaaaatggagtacctgagggcagtgttcaaagaggtgcttcggctccacccaccagcgccgctcctcgtcccgcacgaatcaacaacgcccgcggttgtgcagggctacgagattccggccaagacggcgctcttcgtcaacgtgtgggccatcgggcgggaccctgctgtgtgggacgcaccggacgagttccgcccagagcggttcgtgggcggcagtccctcggtggacttcagagggaccgactaccagttcatcccgttcggcgccggccggaggatctgccccggcatcaacttcgcgctgccagtcttggagctcgcgctcgtcagcctcctgcaccacttcgaatgggagctccccgccggcatgcgcctggaggacctcgacatgggcgaggcgccggggctgacgacgccgcggcggattccgctcgtcctagtccccaagcgcaggacgctcgttcagacattactgcagtagcacaaggaatttgatctgcctccctgagtaccgaggtttatctattgagaagttgtggatcaaacaaaattcaagaacacagattaccttacccaaaaaaaaacgcacaagaacactcaattgcagaaagaaatcggtctcttgttgaccgcagtacttgagttcattctccctggattaagttggatagtttggtttttcacatttatagtcttgggccagaataaagagatgaatgtaaggtagcaggctagcagctatcacagtggaagattgttcatgtaatagagtaccgaacgatttagccatattaggcacgagaactgttcatactgccactc

SEQ ID NO: 104645 - DNA, 1050 bp, Zea Mays
atgcctggacagtttctctctctcgcttcgatagctaatttcgccgtcacccgccggacagacacggaggtacaggagcgagggggaaagtgggatggtagtgggggcatcatcggtgtccggcgccgcggcttccggaggtacctctggtacggctccgccgcggaaggggaagtcgtgcaagggctgcctttactactcgtcagtgctcaagtcccgcggctacaacccaatctgcgttgggatcccccgttccatcccccaagttcctaactacgtggtggatgagcctaaggaggacgcgacagcgcaggggcatgatctcaggcggttcaggtacgggtgcgcgggttactccatattcgtgaacagggacggccaaggtggtgagggcgagggcaagacgttgttgccgtattgcaggggcctcgagttattggtggacagcagattggtcgagagaaaaccatccgcagctgaacaagctccagcacatgttacaaaggatgcagctaccacccgctctcaccaacaaggacaacagagacctgcgaacttgtcgaggcaggaattcttggagaggaaagttactgtccatagcttttctctgtccccagcccccactaggatatattgccttgctgatgtatacggatggcacaggtttaagaagagtgctggactggtcgcttcaggggtcgcgaagaatctaaacaaaacggccaattatatcaaggaaaatattcatgacatattgtaccacgatcgtcgcccaccaaagtagtagccatgccgacttgctgagtcccagaacgaagcacagcagccccagctccgtcactgattatgcaaatggagccttccaggattccaacttcactcgctttacttgcataatcttgtaatttagggctgcatatgtacatgcaatttaacttgctgcttgtttgaagcggaaaatcagatttcgtttggtgtaatcggaagacgatgatattggttgaattttgactgaaaattcgagaaacagcatttctcgatgaaaataca

SEQ ID NO: 104646 - DNA, 1143 bp, Zea Mays
agtttctctctctcgcttcgatagctaatttcgccgtcacccgccggacagacacggaggtacaggagcgagggggaaagtgggatggtagtgggggcatcatcggtgtccggcgccgcggcttccggaggtacctctggtacggctccgccgcggaaggggaagtcgtgcaagggctgcctttactactcgtcagtgctcaagtcccgcggctacaacccaatctgcgttgggatcccccgttccatcccccaagttcctaactacgtggtggatgagcctaaggaggacgcgacagcgcaggggcatgatctcaggcggttcaggtacgggtgcgcgggttactccatattcgtgaacagggacggccaaggtggtgagggcgagggcaagacgttgttgccgtattgcaggggcctcgagttattggtggacagcagattggtcgagagaaaaccatccgcagctgaacaagctccagcacatgttacaaaggatgcagctaccacccgctctcaccaacaaggacaacagagacctgcgaacttgtcgaggcaggaattcttggagaggaaagttactgtccatagcttttctctgtccccagcccccactaggatatattgccttgctgatgtatacggatggcacaggtttaagaagagtgctggactggtcgcttcaggggtcgcgaagaatctaaacaaaacggccaattatatcaaggaaaatattcatgacatattgtaccacgatcgtcgcccaccaaagtagtagccatgccgacttgctgaggtatatcatctatgctcaaggttgagagctgaagaaatgccttgctgctactggaaaccttacacaagtactacctgaatcgacccctactcttgtattgtagtcccagaacgaagcacagcagccccagctccgtcactgattatgcaaatggagccttccaggattccaacttcactcgctttacttgcataatcttgtaatttagggctgcatatgtacatgcaatttaacttgctgcttgtttgaagcggaaaatcagatttcgtttggtgtaatcggaagacgatgatattggttgaattttgactgaaaattcgagaaacagcatttctcgatgaaaataca

SEQ ID NO: 104647 - DNA, 1061 bp, Zea Mays
agtttctctctctcgcttcgatagctaatttcgccgtcacccgccggacagacacggaggtacaggagcgagggggaaagtgggatggtagtgggggcatcatcggtgtccggcgccgcggcttccggaggtacctctggtacggctccgccgcggaaggggaagtcgtgcaagggctgcctttactactcgtcagtgctcaagtcccgcggctacaacccaatctgcgttgggatcccccgttccatcccccaagttcctaactacgtggtggatgagcctaaggaggacgcgacagcgcaggggcatgatctcaggcggttcaggtacgggtgcgcgggttactccatattcgtgaacagggacggccaaggtggtgagggcgagggcaagacgttgttgccgtattgcaggggcctcgagttattggtggacagcagattggtcgagagaaaaccatccgcagctgaacaagctccagcacatgttacaaaggatgcagcagctaccacccgctctcaccaacaaggacaacagagacctgcgaacttgtcgaggcaggaattcttggagaggaaagttactgtccatagcttttctctgtccccagcccccactaggatatattgccttgctgatgtatacggatggcacaggtttaagaagagtgctggactggtcgcttcaggggtcgcgaagaatctaaacaaaacggccaattatatcaaggaaaatattcatgacatattgtaccacgatcgtcgcccaccaaagtagtagccatgccgacttgctgagtcccagaacgaagcacagcagccccagctccgtcactgattatgcaaatggagccttccaggattccaacttcactcgctttacttgcataatcttgtaatttagggctgcatatgtacatgcaatttaacttgctgcttgtttgaagcggaaaatcagatttcgtttggtgtaatcggaagacgatgatattggttgaattttgactgaaaattcgagaaacagcatttctcgatgaaaatacacggtttctcggttgagaa

SEQ ID NO: 104648 - DNA, 2772 bp, Zea Mays
gaagaacagagagttaaacaaacctatccgcgctgcaacagtgcggtgtttgaatccaatccagccagacagccgagaaagcgagcagccttgttcctatacactgtagtctagtttagctcccccctcaaaccactccacccggtccgtttcccgtcccacccgcgtcagcttcgtcttgctctgagctgccggcgacctgctagctaagctacctcgctcgcacctggagcctggtggcggtggccatggcggccctgctgggccttttcttcctgctgctgctccagctcggcccctcttcttgcagcaatgtgtacattgcgtacatgggagagaggagccccgagctgcgcccggctctggtccgggacgcgcaccacggcatgctcgccgccctccttggcagcgagcaggcggccagggacgccatcctttacagctacaggcacggcttctccgggttcgccgccacgctaacggacagccaggcggcgcggctcgccgattcgcctggggttgtgcgagtggtgcggaaccgtgttcttgacctgcacaccaccaggagctgggacttcatgcgagtgatgagtccgtcgcactcggctggaatcctctcaaacagtagactcggtgaggattccattattggtgtgctagacactggaatatggccagagtcggccagctttagagacgacggcatcggcgaggttccacggcggtggaaagggcgatgcgtcgccggggacaggttcaatgcttccaactgcaacaggaaaataataggcgcgaagtggtacatcagaggctacgaagccgagtacgggaagatgaacaccaccgacatctacgagttcatgtccgcgagagacgccgtcgggcacggcacgcacacggcctccactgccgccggcgctccggtagccgacgcgagcttcaggggcctcgccagcggcgtcgcgaggggaggggcgcccagggcaaggctggcggtctacaaggtgtgctgggccaccggagactgcacctccgcggacatcctcgctgcctttgacgacgccatacatgacggcgtcgacgtgctctcggtgtccctgggccaggcaccaccgctccctgcatacgtcgacgatgtcctgtccatcggatccttccacgctgtcgcgagagggatcgccgtggtctgctccgcagggaactccgggccttattcggagacggtgatcaactcggcgccgtggatcgtgaccgtcgctgccggcaccattgacaggactttcctcgcaaagatcgccctcggcaacaatagcacctacgcgggtcaaacgctctactctggagcgcatcctggaagaagcatgagcctagtctacgctgaagacattgcatctaacgacgcagacgatacagatgcaagaagctgcactgcaggatccctgaattctactctagcgaagggaaaggtggtgctttgcttccaaacaagggctcagagatcagcttcggtggcggtggagaccgtcaggaaagctcgtggcgtcggtgtcatcttcgcccagttcttaactaaggacatcgcgtcttcattcgatgttccatgtgttcaagtagactaccaagttggaacagttatactcgcgtacactactagcatgagaaacccaacagttcagtttggctcagcaaaaacagttcttggagaagtgatcggcccagaagtcgcgtatttctcgtctcggggtccaagttctctgtccccctctgttctgaagccagacatcgctgctccaggcgtcaacattttggccgcatggactcccgccgccgccgtatcatcagccattggatccgtgagcttcaagatcgattcaggaacctccatgtcctgcccgcacatctcaggagtcgttgctctcctcagatcactgcatcccaactggagtcctgctgcagtaaaatcagcgcttgtcacaacagccagcgtccacgacacgtatgggtttgggatcgtgtccgaggcagcaccgtacagccaggcgaacccgttcgactacggaggtggtcacgtggatccgaaccgagctgcgtaccccggtctcgtgtacgacatgggggcgtctgactacgtgcgcttcctttgctccatgggctacaacgtctcggccatcagctccgtggctcagcagcgtgagactgagacctgccagcacgcgcccaagacgcagctggacctcaacctgccatccatcgccgtccccgagctgaggggcaggcttaccgtgtcaagaacggtcaccaacgtcggctcggcattgtcggagtacagggctcgcgtggaagctcctccaggggtggacgtctccgtgcgcccctcgctcctggccttcaactcgaccgtgaggaggctggcgttcaaggtgacgttccgggccaagctggtgaaggtgcaagggagatacaccttcggcagcctgacgtgggaggacggcgtgcacgccgtgaggatccctctggtggttcgcacgatggtcggcaggttctacgccaattcatgagctagttagttcgtgtttgtgtggtgctgtgtgttacctttcgctcaccaccggaccggtgatggtgagacggacaagatgtaacctgctaatttgttccgattctaatggcattggtgattggttggggttctttggctagaattcgaccactgattaagatgagcaaaactgaatcttttgtgtttgtaatagaccataacttcttcttgtt

SEQ ID NO: 104649 - DNA, 693 bp, Zea Mays
tccaatgcagtgaaaatctggttggaatgttcagtcagtgtccattccttcataaaattgatgcacctttgcgtaaccgaaaatgatgctttaactcaaggaagactggaagagcatcacaaaacgttcctttagccatgcacccttaactgctcactcccaaaaaattgctaggccgtaggcgtttcgactttcgaccggcgtggaggccgacaccgacccgaccagcagttaccgtggaacgtctctaacatcagggacaaggccatggagccaatggcgattgtgacggtgaccggaggtgtgctgggcccggtcttcgtgttcctgtcgcgcatccagcctgtggtcgacttcttccgccgcctcagcgactgcctccgccaccctcagcgtcgccctgccagaccgctcagggcgccatggtataagcacgccacggcagaggagtagaacacatcgcctttcttttcccctccaatggatctggcagcgcttccgattcctcctcggctttcgactccgcctccgcttccaccagcgccatacggcggagcgggctggggccgaggcgccggcggatcaaaaataagaagcaagtcgagagcagaccacagccggaccagggggattgtatactaactaccaattgcacaggcctaaaatggataccaatttgcaggggcaatgaaa

SEQ ID NO: 104650 - DNA, 761 bp, Zea Mays
ttagtttcgttattatgcttcaatgcagatacggatgaccatgtctttttagcgattccacataaccattaaattcaacaatatgacgaattgcagaatcagaacgagaaacagaacatgggggaacattagtacacaacgagctctgactgctgaagatcttctcgatgaagacgaacatacaataagacacaaggacgatactagagcaggacacatcccatccacagatctagacacgaacatgctacagcacacagcgcaaatgaagaccctactttctaagccttcttgggggacttggcgcccttcttgggggacttgggctccttgctgccgccgctggccgccttctccgccgccttcttgggcaggagcacggagtggatgttggggaggacgccgccgtgcgcgatggtgacgccggccagcagcttcccgagctcctcgtcgttgcggatcgccaggagcacgtggcgcgggatgatgcgcgtcttcttgttgtctttcgccgcgttccctgccaactccagaacctcggcggcgaggtactccaggacggcggcgaggtagacgggggcgccagtgcccacgcgctgcgcgtaccggcccttcttgaggtagcgcccgatccggccgacggggaactgcagcccggccttgacggaccgcgtcaccgacttcttcctggggccgcctgccttgcgcccggccgcccccttcttccccttgctaccgggttccggtggcgtccatgactg

SEQ ID NO: 104651 - DNA, 507 bp, Zea Mays
gagaaacagaacatgggggaacattagtacacaacgagctctgactgctgaagatcttctcgatgaagacgaacatacaataagacacaaggacgatactagagcaggacacatcccatccacagatctagacacgaacatgctacagcacacagcgcaaatgaagaccctactttctaagccttcttgggggacttggcgcccttcttgggggacttgggctccttgctgccgccgctggccgccttctccgccgccttcttgggcaggagcacggagtggatgttggggaggacgccgcgttccctgccaactccagaacctcggcggcgaggtactccaggacggcggcgaggtagacgggggcgccagtgcccacgcgctgcgcgtaccggcccttcttgaggtagcgcccgatccggccgacggggaactgcagcccggccttgacggaccgcgtcaccgacttcttcctggggccgcctgccttgcgcccggccgccccct

SEQ ID NO: 104652 - DNA, 797 bp, Zea Mays
ctctcacttctgggtttatgatatccagatgattctctctctggctgagattgagcaatatttacaattatgggaggtaattgattcttttcagcttcaaaattcaaatgatcaacatgtgtggaattttagcagcaatggactgtatacctccaaatctgcctatagagcttttttcattggagcggaatcttttgatccctggaaaagaatttggaagagctgggcagcccctaagtgtaaggtctttgtttggctggccataaacaataaatgttggacagcggacagactcaaaaaaagagggcttgatcatcctgaaaattgtgttttatgtgaccaagaggacgaaactgtgcagcatattttatctaattgcgtcttcacaagacagttttggcatagtatcttaactccaattggtctctcttctgtgggtcctaaaagaagagattcatactttgttgaatggtggagaaagacttcatccaggattcctaagagaaaaagaaagggatttaatagtatggtaatccttggggcttggagtatttggaagcagcgaaacatgtgtgtttttgatggtgctcgaccctgcctttctaccttagaagacggatttaaggacgagatgagattgtgggttgctgctggagccaggaacctgcactctcttttcaaccctggataaaggaaagtcttgaagcctattgaaagactggggtgttagtgggttgtatgtgtctgtgttgtgtgtgttttgtgggtgtgagtgtgtgtttttgttttgtgtgtgt

SEQ ID NO: 104653 - DNA, 1250 bp, Zea Mays
cgaaatccttgactccttgagacctatatattttttttctttcaaaatgctcactttcgaaagctaacaaagttcaatccgccaactcatctatatgtacacaagtcgtctaagcaatgtgtccaagaatgtacccaagcataaacattccttttgtgctgtcacaatcacaactcaccgagtcacggctaggactgaccaaacaatggtctcagaaataaggcaacagcgcgcctttaccggtgacgacatgtagccatcaccgcctggacggcgcggcggcggcggcggcggcggcggctttcttccccctggcgccggggccgggagtccggccgtcaggctcggcgtgcgcctgcacggcccgcctgaggacctcgaccacctcgctcatggtgggccgctccttggcgttcttgagcaggcagctgtcggccagcttggcgatctcccgggcggccttcgccgagtactcgccgcggagcctggggtccatgatcatccggaagttgcggctgtccggcgggaactgggccacccactccagcagcttctgctccgccgccggtctgttccggtccagcgaccgccgtcccgtcaggatctcgtagagcaccacgccgaagctccacacgtcgctcttcgccgtcaggtgccccgtgtccatgtactccggcgcagcgtacccgtgcgtcccgacgacctgtaacaccgtatcacggggcagagctgtcaaaaccgaaacaaccctgcggcaatcactttccagggcgtgcaatcatgcatatgcgataaaagcgacagattgactgcttgatgctattttcaagccatgcgtcagcatggcgcataatgcaattgttcagtcacatgacagagccgtgcatgttcgcatagaaagaaagtgaaggcaccattgacaatggaagcccagggtcgtccgtcagctgtgcgtagatagagcaggtacactgcattgcctacgtatccggtcagctaaagcccgtctgccaacgactactataacaacctcagtaaggctaacacagaagactagcacgatgtcttcagtgcctgaccctgatcgaattgatggatacaacgtaccgcagtcgagacgtgagtgtttgctccagttggcccctccctggctaggccgaagtctgatagctttgctctgaagtccttgtccaatagaacgttggacgttttgaagtcccggtagattacctggccaaaatgcagaatta

SEQ ID NO: 104654 - DNA, 715 bp, Zea Mays
accaatgcagccataactccgccccgatctatccgtcgcccctccaaaagcacgagagcgcaggaagtgagagaataaaaataataataataaggggaaataataagaaaaaaattctcgtgttcttcgaccggtggtggtggtgcgaacgcaaggcgaccaaggggaggcgagatgaggggggcgaagcggccgctcagcgtggtgacgtcgtgggtgcggcggcagccgcccaaggtgaaggctttcttggccgttgtcaccggcatggccgcgctcgtcgtcatccgcttcatcgtccacgaccatgacaacctcttcgtcgctgccgaggctgcgcacgcgctcggcataggcgtcctcatctacaagctcacaaaggagaagacatgtgccggttcgtttccgcctgcttctttgccacccgttcccgatctgtcgagatcgcccgtgccggcgcagatagggtctaggatttttataggatttggcccgccaattcaacgtttcagacgacgattttactcctgtgaacatctaggactgggaaaggttagaatatttatttggtctattttgtatctataaataccacttatgtttttgtccaatttttagataatgtttgttgtgacctcagatgtgtagcaatgtcattgtttggggtcttgtacgggattcagtgctaatgtattcatctggtacattttggagc

SEQ ID NO: 104655 - DNA, 1411 bp, Zea Mays
cagccataactccgccccgatctatccgtcgcccctccaaaagcacgagagcgcaggaagtgagagaataaaaataataataataaggggaaataataagaaaaaaattctcgtgttcttcgaccggtggtggtggtgcgaacgcaaggcgaccaaggggaggcgagatgaggggggcgaagcggccgctcagcgtggtgacgtcgtgggtgcggcggcagccgcccaaggtgaaggctttcttggccgttgtcaccggcatggccgcgctcgtcgtcatccgcttcatcgtccacgaccatgacaacctcttcgtcgctgccgaggctgcgcacgcgctcggcataggcgtcctcatctacaagctcacaaaggagaagacatgtgccggactatccctcaagtctcaggatttaactgcgttatttctagctgttagactgtactgcagctttgtcatggagtatgacatccatacaattctggacagtgctacacttgtagccacactgtttgttatttatatgatacggttcaaactgaggtcaacttatatggtggacaaggataactttgcattgtactatgtggtgctaccatgtgctggactggcactacttgttcatccttcaacatctcataacattgtgaaccggatctcctgggcgttctgtgtttatttggaagctgtttcagtgcttccacaattacggttgatgcaaaatactaagatagttgaaccgtttacagctcactatgtatttgcgttgggggttgcaaggtttcttagctgcgcccactgggttctacaggttttggatacgcgtggccgtctgctgacagctctcggctatggtctgtggccgtctatggtgctgttttcagaaatcgtgcagacattcatccttgcagatttctgctactactatgtgaagagcctggttggtgggcagctggtgctacggcttccctcaggggtggtgtaagagaagtgcaagctgcagcagaatacaaaactttagtgcttcaccggttcatatgtacttttagtagtgcccaacctgggagccttttttagttgatgttacgagttatgactatatgtatggcaaaattgctgcaagggtcctcttaaaagataggttgatattgagactgtttatagctgcgcttttctggatacccaatctttgggtacttggcttctgccgtatgactgtcgtggtcttaggatcaggtggttaatggtctctttggattagacaattctagaatgctttcataaattgatattgatctatgcagaactggccacgtgaaaatcgtgggactaaggtcatcaggtcgtattcactttaacattgatattaccaagataggggttcctttctggcccattactaatctttag

SEQ ID NO: 104656 - DNA, 85 bp, Zea Mays
ctctggcctgtccggtctgcctcgtccgcttctctctcacccttcctccccctcctctccctccctctccgcctccccccccccc

SEQ ID NO: 104657 - DNA, 1463 bp, Zea Mays
tcctggagataaacttccacggtccccccccccccccaccccaagcccaaatcaccgggcctcgccccacagcaccggttgcgtgggaggaaggaggggaggcggctgtcgggcgagatgagcgactcctactgccccgactgcaagaagcatacggaggtggcgttcgaccactcggcgggggacacggtgtgcaccgagtgcggcctcgtcctcgaggcgcactccgtcgacgagacctccgagtggcgtaccttcgccaacgagtccaacgacaacgaccccgtccgcgtcggcggcccctccaacccgctcctcaccgacggcggcctctccaccgtcatcgccaagcccaacggcgcccagggcgacttcctctcctcctccctcggcaggtggcagaaccgcggctccaaccccgaccgatccctcatcctcgccttccgcaccatcgccaacatggctgacaggctaggtcttgtggctactattaaggaccgagcaaatgaaatcttcaagaaaattgaagatctcaagtctattaggggaagaaatcaagatgccatattagccgcatgtctatatattgcttgtagacaagaagatcgccctagaactgtgaaagaaatatgttcggttgctaatggggccacgaaaaaagaaattggcagagccaaagaatttatagtgaaacaactggaagttgagatggggcaatctatggagatgggaaccattcatgctggagattttctgaggcgtttctgttcaactcttggaatgaccaatcaagctgttaacgcagccaaggaggcagttcagcgctcagaggagcttgatataaggaggagcccaatctcaattgcagccgccgtcatttacatgataacccaactctcagaggacaagaagccacttaaaggtttggaatgctgccccattgtgttcttccatgtgactgatatacaggtaataatactggagaatctgttgcagatatatccttggctactggtgtggcagaaggcaccatcagaaattcgtacaaggatctgtatccctacgcctcaaggctcatcccgaatacctacgccaaggaagaagacctgaagaatctctgcacaccttaggaagctttactttttttcccttctgttatataaatcggaattagatttgtcaaagaggagtgagtgaagttgttcctgttgtgaccgactgtactgagcaatgtgtcgtcgccggcgcgcttaactttgtggatggaccaatgagaacataagttgtcatcatcagatcgaatttcttttcagagcacctgccacctgaagatttttttgggatagcaaaggtgtcgttttcgtatactccctttgggaaaggatgtagatagcaagcagtccttggaagtgcacaagattttatttaaaagaacaggattctgttccccatcttcagaagaa

SEQ ID NO: 104658 - DNA, 1406 bp, Zea Mays
tcctggagataaacttccacggtccccccccccccccaccccaagcccaaatcaccgggcctcgccccacagcaccggttgcgtgggaggaaggaggggaggcggctgtcgggcgagatgagcgactcctactgccccgactgcaagaagcatacggaggtggcgttcgaccactcggcgggggacacggtgtgcaccgagtgcggcctcgtcctcgaggcgcactccgtcgacgagacctccgagtggcgtaccttcgccaacgagtccaacgacaacgaccccgtccgcgtcggcggcccctccaacccgctcctcaccgacggcggcctctccaccgtcatcgccaagcccaacggcgcccagggcgacttcctctcctcctccctcggcaggtggcagaaccgcggctccaaccccgaccgatccctcatcctcgccttccgcaccatcgccaacatggctgacaggctaggtcttgtggctactattaaggaccgagcaaatgaaatcttcaagaaaattgaagatctcaagtctattaggggaagaaatcaagatgccatattagccgcatgtctatatattgcttgtagacaagaagatcgccctagaactgtgaaagaaatatgttcggttgctaatggggccacgaaaaaagaaattggcagagccaaagaatttatagtgaaacaactggaagttgagatggggcaatctatggagatgggaaccattcatgctggagattttctgaggcgtttctgttcaactcttggaatgaccaatcaagctgttaacgcagccaaggaggcagttcagcgctcagaggagcttgatataaggaggagcccaatctcaattgcagccgccgtcatttacatgataacccaactctcagaggacaagaagccacttaaagatatatccttggctactggtgtggcagaaggcaccatcagaaattcgtacaaggatctgtatccctacgcctcaaggctcatcccgaatacctacgccaaggaagaagacctgaagaatctctgcacaccttaggaagctttactttttttcccttctgttatataaatcggaattagatttgtcaaagaggagtgagtgaagttgttcctgttgtgaccgactgtactgagcaatgtgtcgtcgccggcgcgcttaactttgtggatggaccaatgagaacataagttgtcatcatcagatcgaatttcttttcagagcacctgccacctgaagatttttttgggatagcaaaggtgtcgttttcgtatactccctttgggaaaggatgtagatagcaagcagtccttggaagtgcacaagattttatttaaaagaacaggattctgttccccatcttcagaagaaaccgtcatttatccatc

SEQ ID NO: 104659 - DNA, 967 bp, Zea Mays
agtttagacaaagcgcaagaccaaccagtaaccactccgtggcctcccgggaaaggggcttaactcgagtcgctaatccttttccttgtatctccccgtctccatcctcgctcgccgccatggaaggttcgaaggggagtggaggtggtggggccggtgccgggtccgaaaagccaagcgccgagtcgaaccctagtctgaatctgccgccacctaccgcagcggatgtcgaagccacggatgacggtggcgccacggccgcggccgcggcagctgccgaggcggccaggcggccgttcactgccctcagccaggaggaggctgacctcgccctagcccgcgtcctgcaggagcaggagcgggcgtacatgttgctccggatgaacgggagcggtggcgagggcagcgactacgggagctctgatgcagggagctacgagtacgacgaagagggagatgactacgaagaggaactggagcaccacctccgcgtccaccaccacgaacacccctcgggcgatggtgatggagagggagagggcgagggcgccgaggggagcgattacgacgaagagtacgaggaggacgaagaaggggagccggaagtagatcccgcggagtttgagaacgatgaggcttatgcgcgtgcgctgcaggatgctgaggagcttgaggtcgccgcgcggcttatggctctcgctggtctcagcgattggcgaactgtggatgtggagcatgaggaggatcatgtgaatgacccacaggttgtgattcatctcattgttgatgaattttacctttggtggcttggtgctagggaagatcacttgagtttgcaattaatggtctcataagaaacaaaatgccatatcccgctctttgttaatttctgttcatgcaaactagtggagttgttctttgatcaatgcaacatgtatgatgtttcacaacagtgagcatgatttgt

SEQ ID NO: 104660 - DNA, 1398 bp, Zea Mays
agtttagacaaagcgcaagaccaaccagtaaccactccgtggcctcccgggaaaggggcttaactcgagtcgctaatccttttccttgtatctccccgtctccatcctcgctcgccgccatggaaggttcgaaggggagtggaggtggtggggccggtgccgggtccgaaaagccaagcgccgagtcgaaccctagtctgaatctgccgccacctaccgcagcggatgtcgaagccacggatgacggtggcgccacggccgcggccgcggcagctgccgaggcggccaggcggccgttcactgccctcagccaggaggaggctgacctcgccctagcccgcgtcctgcaggagcaggagcgggcgtacatgttgctccggatgaacgggagcggtggcgagggcagcgactacgggagctctgatgcagggagctacgagtacgacgaagagggagatgactacgaagaggaactggagcaccacctccgcgtccaccaccacgaacacccctcgggcgatggtgatggagagggagagggcgagggcgccgaggggagcgattacgacgaagagtacgaggaggacgaagaaggggagccggaagtagatcccgcggagtttgagaacgatgaggcttatgcgcgtgcgctgcaggatgctgaggagcttgaggtcgccgcgcggcttatggctctcgctggtctcagcgattggcgaactgtggatgtggagcatgaggaggatcatgtgaatgacccacaggaggcatggcaagaggttgatccagacgagtactcctatgaggagctagttgcattgggtgaagtagttggcacagaaaacagaggtctctctgctgatgcacttgcttctttaccttcagtaacatacaagatgcaaagtgttcaggatggcaacacagagcaatgtgtaatttgccgtgtggaattggaggagggtgaatctttgattgcacttccctgcaagcacttataccatcctgaatgcataaaccagtggctgcaaataaataaggtatgccctatgtgcagtgcagaagtatcaacctccagcaacaaggagccatgattgctctcggatggccatcttgggcatttgatgggattaactagcggcaccactgcagcatctttatgcttcaagcaaaagcataaaggaacgtcttacatacatgcaaggagatcaggaaataatcctcttgtcaatctaaagttttgtcctggttttctgctcactggatttattggccctgcagcttatatggtcttagttcccttcggacgccttatgatccataaaacatgccaattatattatattgttagttattctttttactgatcgcatgatcgtcgtatatatttgcttgttaaat

SEQ ID NO: 104661 - DNA, 1906 bp, Zea Mays
atgacaacctgtgaaaattctttattcctttgctcccacgaacaattcatcactacacacggacgcacacattacgcgtgaatgaatacgtgtatggcatataccataataccaatcacagtcacaggatcttgtatgtaaaaaatatactgcacgtctagagtgtacacttgagggtagtattggatgacaatttaaatgtttttttataaaataatagaatactaaataatttttagtttaaaaataaataaaatagagtctaattctaattcaatgtttaaattttatagtgtaaaatttagagcctattatacgctgcattggccatacttctcgataactacatgcgacactacatagtactcctgactgtgcctagacggacccctgcctgtaatcgcggcgactcctctagtttctacaagccccgggcatctcctaatcaaatcgggaacacgtacgggtacccctggtccgtcgatcgcggtcacgcggtgccgtcgacgcgcgccttggtgacgccggcgcaggcgtcgacgaagtcgccgtcgatgaagtcggtggagaagacctggagcttgtcgccgaggcccttggcgaagacctcggcgatgaacatccgcgcgtagccgtggatccgcctcgtcacgggccacacgcacaccaccgggttgtcgggcctgggcgtcaccgtgttctccacccggtacaagaacccgcggcccgccaccggcggctgctgccccaggaacttgaggttgctctcgaacttggtctccggcaggtccgtgtcgatccagttgtccctgaggtacccggcgctccacaggggctccccgggcccgggcgccggcgacctgcgcggcttccacacgcagatgacccggcgcgggagcagctccgcgacggtcttgtggaacaccgcctcgtcctgcgggatcagcaggtgctcgccgagcctctccaccaggaacctgccgaactcgggcgggtcctcgtgcccgaactcggtgcgcacctccaggacgaccacctcggactcggtctcgcccaggaacctggtcacgtcgtccagcaccacgtcgacggggtacgtggccaggacgccgtggcatacgcggcgccccttctggacgcgcacgtcgaggacgcgcgcgcccagcgccagctgctcgtacacggacagcgactggcactgcgcgaaggggcgggtcacgaacggcacgccgatccggtcggtggccgagtcgtgcgtgccgggccacaccacctggtgcacgcgcagcctgccggcgcccagctccgccatccaccgcttccggtccgccggccggtgctcagaccccgggaacgtgtcgcccgacgacgacagccgcgtcgccagcgcccgcttctcggcggccaccagcttccgccggtccacctgcttcgagaagaaggcgcccatggcttcgtccaccgggttggtggctgccgttgttgccagcgctgctgctattggggggcagccatggatggataaataaagggtcctgtgcctcgagctctgacctggacctggacgtcgagattgattgatagctgctagctagcaacacaaacaaggaagaaaaatatcaatgcgtgtgattagccaacaacatgcatgctcgggcgctcggctgatcgagccctagcggtgaggaggaaggaagggacggacggcgtgttcttgtcacctccgctgcggtttctcccaaaaagacttcggtttccttggattggaattggatgctacgattggcgttatggtgttgatgccaggccaggcgacagttttttttcccttcccaaaatcactactactagagagaggttaactggttcgttcggggcatgggcggggtagtttttatttatttat

SEQ ID NO: 104662 - DNA, 1515 bp, Zea Mays
cgatcgcggtcacgcggtgccgtcgacgcgcgccttggtgacgccggcgcaggcgtcgacgaagtcgccgtcgatgaagtcggtggagaagacctggagcttgtcgccgaggcccttggcgaagacctcggcgatgaacatccgcgcgtagccgtggatccgcctcgtcacgggccacacgcacaccaccgggttgtcgggcctgggcgtcaccgtgttctccacccggtacaagaacccgcggcccgccaccggcggctgctgccccaggaacttgaggggctccccgggcccgggcgccggcgacctgcgcggcttccacacgcagatgacccggcgcgggagcagctccgcgacggtcttgtggaacaccgcctcgtcctgcgggatcagcaggtgctcgccgagcctctccaccaggaacctgccgaactcgggcgggtcctcgtgcccgaactcggtgcgcacctccaggacgaccacctcggactcggtctcgcccaggaacctggtcacgtcgtccagcaccacgtcgacggggtacgtggccaggacgccgtggcatacgcggcgccccttctggacgcgcacgtcgaggacgcgcgcgcccagcgccagctgctcgtacacggacagcgactggcactgcgcgaaggggcgggtcacgaacggcacgccgatccggtcggtggccgagtcgtgcgtgccgggccacaccacctggtgcacgcgcagcctgccggcgcccagctccgccatccaccgcttccggtccgccggccggtgctcagaccccgggaacgtgtcgcccgacgacgacagccgcgtcgccagcgcccgcttctcggcggccaccagcttccgccggtccacctgcttcgagaagaaggcgcccatggcttcgtccaccgggttggtggctgccgttgttgccagcgctgctgctattggggggcagccatggatggataaataaagggtcctgtgcctcgagctctgacctggacctggacgtcgagattgattgatagctgctagctagcaacacaaacaaggaagaaaaatatcaatgcgtgtgattagccaacaacatgcatgctcgggcgctcggctgatcgagccctagcggtgaggaggaaggaagggacggacggcgtgttcttgtcacctccgctgcggtttctcccaaaaagacttcggtttccttggattggaattggatgctacgattggcgttatggtgttgatgccaggccaggcgacagttttttttcccttcccaaaatcactactactagagagaggttaactggttcgttcggggcatgggcggggtagtttttatttatttatttatggcgagacggtgacggaatcgagtccacaagccaaaaggacacggtttatgccattatggacggacacgcgatgccattggcgacctggagaggtgaaggttcttccagttccatgttggcgcaataatttgtcaagcaaatgcagcaaacttttgtt

SEQ ID NO: 104663 - DNA, 2653 bp, Zea Mays
gagagagagaagccgcaaagccgacgcgaatgtagcgcagagacaacgcgacggccgttgctgccgtcccgtcccgtgctctgcgcggcctgccgccagctcaggcacgcgcgcgcgcggcgcgcccaacccggccctcgcccaaaaaaaccaagaaccatgccaaattaactcgctgccaccaccgccccccgttcacctcctcttcctcctccagttctcccccaattcccaccctgcggaggaggcagggaggaaggtcggatcgagcagcccgcctgctgcgggattggggacagggcctggcgcctggggccggccgccattaggttgcttgaccgcgccgccgcggcgaggggccagcgtcgtcgggcgggacgggatggacgacctcaagcagatcctggcgcgcccgatccagctcgccgagcaggtaataaagtggtccgacgaggcctacacgttccggcaggagtgcatggagctcaaggccaaggtggagcgcctcgccggcctcctccgccaggccgcgcgcgccgacctctacgagcgcccggcgcgccgcatcttcgacgacaccgagaaggcgctcgacaaggcgctggccctcgtcgacaagtgccgcgcccacggcctcgtccgccgcgtcttcaccatcatccccgcgggctccttcaagaagatgaccaaccagctcgacaactccgtcggcgacctctcctggctcctccgcgtctcctcgtcggccggcgacgacgacgacgacctcgacgcccacatcggactcccgcccatcgcgcagaacgagcccatcctcttcctcatctgggagcagatcgccgtgctctacaccggcaacctcgacgcccgcgccgacgccgccgccagcctcgtctcgctcgcgcgcgacaatgacaggtactgcaagctcatcatagaggaggacggcgtgccgccgctgctcaagctcgtcaaggagccgcacctcgaggggcaggagaactgcgcgctcgccatcggcctgctgggccgcgacccggagtgcgtcgagcagatggtccaggccggggtgtgcctcgccttcgccaaggtgctcaaggagggacccatgaaggtgcaggccatgctggcctgggccgtctcggagctcgccgccaaccaccccaagtgccaggacgccttcgcgcagcacaacgtcatccggctgctcgtcggccacctcgctttcgagacggtgcaggagcactccaagtacgccgtcacgtccaagatgtcgatacactccgtgctgatggacagaaagaacaacgccgcctctgcggttcagccggacttgctggatgcaggggagcacgccggcatgaggtatccgactggacacgttccccagggcaagaacgagatccacagtctggtgcagtccaccatggctgcgaagcctaacggaggcagtggtaagcacagcaacatatcatccactagtaacgctggtgtcgcggcaacgaagcagcacaacgcgtcactgtcaggaacgagtacaaggggcagggagttcgaggaccctgagacgaaggcatacatgaaagctaacgcagccaaggcgctgtggcagcttgccaagggaaacgccgctatctgtaagaacatcacggagtcaagggctctgctctgcttcgccgttctcctcgagaaaggtgaaggtgacgtgcagtataattccgcaatggctctcatggagatctgctgcgtggccgagcagaattccgacctccgacgatcggcgttcaaaccaacttctccggctgcccgggctgttgttgaccagttcctacgtgtcgttgagaaggccgagtacgacgatctcctgattccctgcattatctcgctgggttgcttgtccagaaccttccgtgctacagagacccggatcatcgggccactggtgaagcttcttgatgagagggaagcagatgtctctcgggaggcagcgattgcactgaccaagtttgcgtgcacggataattacctgcacgttgaccacactaaagcgatcatcagtgcaggcggagcgaagcacctggttcagctcgtgtatttcagcgagcaggtggttcagatcgcatcactcacccttgcatgctacatcgcacacaatgtcccggacagcgaggagttggcacaggcggaaatcctcacggtgctcgaatgggcttccaagcaagcttacatggtgcaagacccagtaatagacaacttgttgccagaagcaaagatcagattggagctgtatcaatccagaggcgcaaaaggctattattagattacctgctgtgggaagggaattttaaggcgttcttcttggatcggccaagtactgtatatacatccaacggcttctatgtatactctggctaaacctttttttattcccggcatggcaaaagttgttgaagttacacacctctggttgggttcttgatatagggaagtaagttttatttgtaggcttggatgttcagaactccaatttctcttgttggtggtatagtttttggaagattagcatcttgtgctctctttggcctaaatgatgtatcgtgtatattacatttcactcatcaacatgaaaaagttcttaaatccaagagcgtaa

SEQ ID NO: 104664 - DNA, 1610 bp, Zea Mays
cgtgttgaagtctccgcttccgttcttcttccactccactcctctcctctcctctcttctccttgggatcccgatcccgcttctcctcccgtatatatttctatttcttttctgctcaactctactgggatgctccagtcaagtgctagtgcaccacgagcacgcgcaggccaagaagccaggaagtctgccaccctccctcagctcggatgacgccaatagtggcctcgttgagcctcgcccacctcgtggtggccttgttgctgatgttgttagccctcctttgcgtcgacgcgtcggtgcacgattacgatggcgaacggttcgcgaccgacggcaacgccttcgtcctccacggtggtaccgtggtagtgagggtgtctacggctccgctaagggtggcgcgttcatccgctttgagaaggtcacgttcaaaggatgcccgagtcggcgaccgcagccgaggaggacggcaaccgcacgaccacggtcacagcggtcatcttcaaggccggcgaccgcgacgccgtcgggggcacagacgtctccgtcgctggcgggcgggcgctctgctgcacatgggacatggtgagggcggtgaggctcggggcctgcacagagggggggcagtgatgtatcgcgcgcggaacgacaacaccggctggcctagggtgctcgcggcctccttcctcccgggcggcctcgacgcggctttcccggtcgagggcgtcgtcgtggcgcgcaccggcatgtacacactcctgttcgtccactgtgatgcgtcgctcgccggcgggcaggtggccacggcgggcaagaccatctggaagaacagccgctgctacctcccggaccgtatggcgtcgctcgtgcccttctacggcgccaagtcgctggcgttggcggcgtcctgctgcgccacgctggtgatcgcgctggggatgatggaggcgtccagttggtacttttacctcgtcgagttcaacgagtctgggtccgcccccgcggcgagacgttctgggcggccacgtccggcacgctccgcggcgcggcggcgcacgtgctggtgctggccgggccacggcgtggtgcagcccgcgctggcagggctcaagagcgccagggtggctggcctcggcgtcatgttcttcgccgccgcgaaggcccttgaggtcagcaagaacgccgacaccgtgaaacgaatgacgacgaagctagagatgtactggaggttgaacaacgccttgatcatcgcggtggccgtgtcactcagctggatcacatttgaggtccaattcaagtcgacggacgagtacaacgagcggtggcgcgcgacctgggtcatcccgacggtgtgtcagctcatcttattctcgctgctctacgccgtctgcctcatgtgggcgccctcacagagcgcggcgaggtacgcctacctggacgacgaggatgagggcgaggacagtgacatggaggacaaacggtcgttgatcaggcccgacccgctgtcgtacgtggactactggacaatctccgtgtccaaggacgccaccaccatcatcctgagaaccgactccttcgtcatcggtggtggaggcaagcgggtgtag

SEQ ID NO: 104665 - DNA, 414 bp, Zea Mays
atggcgttgcggatgcctcgtgcttctagaaacattctcacctctgctccgggttcctcacagcttctcccaagcgccctccagtctcaccaacccttccgcggttctgcccttggtgccgcgcccatgagcctcaccgaggcgccgtccccatccccgtcgtcgtcgagcgggagcgatgacttcgcggccttcctcgcctccggtgctgacttcgccttccctggtgacccctcctccattttccctgccaccgacaacgagggcgaggacgaggatctggaggagctagaggttgaagctatagaacaaaacggattcagattcgatgtttcgctgctggggctgtcccaaatggaacccattaccaatgggttacattcggatctcgggactggagtctcaaataggtga

SEQ ID NO: 104666 - DNA, 1272 bp, Zea Mays
gtagcagtgtgctctgacgtgcaaatactgtgttttgacggctgagataaaagggtagaggtgaggtgggagggtttaagtgagaattttgcatctactgtgttttgacggctgagattgcatttttaacgatatgtccccttcccaaactacctgaacaagacaagacgggtgccagacaaattcagcaaacaagcaaaaggcacgaccaccaccgccggccgggaagcaagctcaaaccctaatcgccgtccgccggcgacgccagcacgatggcccgctacgaccgcgccatcaccgttttctcccccgacggccacctcttccaggtggagtacgctctcgaggccgtccgcaagggcaacgccgccgtgggcgtccgcggcacggacaccgtcgtcctcggcgtcgagaagaagtccacacccaagctccaggactccaggtccgtgcgcaagatcgcgtgcctagacactcacatagctctggcgtgcgcggggctgaaggcggacgcgcgcgtgctcatcaaccgcgcgcgggtcgagtgccagagccaccgactcaccgtcgaggaccccgtcaccgtcgagtacatcacccgctacatcgctgggctgcagcagaagtatacgcagagtggtggagtccgccccttcggcctttccaccctcattgtcggcttcgacccctacaccgacaagccagcgctgtaccagaccgatccatccggtaccttctctgcttggaaggccaatgccacgggaaggaactccaactctatgcgtgagttcctggagaagaactacaaggagacctccggcaaggagaccatcaaacttgctatccgtgcacttctagaggttgttgaaagtggtgggaagaacatcgaggttgcagtgatgacaaagaaggacggtctccgggaactcgaggagtctgagattgatgagtacgttgccgagatcgaggcagagaaggctgcagctgaggctgcaaagaagggtgccccgaagaacgcctaatttcccgtcttgtgctatggctcccttcaacactgtgtgtgtcccgtttttatgttccatagcaccatcttaactgttctagaaggatgctagatctttaggtgaaactacgcttatatgcctgtgggttaaatggtgtacaatgagctcgtctacatgccttcgtcggaggttttcagtttcgtgtattctgtcatctggacagcgacagttcaaatattgattttacctgattccttgtcatgactca

SEQ ID NO: 104667 - DNA, 508 bp, Zea Mays
ttttttttttttctttccaaagatgaatagcactaacctgacgtgcccaaaccaaatacatgagcgggtaaactactccggagaaagaagacggcatcaacgtatgcgcgcgtgttatgttttgtactccagcctccaggcgtgcacacaaacactagcagagcgtcagccgtgtataaaaacatagagacaaaaacactgtataaacaaggtatagattaaaatcaagcaaacagatagaaacatttttagtccttttaagggtgtttaatttaaagaaactaatttttagtcatctcattttagtcttctacagtataaaccaaacatttggcccatcagccgataaagcgatctgaaaggagaccactgatctcgatcaggtctcctccactccacacgtcggtgtagcccccccaaccaaccaactactcaactagagttgacccaccaagaggccgccatccatggatgcagcatggaagcagcggagaaggatgcgtgtccc

SEQ ID NO: 104668 - DNA, 2051 bp, Zea Mays
atgcctcctgctaccagcgtactgccacggctccgctttcccgtcaactccctgttgctctgctgcacagcaatcgcctcgtttcatagtaaggaggaggaggttgaggcgaagatgatgcagcagatgcagcaggagcagtggaacgccgccgccgcggggctcctccggccgaccaagtcggcgccctgctcgcccatcaagccagcggcggcggcggccatgctgcggacccactccgactccttccacgtcgcgcacaaggtgcccgtcggcgacacgccctacgtgagagccaagcgcgtccagctggtggacaaggatccagagaaggcgatcgctctgttctggagtgcgatcaacgccggcgaccgcgttgacagcgcgctcaaggacatggccatcgtgatgaagcagcagaaccgcgccgaggaggccatcgaggccatcaagtcgctgcgaagccgatgctccgaccaggcgcaggagtccctcgacaacatcctcctcgatctctacaagagatgcgggcggctggacgaccaaatctcgctgctcaagcacaagttgcagcggatccaccagggccacgccttcaatggcaagcggaccaaaacggctcgctctcagggccgcaagttccaggtcactctcgaacaagaagccaccaggctccttggcaatctgggatgggcgctgatgcagaaggagaactacacagaggcggagggggcgtaccgtcgtgcgctgctcatcgggccggacaacaacaagatgtgcaatctgggcatctgcctcatgaagcagggccgcgtgctcgaggccaaggatgtgctcaagcaggtacgccccgcgggggtcgatggtctgcgcggtgccgactctcacctcaaggcctacgagcgagcgcaagagatgctgcgggacctcgagaccaagctcgtcggccgcccgcgcgctgaccagctcgacacgaactggctctacgatgcgctgctgctgggatcgtcctcgagcatctggcagccgcagccgtgcatcgaccatttgctgccacctccggctccggcatcaatcccagccctggccccggcgccgcgcgaccacttcgccgatgaaaacgccggactcagcaagaagctggcggcgctccaggcgaacatgcttaatgtggacgcgcagcccttctactctctgcgggtgccgccgcttgcagcgaagcctcataacacgctgcctcagcagaagccacatagcacgctgcctcagcagcagcagcagaagaagaagccagctcctgtccatgatcccttgggcaacctgaagaggacacggtccagcaattgcatggacaaggcaggagcagtggtggacaaggcgcaaagcatcgacgagaacagcggcaggaggaagtcgctctcagctgaggacagatggccagagctgcccgaccacagcgcgttcgacgaggccctcgtcgcggatatcctgggcccggtgttcgacgacaaaccaacagctgctggaactaacggccacggcaagctgccggcgagctgcgacacgagcccagcagcgaaggagaagatcagcaagaggctgaggatcttccaggacatcacaaagacagtgaacaatttctgattcggtttcggttttcttcacgttcctactcacaacaggcaggctcgaggtggcgatacacagagaaggagaaagagcttgttctcctgagagctcctgtctggcaactaaattaaacagggattctattcagtttaaatttaatgctgattttgattcaatttattaacaccaaaataacagctgattctttttccacgaggctctccttgtaatagaactatagaagtgggctgctgcatctcgttctaatttcgtttcttttgaataacaaaaagttcatttataatcccgtgactcatctgttgttttttattttcactgcaatcgtgtattagctagcattgcagcttgcgtacctgttaatcgatggaattgatcgcatcaattgaaaatgacagccttat

SEQ ID NO: 104669 - DNA, 146 bp, Zea Mays
cacgaagtgaggcattcctgcagttgcaggcagggccggtcctcacaattcgaggtccctaagcgaaaatatgtagatgtcctatacgaggtttgagtctgctaatttttttcaacttttaaataatatctaaaaaaataaaataa

SEQ ID NO: 104670 - DNA, 2272 bp, Zea Mays
tttttttattgcaattccgtcttgaaaatagtaacaaaatactattcagaacaggaacggcatttaatctcttagaagtgaccatctactttctatttgaaatgtctaattactgcatctcaatcttttaattaatttctcgttctccctagatccctacatgcaatggaaggcattgtggagacacatggacacttcgcgacaaaaacaagcctatgctttggactgagaattggactcaacaattcagagcatatggcgatcaagtagctatgcgttcagctgaggacattgcatatgctgtgttacgattttttgcaaagggtgggtcattggttaactactacatgtaccacggaggaacaaattttggaaggactggcgcttcttatgtgctgactggatactatgatgaagctcccatggatgaatatggtatgtacaaggagcccaaatttgggcatctcagggacttgcacaacgtaataaggtcatatcaaaaagcattcctctgggggcaacattcgtctgagatattgggtcatgggtatgaggcacacatctttgagttgcctgaagaaaagctatgcctctctttcctttccaacaataacacgggcgaagacggaacagtgatcttccgaggggataagcactatgtgcctagccgttctgtctccattcttgctgggtgcaagaacgtagtttacaataccaagagagtgtttgtacaacacagtgaaaggtcattccatacctcagatgtaacaagcaagaataaccagtgggagatgttctcagaaacgatcccaaagtatcgtgatactaaagtcaggacaaaggaacccctggagcaatataaccaaaccaaggacgatactgactacttatggtacaccacaagctttcgcttggagtcggacgatttgccctttagaaatgacatccggcctgtgcttcaggtcaaaagtagtgcacacgcaatgatgggatttgctaatgatgctttcgtaggatgcgcgcgcggaaacaagcaggtgaagggtttcatgtttgaaaaaccggttgatctgaaagtaggtgtgaaccatgtcgtattgctgtcgtcaactatgggaatgaaggatagtggtggtgaacttgctgaagtaaagggcggcattcaggagtgcctaatccaaggtctcaacactgggacgttggatttacaagtcaatggctggggccataaagctgcactagaaggtgagtacaaggagatctactcagaaaaaggtttgggcaaagttcagtggaaaccggccgagaacgaccgggcagccacttggtataagagatactttgatgagccagatggagatgatcccgttgtacttgacatgagctcaatgagcaagggaatgatttttgtgaatggcgaaggagtgggtagatactgggtctcataccgaactcttgctggaactccttctcaagcagtgtaccatatcccgcgtcctttcttgaaatccaaggacaaccttttggttatcttcgaggaggagatgggcaagccggacggcatcctcgtgcagaccgtgacgagagacgacatatgcctgtttatctcggagcacaacccgggacagataaagacgtgggacacggatggtgacaagatcaagctcattgcagaggatcacagcaggcggggcaccttgacgtgcccccctgagaagacaatccaggaagttgtctttgccagcttcggcaacccggacggcatgtgcggcaacttcactgtaggcacttgccacactcccaatgcaaagcagatcgttgagaaggaatgcctcggcaagccatcctgcatgctgccggtggatcacacagtgtacggcgcggacatcaactgccaatcaacgactgccacgctaggggtgcaggtgagatgcggaggcggcaagaagggtgcctgagaacaagacggatgctgctaattgacgtttcagctcgtttgtttgttcgtcccttcggtttggcactgatgcttatgacccattggtctgccattgcaattgaaatgtggttggaacgtgcttgatcgggaactaacatgaaatgagtgaagggtagatgctgatctgaaaaatatgtgtgttcccccctctttccttccatgtcgtgttgtttcaggtaaccgtcacaatatatataggtggtcccctttggaatccggggattattccgtttgctgtatttttttctgtgaaaatgaactgattcctgtcaa

SEQ ID NO: 104671 - DNA, 921 bp, Zea Mays
cttgcaggtcggctcacccaacacccataatttctctgattcgcctcctccactaccactagggcgctcgcctctcctcctctggctctgatccactcttctctccacgaaagtacgagaccaaccagaccagtccagccgcagcacgcagccagccagccatggccgtggcttgcgcgtcgcttgcggttgcgggcaggtgggagatcgggggcctgttcacggaggcggagctggcggtggcggaccagctcgtgcaactcagcggcagcggcggaggggacgaggaggcggcgtcgtcggagtcgccgcggtcggtgaacacgtgcgcgggcgccgcggcgtgggaggagcgagaggaggcggccgccggtcccgcgctgggggcgatggagctggacaggagggcgaggaagaggtaccgcctcctgtccgacgtctacgccgccacgaggccggtggccggcgccggcaccggcgcggacaacgccaggaagaggaagcggggtcacgagccgaccgaggcggagccgcggaggcgggtacgacgatcaggtaggtacgacgacggagatcagtacttgtagaatctagatggaatattacggaggtaggagatgggagggaagcgcttctgtctgtgtaattatcgaagagtagtagggtctgttctgcaatgtcagtctcctttagcttttcaaagttctcctagtagtagaagagaagggcacagcagccagcaaacaacaaaggcaagctagtttgtacagaaagctgttggtcgtactgctacgttttgaattcaagatttggatccgaactgtggggggtgggcagcaagatatttattttcagatcagagatcacgaaatgaagtcttctgtcttcctcccatagtgcggctaccgcccctatatatta

SEQ ID NO: 104672 - DNA, 3014 bp, Zea Mays
ctatttcgggctaaattgccaaatctcgagatccatgatccatccgaaaccccgcctcgccgcctcctctcgctttgccgtttccgaccgccaatgctgaggcgagccgacgctaccgcccacccgaatcctcgccgctgagggtgctctaggattggagtgctctggttggttgcatagacgctcgccgccgcctctcccgtgccccggcggccggcaccggccccgaccgcgaggctccgtcgccggcgatggcgtcgccggccggcggcgagtctccagcgaagcccgtcctcctgcatggcgacctcgacctctggatcctagaggcgcgcctgctccccaacatggacatgttctccgagcaggtccgccgctgcctcgccgtatgccgcccgcccacctcctgcgggaccaaccacccgcctgccgccgcgcgcggcggcggcggccgccaacaccaccaccggaagatcatcaccagaggcccctacgtcacgctgtccgtctccggcgccgtcgtggcgcgcaccgccgtcatccccaactcccaggaccccgtctgggaggagcgttttgccgtgccgctcgcgcaccgcgccgccgagctcgagttccaggtcaaggataacgataccttcggcgcgcagctcatcggcaccgtcaccgtccccgccgactgcgttgtgtcgggcaccgaggccgaggattggttccccgtcaaaggcaccaacggcaagccgtacaaacccgacaccgcgctgcgcctccgcttcacattccaccccatcgccaacaacccggcctaccgccacggcatccctggcgaccctggccacaggggcatcggggagtcctactacccgctccgccacggtggccaagtgacgctgtaccaggacgcgcacatcagggaaggggacctgccagagattgagctcgacgacggcaagacgttccagcacaactcgtgctgggaggacatctgccacgccatcctggaggcgcaccacatgatatatatcgtcggctggtcggtgtatgataaggtgcgactcgtgcgcgaaccatcgccgtcgcggccattgcccgatggtggcgaccttacgcttggagacctgctcaagttcaagtcacaggaaggtgtcagagtgtgcctgctggtgtgggatgataaaacttcgcatgacaagttcttcatcaagacgggtggagttatggcaactcatgatgaagaaactcggaaattttttaaacattcctcagtcatctgtgttctctctcctcgatatgctagcaataagctgagcattttcaaacagcaggttgttgggactttgtttacacaccatcaaaagtgtgtgctggttgatacacaagccaggggaaacaagcgaaaagttacagctttcattgggggcctagatctttgtgatggtcgctatgacacacctaaacacaggcttttcaaagatcttgacacagtattccaaaatgattaccataaccctacattttcgtcaggtgcaaagggacccaggcaaccatggcatgatttacattgcaggattgatggccctgctgcctatgatgtcttgacaaattttgagcaaaggtggcgaaaggcaacaaaatggcgtggccgatttagaagagtatctcattggaaagacgacgctttaattaagctggaacgtatctcatggataataagcccttcacccaatgttccaaatgatcatcctagtctgtgggtttcaaaagaagaagatcgtgaaaattggcatgttcaggtattccgatcaattgactctggttccctaaaaggatttcctagtgattgcaaagaagcttcaaagcttaatcttgtgtgccgaaagaatctggtaattgataagagcatccacactgcatatgtccgagcaatcagatctgcacagcatttcatttatattgagaaccagtactttcttggctcttcatatgcttggccatcctatgtgaattcaggtgctgataatctgataccaatagaactggccctcaaaattgcaagtaagattagagcacaagaacgctttgcagtgtatgtagtgataccaatgtggcctgaaggagtccctactgcagcatctgttcaagaaattcttttctttcaggcccagacaatggagatgatgtatacaataattgcagatgagctcaagtcaatggacaataaggacatgcgccctgaagattacttgagcttcttttgtcttggaaaccgggaagaaccaccatctaatggcagcccagaatcagagaaatctacagataaaagtgcagtgggcttagctacaaaatatcgacggttcatgatctatgttcatgcaaaaggaatgattgtggatgatgaatatgtcattctgggttcagcaaacatcaaccagagatccctggctggttctagagatactgaaattgcaatgggtgcataccagcctcattatgcatggtctacaaagaatggacatcctgacggccaggtatacgggtacagaacgtccctgtgggcagagcaccttggaacgatcgatgaccgcttcaaggatccttcgagtttggagtgtgtaaggtttgtgaatcaaatcgctgtagagaactggcgaaggtatactgcagaagaaatgagtacattacaagggcacctcctcaagtacccagttaaggtggaggctgatggtaagatcagcccactgccagaccaagaatgctttcctgatgttggcggcaagattctgggagcttcaacttcacttcctgattcgctgaccatgtagcgtcattacataatttttttttcagagttgaactctgtaattgtctagatttggtgggattgtcgcagaacttatactactagtgaagtgcgcgtgccctgcgcgcgtgtagtgtaggctcatggagatccaaccacacaactaatataactatataaatttacatatataataagtgtaccaacctacata

SEQ ID NO: 104673 - DNA, 357 bp, Zea Mays
atgacattacatccctttgtcgtcacgtacaagatgcagatggccatcatctacgccttcccgccgcctgccccgtcgacggcggccatcgagaacggcctggccgcggtgctggccgagtaccgcgcattcgcgggggagctcggcgaggcccccgacggcacgcccgcggtgctgctcaacgaccgtggcgcgcgcctcgtggaggcgaccgcggacgctgacctcgtggacatggcgcccgccaagcccacaccggagctgctccggctgcacccggacatcgagcgggagctccgatccaagaggtggtgctcctgcattctccttgtttcttctatagtggctgttgcttga

SEQ ID NO: 104674 - DNA, 2291 bp, Zea Mays
cactttctagtttcctttctcctcctccagccctccttaaaaaatcggccacggttatttatttctctcgccccgctccgctttcctaatctgcgagctggggggagatcgagaccctagaacggagggcgggtgtgcggcgctgagggccttagacgaatggcggtggaggagaccgcggagagctgcggcagccacgccgcgaccgctgcgtccggcggcggcgcggcggggcccgcgacgtcctcgtcatcggccgccgcggcggcgcaggcgcggaagcagcaacagcagcagcgccataagctcgaggtgtacacggaggttcttcggcgcctccacgacgccggcctgcccgacgcgcgggcgcccgggttcgacgacgagctctggaatcacttcaaccgcctccctgcccgctacgccatggatgtgaacgtggagagggcggaggacgtgctcacgcacaagcggctcctggagcaggccaaggatccggctcatcgcccggctttcgcggtgcggtccgtgcaggtatctccaattcttgatgggaatcagactgattctgattcgaacactgcaggggaggaagtcgcttcaagactgttgaacaggcagcaaagcatatatcctcctcctgccttcggttcttctacaaatcttgaggcccttgctcttgaagctagcaagtctcatgatcacgatagcacttctgataatggccgatctctatacaggcccatgcatgaaatcaccttttcaaccattgacaagccaaaacttctcagtgagctgacatctctgcttggtgagcttggtctaaacattcaagaagcacatgcattttcaacaaatgatggctactcacttgatgtcttcgttgttgtcggttggcatgatgaggaaacagaggatttagtagaagcagtgcagaaggaaattggcaggattgaagagacacaagcatggtcttcatctcattcatggtctactccagttgaaaaaatgcagattgctgagaattcagcagctgaccgtgttgagataccaacagatggtgctagtgaatgggaaattgatgtaaagcttctcaagtttgggaataaagtagcatcaggatcatatggtgacctttaccggggtacatattgcagtcaagatgttgctattaaagtgctgaaacctgagagaataaatgcagacatgcaacgagaatttgctcaggaagtatatattatgaggaaggtccgtcacaagaatgttgtgcaatttattggggcttgcactaaacccccaaacctatgtatagtcacagaatttatgtccggtggaagtgtgtatgattacctccataaacataaaggtgttttcaaacttcctgctttagttggagttgcaacggatgtgtcaaaaggcatgagctacttacaccagaataatattattcatcgtgatttgaaaactgcaaaccttctgatggatgaaaatgggactgttaaagttgctgattttggtgttgcacgtgttaaagctcaatctggagttatgactgcagaaactggtacttaccgttggatggccccagaggtcattgagcacaaaccctatgatcacaaggctgatgtttttagttttggaattttgatgtgggaactactcacagggaagattccttatgagtacctgactccactacaagccgctgttggtgtggtgcagaagggattacggcctacaattccaaagcatactcacgcaaagctttccgagcttcttcagaaatgctggcagcaggaccctacccaaagaccagacttctccgaaatattagaaactcttcagagaatagcagaggaggtcggagaggagcacgatgggaagcacaaggacagaacactgggtggtttcttttcggctttgagggggcggagccattgagacacagtcgaagacttttaataataaaaatgtacatggcctcggtccgtcctttgaaggacctgagctacaaccagtgcagtgcctgttcctcgcacgtcagcaccagtacacagaaatacagacctgctgtgcagctgcagttgactgaagcggcaatttttatttagctgcagccatcgctttccgcatatccgcttgttattcctgagttccattacgcaatgtataacataggtgaggaagcttgggaactgtatcatcagtctgatttccctgggagtgcaatcctgctgtagatgaaaaaaaaagccagattcaggccgtggcatgattcttttaagactcca

SEQ ID NO: 104675 - DNA, 1713 bp, Zea Mays
attaacactgaagtttcaaattattaggagatcatggttgctctgattcgttcgcatgctttatgtacatacacattgactgatcataacgatgttcatgttcgacgactccctcattaaccgctaatcctgtcaatcgaaacgccaccgctgaagacatccgtcagcgccgtcgacgactgcagcgacgccttgaggagcatcacggcctgtccatcgatcaaaagttagagaacttgtcagagcgcacgcatgcgactttgaccagcagcggtgctagctagtgcatgtgcatgagccagcgctcacctcttttgtgccgagctcaacggtcgtctcctccaacgcggagcagtccttgacgtcgaacttcttgagcagcatgatggcggagatggtggacatgggcgccacggtgaggtcgtccatcaccaggtacgtcaccacctccttcacgtacccgccggcgcccagccccgcggcctcctgcgcccgcgcaagcgccagctgcttgccgtgcgcgtccccgggcggcagccgcatctccatggtcatcggctgccggcacgccgggcacggcaggcccgccacgtccgtcacgttcgtcgggttcccgcggcacgggggcgcgtacgcgttgcaccggaagaaccgctgcggcgggggaggcgccggcgccggcgggaccgcgccctcgccgagcagcagcgggagcgcggcggagggcagcgtcgaggggctgagcagcgcgtcgcggttgggcgagctggagacgaagaaggcgtcgtctagggccagcgcgcccgcgtagagcgagcccagggagcccggcgcgggctcgccgcgcttggccagtgcgcgcgccgcgaggcccgcgggcacgcgcagcaggccgatcaggaagtccaccgcatccttgcgggcctccgcgtacagcacgcgccgcgaacgcctgtccaccagcagcttcagctgcgggccgccagcggccggcgccggcttcacgtctgtagctgccgtcatggacgtcattgctgcggctggtgctggcctggccgggtctgcttgatgttaagagctgcagagctttccttgtcttgtacgtgaccagggccaaattacttatactgtgcagtgtgtctgtccgtgtccggttgcgaaacttgccgtgggaagagaagaaatgctgctcggtatggaggtgatcggagacgaagggaggcggcttggtatatctgcagttgaagcttgctgctttcacccgagggtttggtaacgttgccgtaagaatctggaataagggcgtgttcggcaggctgcaagccgacactgttgcagctgtttggactgctgcagctgcaatccatagagagaaaaatactgtagaagccgcagccgcagccggattgcagccgcagcaagccgcagcgaacaagccgtaagtcctgacctcctcgtccatgcagaagctgaaaaattagattagttgtacgtaccgtccagttgcagcgcagagtaagagaacggagatctgacgatttatcaactggatttgattaattactcgcaaatagcgatgaataaatagtgtgccattttatcatttcacacatctagatctcaccttgatgctatcaaaagcggcggaaacaggcagcacgtgctacgtccgacagtactctcctattcagttcaaggctcgttttcggtaag

SEQ ID NO: 104676 - DNA, 450 bp, Zea Mays
gaagctaggaacaacagttcgctgggtatgatgcatggtttgcaccagtccagatccatagtggcaaggccttgccatggagctcaaaaacaaccttttgacctcttcagaggcatctcttgtaagcaaacacatcatgtactccatcaccaaagactcacatggcaaggtgatcctgccgtcatcaccagcgaagccgaactcctcctgcgacatgctcaggagctcaccgaagagagccgttccgaggaacaccaacgggacctcaaaccgccgaccatcagccgagtacatggcacagtggcctttgccagccaccgacgaagtgctgcatgacgacccgtcagtttctttcacaggtgtcgatgcgagcctcttcctcgcgagggccgccattcttcgccacctactacttgacatctgaacaagtctcttggcactcatcatggc

SEQ ID NO: 104677 - DNA, 945 bp, Zea Mays
gctaggccataaaagcagaacccaggatgattgcactatgtctcagcccaattcagcagctagtactgtagtacatatctcattgcccaaccactagtccactatctttgccttcaaagtggagtaagtgatggcccagcaaatcagatctgaatctcaagagctagcaaccaagacaccatcactacaatcacagccacaaactaaacatttccaagcactagcctgagaatcaagaagaaccaagcagcaaccatgatcaatcccaagaagctcgctcagttggcgaggaagtggcaaagggtaaaaatagccaccaaagacgacgacagatgctgcaccatttcaccaattgcaggcaggggccactgcaccgtgtacacagtggatgggagcaggttcgaggtcccattagcgtacctccgctcagtggtcttcagtgagcttttgaggatggctgcggaggagtttggtttcacaggtaatggcaggatcactctgccttgtgatgcagctgtggtggagtatatgatatgcttgctccagagaaatgcatcagaggaagttgagaaggcattcttgagctctgtagtgatgccttgtcagcaatcaagctatccaacgccaccggtggtgctgcatcagcaatttgcagtttgtagctcctaaagatatccaggaatttgcagcaattagtgtgtagtactctaatacaaatagaatgaaaattgtatttatttatcttagagaactagtggctgtcatttgttgatgccattttttaaaaaaatataacaggtgctctgtagtaatgccttggtcttatttttcattgccgttctttcttcaaaagttatattaaattagcagacaaatgatgagtaggtgtagatgcagaaatgtatgcttacaaaagtgttattgtaaaagtttcccaaaaataca

SEQ ID NO: 104678 - DNA, 78 bp, Zea Mays
ctgaacgtggatataaaccctctttgggaatttgcatgcggggcactcctgtacagaagatacaatttcaagtggagc

SEQ ID NO: 104679 - DNA, 678 bp, Zea Mays
ctatatattaatggtcaagtggcctccaaacaccatcacctgcaggctgcagctcctcaaacaaggaattccaaaccgaaaccacacagctccccagcttccagcaagacagagggagaaagaaaccattatgatcagcaccaagaggatctctcagatggtcaagaagtggcagagaatggcagtgttggggagaaagcggctctcctggagggtggaaagggaagtcgaggatcgatcctgcgcctctgtggcgagcaaggaccactgcatgatgtacagtttagacgggaggaggttcgaggtgccgctggcgtaccttggcacgctggtgtttgcggaactcctgtggatgtcctacgaggagtttggcttcgtgagccatgggcggatcacgctcccttgtgatgctgcagccgtagagtatgccatgtgtctcctcaggaaaggctcctcggcagatgtagagaaggcattcctgagcaccatggcagtctcatgccactatgcaagctgtattgctattgcaccatttgttggagttagccatcaagctgttatttgcagctcctggctgactgtaaagtagtttagtatatagtttgtaggaaaagaaaattctccatggagccttttgatgcttcaagcaatcaaggaaaatgcaaactagcatgttaa

SEQ ID NO: 104680 - DNA, 450 bp, Zea Mays
tacacagatggctggttggcgcccgagtcccatcggtggcaccgagccaccgacgctgtggtggcagggtctgaccatggagctcaagaacgccctcacaacctcttcggaggcgtctcgcctgagcaaacacatcgcgtactccatcaccgcggcatcgcagggcagcgtgatcctgccgccatcgtcgccggtaaatccgaactcctcccgcgacatgctcaggagctcgccgaacaccgccgtgccgaggtacgccagcgggacctcgaacctcgtcccgtcggaggagtacacgacgcagtggcccctgacggccaccggcatcgacgtgccgcacgaaccgtcggcctctttcgccagcgtcgccgtgagccgcctcctagccatggcagccgttgcctgccacttcttcgccatctgaacaagcctcttggaactgatcatggt

SEQ ID NO: 104681 - DNA, 898 bp, Zea Mays
cccaaccatttggctccaccagcagtcgagtgagctatatatactcacggtcaggcggcctctgaacatcatcgcttgcagttgcagcatcacaagcaaactgaagtcactcacagctctccagcttccatccagaaaggagaaggaaacaagctagtggacaaccaaccatgatcagcgccaagaagattgctcatctcgccaagaagtggcagaggatggctgcacaagggaggaagcgcctcgccttgggggcggcagcaaagcaagccgacgagtgctgcagctatgtggcgagcaagggccactgcgcggtgtacacggccgacggggcacggttcgaggtgccgctggcgtgccttagcaccccggtcttcgtggagctcctgcagatgtcacaggaggagttcggcttcacgggcggcgatggcactggcaggatcacgctgccctgcgacgcggcgatcatggagtacgccatgtgtttgctcaggaaaggagcctctgctgagctagagcaggcgttccttagcaccatggccatgtcatgccactgtgccagccacatggcgccgtatgttggacgagccagacagcagattgttgtttagtttctgttcagtgtagtgtagatagtggagcaaaggtattagctagataaatattattcgaaaccttctgatcgtgtgcaaggacgcgactaatcaagcaaggtcttaagaagttagagagacatgatttatgttctgtacttttcgaaaattgtgaggactactcacattacatagcaaaagactttcttgtgcacaactctgaattcaaatcagctgataggttgttccgttcaaaataaaaatctgagaggttgctagtgcacaacacaaaagaaaagaagaaa

SEQ ID NO: 104682 - DNA, 485 bp, Zea Mays
tacacagatggctggttggcgcccgagtcccatcggtggcaccgagccaccgacgctgtggtggcagggtctgaccatggagctcaagaacgccctcacaacctcttcggaggcgtctcgcctgagcaaacacatcgcgtactccatcaccgcggcatcgcagggcagcgtgatcctgccgccatcgtcgccggtaaatccgaactcctcccgcgacatgctcaggagctcgccgaacaccgctgtgccgaggtacgccagcgggacctcgaacctcgtcccgtcggaggagtacacgacgcagtggcccctgacggccaccggcatcgacgtgccgcacgaaccgtcggcctctttcgccagcgtcgccgtgagccgcctcctagccatggcagccgttgcctgccacttcttcgccatctgaacaagcctcttggaactgatcatggttcctccttcttcctgcctttttggctcaactgaat

SEQ ID NO: 104683 - DNA, 791 bp, Zea Mays
atcatcgcttgcagttgcagcatcacaagcaaactgaagtcactcacagctctccagcttccatccagaaaggagaaggaaacaagctagtggacaaccaaccatgatcagcgccaagaagattgctcatctcgccaagaagtggcagaggatggctgcacaagggaggaagcgcctcgccttgggggcggcagcaaagcaagccgacgagtgctgcagctatgtggcgagcaagggccactgcgcggtgtacacggccgacggggcacggttcgaggtgccgctggcgtgccttagcaccccggtcttcggggagctcctacaaatgtcacaggaggagttcggcttcacgggcggcgatggcaggatcacgctgccctgcgacgcggcgatcatggagtacgccatgtgtttgctcaggagaggagcctctgctgagctagagcaggcgttccttagcaccatggccatgtcatgccactgtgccagccacatggcgccgtatgttggacgagctcacgagccagacagcagattgttgtttagtttctgttcagtgtagtgtagatagtggagcaaaggtattagctagataaatattattccaagccttctgatcgtgtgcaaggatgcgactaatcaagcaaggtcttaagaagttagagagacatgatttatgttctgtacttttcgaaaattgtgaggactactcacattacatagcgaaagactttcttgtgcacaactctgaattcaaatcagctgataggttgttcgttcaaaataaaaaa

SEQ ID NO: 104684 - DNA, 691 bp, Zea Mays
tcgcttgcacttgcagcgtcacaagcaaaccgaagctagtcagtcacacacagctctccagcttccatccacaaagaagaaggaaacaagctaaccatgatgatgagcgccaagaagattgctcatctcgccaagaaatggcagaggatggccgcgcaagggaggaagcgcctcaccttgggggcggcggcggcaaaggaagtcgacgagtgctgcggctctgtggcgagcaagggccattgtgcggtgtacacggccgacggggcacggttcgaggtgccgctggcctgccttagcacccctgtcttcagggagctcctgcagatgtcacaggaggagttcggcttcgctggcggcgatggcactggcaggatcacgctggcctgcgacgcggcggtcatggagtacgccatgtgtttgctcaggagaggagcctctgccgagctagagcaggcgttccttagcaccatggccatgtcatgccactgtgccagctacatggcgccgtatgttggacgagccaggcagcatcagatcgttgtttagttagttgctgttccgtgtatgtagacgtgtagtgtagagcgatgattttaactaggtgggtgctattcaaagccttctgatccagcaaccgatcaagtgaggtgttgtaagtacaagagaataaagagacgtgattcttgctttg

SEQ ID NO: 104685 - DNA, 3558 bp, Zea Mays
atggggtgcggccagtccaagatggaggaagagtacgcggtgcgccactgccgggtgcgctccgagctcctcgcgctggccatccgccagcgctacacgctcgccgacgcgcaccacgcctacgccgagtcgctgcgcgccgtcggcgccctgctgcacgacttcctccgcggggtccagtcgctgccgccgccgccgcccgagcccgcgctccgcctcccgcagcagcggaagggcgacggcctccctgccgcgtcgccgccgcccgcgatggcgtcctcctccgccgccgccgccgcgccgcccgtcgccaagcaggtccgcatcgcccccgacgacgggcatatccagttctccgacggcgactccgattccgaggatgggcacatcaagttccactccgacgaagagcccgacccggctcgccgccgcccggaggtcgtccgctccaccggcgcgccgggtcctccgccaccgcagatgggacagccgtatgcctccggcggagggtatgctccgccgccgtatggtcctggatacggttacgggtacgccactgggcctggtccgggtcctggtcctgattatggcggtattggcatgaacggcggcggtggttatgaaccaggccatggtgtcatccagccacctccaccatctgtctcgcacgagcaacgcctggaggcgactaatgccagggtccactactattccggcaatggcgagcagcagccacccccgcgtggctatggtggtgggtactcctacccaccacagagttcaagatcatataatcagtatgcctatggtggttactatggaggtggttctgctcctgcaccaccagcagacatcccatcctcctccggtgagccagcagcagtgccaccgcctccatctccgcccagggtgtccacctgggagttcctggacccgtttggaacttatgagagctactacgagcaaccaactgctacagcagctccatactctcctggcaggagtttgaaggatgtgcgcgaggaggaggggattccagacttggaggacgaagacatggaggtagtcaaggaagcttatggtgatgagaagcaccctgtgaagggttacatggggaacgggaaggccgcaaagggagagggtaggagcagcacgggggatgaattgccccgcaagtccaagtcatctgaggccagtggtagtggtagcagcttggagcatgacgttcatgtagtggaaaaaagtgttgtcggagaacaagttcgacactcggagccacggcagcatgttgccggtctaccacccacaggatcggaaaagctatacattgatgacactgaggtggtggtggagatcaggactcaattcgagcgtgcctcacaatcagctggtgaggtatcaaagatgcttgaggtcggaaagatgccttactaccagaagggttcaggtttcaaagtctccgcaatgattgtttgtggtataccgacaatggaggaggagtttctgcgttttgaagaggacaaggcgatgggctctggcaacctctcctctacactacagaaattgtacatgtgggagaagaagcttcttgaggaagttaagacagaggagacaatgcgggtactgtatgacagaaaacgtgaggagctgaaaatgttagatgagaaaggtgccgaagctcataagcttgaggccactgaagtttacatcaggaagctatcaactaagattagcatagctatccaggttgtaaacactatttcagaaaagattagtaagttgagggatgaagagttgtggcctcaaacatgtgagctcattcaagggttgatgaggatgtggagcgttatgctagaatgccatcagatacaactgcatgccatatcccaagctaaaaacatagactccatgatagacactgcaaagttcggtgacgctcatatggacttgatcaagcggttagagcttcagctattggattggattgcttgttttgttgcatgggttagcgctcaaaagaattatgttaaaaccttaaaccggtggctgacaaatggtgttatctatgttcccgaggaaaccgaggacggggcgcctccattttctcctggaagattaggagggccaccgatcttcgtcatatgtaataactgggctgccagtgtggacaggatatctgagaaagaagtagttgaggcgatgcaggcctttgcatccaacgttctgaacctctgggagaggcacaggtcagagcaaagacagggtctgatggcgaacaaaggcatggacagggatcttagggtgatggaaagagatgagcagtcgatgcgcaaggccctggaagcgcagaacaagaagctcgtgctcgtttcgagtcagggcagcgtgtccttgtccgcgcaagcgttacatgagcagcgaggccctggcgctgaggttggcagtttgcaatcaggcctgagaaatatcttcgaagcgatggagaacttcacttctgcatccgcgaatacatacagggagctccatcttcgcgccgaagaagagaaagcccgagttgcgcaggagagcggcggcagtgttccctaactcctttcaacgcttaggttttacacgaggacatgagcgtctgtcaatgcaaagggaccgccaccagtgacccccctgcggcacagtgacactacaacccttgtggcagctgatgcaccttgctcgccaggtgccccaagtttcgggtttcgggtttcaggctctggtgtggagttaacaggttgcaacacgggttttgttttactaatctgtacatgagttgggctacgtgatgcattctttgatctggatggccagcagttctcctcaaaccggaactgtgaagcacggttatggaaataggtatatcaccaggcatgttctggtagttgtgagacccctggagcgactgagtgaagaagaggcaggcccttgtgcatctgggaagctgaattatgacctctagttggctgtgcaaccccagaagataattggaaggaagatgtaagccgcacgatcttggttcagatcaaagggtggggcatataagatcctgttgtcatgaaatccaagatccatggaacgctgctctccaccccatgtcactatgccagcgctcaaccgtacatacaagaggccaggctatcagaaggtgttccgtaatcgcagcactttggcatgtcattgtacatttgtacagagaggtgatgcgggatgaatcgagctggagcctcttgtccgctgccgagcgcccgagacatatgtttgcttagagtttcctctgctgcgtctggactctacttcgccgtgcaaccgagctggaagtactcttacagggtagacgacgccctgacccgttctgcagatcagctaaccgctccggccctcaacctttttttttgtttattatatatacatattattaattcatttgtagcaccccgtgtacagctgccggcgaacttaaacctgctgcgccatattttattcatttttttcaccacgggtttgccgtgcttgtgaattgctgaa

SEQ ID NO: 104686 - DNA, 2982 bp, Zea Mays
gaccaaagctatgctggcataggcggatatggccagagcttctttaacatcagctacgctcgcagccagccacctccaccatctgtctcgcacgagcaacgcctggaggcgactaatgccagggtccactactattccggcaatggcgagcagcagccacccccgcgtggctatggtggtgggtactcctacccaccacagagttcaagatcatataatcagtatgcctatggtggttactatggaggtggttctgctcctgcaccaccagcagacatcccatcctcctccggtgagccagcagcagtgccaccgcctccatctccgcccagggtgtccacctgggagttcctggacccgtttggaacttatgagagctactacgagcaaccaactgctacagcagctccatactctcctggcaggagtttgaaggatgtgcgcgaggaggaggggattccagacttggaggacgaagacatggaggtagtcaaggaagcttatggtgatgagaagcaccctgtgaagggttacatggggaacgggaaggccgcaaagggagagggtaggagcagcacgggggatgaattgccccgcaagtccaagtcatctgaggccagtggtagtggtagcagcttggagcatgacgttcatgtagtggaaaaaagtgttgtcggagaacaagttcgacactcggagccacggcagcatgttgccggtctaccacccacaggatcggaaaagctatacattgatgacactgaggtggtggtggagatcaggactcaattcgagcgtgcctcacaatcagctggtgaggtatcaaagatgcttgaggtcggaaagatgccttactaccagaagggttcaggtttcaaagtctccgcaatgattgtttgtggtataccgacaatggaggaggagtttctgcgttttgaagaggacaaggcgatgggctctggcaacctctcctctacactacagaaattgtacatgtgggagaagaagcttcttgaggaagttaagacagaggagacaatgcgggtactgtatgacagaaaacgtgaggagctgaaaatgttagatgagaaaggtgccgaagctcataagcttgaggccactgaagtttacatcaggaagctatcaactaagattagcatagctatccaggttgtaaacactatttcagaaaagattagtaagttgagggatgaagagttgtggcctcaaacatgtgagctcattcaagggttgatgaggatgtggagcgttatgctagaatgccatcagatacaactgcatgccatatcccaagctaaaaacatagactccatgatagacactgcaaagttcggtgacgctcatatggacttgatcaagcggttagagcttcagctattggattggattgcttgttttgttgcatgggttagcgctcaaaagaattatgttaaaaccttaaaccggtggctgacaaatggtgttatctatgttcccgaggaaaccgaggacggggcgcctccattttctcctggaagattaggagggccaccgatcttcgtcatatgtaataactgggctgccagtgtggacaggatatctgagaaagaagtagttgaggcgatgcaggcctttgcatccaacgttctgaacctctgggagaggcacaggtcagagcaaagacagggtctgatggcgaacaaaggcatggacagggatcttagggtgatggaaagagatgagcagtcgatgcgcaaggccctggaagcgcagaacaagaagctcgtgctcgtttcgagtcagggcagcgtgtccttgtccgcgcaagcgttacatgagcagcgaggccctggcgctgaggttggcagtttgcaatcaggcctgagaaatatcttcgaagcgatggagaacttcacttctgcatccgcgaatacatacagggagctccatcttcgcgccgaagaagagaaagcccgagttgcgcaggagagcggcggcagtgttccctaactcctttcaacgcttaggttttacacgaggacatgagcgtctgtcaatgcaaagggaccgccaccagtgacccccctgcggcacagtgacactacaacccttgtggcagctgatgcaccttgctcgccaggtgccccaagtttcgggtttcgggtttcaggctctggtgtggagttaacaggttgcaacacgggttttgttttactaatctgtacatgagttgggctacgtgatgcattctttgatctggatggccagcagttctcctcaaaccggaactgtgaagcacggttatggaaataggtatatcaccaggcatgttctggtagttgtgagacccctggagcgactgagtgaagaagaggcaggcccttgtgcatctgggaagctgaattatgacctctagttggctgtgcaaccccagaagataattggaaggaagatgtaagccgcacgatcttggttcagatcaaagggtggggcatataagatcctgttgtcatgaaatccaagatccatggaacgctgctctccaccccatgtcactatgccagcgctcaaccgtacatacaagaggccaggctatcagaaggtgttccgtaatcgcagcactttggcatgtcattgtacatttgtacagagaggtgatgcgggatgaatcgagctggagcctcttgtccgctgccgagcgcccgagacatatgtttgcttagagtttcctctgctgcgtctggactctacttcgccgtgcaaccgagctggaagtactcttacagggtagacgacgccctgacccgttctgcagatcagctaaccgctccggccctcaacctttttttttgtttattatatatacatattattaattcatttgtagcaccccgtgtacagctgccggcgaacttaaacctgctgcgccatattttattcatttttttcaccacgggtttgccgtgcttgtgaattgctgaa

SEQ ID NO: 104687 - DNA, 728 bp, Zea Mays
agtttctggtttatcttccaccgcgcttcgcccactcgctccagccgcttcaccgcgccgccaccgccaccgcgaggatgccgttcaagaggttcgtggagatcgggcgcgtggccctggtgaactacggggaggactatggccgtctcgttgtcatcgtcgatgtggtcgaccagaacagggcacttgtggatgcccctgatatggtcaggtgccaggtgaacttcaagcggctctcacttactgacatcaagattgacatcaaacgtgtccccaagaagacagccctgatcaaggcgatggaggaagctgatgtgaagaccaagtgggagaacagctcatggggcaagaagctgattgtccagaagaggagagcatcgctcaatgactttgataggttcaaagtcatgctggcgaagattaagaggggcggtgctatcaggcaagagctcgccaagctgaagaaggcgtccacggcttaaggagtctctttccgtgaatgtcatgttagagtttttggttatgagttggatcagcaattcgattgagcgttgtcaaagccagaattaccaatatgttccctgtaaacccatttcaaactttatcaagcacgggcgtgctcaggatacttttgccatgaatgatatggaatatctatggtagcttgtggcaaatgtgtaacgaggccgcaaatctcgtgactatcaactcaaagtttcttcctcaca

SEQ ID NO: 104688 - DNA, 202 bp, Zea Mays
atcttacaagctctttttgttaaggaacacaatgcagtgtgtgatgcaataaaggaagaacacccaacctatcacacgaagaattatatcggtatgccagattggtcacttctgctgtcattgcaaaggttcacactattgattggactatcgagtttctcaagactaagaccatgagagctggaatgcgcacaaaattggt

SEQ ID NO: 104689 - DNA, 828 bp, Zea Mays
atggcgaggctattgaagcaggagggcggcttgcggcgtgcaggcaatggtggtgccctggatccgtatgtttatatggtcgcagacagatcagatgaagttaacgaagctttgtttatagaaatagcgatggagatgtttattagtttgcggggtacaaatcttggtgctggtgtgattgatcctacaaaagtacactcagataatcttttgcacgtctggtctatgcccagcacagtaaatgttagccagcaagaagcgcctcggcctctagagaaagtcaaccttttggtagcaagaaatgaaagggaaagttttcaaattgctttacgcccaacggtttcatgggcaacttcaggtattgcagggtctgtgcagatacaatgcatcgatctctgctcctcctcaggagacaggtctttcaaagtgctgcattttttttattctctcacagttcgtgaaaatgttggattccttttatatgtaaattcaagcttacccgaggaccgcattggtgatttggtgaaagaaactttggctgcagtaggactaaaggttgttccgactgagtacaaatatctgtcaaagaaaatattgccaacaaatcagtattctgtcatggagtattttcttcccattcgcccaactgagagggcctggccagcggtgtacttcctgtatgatctctcaccaattacagtcaccatcaaagaggaaagaaggaacttccttcattttataactcgtctttgtgcagttcttggtggcacatttgccatgacagattcactggtagcatcagttgcaatgcatgcaacgtggtactga

SEQ ID NO: 104690 - DNA, 1463 bp, Zea Mays
tccatactcccattcactctcttcagtaagcccggggcttcttcgtggagggcgccgatcttcttcgttgggggttttccgccggggaggcatccaccttgttacttcgtggcagaggcaccatgcctcgtggtgacaacccgcactcagtttcagagaatacggcagcactgagggaatcaccaaaacagcccaagaatgttgttaatgagcaacccacaacttctccttttcctgaaaacaaagttgctgctacagttggcataaagcgaccacagccttatggccccttgagtccgaccaatcatcacacgctgggcaatccaggggcaaatggccatcttgtgtatgtgcgaaggaggcttgaaactgatcagagcaaaggggttactgctacccacggagaaagtgccagttctacaagcttgaagaaagcttgtgcaggcagcttgcagtcacagggacgaattctgaagcatcaaaacaatgcaactcacacccagtgtgctccccgatttgcatctccagctgctgctacatcctcccctgctttgcaacctgcagttttgtctcctcactgttcttttgggaagcaatctccaggaaaggttgctgcccagccagctaatgatgtgactactagtctgccacatgctagcaatgtggtctcctctgcttcagtgcttcaaagctctgtatctgctaacttagcaccaagcagtgtttcggctgctaacacagcatctcgcgctgctatatctgctactaatttagcatcttgcagtgctctgggtaccaatgcatcatctaatgatgctactactactttagcatctaatcaagctcatgagccaagatcgagcaatcaggatcggagtgaaagattccttcgtctgcaggaattcttgagacataatgagcaatctgaccaggaagaatatgtacataagctccggtcattgtcacccgttggacgtagtaagcatgcctttgagttggagaaacgggcagccaatctattgatcgaggaagggaaggaattgcagaagatgaaatttctgaatgtgctgggcaaacttgtcccccccatcacttccgaatcagcccccttctgtcatgcatcagccgtcgttcactgcccatcgatgagaagagtttaagattgagttacgatgctccatgacaggcgttcagtgttgcgttatctgtgagaactgagaacatgcctgtatgcccacccggatgagtgagagtagagttggctgacatgatatcatgttgtaagcattgttatggttcatatttccgcctattcgcagtgccggaaacctgatgcagcactgaactgtaaggtttgtgcagctccttctcaggtcatcatgctacgtgtgcggcagtgaacccaccaaagtctaactaaccatggcaggctcagaagtcagaagggtgtggcccaaaacagt

SEQ ID NO: 104691 - DNA, 258 bp, Zea Mays
atgatgctcgccggggctgctgccgcttcgcaggccaccatgccaccgtccgagaaggactactggtctctgctcgccctgcactaccagcagcagcaggagcagcagttccctgcttctgcttacgaggcttacggctccggcggcgtgaacgtggacttcacgatgggcaccagcaacggcagctatctgaaatcaggtggtaggtctaggaagaagctatctcttcgggatggagtaggtgcgctgacaagctag

SEQ ID NO: 104692 - DNA, 3550 bp, Zea Mays
atcaatctctttcgctgcttgctttccattgaaaatgatgtgttctcccacaccctgcaacctgaaggcaacatgcctagcacaaaattctcccaaggattcccatggtttcctagcccaagatgtgcatggagccttgcttcttgatctccagcagaacagaagtgaagcactgtggccttgcatgcccaagttttgttgttagcgttaccaagatcatagctaccactgatgcagtgcgttcgcgatgaactgtgtagagcaggttctgaagagagtgttacctgcatctgcatggaagagggaggagacccgcagcttccgagcatctccgtggcacgcaccacgtccgaaggcgcgggggccgtcgacttggatctccttgagcagctactgtccggcgacaacggttggctcgaggtggtctcgcgctcgcccaactcggtagcgtttcctccaccctcggccttcttctcggctgacgcgacggccaccacagtgacgacgacggcggcgccggccgcgaacgccagctggttgattcagacgggcggcgcgagcaccccctccgtgcgggagcggttcagccaggccctgtcctacatccgtgatacgcagagcgacggcgacgtcctcgtgcagctctgggtgccggtcaaccgcgatgacgggaagctggtgctgaccaccagcggtcagccgttcacgctcgaccaccgctccgacagcctcatccggttcagggaggtgtccaccaagtaccagttcccagccgacgttaggtcaggggagtcaccagggttgccagggagggtcttcatcggcaggctccctgagtggtcgccggacatcaggtgcttcaccagctacgagtacgccagggtgacagatgcaaagtacctcgatgtccacggcaccatggggctgccagtgttcgagaaaagaagttacagttgcctgggcgttatcgagctgatcatgacaaagcagaagctcaacttcacctctgagctcaacaccatctgcagtgctctacaggcagttaatctcagaagtacagaagtttcgagcattccacgcaaaaagtttagcactgcttcctacaaagatgctttaccagagatactggaggtcctgagggcagcctgcttgacccacaagctgccattagctcagacatgggtcacatgtactcaacaagggaaacgaggcagccgacattctgacgagaactacaggtactgcatttccaccatcgacgaagcatgctttgtgaatgaagccgagatgcggggcttccatgaggcctgctccgaacaccatctgctgcgtggcgagggggtggcagggaaggccctcacgacaaaccagccatgcttcctgccggacattggatcctcaactaaattggaataccccttgtctcaccatgctaagatcttcaggttaaaaggtgcagtggcgatccgactgcggtgcacacgcactgggatagcagacttcgtgctggaattctttcttccaacagattgtgaagcactggaggagcagaagacagtgctggactccttgtcaggcaccatgcgaagtgtttgccagaccctacgtgtggtcacagatagagagatggaaggcgaagcggcgctggaaatgaacgagctgaactcttttactcctcctgagaaggacaaagatgagttgtcctttggaggcaattcagcagatcgtagaggggcctcttggacaagtctggcaggaacttcacagcaagaacccgagttagctgcattgcggatgcatggaacgttctcacctgtggggcagggtccatctctatctggtgttcaggcaactgctgaaggcagtaagacaaaaaggcgcacaaaggccgagaagaccgttagtttgcaggttcttcggcagtacttcgctggtagcctcaaagatgcagcgagaagccttggagtgtgtcccacgaccctcaaaagaatatgcaggcaacatggtataacccgctggccatcacgaaagatcaagaaggtagaccactctctaagaaagctccaacagatcattgattcggttcatggtgcagagacagctttccagctaaacaccctgtacaaggatctcacagacacctcaatatcatctgacaacaatttgtcaggaagtgtcacggttcctccaactaaccagagcaatctcaccgacttcaacaagcaccaaccccacaagtcaagtagcaatatgccatcaacttcacactcacactcctcatgcagccacggttctcagtcaagcccctcgtgtagcgttggtgcaacagaacatgcacaacagggtataattgatctgatgaagtcagaaaatcctgtgaaagacagctctattcagactatgcaaacagaaaacacttcattatatgagcatttctcagttcatgaggctccaattgatcttctacaggatgttactgaaaaggctaatggtgcacatcattcttctcgaagcctgtcatcccccaaccccaagcagaacacagatgcaaatatgagagtaaaggcaacatttggctcagaaaaggtgagattccgactaaacccagagtgcaattttcaaggactgaagcatgagctagcgaaacgtttgagtatagtagacacaaaccccttggttttaaagtacttggatgatgattcagaatgggtcttgatgacatgtgatgcagatctgcaggagtgccttcatgtatacaaactagcagatatccaaacaatcaaaatttcagttcatttagctgttagtccagctacaagggtcacagctggtcacactggtttgtcatgacaacagtatgagcctcaccactttgtgaggtttaatcaaattcaaccaggatcacatggttttgtgcaggggaaaccaaagattccaggagtccagggttggtagctgtgcaatactgcaatgtactatgtaccaccacgtcccagttctactgttagatcaattagtcttgtttctgatgctcaggttaggaactaatgatcaaacaagaatacttgacaatgagagagtcaagaaatcaggataaacagaagtaagcatgcattgcttgtaaatacttattgatgaacctgaatctctgaatgacaatgcaattgattgaattaatagggtgacgtatctacaaatcagatttgctccaactccaagtatgttttgtttctttgagtgctgatgtgcaacaatcattgatggcttctttctgataattgatcagctacaattgtcccttaagatcacagcattccttcatcgcctgagcgatcagcatgctctgttcaatgcacatgaaattctgcttctgaaattgtaattttctgcagcaaggattagatctagaataggatgataggatacttagtttgttcaatatgtttgtccattgcaaaaaaaaataaaaaatgaatggtacactgaattatgggcctctttgaaagaacgtctgctgctgtagacattatagattgttttcctttaagaa

SEQ ID NO: 104693 - DNA, 3838 bp, Zea Mays
ccctaccctcccgagtcccgaccccgtcctgctcgctccgccgtcctccgcccgccacccgccggactgccaaagcccggaggcctgaggcccgagttacgcgaggagcagcagaaccagcggcccggcgcctcatccctcagcggccacgcgagtgcgcggtcggcgcggagtgagcaggagcaacccgtggctggcggtcagtcgctggctagctggagcctggagttgcgacttgcgagcggcgttagaactcgccctacctataatttttgtctgcctccgtcactgattccacccgttctgttgccggcgacagaggcacagagaagcgccaatccgccggcttgatctgaagcatggacaagcaatctgatgggcagggggtggagagggttgctgaggagaagcaacttgatgagaaagagttagaaaggaagctgaaaaaagatcaaaaggcaaaagagaaagaagagaagaaacttaaggcaaaacaaaaggaggcggctaggctccaggcacaagcaacatcagatggaacaaagaagactgagaagaaactaaggaagaaagctgtggaggacgaaaatccagaggatttcatagacccagacactcctaatggacagaaaaaattgctcgcacctcagatggccaagcaatacagtccaagtgcagttgagagatcatggtatgcctggtgggaatcttcaggatattttggggcagattcggcaagcacaaaaccaccatttgttatagttctgccacctccaaatgtgactggagctcttcacatcggtcatgcacttacagtggctatagaggatgctatgatacgatggcgtcggatgtcaggctacaatgctctgtgggtccctggagtggaccatgctggcattgctacacaggttgttgtagagaagaagcttatgcgtgaaaggaagttgacaaggcatgacatagggcgtgaaaaatttgtttctgaagtactcaaatggaaagatcaatatggtggtaccatattgaatcaattgcgccggcttggggcttcacttgattggtcccgtgaggcttttacaatggatgagcaaagatcaaaagccgtaactgaagcttttgtcaggttacataaggaaggcctgatatatcgagattatcgccttgtgaattgggattgcacgcttcgaactgcaatttctgacattgaggttgatcatattgatcttaaagaagaaacaatgttaaaggtccctggttatgccaatcctgtacagtttggtgtattgatatcttttgcctatccgctcgaggaaggacttggtgagattgttgtagcaaccaccagaatagaaacaatgctgggtgatacagcaatagccgttcaccctgaggatgaaaggtataaacatctgcatggaagatacgcagtccaccccttcaatggccgaagactcaaaataatctgtgatgctgagttagttgatcccacttttggtactggggctgtcaagattacccctgcccatgatccaaatgactttgaagttggaaagcggcataaccttgaattcatcaatatcttcacagacgatggaaaaataaatagcaatggaggtgcaaaatttgatggaatgccaaggttcaccgctcgagttgctgttattgaggcgctgaaggaaaaggggttgtataaggacacaaagaagaatgaaatgagcttgggtgtttgttcaagaactaatgatgtagtggaacctatgataaaaccacagtggtttgttaattgcaaccacatggccaaggcgggccttgacgctgtaaggtcgaaaaagattgaaattattccccagcagtatgagcaagactggtacagatggcttgaaaatatacgtgattggtgtgtctcaaggcaactttggtggggacatcgtgtacctgcatggtatgtgacactagaggatgacctggataaaaaccttggttctgcaaatgatcgctggatagtcgcaagaaacgaaagcgatgcaaaccttgaagcgcagaaaaagtatgcaggaaagaaattacgtctagatcaagaccctgatgtgctggatacttggttttcatctggtcttttccccttaacagtacttggttggccatctgataccgctgacctccgtgctttctaccctacatcggtactagaaactggacttgatattctcttcttttgggtagcaaggatggtgatgatgggaatgcaacttggtggtgatgtgccatttcagaaggtttatttacatcctatgattcgggatgcacatggccgaaagatgtcaaaatcacttggtaacgttgttgatcctcttgaggtgataaatggcatgtcgctggatggtcttctgaaacgtttggaagaaggcaatctggatccaaatgaattaaacattgcaagagatgggaagaagaaggattttcctgatggcatagcagaatgtggtaccgatgctctacgctttgcactgatatcgtacacttcccagtctgacaggataaatcttgatattaagagggtggttggatacagacagtggtgcaacaaattatggaatgccatccgttttgcgatgggcaaactgggtgaccattacattccgccggcaactgttgatgtgtctcttatgccaccaatctgcaagtggatactctcggtgcttagcaaggccgttgggaaaaccgtttcctctttagaagcatataagttgtctgacgcaacatctgctatatactcatggtggcagtatcagctatgtgatgtatttatagaagctatcaaaccttacttcttcaacgattctcaagagcttgaatcagcaagagctgcctccagagataccctgtggatttgcctggatactgggctgcgcttgctccacccattcatgccctttgtaacagaagagctctggcagcgtcttccacagcccaaagattcttgtaggaaaggttcgattatgatttcacagtatccatctcttgttgaggaatggagtaatggcagacttgaaaatgaaatggacatcgtcttggatgctgtgaacaaaataaggtctctgaagccaccaacagattcaaatgaaagacgtcctgcttttgcactttgccgaggccaagagatcgctgccacaatccagtgctatcaatctctaatcgtgtatctttcttccatatcacatctcaagatcctgacagagaatgatgaaactccagccgattgtgcaactgctgttgtcaacaaagacttgtctgtgtaccttcagctccaaggagctttaaatgcagacgctgaacgtgaaaagctaaagaagaaaaaagatgagattcaaaagctacagaatgcactggcgcagaaaatggacgcctctggctatcgcgagaaggctccacagagcgtacaggaggaggacatgaggaagctcaccgctttgttggagcaactagaggtcatcagtgaagctgagaagaaattagacgcgaactgagtttgacctctgtttcgaagaggccttgcttgtaccgaagctgaccccatatttttcttgtttgcaaaaaagctcagttatgtgcctgtacgctcgggctcaggtttacagttgatggttcaaatggaagccacatttttgcagcttgtcaagggtgcactggctaatacagaagcatatttattttgtcaagtgaggaacttttgatgatgaatgatgatgcatatggaatctgtcagaaaatgcagtagcggtgctattaaggtttcaggtttgcaagccttacgcatatgcgccagcgtgtcact

SEQ ID NO: 104694 - DNA, 827 bp, Zea Mays
cccactttccgtccttttcctctccactcgcacgttaacgctacacactcccgtttacgtgcacacctccaaaccctcatcacgatccggctccaaggtctcgagatgaagtcgagggcgaggtccggcggtggcgactccaggctctcggtgaggaagaccaaggttgagaaggacccaaacaagcccaagaggcctccgaccgcgttcttcgtcttcatggaggagttcaggaaggactacaaggagaagcaccccaatgtgaaacaagtctcagtgattggcaaggctggtggtgacatgtggaagtccttgtctgatgccgagaaggctccctacgtatctaaggccgagaagctgaaggttgagtacacaaagaagatggacgcctataacaacaagcagtctggaggaggacccacattgtctggtgattctgacaagtccaagtccgaggtcaacgacggggacgaggagggtgatgagtgatggatgacgggtgaaactctgggctgcccaagtgcttgcagtcagcagggaaatctcatcgtcgttgggcctaaccgggctttgctgctccgtagcgtctggaagctgtctgtcttttgagatgctgtagactagtagtgcctgctctgagttagtaattgaaagtgttgtccctgaagtgatgctgtttagttggtagtgtgttcgcttcttcggcacttatacttacccccaagcatcaacgctgcctgttttaaatctcaataggtgctgttttaaatctcagatctcaatatatgactactgatcgctgaatagatttcatgctctcttgattg

SEQ ID NO: 104695 - DNA, 825 bp, Zea Mays
cccactttccgtccttttcctctccactcgcacgttaacgctacacactcccgtttacgtgcacacctccaaaccctcatcacgatccggctccaaggtctcgagatgaagtcgagggcgaggtccggcggtggcgactccaggctctcggtgaggaagaccaaggttgagaaggacccaaacaagcccaagaggcctccgaccgcgttcttcgtcttcatggaggagttcaggaaggactacaaggagaagcaccccaatgtgaaacaagtctcagtgattggcaaggctggtggtgacatgtggaagtccttgtctgatgccgagaaggctccctacgtatctaaggccgagaagctgaaggttgagtacacaaagaagatggacgcctataacaacaagcagtctggaggaggacccacattgtctggtgattctgacaagtccaagtccgagggtgatgagtgatggatgacgggtgaaactctgggctgcccaagtgcttgcagtcagcagggaaatctcatcgtcgttgggcctaaccgggctttgctgctccgtagcgtctggaagctgtctgtcttttgagatgctgtagactagtagtgcctgctctgagttagtaattgaaagtgttgtccctgaagtgatgctgtttagttggtagtgtgttcgcttcttcggcacttatacttacccccaagcatcaacgctgcctgttttaaatctcaataggtgctgttttaaatctcagatctcaatatatgactactgatcgctgaatagatttcatgctctcttgattgactgcatctctcccaagtt

SEQ ID NO: 104696 - DNA, 778 bp, Zea Mays
aaatccctgtgaattcgatgctgttggtgtgggttgttgctgatggttttattggatttggttcggtaggtctcgagatgaagtcgagggcgaggtccggcggtggcgactccaggctctcggtgaggaagaccaaggttgagaaggacccaaacaagcccaagaggcctccgaccgcgttcttcgtcttcatggaggagttcaggaaggactacaaggagaagcaccccaatgtgaaacaagtctcagtgattggcaaggctggtggtgacatgtggaagtccttgtctgatgccgagaaggctccctacgtatctaaggccgagaagctgaaggttgagtacacaaagaagatggacgcctataacaacaagcagtctggaggaggacccacattgtctggtgattctgacaagtccaagtccgagggtgatgagtgatggatgacgggtgaaactctgggctgcccaagtgcttgcagtcagcagggaaatctcatcgtcgttgggcctaaccgggctttgctgctccgtagcgtctggaagctgtctgtcttttgagatgctgtagactagtagtgcctgctctgagttagtaattgaaagtgttgtccctgaagtgatgctgtttagttggtagtgtgttcgcttcttcggcacttatacttacccccaagcatcaacgctgcctgttttaaatctcaataggtgctgttttaaatctcagatctcaatatatgactactgatcgctgaatagatttcatgctctcttgattg

SEQ ID NO: 104697 - DNA, 999 bp, Zea Mays
agccagtatcctcgcattgttaccgaggacttcttgccacttccaagcaaagggaaatctgggaaggatggctggtatcctccaggccatggtgatgtgttcccctctttgaataacagtggaaaactcgacatcttattggctcagggcaaggacacagagatcctgaaccatctgatcaataaccagaatgaatactgcatggaggttactccaaaaacattggctgatgttaaaggcggtactctcatctcttacgaaggaagagttcagcttttggagattgcccaagtacctgatgagcatttcttgcccaacaggtgggtgaaccttaaagctgtcaagagactagtagaggctgaggcacttaagatggaaattattccaaaccccaaggaagttgatggtgtgaaagtccttcaacttgaaactgcagctggtgcagctattcgtttctttgacaaagcgattggaattaatgttccccgctcaagatttctcccggtgaaggctacatctgatttattgcttgtgcagtctgatctttacaccttggttgatggctttgtcatccgcaatccatccagagcgaatccagctaacccttcgattgagcttggacctgagttcaagaaggttgccaatttccttgctcggttcaagtccatccccagcatcgtcgagcttgacagcttgaaggtttctggtgatgtctggtttggttctggaattacgctcaagggcaaggtgacaatcaccgccaagtctggagtgaagttggaggttccagatggagctgtatttgaaaacaagggacgagagaggacaccatgggacatttctgtcctaactgtcccgcaactaaacgcacccgcaactaaacgcactatctcaccgggtggtatgctatatgataagggggatctctccacccaggttgccacatccacatgcctggtgctcgagaatattgttgtggaaggccatattccaaggtga

SEQ ID NO: 104698 - DNA, 1812 bp, Zea Mays
caccatcacccaccatcagccgccaaagatcacgaaagcgacgcgcacaccccaagaaagggcggctccccactccgcctcgccgcacccctttcggcctttcttcctcccccacctcttgctcgcgtcccagctcccaacaccagtacaccacgcgccggctgcgagcgatgcccgcgatcccaacggcccccgccccctgccccgtgcgcttcctcctcgcccgccgccacagcctccacatctcctacccgtcgccttgctctaaccaccagcggctcccgccccgcctcctgcgcctgcccgctcgcccccgggccgctcccatgtcggccgaggcgcgggcacccgcgtctccggtggcgccgccggcgcaccccacttacgacctcagggccgtcatcgcgctcgccctcgcagaggacgccggcgaccgaggggatgtatcctgtttagccaccataccttctgatgtcgaagccgaagccacatttattgctaaagcagatggtgtcattgctggaataagcctagcagatatgatatttaaccaggttgatccatctttgaaggtcgaatggtttgaaagtgatggcaattttgtccacaaaggactgcagtttggaagagtatatgggtgtgcccgcagcatcatcgttgctgaaagggttgtgctaaatttcatgcagcggatgagtggcattgcgaccctaacaaaggctatgtctgatgctgcccgtccagcatgcatattggaaacaaggaaaactgctccaggtttacgtctgattgacaagtgggcagtactgattggtggcggaaagaaccacaggcttggtttatttgatatggttatgataaaagataatcatatttctgttgccggtgggattgcaaatgcaatgagatctgttgatcaattcctgcagaaggaaaaactcacaattcctgtcgaggtcgagacaaggacaatcgaagaagtgaaagatttgttgaagtacgctgctgagaacaaaacttcattgacccgtataatgttggacaatatggttgttcctcttggaaatggagatttagacgtttcaatgcttaaagatgcagttcggttgataaacggtagatttgagactgaggcgtctggaaatgtgacagttgatacagtgaagaaaatcggagaaacgggagtcacctatatttcaagtggagcattaacgcactctgtgacggcgcttgacatctctctcaagatagacaccgagctggctcttcaggttggaagacgcacaaatcgtgcttgactcccacagcattacgttgtggacgcaacgcacgcaagtaaggcaggatgacagagggaccagcgtggcaaaccagcttaaatagcttaataataacttggcgctgaggcctctgactgcaactacgtgggattcattcttcagtttcatgcacaaacgaccgcaatattgatcggatcagaataattggcaggacatacaggttttgttctagcaccaagtttgggagcttgcgttctgcggcagataggcaggccaggtaggtgtacctcctcctgggcccagccacagctcgacagcaggtaccaggtaggtctactgtaaacgggggatgtcgcactgaactcgcaataccaaagacaaaataacaaaaggtggagataagatgcttatcttactgccattggtgataaaagcaacgtcaactcacatctattatttattgtatcgttccatcatcacttccagaatccatttgtatacagtgtatacgaccggtttgctcgctctttgg

SEQ ID NO: 104699 - DNA, 1808 bp, Zea Mays
caccatcacccaccatcagccgccaaagatcacgaaagcgacgcgcacaccccaagaaagggcggctccccactccgcctcgccgcacccctttcggcctttcttcctcccccacctcttgctcgcgtcccagctcccaacaccagtacaccacgcgccggctgcgagcgatgcccgcgatcccaacggcccccgccccctgccccgtgcgcttcctcctcgcccgccgccacagcctccacatctcctacccgtcgccttgctctaaccaccagcggctcccgccccgcctcctgcgcctgcccgctcgcccccgggccgctcccatgtcggccgaggcgcgggcacccgcgtctccggtggcgccgccggcgcaccccacttacgacctcagggccgtcatcgcgctcgccctcgcagaggacgccggcgaccgaggggatgtatcctgtttagccaccataccttctgatgtcgaagccgaagccacatttattgctaaagcagatggtgtcattgctggaataagcctagcagatatgatatttaaccaggttgatccatctttgaaggtcgaatggtttgaaagtgatggcaattttgtccacaaaggactgcagtttggaagagtatatgggtgtgcccgcagcatcatcgttgctgaaagggttgtgctaaatttcatgcagcggatgagtggcattgcgaccctaacaaaggctatgtctgatgctgcccgtccagcatgcatattggaaacaaggaaaactgctccaggtttacgtctgattgacaagtgggcagtactgattggtggcggaaagaaccacaggcttggtttatttgatatggttatgataaaagataatcatatttctgttgccggtgggattgcaaatgcaatgagatctgttgatcaattcctgcagaaggaaaaactcacaattcctgtcgaggtcgagacaaggacaatcgaagaagtgaaagatttgttgaagtacgctgctgagaacaaaacttcattgacccgtataatgttggacaatatggttgttcctcttggaaatggagatttagacgtttcaatgcttaaagatgcagttcggttgataaacggtagatttgagactgaggcgtctggaaatgtgacagttgatacagtgaagaaaatcggagaaacgggagtcacctatatttcaagtggagcattaacgcactctgtgacggcgcttgacatctctctcaagatagacaccgagctggctcttcaggttggaagacgcacaaatcgtgcttgactcccacagcattacgttgtggacgcaacgcacgcaagtaaggatgacagagggaccagcgtggcaaaccagcttaaatagcttaataataacttggcgctgaggcctctgactgcaactacgtgggattcattcttcagtttcatgcacaaacgaccgcaatattgatcggatcagaataattggcaggacatacaggttttgttctagcaccaagtttgggagcttgcgttctgcggcagataggcaggccaggtaggtgtacctcctcctgggcccagccacagctcgacagcaggtaccaggtaggtctactgtaaacgggggatgtcgcactgaactcgcaataccaaagacaaaataacaaaaggtggagataagatgcttatcttactgccattggtgataaaagcaacgtcaactcacatctattatttattgtatcgttccatcatcacttccagaatccatttgtatacagtgtatacgaccggtttgctcgctctttgg

SEQ ID NO: 104700 - DNA, 1807 bp, Zea Mays
caccatcacccaccatcagccgccaaagatcacgaaagcgacgcgcacaccccaagaaagggcggctccccactccgcctcgccgcacccctttcggcctttcttcctcccccacctcttgctcgcgtcccagctcccaacaccagtacaccacgcgccggctgcgagcgatgcccgcgatcccaacggcccccgccccctgccccgtgcgcttcctcctcgcccgccgccacagcctccacatctcctacccgtcgccttgctctaaccaccagcggctcccgccccgcctcctgcgcctgcccgctcgcccccgggccgctcccatgtcggccgaggcgcgggcacccgcgtctccggtggcgccgccggcgcaccccacttacgacctcagggccgtcatcgcgctcgccctcgcagaggacgccggcgaccgaggggatgtatcctgtttagccaccataccttctgatgtcgaagccgaagccacatttattgctaaagcagatggtgtcattgctggaataagcctagcagatatgatatttaaccaggttgatccatctttgaaggtcgaatggtttgaaagtgatggcaattttgtccacaaaggactgcagtttggaagagtatatgggtgtgcccgcagcatcatcgttgctgaaagggttgtgctaaatttcatgcagcggatgagtggcattgcgaccctaacaaaggctatgtctgatgctgcccgtccagcatgcatattggaaacaaggaaaactgctccaggtttacgtctgattgacaagtgggcagtactgattggtggcggaaagaaccacaggcttggtttatttgatatggttatgataaaagataatcatatttctgttgccggtgggattgcaaatgcaatgagatctgttgatcaattcctgcagaaggaaaaactcacaattcctgtcgaggtcgagacaaggacaatcgaagaagtgaaagatttgttgaagtacgctgctgagaacaaaacttcattgacccgtataatgttggacaatatggttgttcctcttggaaatggagatttagacgtttcaatgcttaaagatgcagttcggttgataaacggtagatttgagactgaggcgtctggaaatgtgacagttgatacagtgaagaaaatcggagaaacgggagtcacctatatttcaagtggagcattaacgcactctgtgacggcgcttgacatctctctcaagatagacaccgagctggctcttcaggttggaagacgcacaaatcgtgcttgactcccacagcattacgttgtggacgcaacgcacgcaagcaggatgacagagggaccagcgtggcaaaccagcttaaatagcttaataataacttggcgctgaggcctctgactgcaactacgtgggattcattcttcagtttcatgcacaaacgaccgcaatattgatcggatcagaataattggcaggacatacaggttttgttctagcaccaagtttgggagcttgcgttctgcggcagataggcaggccaggtaggtgtacctcctcctgggcccagccacagctcgacagcaggtaccaggtaggtctactgtaaacgggggatgtcgcactgaactcgcaataccaaagacaaaataacaaaaggtggagataagatgcttatcttactgccattggtgataaaagcaacgtcaactcacatctattatttattgtatcgttccatcatcacttccagaatccatttgtatacagtgtatacgaccggtttgctcgctctttgg

SEQ ID NO: 104701 - DNA, 1803 bp, Zea Mays
caccatcacccaccatcagccgccaaagatcacgaaagcgacgcgcacaccccaagaaagggcggctccccactccgcctcgccgcacccctttcggcctttcttcctcccccacctcttgctcgcgtcccagctcccaacaccagtacaccacgcgccggctgcgagcgatgcccgcgatcccaacggcccccgccccctgccccgtgcgcttcctcctcgcccgccgccacagcctccacatctcctacccgtcgccttgctctaaccaccagcggctcccgccccgcctcctgcgcctgcccgctcgcccccgggccgctcccatgtcggccgaggcgcgggcacccgcgtctccggtggcgccgccggcgcaccccacttacgacctcagggccgtcatcgcgctcgccctcgcagaggacgccggcgaccgaggggatgtatcctgtttagccaccataccttctgatgtcgaagccgaagccacatttattgctaaagcagatggtgtcattgctggaataagcctagcagatatgatatttaaccaggttgatccatctttgaaggtcgaatggtttgaaagtgatggcaattttgtccacaaaggactgcagtttggaagagtatatgggtgtgcccgcagcatcatcgttgctgaaagggttgtgctaaatttcatgcagcggatgagtggcattgcgaccctaacaaaggctatgtctgatgctgcccgtccagcatgcatattggaaacaaggaaaactgctccaggtttacgtctgattgacaagtgggcagtactgattggtggcggaaagaaccacaggcttggtttatttgatatggttatgataaaagataatcatatttctgttgccggtgggattgcaaatgcaatgagatctgttgatcaattcctgcagaaggaaaaactcacaattcctgtcgaggtcgagacaaggacaatcgaagaagtgaaagatttgttgaagtacgctgctgagaacaaaacttcattgacccgtataatgttggacaatatggttgttcctcttggaaatggagatttagacgtttcaatgcttaaagatgcagttcggttgataaacggtagatttgagactgaggcgtctggaaatgtgacagttgatacagtgaagaaaatcggagaaacgggagtcacctatatttcaagtggagcattaacgcactctgtgacggcgcttgacatctctctcaagatagacaccgagctggctcttcaggttggaagacgcacaaatcgtgcttgactcccacagcattacgttgtggacgcaacgcacgcaagatgacagagggaccagcgtggcaaaccagcttaaatagcttaataataacttggcgctgaggcctctgactgcaactacgtgggattcattcttcagtttcatgcacaaacgaccgcaatattgatcggatcagaataattggcaggacatacaggttttgttctagcaccaagtttgggagcttgcgttctgcggcagataggcaggccaggtaggtgtacctcctcctgggcccagccacagctcgacagcaggtaccaggtaggtctactgtaaacgggggatgtcgcactgaactcgcaataccaaagacaaaataacaaaaggtggagataagatgcttatcttactgccattggtgataaaagcaacgtcaactcacatctattatttattgtatcgttccatcatcacttccagaatccatttgtatacagtgtatacgaccggtttgctcgctctttgg

SEQ ID NO: 104702 - DNA, 492 bp, Zea Mays
atgggggtccggcatgaagggcattccttcatcccttgcttctcatggaggtcgctgcatttggcacagaccacctggtgggcgcaagggaggaacaccacggacatctcctcactcaagcacatgacgcactcccggtcacgctgtatatcatcaaaactgggatcttggggtactgctatgttggacaaaatttgggcactgctgttctttctcccttcagaaagatgcaatgcatatgttttattgtcagcaccccacttgggggcagcaacctttgaagagtccaaagaaaccttcatctgtgcaatacgctgctcaagagcacggatctcactcttgtatctttctgtgtcattcgctgctttaagatgcagtaaattctcttctgacctcatggaggtctcaatttgctccctctctttcttctttgaggttacaagggcaattacctcaatctttccagcttcctcttgtttccatcttgcctgc

SEQ ID NO: 104703 - DNA, 1195 bp, Zea Mays
taaaagcaatgaacaagttcagcagctgcattgcttgcagccctgttactattagccatatcaatcatggcgggcggcatatgagaaaagtgaactaatccacgaaacaaaactagattaagttttctcgatctctctgatcgccactcactagctagtgcacgatcttctgttctgtttattgactcccttcttagcttgcatcttcttgttgtcttcctcttttcgcgtttccgacctgatccatcacatgtaccatttcatctgggtcggattcggggcgcccatgccgtggaggccctgcggtgccgtcgcgtcgtccctgccgacgccaaggaagtcccttgtgctcacattgccgtcgtccacgcccgccaaccctgagaggccgccggtgcctcctcccgttaatggcagtgagttcatgatgagatcatggaaatatgcctcgtgagacttctcttcttccgctgccctgctactagtctcccggacgctggcagtgcctgcgaagccggctgcgcggagcagcgcgctggggccgttggggttgtgggtggtgctcgacgtcgtcgagcccatctgagccgccttcatcaggagcgccgtcgctgagagcccggccgacggagatgagttgtgcagggaagggacgaagcctccgccgaagtggcttccgatggacgccatcccgttaccatgctcggtgttgctgctgctgccgccgttgagttggtcttggatgacaaggcgcgcgtcctgatggctgcttccgggccatccaccgctgttgccagagaagaccccaaggttagggaggttgacgcgggcgttgctgctgcctggctggtgctgctgctcgggaagttgcgtcaggtcatggctatggaagggctccttgccgtggagcagagggccctggctgccagacgtgccaccactgttgccagagaagaacccaatgtccaggaggttaacgttggcgttgccgctgtttggctgatactgctgctcggggagatgcgtcatcacgccatgcaagggcgccttgccatggagcagagggccctggctgccttcggagagatcaccaccgttgtcggacaggtcttgttcgataagaggagtgccgccgccgaggaagaaagacaacgagaagtctgacgcctgagaacggaacatggaggagcccgag

SEQ ID NO: 104704 - DNA, 360 bp, Zea Mays
atgtcaagaaaagccgtccgcagctactatctgcatgctaaaggtttaggtagcatgccaggaccaagaccccaggaaacacaaaacaagggacctgtttttgcaagaaccagggttcaagacatggttggcagcctcacttggaggtgttaccaccgtgctatgaccatgtttctctatgaaggcataagattgtatcacataataatagtcttgagttgctcaccgaagttcagaaaaccaacagcaattgtgcaaatgacatactggtacaggtatccattaactcaaagattatatcacataaatatatggagcatagtctcaagttgctacccaagtttggaaaaccagcagtag

SEQ ID NO: 104705 - DNA, 1170 bp, Zea Mays
aaagccacctcctccagcgccccacccgccagaggcccgatcgtcccacactcccaccacgcgacaggaacacaaaaaccctagcacaagcccacacgacgccacccggccccggacggccggcccccccgtcccacgttcccaccgggctccgagcacaaaaccctaaccttctcgctattaaagtcggcgtccagtccgtcggctgctgctacgccaccgaatccgcatctcctcgccggtcgcgcacgggcaaagcagcgatggcagcagcgacggcagttggcggacacgacagggtggaggctgcggcgtcgtccgcgggggctgtgctggccgtcgccgttgcctcgcagaggttgataggcctgctcgctcttgcggttcaaactgtaaattgtgtagcagaaatatataatgaagaccagcaggaaatatacaagttattatatggaagaatcaaatctgaaaatgtccctgaaattaaggctgggtcagatgatgatgatgacgatgaagacgatgaagatgaagatgaagatgatgatgatgatgatgatgatgatgatgagggtggtgacgacgacgatgaagacgatgatgatgaagaggggggtgatgaagatgatgatcctgaggctaatggtgaaggggggagtgatgatgacgacgatgataacgatggtgatgatgatggtaacgatgatgacgacgatgaagatgatgacgaagatgaagatgaagaggatgacgacgatgaggaagaacagccaccttccaagaagaagaagtgatttgctctttcatggattcacctcagcttctccatgctgttagttgtgttgtttagatcatggaacagctttgggacaaatgttgcttgtcatggtattatagtgtaggaaaccttgacatctgatgttaaatcgttatcctactttctcctctgcatgtagtcttaattgtgtgttttagatttttactttattggagctgtgattgtgtcatgccattcagttttattctgctgaggccagtgtcatgccattcaatttatttcttttactgaggcctgagcactcaggcctggattgtatgtgatgctatgtctgttactgagaaggttgagccaggccagaattgtatttgatgagttgcagattcttgagc

SEQ ID NO: 104706 - DNA, 604 bp, Zea Mays
ctacgccaccgaatccgcatctcctcgccggtcgcgcacgggcaaagcagcgatggcagcagcgacggcagttggcggacacgacagggtggaggctgcggcgtcgtccgcgggggctgtgctggccgtcgccgttgcctcgcagaggctgggtcagatgatgatgatgacgatgaagacgatgaagatgaagatgaagatgatgatgatgatgatgatgatgatgatgagggtggtgacgacgacgatgaagacgatgatgatgaagaggggggtgatgaagatgatgatcctgaggctaatggtgaaggggggagtgatgatgacgacgatgataacgatggtgatgatgatggtaacgatgatgacgacgatgaagatgatgacgaagatgaagatgaagaggatgacgacgatgaggaagaacagccaccttccaagaagaagaagtgatttgctctttcatggattcacctcagcttctccatgctgttagttgtgttgtttagatcatggaacagctttgggacaaatgttgcttgtcatggtattatagtgtaggaaaccttgacatctgatgttaaatcgttatcctactttctcc

SEQ ID NO: 104707 - DNA, 258 bp, Zea Mays
ttttttttaaaatatttgctctgtgacttaagtatgataaaaacataacttgtgattttgattgttttaaaggttattatatggaagaatcaaatctgaaaatgtccctgaaattaaggctgggtcagatgatgatgatgacgatgaagacgatgaagatgaagatgaagatgatgatgatgatgatgatgatgatgatgagggtggggggagtgatgatgacgacgatgataacgatggtgatgatgatggtaacga

SEQ ID NO: 104708 - DNA, 5276 bp, Zea Mays
ttatgtgctcgcatatgcttgttacagcatgctggaggaattccagaaaaagctggtgaaattgtctgcttggagaatggcatgagtattgcacaatggttcaaattctgcatagggctttttctttgtcggaggatctattgctaacaccaggtgggattggccggaatgggcacatatgaaaagttctccagaagagcacatattgaaaagtcttgcatcaagaaacagtggaacaggaaaaatggggttgttaagtagatatggaaaaatcactggacatatgaacaaaccggcttattccaatgatctgtccgttgagggtggagggcacactaatgttgagaagctagtaaacaggacagatgaaacatattacagaaagagtgttgatgtgcatgaaacttttacaaagaactctgctttacttcagaattccgctgtggtgaatttagggcccgctaaaaaccatccagttcatgcattcgacttgaacccacttaccactcctagtggaagcccacactttgaagcaagcatgggaagacattacaatggaaatcatttggcccatagtcatggaatccatttggagaaaaactttgatgcgtcattttgtaatcctatgccacgttttacaggagttatgaaccatgatagtagggcgtgcagaccaaatttctccaataaaacattccaggacacttcaacgatgattgaatttcagaaaccccaaacacataggcctccgataaatcaaaatccttctccaaagcaagcaacaaagatcagcaaaagtctatccgaacataatgaaccatccattagtaccggaaataagaagcaaccacttgaagttgttaatggcatgaagcgttctgaaggtgatgagcttacagatgatacatccaagaattcatttatctcattatttctttcacaccttgagaggaataatacacccgaacccatcgatgacattctcaacagtaatgagcactatcttcctaaggccctggatgttgcatgtggttctgatcatccagaaagtgccactagacagattgaaacaagggtgcctaatgataagcactcaaagttggcctcagccattgttcatacgaaaaggagatcagagggcatttctctttcagtggcttcttctggatataatcctcaagatgcatcccatgctaatagtcaggaacacttgattcatggtgattccttgtcacatttgctgcctagtcaacctaacaccggaatctcgaaaatttctgcaagggtttcatgtcatgcaaattgcatgagctgcattcacgtgggtaataaatcccatcaggttgcacatggtgagattggggttccctgtttctatgataaaatggccaggggccatggtacttttgagcgagttgatgactgcacacatagaagtttgagagctttcacaaaaatcagttgcgataatgggaaatcttgttgttcttctcgtgagcttctacctagcttttgccaaaatgatcagccaacattgggaaaatcgatttgtggatgctgttgcaaaattcaggaagatgcttccaagcttggttttatacctggtcacatgtgcagaactcatttttctagtgatgttggtccagttctagccaataagcctactattgaagggctagatgaattttgtgcttgcagttgctccacttttacacaacgatcatcattatgttctcgggaatacgtcttgcagtcttcctgtgactcatgtcccattaatggactgcactgcagaagttgtatgggacatgcagcagatagcttaacaaaacactctctgtttgatcctcttaatacaaaagaacgaggttcttgttgcaatggaagatgctgctactctgtagtcccaaaatgtttgtctagttgtgactttacaaaacactgtgatgtcataattgaccaaataggtcatgctgcacctaaagataaccatcagctgcaaatgcctaccagatgctgcacactgggggagaatgagaagttaatatgccaatgcttaagcaataaaatagctgtaagaaacttgcctcaaacttctcattgtaaagatgtctctgagaaagtaatgaaccagccttctattgctataacggagagactggagaatgtatcagaaccttcagtggctgatgacagttcatccaaagctgtagcagagaaaaaggatgcttatagagattctgcagtatctaaaggacagccaaattttggtttctcatctgggtcgtccagcattatagtgacaaagttccagaaatcacctgaatttaacaatgtatcctctactgctaaacatagcaaacataaaaatctgtgtgatgaaggatcaagaattgagaaaagttcagcatccagctatgtgcctaccagtacaggatgtgaagaacccctaaatagttctgccaaatctgagctgggtccatcaagagtgaagcgcaaatgtaatcagatttctgagggaaggagactggaagaaacagataatgaggaacattgttctgaactgctaaaaaagactagaacactgaggtgctctgttaaaggttctgaatcagatgattgtactagggctagttcccagtcgtcccagaagggggtttatcaaccacaaaatgaggttaactcattttcttgcagggtgttgagaaccaagcgaaaacatcctattatgcatctaaataagcatgtgaaacagcttcacagacagaccaagttttttgaaggtgatgagcaaccagatgccaagggcaattttcttggtggattagattcctatgatagaaagaggcaagtagaggatatgagcactctggataaaacaagacatcaccaggaagggagtcgagcatttgtccgcaaacttcctaaatatgtgtctctgaattgcattgttaatgaaccgaatactaacagtgaaggtgcttgcagtgggagtggtgggattgattctagtttaattgctacagggattacaaacgataacaggaaatctcccaaaattgttcctctcaatctggttcttaaaaaggctaagagatgcaatgctgttaaactccgtaagacagaaagcacccacttgtatgaggagaaaagctcagattgttctgtgaacagctcagattattctatagaaaagtattccgttgatgatgaaaattgcagcccacaagctgaatatgaactgcaggattccaaaaggagtaggtattcatctaatgatctgaggtcacatgtggctctccacaaaagaacatctggtggaaccaagaatcgaagaacaagtgtatcccttgccaggattaagaaattcgggagcaaatcagtatgctattctggcagtgacaaagacaatgctgtgctagcccatgaagtgaatgctaggagatacagtggaagactcagctcaaattctccatgctgtgtttgtgggatctcagacctggagccttgcaatcgattaatagagtgcagcaagtgctatatcaaagtgcaccaagcctgctatggtgtactaaaagttcctaggggtcaatggttttgcagaccgtgcaagaataataccatggatacagtctgtgtgctgtgtggttatggaggtggagctatgacaagggcactgaaaaccaagaatattttgaaaagtttgctccaaggtttgatgaatttagaaaggtcagaatattatgttgattccttaggaaatgcaagcagtgagtgtacaagcttgcaaaatccagtagacagtgcacatggggataacattatgaatgcgaagaacatcaccagcaattcctggacctctggaaaatactattcgagtttacttggaccacaaccaatgcagtgggttcacatggtctgtgggctgtggacacctggcacaaaatgcccaaatgacaccacaatgagcgcttttgatgtttcaggtgcttcacctgccaagagaaatactgcatgttcaatatgtgacagaactgggggctcatttgtcaagtgccgagctgtaaattgtttggtattctttcatgcttggtgtgcacatcagaggggtttgctgcaaagtgagcctgaaggcgagcacaatgaaaatattggcttttatgggcgatgcgtgtctcacgccattgttttttctagtcacgttaatcctaagaaagaatactttagaaacaacaattggacatgtgcacgtacagagggttttaaaggccgaaagggagaaggcttttctgatagtagccataaaaaatatgaagagtacagtggcgagttcggtgtttcccaagaacagataaatgcttggttacgcataaatggttcaaagccctgcggacgaggacagaaggagtacatccattacaagcagttaaaagggtggaagcatttggttgtttacaaatctggcatacatggacttggtctctacacatcagtctttattccacgcggctctatggttgtagaatatgtgggtgaaattgttgggcaacgggttgctgacagaagagagatcgaataccagtccgggaaacggcaacaatataagagtgcatgttatttctttaagattgacagggagcatattattgatgccacccgcaaaggtgggattgcaagattcgtcaatcattcatgccagccaaactgcgttgcgaaaataatctcagtcaggaatgagaagaaggtaatgttctttgcagaacggcacataaacccaggggaggaaattacgtacgattaccacttcaaccgggaagatgaaggccagaggatcctttgcttttgtagatcaagatactgcaggcggtacctcaattagtttccggtgggcgtaacatgtctatatataacttatatatctatatgtatatcttatatatttacaaattacaattgcgattcatgcctgctgtatatgtaggaacttgcatctagaactgcctgtttatcttttgtgaagtcaaatgagttatcagctgttcatgtgacactgaataacaaaagcataaaaagtgtcactatctcgtttatgagaaatcatgcgcctaatctgaatgatggatgatccagtgatctactttggcaagaagggcttgaggtcagacttgtccacctgaagctttgttgagatggcctcgatctgctgattcctgcaaatccaagagccatccatctttgggaaacagaatatataaaaaaaaatgaccaataacaga

SEQ ID NO: 104709 - DNA, 2538 bp, Zea Mays
cccgacctcccgcgcgacgccgaacctgcgagccataacgccacccaccgcctcgccgcgcagatctctggggcttatccctacccccgggctgtgattctcccgcctcctcaccgatgcggacgccggcgatgctccggtgggccgcggcgctcgcggtcctgctcgccgtcgccgcgccggccgccgggttctacctccccggcgtcgccccgaccgacttcgccaagggtggtccgcttccagtgaaggtgaataagttgacatctatcaagactcaactcccgtatacatattactcccttccattctgcaagccagatgccatagttgacagtgccgaaaatctcggggaggttcttcgtggcgatcgcattgagaactctccttatgtgttcaaaatgcgagagcccaagatgtgtcagattgtctgcaaagcaaagatcactgagaaagaagccaaggagctgaaggaaaagatagaggaagaataccgagtgaacatgatcctggacaacctcccgctagttgttcctgttaataggcaagataagaacagtattgcttatcaaggtggatatcatgttggtctcaaaggcgtgtattctggaactaagaatgagaaatacttcatccacaaccatttgtcatttacggtgaagtatcacagggatgataattcagaactttccagaatagtgggatttgaggtcaacccactcaggtattttgatacattttttgccagtgtcaagcatcagattgatgataaatggaatggtgtagacactcgcttgagcacttgtgatcctcatgcaagcaaatttgtcataaactctgattctcctcaggaagttgaagctgacaaggaaatcatattcacatatgatgttcattttgaggagagtgagatcaagtgggcatcacgttgggacacctacctgttgatgactgatgatcagattcattggttttctattgtgaactctctcatgatcgtgctttttctatctggcatggttgccatgataatgcttcgcactctctacagagacatctctagatacaatcagcttgaaactcaagaagaagcgcaagaggaaacaggctggaagcttgttcatggggacgtattccgtcctccaacccactctgacttgctctgtgtttgtgttggcactggcgtccaattctttggcatgctcctagttacaatgatcttcgctgtgttgggtttcctttctccatcaaaccggggaggactgatgactgcaatgcttcttgtctgggtcttgatggggctgcttgctggctattcttcttcacgcctctacaagatgttgaaaggttcagagtggaagaagatcaccctgcaaacggctttcctgtttccaggggttgcatttgttattttcttcatcttgaatgctcttatatggggggagaagtcatctggtgctgtccctttcaccacaatgtttgcactggtcctcctctggtttggcatctcggtacccctcgtctttgttgggagttatcttgggttcaagaaacctgccatggaacctccagtcaagacaagcaagattccacggcagatccccgagcaggcttggtacatgaatccgcttttcactattctgattggtggcgtccttccatttggagcagttttcattgagcttttcttcatcctcacctccatctggctgcaccagttctactacatcttcggcttcctcttcctcgtgtttgtgatccttgtcatcacctgcgccgagatcgcagtcgtgctctgctatttccagctctgcagcgaggactacatgtggtggtggaggtcctaccttacctcaggatcctccgcgctgtacctcttcctgtacgctgctttctacttcttcacgaaactgcagatcactaagctggtgtctggcatcttgtacttcggctacatgtttctcgcctcctatgccttctttgtgctgactggcacaattggcttctgcgcctgcttctggttcactaggttgatttactcgtcagtgaagatcgattaggtgccaatatatgacagaatagcacgtgtttcagtgatggagacaagagaactgtaccattgatgtggattgggaattaccccccttcttttagggttttcagggaaaaaagtttcttcttaggatttagtttatgaattattatggtttgttgtcagattatacactttagggcttgttcgttttggtgataatccacatgtattgggtgggattgagctggtttaaatccataacaagtcaaaatccaccccaatcccactcaatacactccaatacacatgtaatatcaataaccgaacaagcccttagtggtttggaactgagaaaaaatataagggtaaacacattgcgaagaggctgtacctttttgacatttttttgtgcggctctatataaattcaattcattatgaccggtatgcttgtactggtgaattactgtaaggctccagggccagcatgaaataccctcatgg

SEQ ID NO: 104710 - DNA, 682 bp, Zea Mays
gtaaagtgaaacggagacgaaacccgctcgcgttttcttctttcagaaaacgaaatccactcaggagcgaggaaagagggacagaggagggatagatccccgggctccacgcctccacaaccatccgtcccgatcccgaccagctttgagatcgcgatggcggacggccgctgctgcaccttcctggagatcctcttcgccatcatcctcccgcccctcggcgtcttcctccgattcggctgctgcagaagttctgcatctgcctgctgctcacaatccttggctacgtccccggaatcatctacgcgatctatgtccttgttgctctcgactctgaccagcacgagagggaatactacacccttgcttagagcatctggttgtgccaggcgggcctgcacagttgagtcgaaatcagtattttttttctcatgtggattgtctgacatggcataagcggcaatgggtaaccaagtgttgtggtctatatctctgttacccaacttgtgagctctctttattgtgctccagttattcaatctgtaattgtgatactacaagagaataagatgcgcatgtatctctgagagcaactgtgatttatgattggtgctaccttgggctcaaaaacatgtgaacagtcgttctatgaaatgcgatgtgtacacacatgttctttgaa

SEQ ID NO: 104711 - DNA, 689 bp, Zea Mays
gtaaagtgaaacggagacgaaacccgctcgcgttttcttctttcagaaaacgaaatccactcaggagcgaggaaagagggacagaggagggatagatccccgggctccacgcctccacaaccatccgtcccgatcccgaccagctttgagatcgcgatggcggacggccgctgctgcaccttcctggagatcctcttcgccatcatcctcccgcccctcggcgtcttcctccgattcggctgctgcagaatagagttctgcatctgcctgctgctcacaatccttggctacgtccccggaatcatctacgcgatctatgtccttgttgctctcgactctgaccagcacgagagggaatactacacccttgcttagagcatctggttgtgccaggcgggcctgcacagttgagtcgaaatcagtattttttttctcatgtggattgtctgacatggcataagcggcaatgggtaaccaagtgttgtggtctatatctctgttacccaacttgtgagctctctttattgtgctccagttattcaatctgtaattgtgatactacaagagaataagatgcgcatgtatctctgagagcaactgtgatttatgattggtgctaccttgggctcaaaaacatgtgaacagtcgttctatgaaatgcgatgtgtacacacatgttctttgaaatc

SEQ ID NO: 104712 - DNA, 3066 bp, Zea Mays
atggagggtgctgccgtttctagtctgacgattgcactcgagaagcagtccaggctcctgcgcgcgatctgtgaccggttgtcggcacaggatgcgccttgggcttcgctcgagtccgccaccaccgagcacctcgatgccgtggaggctgctgcggcaactcgcgtcggcgcgccggaatcgtggcgaccgcacgtcgagctgcgctacgaggagcccgtcaccgccgacaactggggtggcctgttcgagcactcgggtgtcattaccgcggaggttgggagctcaccggaggaggtgatcaccgacgactggggcgacctcttctgcagaggcgtcgactccgacgagcagctctgcgattcgctccattccgcgtcgattcgctctttggaggaggcgtttgcccgtgaggatcccattccctcgcgggcggatctcgggatccaactctcggccaccaccgagcgcctcgatgccgtggaggcggctgtggcaactcacgtcgacgcgctggagtcgtggcgtctgcgtgtcgaggcccgcgcttcggtccacctatgtggattcttcgatggcactgacgtcaccaagctgcctaccacctgttcgacttcggggctcacaaccaaactcgccatggcgcactatggctcgcatctacccggtgataagggaggttctgccgcgtcgtggcagccggtgcggtcgctggcgctcgcggtccacgttgagtcgcagtgccagcaggcgtcctccgcgtgcggcacgccggccatggccagcatggggaagatgagcgtcggggacctcacggaggccgacctcaaggggaagcacatcttcgtgtgcgccgagatccacgagccacccgacgagaaccagaacagcaccaacgacatcctctccacctcgtgcgacactgccgtggaccagaggcggaccgagtgcctaggcagtacaggccgtcgcctgggctgccagcctgccacgccacgagagtgcatgctgtcagtaattcctgggtccgccactgccgtggacgtcgtgaagcggtgccaacgcctgtttccgctcgcggactcgaccggcgcgttcgacgcgaccgtggcggcgcgggtgacccagatggccgtgtcgtcgccagccaggaacacaacgcccacaggctcctccccggagagcacggcgtgctggttcccgtgcgacaacaagagcagcaagcagctgcagcgtggcgggccattgttggatgggtcggacggagcgtcattcagggtcggcatgcagttgaggcagctgtcggggtgctaccagtgccacatggtggtggtccccgttagcggtagcgtctccatgagggccaccatctgcccctggctggactgcggcgatgtgttcgtcaggcaggagagcctccagctccaccagtccatcaggcacgcagtgtcagggcttggcacgatggccacgaacgggcgcgcgcacgacgtcgagggcaaagaggagtacgactcggtggcgaggttgaccaggttgctaatgtcccaccaagacctaacagctcttccttggtacgacaataaggatgccttcaacacgttctacaacaagactggttctagcaagcaggtggccagagccatcttcatcaaccctgagcatggtctgtaccccgagatcttccacctagagcagctcatcttagggaaggaggacacaactaacaacttctctcgtggctaccacactattggaaagggaatggtgctggtagctaacaactttggtaacgacctccttactcgccgcagtgagatcaagcaaccatggcctccacctcaggagttggcgtgcttgggtttgaacatcatggttgctgacacatccgcgcccggcgtccgcatgccgcgctggcctccacctccacgccccccatcccccacccccggtaggcaggtactctcctccaggaccgtcagccatggcagagctatagcggttgctccagttggcccgctcaagccgcgaaattcgggaccccttcccggctcccgcgccatggacggcctccccgacgccgacgcggcgccgttggcggccgcgccgccgcagaagcgcgacgagtggagcgagagcggcatcgcgcgcctgctcgaggcctacgaggccaagtggctgctgcggaaccgcgccaagctcaagtggagcgactgggtcgacatcgcccgcgaggtgtccgtgcattgcgccgacgacgccgcggccgcggggaagccccccggcggcgtcggtagcagcgccaagacccccaaccagtgcaagaacaaggtcgagtccatgaagaagcgctaccgggccgagaccgccgcggtggcgcgcgccggcccggccgccgccggcccgtcgtggaggttcttcgcccgcatggacggcctgctcaagggaccgcccgtcggccctgaccaggtgcagcagcagcaggcgctgactaacagcagaatagacttgcgagctccggcgaaaccggaggccgaggcagaagctgactttgccgcgcagctgcgggatgcggttccaggtgcattcactgatctgatgaacatggacgcgaatggcgccgtcccggataaagcggagaaggctgacaacagcatgcagaaggagagcgggcctgctgatagcgatgccaacgtcagttctccgaggagtaaggtggcgaacgaggacgtggaggaggtggaggacaaggtctgggaccggcccaagaagagaaagagcacagacttcgatatagccaagagcatcgagctgctggctagctccttcttgaaggttgagcaggccaggatggagatgtacagggagacagaaagaatgagggttgaggctgagatcaagaagggggagatggagctcaagaggactgagatcatggcgaaaacacacctgcagatcgctaggcttttcgcgaggaagttgaagcagagcagtggaaagaacggtggcagttcgtcagtaacggctgaagtggacacccttaccaagaagggcgagaatggttag

SEQ ID NO: 104713 - DNA, 4708 bp, Zea Mays
cgctgccgtcgtcgcgccggcctcgatacgttcccgggaagtcggaggcgccgcgctcgtcacgccgccggctccgacgagatggaggatggcgtatctacttatactgtggatgaggcacttgtgtccatggggtttgggaaattccatgcattcgtgcttgcatactctgggatggctaaaatctctgaagcaatggagatgatgcttttgtcatttgttgggcaatcagttcaagctgagtgggggctttctgcacatgaagaaagcctcataacaagtgttgtctttgtggggatgcttgtaggagcatatgcttggggcatagtttcagataactatggaagaagggttgggttcaacttcacagctattgttactggaggagctggccttcttagcgcttttgctccaaattacttatctttgattgtactgagatttatggtcggtgttggactgggtggtgggccagttttaggttcttggttcctagagttcatccctgctcctaaccgaggaacatggatggttatgttctcagcattttggactgttggcacaataatggaagcttctcttgcttgggccgttatgccagcttttggctggaggtggctgctggcactctcatcattgccatcgtttgccctgctactcttctacccagtgacacttgagtcaccaagatacctatgcatgaagggtagaatagctgaagcagttcatgttctggaaacaatgtcacgcgtgaactgtgtttctctcccctctggccgacttgtctctggccatcgggtggaacttcatgatatcggggattcttcagaaacggcacagttggtgacatctaataagaataacactgctgatcgtggtagcaaatccgagattggaggcctcagtgccatcttaaagcttctatctccaaacttaatcagatcgactcttctactctggactgtctttcttggtcatgcctttctgtactatggtcttgttctactcacatcagaactaaatcatggaaataggatctgtggatcagaagagggggcagaagtgacaacaacagcccacatacatgatgagaatctctacagaaatgtatttataacaagctttggagaggtccctggtcttctcctgtcggctgccattgttgacatgatcgggcgcaagctctcgatgtcttccatgctttacatcagttgcctgtgcatatctccgcttatgttcgcccagacggaatcgctgacgaccatctttttgttctgtgcccgggtttgcatctctgcaagcttcactgttctgcacatctacgcccctgagatatacccaactgctgttagggccacgggtgtcgggtttgcaagctcgattgctcgctttggtggaatcctgtgccctctcgtggccgtcggcctggtgcacgcgtgccaccagatggcagctatcctgatattcatcacggtgatgctggcttcaggcatcgccgtgtcatacttccccctggaaacaagcggccgaaagctgagcgaccacgtcgccgccgcgtaagagctgattaattgaagaactgactttttgagagggatacaccaatacagaatcaaggcccaaggggccattattttttttgttcagttgttgacaaaggatacagtgggaaagaaagtgcaaaggaggcactagattgttacgttattatactgttgcttctcaatagaaatctacagatcactatatgatttttgttctcttgtcaatatggtattagtatgaattctaaacgccctcaaaattcattttttgtttcaaaagtgaaacgtctttttatatatgaattgggaaactaaaaaatgaaattccgttgccgggactcgaacccgggtctttcgggtgagagccgaatatcctgaccagctagactacaacggattctgtttatgttgtgcatagtaatttataagattacgtagagctattcacagtaatggcttagcgacattctcgctgctgcaatggcgacggtctcgttccatcactgtcccccgtcattctcgctgctccaatggcgacggtctcgttccatcccccgtctcttcctcctccgtctcctaattttggaaaggccatagtttcccatcgcgagacctgtatccccatggatccatgagagaaaggcggaggagatcaggcgacgtacgcgcgtgggggtctcctcctgcacgctctcagctgaaccgccccgtgctcccctgggcgcgccgcgcgcaatggcccgacgacggcgccccctaccgccgccgctgctcgtctggttggccgtcctcttctctgcggtggcgcccgctgtcgccaagaccgacaagtctgacgttgctgcgctcaatgtgatgttcaatagcatgaacaagccatcgcaattgtccggttggaaatcgagcggcggtgatccctgcgatgacgatgacgagtggaaagggatagagtgcagcggctcatctgtcacagaaattaacttgtcagggcttgaactcagtggctcgctaggatatcagctatcaagcttgaaatcagtaaccaaatttgatctcagcaataacaatctcaacggcgatcttccatatcagcttccaccaaacgtggttgaattaaatctttacggaaactctttaactggaggagttccttattcgatatctcagatgggtgatctggaaacactaaatttgggcaagaaccacctaagcgggcagttgacggatatgttttcagaacttccaaagctctcaacattggatctctccttcaaccgcttctcaggcagcctgcccaagagttttcagcacctaaaagacctcaagacgctgaatgtggagagcaaccaattcagtggtcatatagatgttctagcgaaacttcctctcgaggatctatagtggaaactacgcttcgtctttctgagaactaaagctataatggcttcccctttgtgctcaaggaatctgcagaacaacaagtttactgggtggatccctagtaaactaaaagacatcagcaatctacagattggagggaaccagtggtcgtccggatcagctcctcctggtatggagaagggctctgcactggagggctcttcaggcggaggtggtcgaagtggagtaaacggtatcgccatcgcagctgtggtgatagcggtgcttgttgcagctctgattctcttgtctgtgttgaagaggaaccgttcttcttcctcgtctcattacctcatggatgagtcagcgatcaacatgaagccactggagcattcatcgtcaattagcagtacgacaccgtctgcaatgcctatcaagccgattagtgacaacgagttcgagaacaaactaaactattcgaggcggagcacagatccagtcaaccttgttgcttattcatcatcagacctccaagcagccactggaagcttccatagtagcaggttactaggtcaggggacaatcggtggtgtttacaaggcaaaatatgctgatggaacggtgctggccgttaagaagtttgatccattgagcttctcgggaagcagcgacttcatggatcttgtgaacagcatttccaagctgcatcatccaaacatctccgtgcttgttggttactgctcagagcctgggcactacatgttggtctatgactacaacatgaatggatccctctatgactttctgcacttgtccgacgactacagcaagccgctgacctgggacacccgcgtaaggattgctgttggtacagcttgtgctctggagtacctacatgacgcgtgttcacctccagtgatccacaagaacatcaaggcatccaacgtcttgctcgatgctgacctcaaccctcacctcactgactgcggccttgcatacttctatgaggatccgagtcagagcctgggaccagggtacgatcctccagagtgcacaaggccatcaggttacgttatgaagagcgatgtctactgctttggtgtcgtcatgcttcagctgttgaccggccggaagccctacgacagctcgaagcctagagcggagcagtccttggtcaagtttgtcggtccacagcttcatgacaccaacgccttggaagctctggcggatccaggccttcgtggcctatatccaccgaaagcattgtcccgtttcgccgatgtcctctcccgctgcgtccagtcggatccagaactccggccatccatgtcagaggtggtgcagttgcttctccagtgcgtccagcgcacaaccagcaacaggaggctgggtggccaccgcaccgtctcgcagcgaagcgacgattctgattggtgatgctctgtttctgcctccatcctgctgctgcggcccagttgctgaaactgtctcagaacagaaccgtaggtgtgcggcccttggcatgccgctgtacaaaagaaaatgctttattagacaatctggttgctcgaacagtgtggcaacaaataagtcggttgatttaggtaaaggtaaaagcagattgggtgttctagtgagtagtgacattgtatttgtactcataaacttaaaaacatatgaccagctaatttttaaaaatatataaaccatcttagaacaactccagcagggcctctcagatccctattctacttttgagaatgcaagagccaaaaaaaaaaaaa

SEQ ID NO: 104714 - DNA, 1644 bp, Zea Mays
aacatctctctaccctctcctccaccccattcatgcctcccggtccctgctcccgacctgcttcctagattggcgggtccgctgatcccatccacccctcctcgtccgctgcgcgggctgcagttctcgattctgttcctctctctctctctctctgatggaggatggcgtatctacttatactgtggatgaggcacttgtgtccatggggtttgggaaattccatgcattcgtgcttgcatactctgggatggctaaaatctctgaagcaatggagatgatgcttttgtcatttgttgggcaatcagttcaagctgagtgggggctttctgcacatgaagaaagcctcataacaagtgttgtctttgtggggatgcttgtaggagcatatgcttggggcatagtttcagataactatggaagaagggttgggttcaacttcacagctattgttactggaggagctggccttcttagcgcttttgctccaaattacttatctttgattgtactgagatttatggtcggtgttggactgggtggtgggccagttttaggttcttggttcctagagttcatccctgctcctaaccgaggaacatggatggttatgttctcagcattttggactgttggcacaataatggaagcttctcttgcttgggccgttatgccagcttttggctggaggtggctgctggcactctcatcattgccatcgtttgccctgctactcttctacccagtgacacttgagtcaccaagatacctatgcatgaagggtagaatagctgaagcagttcatgttctggaaacaatgtcacgcgtgaactgtgtttctctcccctctggccgacttgtctctggccatcgggtggaacttcatgatatcggggattcttcagaaacggcacagttggtgacatctaataagaataacactgctgatcgtggtagcaaatccgagattggaggcctcagtgccatcttaaagcttctatctccaaacttaatcagatcgactcttctactctggactgtctttcttggtcatgcctttctgtactatggtcttgttctactcacatcagaactaaatcatggaaataggatctgtggatcagaagagggggcagaagtgacaacaacagcccacatacatgatgagaatctctacagaaatgtatttataacaagctttggagaggtccctggtcttctcctgtcggctgccattgttgacatgatcgggcgcaagctctcgatgtcttccatgctttacatcagttgcctgtgcatatctccgcttatgttcgcccagacggaatcgctgacgaccatctttttgttctgtgcccgggtttgcatctctgcaagcttcactgttctgcacatctacgcccctgagatatacccaactgctgttagggccacgggtgtcgggtttgcaagctcgattgctcgctttggtggaatcctgtgccctctcgtggccgtcggcctggtgcacgcgtgccaccagatggcagctatcctgatattcatcacggtgatgctggcttcaggcatcgccgtgtcatacttccccctggaaacaagcggccgaaagctgagcgaccacgtcgccgccgcgtaagagctgat

SEQ ID NO: 104715 - DNA, 368 bp, Zea Mays
ttttgaaacataatttactagaaatataaccaaaacttataacattgtcattggttgtttcaaataagagagaaaatagcagagaatcaaataagaaagaaaatagcagagaaatataaccaaaattcgtggacaagtaaattcatcagaggcttttgaatcaccggtttcttatttgagtccaatatttattttatttctcatataacatgattgagccaaaagagaaagagaatcaaaagaaggcaaaagcaaggtgtccgcgcttcatgctacttggaaggtccttcagtattccttgccaaagtttttgcaccacagttgagatgggattggccggactgggtgatgcgggcgttgctgcatag

SEQ ID NO: 104716 - DNA, 333 bp, Zea Mays
atggccagaggcggcaagcctgccagctgtcaacccgttagagcagaaaactcagccagcagccatgaggcctgccttgaggtagcgtgctcagccagtgggtgcaaggaccaggttgaggctccagctcttcatgactgccagcccaagtggcactacagtgagcctgagtcagctaacaagggtgtcggccaaacaagtctgcacaatggcaagttcgtttcgagcatcaggttgagaagtgcaagtattccatcacttacccaaacaactagtgtgaaaaatcagtgtaactacaagcctattttcagaatatttatgggaccattttaa

SEQ ID NO: 104717 - DNA, 3886 bp, Zea Mays
gaaaaggcaggaggtctgccaagatatattgataagaagaataacaagaggtttaagtcaatacagtgaccgaagtactaggcaaagatccaacctgaagagaagcaaacaaaaataaaaaacagaccccactaaatagttgttaaggggtaactaggtgcttggcccctgccaaaatccaggctgctgtctcactcttgattttggcaatgatttgttggcagctcgagaatctgcgatcaaagattctcgcatttcgttctcgccaaatctcccagtttacaaggatcaaaagtgatctgatgccttttctattgcatcccggcaaaaaagccagcttttcccaccaatgccccagctcggggggtcgcccccagttagacggcttcaggccctgaacagctacccagacagcaacttcctcccaaattcttttgatgaaacgacattccacaaaaagatgaagccccgattcctgggcagcacgacacaagacgcaagttggttcatggggccaattcctggcggctaatcgatctgctgtccaaatgcgattttgaattgctaaccagctgaaaaacttgcattttggaggcgcccagttcttccagatgatgaggtcataatttgtgtgaacagagcccaaaaattgtgcctgatatgccgatttgactgtgtagcggtgatccacagtgaaattccaggtgatggcatcatcacgctctgggtgaaactggatcttttggacttcagaccaaagaatgcagaactcatgaatgtggtggggagtaatcggtctgtcgaacagcgcaagatccatgatccaggcattgtttgtgaccgcctccgctaaagatttcctcttatttcttgatatagaaaagagacgaggcgccaagtcctttggcctttgccccctcacccaagcgttgccccagaaggagattttagaaccatcaccaatatcaatggtcgtcgatgccgcaaaaagcagtctatcaacatcagagcaaggaatctctaagttgtcccaaatattctgtgatgaggtgcaattatgccagagccatcgcgcgcgcaaggcacgcgcaaaagcgcccaagtcaagaactcccaagcccccaagggattttggcctcgccacccgtttccagttgactttgcactttccgcccgtcagtcgttcagaaccagcccaaaggaattgtcttcttttggagtctagaaggctaatcgttgccttgggagcattaagggcggttaatagataaattggttgtgaggtaagcactgttttcaccagatttaagcgccctgccactgagaaatttctcccattccagctgctcagtttgttcaatactttgtccaccaaaaactggaagtgctccttcctgagtctagttgtggagagagggaggcccaggtaccggatcgggaaggttgctcttctggctgggaagcaactaagaatgtcatcaaggggtagcccctggcaacagattgggacgatcatggacttctgaaaattggtcatcagaccagaggcctcgccaaatgaggtgagcaacttgacaattgtctcaatatcctcttttttcggcttaacaaacaaagctgcatcatcagcatatagcgagatcctaatgctgggcgagctgtttcccaacttgctcaatgctccactgtccgcggcgatctttagaattttttgcaaagggtctatcgccaagacgaacagaagaggggagagaggatcgccttgcctgagacctctctcatgatgaataggagggttagggaccccgttaacgagcactcttgatgttgaggtggagaggatagaagcgatccagtcagtccacctcacagggaatcccaaattgcggagtaaggcaatcaagtaatcccagcggacggagtcaaaagctttttcaatgtctagcttgaggaatagcgtgggcgaattaatacgctggaagcgcctaacagcgcttctaactgcaaggaagttttcatgaatgctccttttttgaatgaaggcactttggcaaggtgaaactaactcattcattctcggcgccagacgaagagccagggttttggtgataatcttaatgaaagaatggatgaggcttataggtctgaagtccccagctacctccgcgccttcctttttggggattagaatgatgtttgctgaattgattaattggaggttgaggcatcgattattatagaaagcattcactgcagccatgagatcatgtcttataatggtccaacaagatttaaggaaaacaccagtgaagccgtccggccctggagccttatctcctggtaaaagatcaatacttctcttaatttcctcctcggagaacggcgcgtcgaggcttgatagatcaaactgctggtcagagataatgtcccagttaaggtcgatagatctaggggttggccgctttaaagcattatggaagaaattttgtagctcttgcgctttttcattgtgcgagaagacccacccattaccgctccgcaaccgttgaatgaaattttttcgcctcctggagccagctttccggtggaaaaatttagtgttggcatctccgaatttaagccaaagcatgcgtgagttttgcctgtttcgtgccctttcaattaccgcatagccaaggatgcgcatcttcaatctatttcggaggttcacttccatgtcggacagtcccctattttcttgtgccatgtccagtcttagaataacttctagggccatatacataaagagtctagcatcaggtattaacttggagctccattccttaagcgccttggccgtgaactgcagtttgtagtacagcctatgaaaaggctcacgatgttgggtcggtgccagccaggcttgctcaactgtatgctggtaacctggtaatttggtccagaaattctcaaatctaaaggaacgtggacgcctcggcatagtagtattggataggagcaacgggcagtggtcagagaccgaggatgatagtgcatgcagaccaaatattccgaacatctcctcccattcagagttgcagaagaatctgtctagtcttacgagagtgggatgtcgtctctcattgctccaagtgaacttcctgttttgcaaaggaatttctttcaagtcgcaaatgtcaagagcttgcctgaacagaagcattaggcgagggttgactctagaattgtttttgtcgcttgctttgtatgtgcagttgaaatccccaaggaccaaccagggggaaggtgaaggaggcctctgtgcactcatctctcttagaaaatcaggcttgcggcctctacaagatggtccatagacgactgtcaggtagaaggaagcacaacgatccttaagagagacatttgcagatatgtggaattctccgatagtaaaattggacaattcgagtaggtcgctatcccaaagcaaaagaataccaccccgtgttccactaattccttccgcaggtttaaaactgaatttattaagctttggtcctccaagcgccatcacaatggacctgtcgaccgttgataatttagtctcttgcaaacaggcaagatggcaagtggtggtggagatcatcgcgcgcactgcatctcggcgcgcttgcaaatttaaacccctaacattccagcacaggatgctaaagtcagacatggaggagaaaagcacctcgattaattgccgacagctggatgaaattgcagcatcctcttggatctcagctatagcatctccagcaattcccagcaaggccttgtcgaggcgaactgtgtctggcgtatccagattgaacagagcatctagggccgtccccatctccacagtcagtggcttcttgaa

SEQ ID NO: 104718 - DNA, 213 bp, Zea Mays
ggcgcactgggagctttgctggtctacgacatcaccagacggaagagcttcgatcacataccccgctggctagatgagctccgagcccatgctgacaagaacattgtgataatgctggttggcaacaagagcgatctcgaggagcagcgggctgtgagcactgaagacgccaaggagtttgccgagaaggagaacctcttctttttggagacc

SEQ ID NO: 104719 - DNA, 907 bp, Zea Mays
ccgacggagctcatctctttgagcgggagtgctggactgcagctgccagctgcatttgcgtgcagcactgcctgcgcctgctgtgccgcccagtccaatggagagggccgcgtcggtcatctcctcgctcctcggcggcggcggcggctccggggcacaggcggcaacggtgaagtccgtcctcgtgtaccccatcaagtcctgcaggggaatctccgtgccccaagcccccatcaccgccacggggttcaggtgggatcgccagtggatgctcgtcaactccaaagggagagcatgcacccagagggtggagcccaagcttgctctggttgaggtccagatgccgccggaggcctttgccgaggactggcaccccacgcccgacgaccacatggttatcagagcacctggaatggaacccttgaaggtccctctttctgtggaatgtgccacaatcagtgatgtctctgtgtgggagtggactggcgctgcttatgatgaaggtgctgaagcagccgaatggttttccacatttttggggtgcccaactcgactggtgcgctttaacgaagattcagaaactaggctgactgaccctgactatgcacgaggttacaaaaccatgttttctgatggcttcccttatctgatagtctctcaggtgttgttttgcatatattccatggttttcagataaatctatctgcaaatgttgctaaacaaaaacctttacctgacaatgcacatctgttttcagggctcattggatgcattaaatgagatactcaaagagcctataccaattaaccgcttcagaccaaagttagttgtgcatactgcgcgcttgtgtttgactactttctaaatgacttattttggttaggccaagtttgaatacactaatggg

SEQ ID NO: 104720 - DNA, 1432 bp, Zea Mays
ccgacggagctcatctctttgagcgggagtgctggactgcagctgccagctgcatttgcgtgcagcactgcctgcgcctgctgtgccgcccagtccaatggagagggccgcgtcggtcatctcctcgctcctcggcggcggcggcggctccggggcacaggcggcaacggtgaagtccgtcctcgtgtaccccatcaagtcctgcaggggaatctccgtgccccaagcccccatcaccgccacggggttcaggtgggatcgccagtggatgctcgtcaactccaaagggagagcatgcacccagagggtggagcccaagcttgctctggttgaggtccagatgccgccggaggcctttgccgaggactggcaccccacgcccgacgaccacatggttatcagagcacctggaatggaacccttgaaggtccctctttctgtggaatgtgccacaatcagtgatgtctctgtgtgggagtggactggcgctgcttatgatgaaggtgctgaagcagccgaatggttttccacatttttggggtgcccaactcgactggtgcgctttaacgaagattcagaaactaggctgactgaccctgactatgcacgaggttacaaaaccatgttttctgatggcttcccttatctgatagtctctcagggctcattggatgcattaaatgagatactcaaagagcctataccaattaaccgcttcagaccaaatattttagtggaggggtgccacccatatgcagaggatatgtggaaatcagtaaagataaacaagttaacatttcaaggtgtgaagttatgtggccgttgcaaggtccctacaattaaccaagacactggaatacctagccctactgaaccaactgaaactctgcagacatatcggtcgggtgaagtgctgcttcgtagccacaaaaacaaacgccaggtgtactttgggcaaaatgcagtctgcaaggaatctctgtcagcaaatggggaaggaaggatcgtcaaggtcggggatccagtttaggccttgttcgtttacatcggattgtacccggaatcattccggctaatcaaagtttatataaattagagaagcaatccggctcggaatcgttccgacccaccaatccgacacaaacgaacaaggccttatgtgacacagtcgttctcttcatctgttgaagtgccagcctgagtgaccgaatcaggacggctatgtaacaaccacttgtataatttttagcactattttagatttatatttgctgaggaaagttaaattaatatttacgaagttttaagtttaagtttaaagagttttagttaagtttttctataagaaataattgtttattctccattatattaaaatcagcgtggatatttaatttgagagtactaaaaaatattgaggttaagttatttt

SEQ ID NO: 104721 - DNA, 1318 bp, Zea Mays
ccgacggagctcatctctttgagcgggagtgctggactgcagctgccagctgcatttgcgtgcagcactgcctgcgcctgctgtgccgcccagtccaatggagagggccgcgtcggtcatctcctcgctcctcggcggcggcggcggctccggggcacaggcggcaacggtgaagtccgtcctcgtgtaccccatcaagtcctgcaggggaatctccgtgccccaagcccccatcaccgccacggggttcaggtgggatcgccagtggatgctcgtcaactccaaagggagagcatgcacccagagggtggagcccaagcttgctctggttgaggtccagatgccgccggaggcctttgccgaggactggcaccccacgcccgacgaccacatggttatcagagcacctggaatggaacccttgaaggtccctctttctgtggaatgtgccacaatcagtgatgtctctgtgtgggagtggactggcgctgcttatgatgaaggtgctgaagcagccgaatggttttccacatttttggggtgcccaactcgactggtgcgctttaacgaagattcagaaactaggctgactgaccctgactatgcacgaggttacaaaaccatgttttctgatggcttcccttatctgatagtctctcagggctcattggatgcattaaatgagatactcaaagagcctataccaattaaccgcttcagaccaaatattttagtggaggggtgccacccatatgcagaggatatgtggaaatcagtaaagataaacaagttaacatttcaaggtgtgaagttatgtggccgttgcaaggtgtactttgggcaaaatgcagtctgcaaggaatctctgtcagcaaatggggaaggaaggatcgtcaaggtcggggatccagtttaggccttgttcgtttacatcggattgtacccggaatcattccggctaatcaaagtttatataaattagagaagcaatccggctcggaatcgttccgacccaccaatccgacacaaacgaacaaggccttatgtgacacagtcgttctcttcatctgttgaagtgccagcctgagtgaccgaatcaggacggctatgtaacaaccacttgtataatttttagcactattttagatttatatttgctgaggaaagttaaattaatatttacgaagttttaagtttaagtttaaagagttttagttaagtttttctataagaaataattgtttattctccattatattaaaatcagcgtggatatttaatttgagagtactaaaaaatattgaggttaagttatttt

SEQ ID NO: 104722 - DNA, 1446 bp, Zea Mays
agctaataggtcgagtgcttcgctaccagccagccagtagtatcgagtatactactcacgccatcttgcactcctccgacaccgaggcagctccaagccatggccatggagaaggctgcctcctccctcttaggcggaggcggcggggagccggcagcgactgtgaaatctatcttcatataccctatcaagtcctgcaggggtctcgccgtgtcacaggcgctcatcatctctaccggtgccgtactgtgatccaccgtccatcttccgtccttggcgttcgttctcttcctcctctgggacgatgcccttgtctaatatctgttgtacgacgatgcccgtgtctaatatctgttgttccgtcttgcagggttccggtgggatcggcagtgggtggtggtgaacggcaaagggcgagcatacacccagagggtggaacccaagctcgctctggtccaggtagagttgccgccggaggccttcgccgaggactggcagcccacgccctacgaccacctggttatcagagcacccggaatggacacgctgaagatacctctagcagcggaacacaccacaatcgatgatgtctctgtgtgggagtggtctggctctgcgtacgatgaaggggctgaagtgtctgagtggttctccacttactttgggaagccaagtcgactagtgcgcttcaaagaagcatccgaaactaggccaactgatccatattacggccaaggccaaggttacaagatcatgttcaccgatcgcttcccatttctgatagcctctcagggttcattggacgcactaaatgagattcttaaagaacctgtaccaatgaaccgcttcagaccaaatattttagtggatggatgcaacccatactcagaggacctgtggaaaaccataaagataaggaacaattggatctataccattaaaagatccaaactttaggtgccaagcattaatcaagaggatggaatacctggcactgaaccaaatgaaactctacagacatttcggtccgaccaagtgcttcgtccaagccacaaaaataaacgacaggtgtactttggggtgaatttagtctgcaaggaatctctatcaggaaaggacgaaggaaagatcatcaaggttggcgatccagtttatgttgtgcaggcattcgattcttctaatgaagccctagtctgattcagggttaaaaatagtgacagtgtgttcaaaaatcaaaataagtgagtttgttatgcgcactggagaaacaaaaatcagcgggctgttaaaactgttaatgagacaataaaactcctgctgctggacagtaattatgagttagatgtaccttcatcaggggtttatttacctctatgatattacatagtataccttgtacatcagaatgatacaaaacaataagtcccaaaaaggaaggtgagttag

SEQ ID NO: 104723 - DNA, 1416 bp, Zea Mays
agctaataggtcgagtgcttcgctaccagccagccagtagtatcgagtatactactcacgccatcttgcactcctccgacaccgaggcagctccaagccatggccatggagaaggctgcctcctccctcttaggcggaggcggcggggagccggcagcgactgtgaaatctatcttcatataccctatcaagtcctgcaggggtctcgccgtgtcacaggcgctcatcatctctaccgggttccggtgggatcggcagtgggtggtggtgaacggcaaagggcgagcatacacccagagggtggaacccaagctcgctctggtccaggtagagttgccgccggaggccttcgccgaggactggcagcccacgccctacgaccacctggttatcagagcacccggaatggacacgctgaagatacctctagcagcggaacacaccacaatcgatgatgtctctgtgtgggagtggtctggctctgcgtacgatgaaggggctgaagtgtctgagtggttctccacttactttgggaagccaagtcgactagtgcgcttcaaagaagcatccgaaactaggccaactgatccatattacggccaaggccaaggttacaagatcatgttcaccgatcgcttcccatttctgatagcctctcagggttcattggacgcactaaatgagattcttaaagaacctgtaccaatgaaccgcttcagaccaaagtgccaagcattaatcaagaggatggaatacctggcactgaaccaaatgaaactctacagacatttcggtccgaccaagtgcttcgtccaagccacaaaaataaacgacaggtgtactttggggtgaatttagtctgcaaggaatctctatcaggaaaggacgaaggaaagatcatcaaggttggcgatccagtttatgttgtgcaggcattcgattcttctaatgaagccctagtctgattcagggttaaaaatagtgacagtgtgttcaaaaatcaaaataagtgagtttgttatgcgcactggagaaacaaaaatcagcgggctgttaaaactgttaatgagacaataaaactcctgctgctggacagtaattatgagttagatgtaccttcatcaggggtttatttacctctatgatattacatagtataccttgtacatcagaatgatacaaaacaataagtcccaaaaaggaaggtgagttagacgactttgtctagataggatggaatggatggctgatggagtctcttgtgccctatacaaaatcagtgacccactgcaagttccttcagttacatcagaaattcagaatagcatgtgtacctctagtttcaaggatcttccaaagccattcagggactatatcaaaaccatatcagtaacttagtggttattagtcaaggct

SEQ ID NO: 104724 - DNA, 1614 bp, Zea Mays
gtatcatcctgctggcgcggcacaagacgccaccgagccaagaatttgcatcctcatcctgcggctgtcagtgtcaagcagccaggctcaggggtaaggtttcagcaattcagctccctcgcctccgccgcggcaccggcactacgagtgcttcgctaccagccagccagcacactctacgagtcgccatcttccactccaccgaggcagctccaagccatggccatggagaaggccgcctccttcctctcctccctcttaggcggcggcggcggggagccggcggcgactgtgaaatctatcttcatataccctatcaagtcctgcaggggtcttgccgtgtcacaggcgcccatcacctccactgggttccggtgggatcggcagtgggtggtggtgaacgccaaagggcgagcatacacccagagggtggagcccaagcttgctctggtccaggtggagttgccgccggaggccttcgctgagaactggcagcccacgcccgacgaccacctggttatcagagcacccggaatggacacactgaagatacctctaataacggaacacaccacaatcgatgatgtctctgtctgggagtggtctggctctgcgtatgatgaaggggctgaagcgtctgaatggttctccacttactttgggaagccaagtcgactagtgcgcttcaaagaagcatcggaaactaggccaaccgatccagattatgcccaaggttataagatcatgttcaccgattgcttcccatttctgatagcttctcagggttcactggatgcactaaatgagattcttaaagaacctgtaccaatgaaccgcttcagaccaaatattttagtggatggatgccacccatactcagaggacctgtggaaaaccataaagataaacaacctaacattcctaggtgtgaagttatgcaaccgctgcaaggtgccaaccattaatcaagaggatggagtacctggtactgaaccaactgaaactctacagacttttcggtccgaccaagtgcttcgtccaagccacaaaaataaacgacaggtgtactttgggcagaatttagtctgcaaggaatctctatcaggtgaaggaaaggtcatcaaggttggcgatccagtttatgttgtgcaggcattcgcttcttctaatgaagccccagcctgattcagggttaaaagtagtgacagggtgttcaaaataagtgagtttgtcttgcacactggataaacaaaaaacagtgggctgttgaaactgttaatgagacaataaaacacttgccgctggacagtaattatgaattagctgtaccttcatcaggggcttatttacttctatgatattacataccttgtacatcagaataatacaaaacaataagaagtgccaaaaaaggaggtgagttagaagagactgtctaaataggatggaatggatggctgatggagtcttttgtaccctatacaaaatcagtgacccactgcaagttccttcagtaacatcagaacagcatgtttgtctatagttccaaggatcttccaaagctcttcaggccacgattgatactaaagaaattgtcacatgaacagtgcagtg

SEQ ID NO: 104725 - DNA, 1625 bp, Zea Mays
gtatcatcctgctggcgcggcacaagacgccaccgagccaagaatttgcatcctcatcctgcggctgtcagtgtcaagcagccaggctcaggggtaaggtttcagcaattcagctccctcgcctccgccgcggcaccggcactacgagtgcttcgctaccagccagccagcacactctacgagtcgccatcttccactccaccgaggcagctccaagccatggccatggagaaggccgcctccttcctctcctccctcttaggcggcggcggcggggagccggcggcgactgtgaaatctatcttcatataccctatcaagtcctgcaggggtcttgccgtgtcacaggcgcccatcacctccactgggttccggtgggatcggcagtgggtggtggtgaacgccaaagggcgagcatacacccagagggtggagcccaagcttgctctggtccaggtggagttgccgccggaggccttcgctgagaactggcagcccacgcccgacgaccacctggttatcagagcacccggaatggacacactgaagatacctctaataacggaacacaccacaatcgatgatgtctctgtctgggagtggtctggctctgcgtatgatgaaggggctgaagcgtctgaatggttctccacttactttgggaagccaagtcgactagtgcgcttcaaagaagcatcggaaactaggccaaccgatccagattatgcccaaggttataagatcatgttcaccgattgcttcccatttctgatagcttctcagttgtactgcagggttcactggatgcactaaatgagattcttaaagaacctgtaccaatgaaccgcttcagaccaaatattttagtggatggatgccacccatactcagaggacctgtggaaaaccataaagataaacaacctaacattcctaggtgtgaagttatgcaaccgctgcaaggtgccaaccattaatcaagaggatggagtacctggtactgaaccaactgaaactctacagacttttcggtccgaccaagtgcttcgtccaagccacaaaaataaacgacaggtgtactttgggcagaatttagtctgcaaggaatctctatcaggtgaaggaaaggtcatcaaggttggcgatccagtttatgttgtgcaggcattcgcttcttctaatgaagccccagcctgattcagggttaaaagtagtgacagggtgttcaaaataagtgagtttgtcttgcacactggataaacaaaaaacagtgggctgttgaaactgttaatgagacaataaaacacttgccgctggacagtaattatgaattagctgtaccttcatcaggggcttatttacttctatgatattacataccttgtacatcagaataatacaaaacaataagaagtgccaaaaaaggaggtgagttagaagagactgtctaaataggatggaatggatggctgatggagtcttttgtaccctatacaaaatcagtgacccactgcaagttccttcagtaacatcagaacagcatgtttgtctatagttccaaggatcttccaaagctcttcaggccacgattgatactaaagaaattgtcacatgaacagtgcagtg

SEQ ID NO: 104726 - DNA, 1274 bp, Zea Mays
gtcagtgtcaagcagccaggctcagggggttccggtgggatcggcagtgggtggtggtgaacgccaaagggcgagcatacacccagagggtggagcccaagcttgctctggtccaggtggagttgccgccggaggccttcgctgagaactggcagcccacgcccgacgaccacctggttatcagagcacccggaatggacacactgaagatacctctaataacggaacacaccacaatcgatgatgtctctgtctgggagtggtctggctctgcgtatgatgaaggggctgaagcgtctgaatggttctccacttactttgggaagccaagtcgactagtgcgcttcaaagaagcatcggaaactaggccaaccgatccagattatgcccaaggttataagatcatgttcaccgattgcttcccatttctgatagcttctcagggttcactggatgcactaaatgagattcttaaagaacctgtaccaatgaaccgcttcagaccaaatattttagtggatggatgccacccatactcagaggacctgtggaaaaccataaagataaacaacctaacattcctaggtgtgaagttatgcaaccgctgcaaggtgccaaccattaatcaagaggatggagtacctggtactgaaccaactgaaactctacagacttttcggtccgaccaagtgcttcgtccaagccacaaaaataaacgacaggtgtactttgggcagaatttagtctgcaaggaatctctatcaggtgaaggaaaggtcatcaaggttggcgatccagtttatgttgtgcaggcattcgcttcttctaatgaagccccagcctgattcagggttaaaagtagtgacagggtgttcaaaataagtgagtttgtcttgcacactggataaacaaaaaacagtgggctgttgaaactgttaatgagacaataaaacacttgccgctggacagtaattatgaattagctgtaccttcatcaggggcttatttacttctatgatattacataccttgtacatcagaataatacaaaacaataagaagtgccaaaaaaggaggtgagttagaagagactgtctaaataggatggaatggatggctgatggagtcttttgtaccctatacaaaatcagtgacccactgcaagttccttcagtaacatcagaacagcatgtttgtctatagttccaaggatcttccaaagctcttcaggccacgattgatactaaagaaattgtcacatgaacagtgcagtg

SEQ ID NO: 104727 - DNA, 219 bp, Zea Mays
atgaagagggccgactgctgcacagcgagatacaagcgcaggcagagtccttcggtgaaatgcaagggggataatctaccgagcaaagcccagattcttcatagggccatgcgtcctgccagccgactttctgatattcttcgatcaattgctgcgtcaacagagttcatctggagcaagactcttgtcacattctcgaccaaacttaagctacaataa

SEQ ID NO: 104728 - DNA, 1274 bp, Zea Mays
tcccacctcacctcccttcccttcccctctccgagtccgctctccgctccaatgccgttgcctctctcctccacctgcttcttctcataaacgcttccggcctcccggagtcccggacacaaaccctagcattcaaccacgccgagctcgccggaacaagcccaacccgagcccaatcccgctcgggccccagccgatccgacggctcctcaccagcacaatccggggtaccccgcggatgctagcctgatcgggtccccacggtcgatgggttcgcccgggtccgccaatggcagacgcggcgactatgtgaggatcccggaggaggcggaggtggcgtccaagggggagggagatgccgcggcggccgtcaaggcggccgcggcggcggagtgccctagggtgctgcggtgcagcgcgatccggtggtgggccaaggtcgccgtgctcgggatcgtccttgctggggccggagctgccgcggtcgtcttcctcggcccgctccttatcaagaaggtttagaatattaggtcagatcagacgcttatatgtataataagtcaatagcacgtgcaaggagcagctgtaagattgttgtacctattcttcactgggaatcaacaacgttcagcaggccatctattgctctaatatgtttcggcacaatcgcattattcccaagtgttttgttaccttcttcgcccttcatgtggcttgcggggatgacttttggatatctttatggttttttaataatcacagtgggtatgagcataggcatgtcattgccgtattttataggttctgcattccactgtaggatacatagatggctggagaagtggccaaagaaagcagcttttgtaaggcttgctggcgagggagattggcaccatcaatttaaggctgtagctttactcaggatttctccatttccatatatagtttttaactatgcttctgtggctacgaatgtcaaatattacccatatatcgctggttccatggctggaaccatacatgaaactttccttgcaatatacaggtttgtacttgcctcatgccttttattctttggatgtactttttttcctgctcacctgagcatgcctaatacacattgtggtgaatttttgttattaaatcgatatggaacactttggatgaaacctttggcgtgttatatcagatttactctttttgtgatagctggtcctggtttttgtagtcacctattcattaatgcagtttgatgggttgctgtccttataatt

SEQ ID NO: 104729 - DNA, 1490 bp, Zea Mays
tcccacctcacctcccttcccttcccctctccgagtccgctctccgctccaatgccgttgcctctctcctccacctgcttcttctcataaacgcttccggcctcccggagtcccggacacaaaccctagcattcaaccacgccgagctcgccggaacaagcccaacccgagcccaatcccgctcgggccccagccgatccgacggctcctcaccagcacaatccggggtaccccgcggatgctagcctgatcgggtccccacggtcgatgggttcgcccgggtccgccaatggcagacgcggcgactatgtgaggatcccggaggaggcggaggtggcgtccaagggggagggagatgccgcggcggccgtcaaggcggccgcggcggcggagtgccctagggtgctgcggtgcagcgcgatccggtggtgggccaaggtcgccgtgctcgggatcgtccttgctggggccggagctgccgcggtcgtcttcctcggcccgctccttatcaagaagattgttgtacctattcttcactgggaatcaacaacgttcagcaggccatctattgctctaatatgtttcggcacaatcgcattattcccaagtgttttgttaccttcttcgcccttcatgtggcttgcggggatgacttttggatatctttatggttttttaataatcacagtgggtatgagcataggcatgtcattgccgtattttataggttctgcattccactgtaggatacatagatggctggagaagtggccaaagaaagcagcttttgtaaggcttgctggcgagggagattggcaccatcaatttaaggctgtagctttactcaggatttctccatttccatatatagtttttaactatgcttctgtggctacgaatgtcaaatattacccatatatcgctggttccatggctggaaccatacatgaaactttccttgcaatatacagtgggaaacttttacagagcttggctgtagcaactagccaagggtccttcttgtctgtggatcagatcatctacaatggaatcggatttatagttgcagcagcttctactgccacgatcactatttatgcaaagaaagcacttcaaaggctccaagcagaggaggagatattgtgagcgcatgaggtccaagcccaggatcaaaacccataacgctagtttcctttcaggtgtattatacatgaagggcttgtttggcagcaaggggggaggggaatctagcccctccaaccccctccatttcccttgctgccaaacatgcctgaacagttgctactaatctggtttcctgtgtcgactacctgactgccactaccatctgaggagagggaagggtgggtgctgaagcaattgtaaagaaaaacagacccagaaaaacttacgttttcggttcttgtttagttttctgtaaagagaactatcaacttcagtgtattgcattgcgcgatgtagattcccaa

SEQ ID NO: 104730 - DNA, 1935 bp, Zea Mays
tcccacctcacctcccttcccttcccctctccgagtccgctctccgctccaatgccgttgcctctctcctccacctgcttcttctcataaacgcttccggcctcccggagtcccggacacaaaccctagcattcaaccacgccgagctcgccggaacaagcccaacccgagcccaatcccgctcgggccccagccgatccgacggctcctcaccagcacaatccggggtaccccgcggatgctagcctgatcgggtccccacggtcgatgggttcgcccgggtccgccaatggcagacgcggcgactatgtgaggatcccggaggaggcggaggtggcgtccaagggggagggagatgccgcggcggccgtcaaggcggccgcggcggcggagtgccctagggtgctgcggtgcagcgcgatccggtggtgggccaaggtcgccgtgctcgggatcgtccttgctggggccggagctgccgcggtcgtcttcctcggcccgctccttatcaagaagattgttgtacctattcttcactgggaatcaacaacgttcagcaggccatctattgctctaatatgtttcggcacaatcgcattattcccaagtgttttgttaccttcttcgcccttcatgtggcttgcggggatgacttttggatatctttatggttttttaataatcacagtgggtatgagcataggcatgtcattgccgtattttataggttctgcattccactgtaggatacatagatggctggagaagtggccaaagaaagcagcttttgtaaggcttgctggcgagggagattggcaccatcaatttaaggctgtagctttactcaggatttctccatttccatatatagtttttaactatgcttctgtggctacgaatgtcaaatattacccatatatcgctggttccatggctggaaccatacatgaaactttccttgcaatatacaggtttgtacttgcctcatgccttttattctttggatgtactttttttcctgctcacctgagcatgcctaatacacattgtggtgaatttttgttattaaatcgatatggaacactttggatgaaacctttggcgtgttatatcagatttactctttttgtgatagctggtcctggtttttgtagtcacctattcattaatgcagtttgatgggttgctgtccttataattataaagatggcttgtgatatatatttacgcatgaatacttgagtaatgacgtgcatcctatatgtgctatgttgatgtgagcagttgagcataaactcacaactcaaacatattgtctgagccgctgtaagattgtattcaccatcggtcatgagaaactaatgccaatttttgtaaacagtgggaaacttttacagagcttggctgtagcaactagccaagggtccttcttgtctgtggatcagatcatctacaatggaatcggatttatagttgcagcagcttctactgccacgatcactatttatgcaaagaaagcacttcaaaggctccaagcagaggaggagatattgtgagcgcatgaggtccaagcccaggatcaaaacccataacgctagtttcctttcaggtgtattatacatgaagggcttgtttggcagcaaggggggaggggaatctagcccctccaaccccctccatttcccttgctgccaaacatgcctgaacagttgctactaatctggtttcctgtgtcgactacctgactgccactaccatctgaggagagggaagggtgggtgctgaagcaattgtaaagaaaaacagacccagaaaaacttacgttttcggttcttgtttagttttctgtaaagagaactatcaacttcagtgtattgcattgcgcgatgtagattcccaagtctaaagttgtttcctcttggatgctggcagcgt

SEQ ID NO: 104731 - DNA, 336 bp, Zea Mays
gaagtccgagagtaccagaagtatatggttgaaaaggctctgtttaccaatacgttaatagctttgccaactggacttggcaaaacttttattgttgaggtagtgatgtacaactactttcgatggtttcccgaaggaaaaataatatttacctgtccttcacgtcctcttgttactcagcaaattgaggcatgtcacaatacagtgggaataccacaggtaccacaaataatctactgttggtgattttcttatttttatttaggtcgaagtctatttttggccatccaattattgcccgagtttgtttttggacatgcaactcaaaaactataa

SEQ ID NO: 104732 - DNA, 110 bp, Zea Mays
gagtatacccagttctctctctatgtttatcctaaatttagaaagcaatactattggggggcacttccattcaaaatcgatgactgtctttttgacccattattatagag

SEQ ID NO: 104733 - DNA, 3087 bp, Zea Mays
agcaaagctgaataacagatcactcccgtctcccatccccttcctctcctagcaatcctctgccggagtccaagctccaatcagatccggacccacccctccccctccgaagaagccctaggcatgccccgcagccgatgaggtcgctccgccgggtcctcatcccgctcgtcctcctcgcaggactcgtcttccgcgtggacgacggcggcggcgcgttcctcccgcccccgccccccgcgctccccgctcccccgccccgcctcgcacttaacggagaagcggctccggaggatgatggggcggcggtttcccgctccacggagatcgtcgcggcggaggcgcgctccaccgagttcgtcgccccagcgaggcccaagaagcagagcttccgggagctccttgtccggccgcagcctgcgcgccacgagccggctagtttggttaccgacgaggcgaaagccgaatccagctctgtgcttcagttttgggataatggcacaattcagcttgtggacaaactgtcgcaatctcctctgtgggagatcaccacagggcctccactatcagaccagattaataccgctgagtctggtctgaattacctcatttatcctttcaatgagaacaagaacatgaatggtactgaactttgggaggtttataatgggaacaccgtgaggctcccatggaaattggaggaattcgttgccagaagcccatacattcgggattctgttgttactattggatcaaaagtttcaaccgtttttgttgttgattctgatagtggtgagattatttacaggcacagtattccagctgtgttaaatgaattggaaggaccagggattgaaggaacaccatccaagctaaatgcccgtactaattatgacagcgataatatcatggtgcttgtgagaaatgactattctcttagtgcatcagatcttggcaagcatttatttaactggacaagaacttctttctctgtgaaatacaaccaccctgacattccatgcatcagaagtgagggtttgccacttgctttacctgattcacgttcagctaatgtaattgtcttgaaagaaggtaccccttttatttccatccatggttctgatgccctggaaccagttcaaaccccaaggaagctaccaaacactgctgggaagtcagatatcgtattggatgattctcaaaatcaaacgtatgatggtgctcgatctcatgtcatctctgctgattctgaagctaccgaaacccccactaggaacacttatgtatggttattttcttttttccccatatttttggtcattggttatctgttgagcttgacctctgcaagcaagtcttgcaggcaatttgtgattcagcttattaagccattcacgcgcgacaagaaatcggtggacattagaggcaggtcagagggatctcctaaaagaagaaaaacacggaagaaggatggacttgtcaatagccctgagaccttgacagcatctgacaaggagtgcagtgaaactggtgggtcaactgaggcaccaatggaaaattctgcactaaaagatgcccttggtggtcgtcacattggtaaactatatgtctccaataaagaaattggtagagggagcaatggcacagttgtttttgaaggatcgtatgatggtcgtcaagttgctgttaaacgtctgctgcgttcccacaatgacatagctgaaaaggagactcagaatcttattatatctgatcatgatccaaatattgttagactatatggttgtgactatgacagcgattttgtttatatctcccttgagaggtgtcactgcagtttggctgatctaattcaaaaacactcatatctgtcttctggagagtctgtttctaacaatgaggccagtttcagcatcaagtcaaagatttcaaatgttaagggaatggatgtggaattgtggacacatgatgggcttccttcagcacaactcctgaagctgatgagagatgtggttgctggccttgtgcatctgcatgacttgggaattattcatcgtgatttgaagcctcaaaatgtcttaataagcgcaggaggacctattagagcaaagctttctgatatgggtatcagtaagcacctgcaagatgacatgacttctgttagccatcatggtacaggatttggaagctctggctggcgggcacctgaacagcttcgtcatggtcgtcaaactcgtgcaatggatctttttagtttgggctgccttattttctattgtatcactaaaggcaagcatccgtttggtgagtactatgaaagggatgtgaacattgcaaacaatcgctttgatctctttatggtggactacataccagaagcagtccatcttatatctcatttgttacaaccaaacccagaggcaagaccgacagcagtatatgtcatgcaccatccactcttttggagccctgaattgcgtctttcgtttctaagggataccagtgacagaattgagaaaaccagtgaaactgacctcataaacacactggaaagcataggatctttggcgtttggtggaaaatggggagagaaattggatgctgctttggttacagacatgggtcgttatagaaaatataactttgggtctattcgtgatcttctgaggtatatcagaaataaatcgggtcattacagagaactttcagatgatctcaagggcatacttgggtcactaccagaggggtttgatcgctattttgctagccgatttccaaagttgctaattgaggtgtacaaggtcttgtgggtgcactgcaaggacgaggaagctttcagtaaatatttcaaaggaagttagttatagctggagaggattgtcctttcctactgtacatactaaccctgatgtagaacaagtacatgtgtaccatatgactcgtattataggataaaaaagagctcaatctgtacattatgcaccggtatggtaggaccgtgtcatttgcacagcctaatgctctgatggcttggacattgtgcatcgtggaatcttcgtaatcgttgtgtgtttgatgaagtcttaa

SEQ ID NO: 104734 - DNA, 645 bp, Zea Mays
ttttttcctttagtattttaaacctttgatacatgacatcacttacatatgagtaagtagcctacctctggtggcaaaatgtttgactatcaccatattgattatagaagggtattgcttcagagatttgtaggaattaggatagttcatattttttatcttagtatttttaggaaaaaaaactaaatttcctagtgcagttttaatacgatgtatgctttatattgcaaatttgttctgttctttagtcaattcaacctttcttttgtttctcataagctcacaattgatggatacaaattccagggcatacttgggtcactaccagaggggtttgatcgctattttgctagccgatttccaaagttgctaattgaggtgtacaaggtcttgtgggtgcactgcaaggacgaggaagctttcagtaaatatttcaaaggaagttagttatagctggagaggattgtcctttcctactgtacatactaaccctgatgtagaacaagtacatgtgtaccatatgactcgtattataggataaaaaagagctcaatctgtacattatgcaccggtatggtaggaccgtgtcatttgcacagcctaatgctctgatggcttggacattgtgcatcgtggaatcttcgt

SEQ ID NO: 104735 - DNA, 3408 bp, Zea Mays
atggcgagccatcagcgcggaggaggtcgggttggcggcggcggctggggtcaggcgaaccccaacgttattcagggccaggcggggcggggctacggcggcggtcgaggtggtcagtactacggcgacgacagccgcggtcgaggtggtcagtactacggcgacgacagcggcggacgtggcggcggcaggggcggtggtcgtggcttcgacggccgcgacggcggcggataccaggaaggtcgtggcgggggccgcggcggcggcggataccaggaagggcgtggcgggggccgcggcggcggcagataccaggaaggacgtggtggtggccggggtggcggcggctactactatgaaggacgtggcggggaccgtggtggcggcggctactatggaggacatggtgggggctaccaggaaggccgtggcgggggccgaggtggtcgcggctaccagggacagggaggcagcgactacggccgcgagcgcgggcatggcggcctacaaaccccacgtcctgctctgcgccaagccggtccgcccctcgcggaccgctacgcggccgacgcagccgcgttgagggacaagttcaagacgatggacattcaccgcgacgagcccatgtttccagcgcgcccgggcttcggcgccgtggggacgccgtgcgtcgtcaaggccaaccacttctttgtcggcctcgtcgaaaagggcctgcaccactacgacgtggccatctcaccagagacgacgctaaggggcatatacaggcaagtcatgtcgaagctggtttccgagaaccggcagaccgagcttggcggccgcctgcctgcatacgacgggcagaagtcactgttcaccgccggagagctgcccttcaagaccaaggaattcgttgtcaccttgtctggcaggatggaaaggaggtacaaggtggtgatcaagcatgccacggcggtcagcctcgaccagctgttgatgctcatggcagggtacccaacggacatcccggcgcaggcgctgcaggtgcttgacattgtgctgcgtgacattgtgctcaacgaacgcaacaccatggagtacgttgcagttggccggtccttcttctcaccactcatagactcaatgggacccaagaaccttggcttgggtgtggagggatggaagggtttctatcagaccatcaggccgacacaaaaaggcttatctgtgatcatagacatttcttcatcagctttcattcgacccctgccactgattgactttgttatggagattctgaacaaagataacaggacctttagaagtattacttccatggatcttgtcaagctcaagaaagccctcaagggtatgaggattgaagtcacacaccgaggagacatacgccggaagtaccgaattgccagcttgacaaacagtcctccatcttcacagttctttgaatcatctgctggagttcagaagtccgtagcagattacttcagagaggcataccatctggaaatgcactatgattttctcccatgcctccaagttggcagtgatcagaggccgaattacctccctatggaggtttgcaagatagtagctggacagcaataccggaagaagttggaaggccaacaggtctctaaactaatggactccacctgccagcgcccatctctccgcgaggacaacatttgtcagattgttgagcaaaatgactacaataaaactgagcgtgcaagtgaatttggcatggaggttgattatcgtcctacttcagtgcaggctagagttctgccagctcccactctgaagtaccgtggcactggatctgacagtttgtgttgtccaaaggatggtcagtggaacatgataaaaaagcaagtagtagatggtgcaagggtgggcaactgggcctgcgttaacttttgtcaagagttgcgtgcagatggtgttggtaaattttgctctgatctggtcaagtggtctcgcactactggagtggacatggataacttgagacttccaatatataccgctcgtcctgaacaagctgaaactgatcttcgtaggctctatcaggatgctcggaacaagctaagagggcaaaagtttgatcttttgcttgctatactgccagagaaaaatggcagcttatatggtaatttcaaaaggatctgcgagacagagattggtatcatgtcgcagtgttgtttggataaaaatgttagaagtgcaggccctgcatattttgctaatgttgctattaagatcaatgccaagtttggaggaagaaacttagaatttgctaatcccaaagaaagcttaccgggtgttacaattgaaccaacaattatatttggtgctgatgtcactcaccctgccgctctagatgataccgccccttccattgcttctgttgttgcctcccaagactggcccaaggtggctaactataatgggattgtccgtgcacaaggtcatcgtaaagagctcatcaatggcctggaagacattgtcaaggaactcctacttgcattcgaggagaggtctaagcggagacccaagcagctgatcttctacagggatggcgtaagtgagggccaattcaaacaagtgctggaacaagaaatccctgagatagagaaggcatggaaagctctttacaatgagaagccaaagatcaccttcctagtggtgcagaagaggcaccacacaaggctcttcccaaacaacccaaatgatcgccaatgggcggacaagagtggaaatattctacctggcactgttgttgacaaggatatctgccacccaacagaatttgatttcttcctgtgcagccatgctgggatcaagggaactagccgtcctgcgcattaccatgtcctgagagacgacaacaacttcactgcagacgcgctgcagtctctcacatataacctatgcttcttgtattcaagctgcactcgctctgtgtcaatcgctcccccagcatactacgcccacaagttagcgttccgcgcccgcttctacgtcaaccaagactctgatgcggcgacaagtgtcggctcttatggttcatcagctccctctgctgctgctgctgctgctggtccgaagccgcttccggagatcaagggtgaactgagaaggctcatgttctactgctagtccttgaccacgggaaaccctttcctgaacaaggctttgctcttctgaagactgaacaaggctgctgcattatttattatgaacaagcctgaacaaggctgcattatactagcttaacgtttgtagtttgcattttatttcatataaacgatccaagtctttgccgaacttgattattatattcagttattcagcattcacgggacgctagagggaaaaatcgaaattttgaaacgctttggtgaa

SEQ ID NO: 104736 - DNA, 1709 bp, Zea Mays
caccagcagctataggtacgtgcacgcagtgcatggcgcaggagggctccgaggcctccgtcgccagctccccgccgccgccggcctcctcgtcctcctcctcgtggtggcgcgacatgcacccggcggcggctgcctacggcggcgcgtggccgccgcccccgcccaccgcggcgaggtggcccccgatggcggcctcgtcgtcgcgccaccagcagcagcagcagcaacacggcggcggccgcacgacgtcctccggcggcggcgccgacgacgacctctcggcctccaacgccaccatgacgtcgtcgtccttcaccaacacctccgccaccaaccgatccggcctcagcatggacgacgactccggcggtggcggacctgctgaggcggccgccgccgccgccgcagagagccaccacctctggaaccaagtcctcatcatgggcggcggcggcggcgaggttgggaggagcatgcacgacgcccacgacgacagcgagaacttcctcgagctgctcaactcgaggacgctcgtgccggagctcttcgccgaccctccggcctgcgactacctcaagaagatggagtacggcagcagccacggcggcggcgggtggccggaccaccaccagttcacgacagcagccgcgctggagaagcacctgagctccggctacggcggcggcgcgctcgcgcaccagcaccagcacgcggcggccggaggcgcgccggagcggctcacggcgaacctgtccgacctcgtgagcaactggtccatcgcgccgccgaacccgtgcctcggcgacgcgcaccaccaccaccgcaccggcgtcgtcgccgcggcatgcgataacgacaacgccaaggccggcatgttcctgggctccggcggcggcgtctgcaatcacgagataggcggacacggcgcgatgctggagggagcggcgacgggcggcggcggcggcggcggccaggagtttctccggcccgccgcaggcgcagggtacagctccatgctcgggctcagcaggaacaacaggacgatgtatatggaggcgccgtggggaagcaatgccgccggcgcgacgaggagcctgtcggacctgatatctttcggcggagctccgctgggaaaagcagaggaaccggcgccgcccacgtcaacgaaggcgctggcggagtacaagaagcaagggcacgacatcccttcgccggcgaagacgagtagcggaggtggaagcaaggggagctcggaggggaagaagaagagatcagagcagcaagggtcgtcggaagggaacaccaagaagtccaagagtgaggtctcctcgcccacgtcgtctctcaaggcatcatcgcaggtgcctaaagtgaagttaggagacaagatcactgcactgcaacagatcgtttcaccatttggaaagaccgatacggcatcagttctgtatgaggcgataaattacatcaagtggttgcacgaacaagttcagttgctgagtgatccatacatgaagactagtagcaaggactacaactacaacgcatggggaaggttagaagataaggagggcgccgagatggtggacctgcgaagtagaggcctgtgcttggtgcccgtctcatgcacgcctcaggcgtacagggacagcaacgacggcccagactactggacgcccccatataggagctgcttgtaccgatga

SEQ ID NO: 104737 - DNA, 905 bp, Zea Mays
caaatccgcggggtcagagagaaaagaaggcattggaattgaagcatggcgacaaaaaagaaaagaaaagaaaaggagaatctgtagaatgaacgagcatttctagccgagttcccttaccaacgagagaagaaatcgggcagagtcagggttgatctgcgctccacggcagcagcgtcgaaaggcagacgctaggacggcgaggacgcctacgggagagggggaggaggaggaagagcggcgagccgcgttcggcgcggaaggctcttgcctccggacgcgacttctctcctcccgtgcgtactcctgcacacgtggcgctggaaggaggaaacgagacttccacgaaacggtagccacatctccacaagttaaaaaaagtgggagaaaatgagcggtccgaaagctttatcctttcaactctcatgctccgcactccgcagttttcctgcttgctcgagctgctgccctgctgctccagtgctccacaaccagccggagtgagagaagccgtcaaacacctcgctctgtcgccgctcaccgtcaaatacgtcgctgcaacgccatctgcgacctccgtccttcgcgcctctggagccgtggagtctggcgtgggtaaatctggattttgaaggttatcttcaaaagttgatacgccctgccagctatgtgacccgccatcaggagcaatgaaacttacaggatcaatcacgtctccactcgtcatagcagtattgaatatgggatctaaatagaaaattattttattgttgttgtatcatgtgcgcctgccgccgctagtgaataaaaatttattgttgtgattggagaaattgtggcgggaatgacatcttgacatgttgtttggtgctaacttgccgccagatttgtttttggaaaaaaaa

SEQ ID NO: 104738 - DNA, 890 bp, Zea Mays
caccctcttctcctcttccaccgacggcgaccgcccccaattttctcctacccctccgccttcactgaggtccccgagatccgagtttccttgccctggtaaaccataatatcatcacgcctcgtgcccaaatcggacgcacgcactcccggtcgaattccctcgagcggagcagatttggatccggctcggccagatggatcccgaggacaccaccccaccggcgccgagccaaggtgatgcggagacaactccgccgccggtgttggaagtggcggcgggggaggacagcctagctagcgggggcgaggcggccgagcgggcccacgaggaggaggagctcgcgcgggaggtcatggagctcggcctccagaacgagtaccttaggtcccagattgctggcgtccgcccggcgggtgacgcggacgaggtccccgggcttgtgaggggctggaaggagcaggtggagaggatgagcagggaggtgcaggaacagcggctgacgcgggaggccacggagaaggccctggagcacgtcaacgtggcctatgctgaggctgacggcaaggtgcaggagcttacggccaagctggcacaagctgaacaaaaaatggaaaaggaactaaaagaacgcgatgacaaatatcttgagctggaaaccaagcttcagaggcttctcaagcgtgcaaaacaacgtatacaagatatacaaaaggaaaaagttgatctggaagctcggtttaatgaagttaatcagaaggctgagcaggctgcttctctgcaattagcagcacagcaggaactggaacgtgctcgtcagcaggctagtgagggcttaagatcaatggatgctgaaagacagcagttgcggacagtgaacagcaagtgag

SEQ ID NO: 104739 - DNA, 269 bp, Zea Mays
cagattagtcgactggaaagtgaattttctgcatacaaggtccgggcacatgcacttctgcaaaaaaaggatgctgagcttaccgcagctaaaagttcagatttcattaaagaacatgaagaggccataagggaagctgaaaaggaggtggcagctgctttagcagaaagagataaagcaatagatgatctccaaaaggcagaatccagacatggtgatgagattgaggcaaggtaggggtacctaatcttctgctcagcaaaataaaa

SEQ ID NO: 104740 - DNA, 1129 bp, Zea Mays
atcatattaagttgcatgcaccaaccagtcgaacccaaaagattaagctgataggagaaggtggacaattcacttatattatattccaacatgttgatgtccagatgtggtcaaagcagcctgtttggatgttgtagtttagaaaaatgtggtatcaagaaactagagttttaggatcagcgagatagtatcatatggtacaaaaagaggtctggaatgcattttctagaatctggacaacaaagcaccaccttttaggcaatactctgggtttaaaactaagagatctgttaaggagcatcttctagttttcaatcccccctctgatactttgtatcctacacaatttaaaataagacctattattttgagactatgttgatgatattattgcattgatgtcacaggttagcaacaatgatcatcaaagtcaaggacctgttaaggatacaatgagtgttgaattggctgagcaacaaattttgcttctcgcaaggcaacaagcacaacgagaagaggaattggctcagtcacagaggcatatcttagcacttcaacaagaaattgaagagctcgagcgtgaaaatcgtctccatgatcaacaggaagcaatgttgaaaaccgagcttcgcaatatggagagatcacaaaagcgagaaggaatagatatgacatatctcaaaaatgtgattctaaaacttcttgaaacaggggaagtgggagcgttgttgcctgtggttgggacgttactacagtttagtcctgacgagctcaagaagtgccagcaaggtgtcctttcgagtgtggtctcttcacaagctactgcagtgtcagatggcacaaccacacagaattcgttctttgcaagattctcgttctgaggcattgccctcgaagatcagcagtttagctgggggagaggatgtcctgagccttcagattcacagttttgttgaccgtagaaaacgtttattcatttattagttacaagcgtccttacccccccccccccccccctctccttttgtaaaagtagtgcatatagcaggattaagataaacacatgtaatggagtatatattgtgcaactgccatatattatatgatatatagcggctcatattaggtt

SEQ ID NO: 104741 - DNA, 1397 bp, Zea Mays
atcggaaggccccaaagcccgtgggccgagccgagcgtgacggaagcagcacgcaggaccaattttgaaaaggggctgcaagacgcaagacgaccgttggaagagccgcctcttcgcctccgcttaaaagcctcctcgcctcgtcttccaaacccgagagcaaacgagaaggacgccggagaccgagaagcaatctctcctccccccggccagccgaccgaccgaccgacccatggaccgccgtcctgctctcgccgtctctccgcgcccgccccgggtgccccgcccgcccctcgtgccagcctcctccgtgcaaacgcctccaggatcgatgaagaaggcggcggctccgatgcgcgcgtccgtctgcgcgatcccgtcgccggtccgcttcgagcccagcccgatgcgcgcctccatctccgctctcccgtcgccgatccgcgccgaaccgagccctatgcgcgcgcgcgtgaccgccgcgctccagccaccaagtcgcgtcaagctcgacctggctgcgtcgtcgcctcctccggcaagggcggcggccgacaaggagaacttcctcctcgccgcggctccgtcgtccccctcggcgagggtggggttcgacaaggagaacctcctcccggccggcgcggacgcccacgacgagcttgtggcgctcaacctcgccgcgattgccaggacagcgggcacgccgtctggtggcccgctcttcgtgcggggcagactctacgacctctactcggcgcgccgcaacgagcggctcaagcgcaagcaggacttccccttctattccgaggagttcgcgtccgcggcagtggaccccgagacgatggccgagaacccctgtgtcgccgtcgagctgtccaaacgccgcgtagccaagaaggcctacgccgccagcggcgcggagtccgtgaggaggtctatgccagccgtcgacttcgcagcatgccgcggtggagacttggggccgaggtcctcgctcaggagcagtaaggagatgaagaaggcttccgccgcgtccggcgccgtttccatggccaccaaggtgaggagggtcaaccccaggtcttcggttcgccggttctgagtgttgtagcgctcttcatctgaggttttctagcttccactctctggttcgatatgtcactgtcacatgtggatttggtgatgcggtctacctataactagtagatgtcagtaagaaacattgccagttttttgtgctcggaattggtttggcgagcaacccagatgcgaattgcgaatcaccttggtgttagacacgcagagggtggaagaagagagcatgagatctggaagggaagcagagatgtaggcaacggtggtgttcgtctatgttcagtttcttctggtttttccat

SEQ ID NO: 104742 - DNA, 121 bp, Zea Mays
ctgccctgtcgttttcaaacgagaaacttaaaaagagaaagaaagtgatgggtctgcactccgcttgccgggaggtggcgtctccatgtttaacccattatcaaacaccccttagatcttt

SEQ ID NO: 104743 - DNA, 1203 bp, Zea Mays
atgggtggggtctgtacggctgtacgtatcgggatttgttattcctttatcacttgtatccaagcctacactaccacgtgcagacaataccatgccccgtccaggacttccgtttcaggagtacactggattcgttcacagcgccggtgccacggcgacggcggagaccatgctgtcgacgccgcatacgttgcttccgcggcacaggcggtagtacccttgctcaccccactgctttccccacgagttcttgatgatccagtaggggcggtagcccagccgcagcgccgcgaagccgcgcgcgccgtagccgacgaggagcacgccgtggttgacccacgcgcgcgggcagatgagagggcacgacaccccgcccacgtacgtctgcatgaacgccgcgttgagccccaccgcgaggggcccgcggcggacgagcgccgcgcggatctgggcctcgtcgccggccggcacggcggtgaagttggccacgcggacggcgacctgggtcgggtcgaagcggcagggccccgccgcgcccgtgtacgggtacgcgctctgctccatcaggccgccggactccatcaggtacgagtacgcgttcgtcatcagcccgccggcgcagccgttgttgcactcgttctgcgccaccgcgctgcacgtgtggtcgcagtcgaccagctgctgctcgctgaggtcgacgagctcccccgtggcgaggaagttggcgccctccaccgcgcccgtcgtgctgaacgcccagcacgacccgcacgcgccctgcgtcttgacgcccgtgacggcgcccttgtcgcgccagtcgaagctggccggcagacgggccacctcctccttcgaggccggcggggcggccggcacgccactcatgagccgctggacgtccccgccggcgcgcaggcccgtgaggcgcgcctcgaactcctcccgcgtgaggtcggagaagggcgtgaccccgtggcgcgccgtcgggtccagcgcctggtgcgccgccgcgcgggccaggttggccgcgaacacgcgcagccgacgcgcatactccttgggcccggagtaccgccgcccgtgccgcctcacgaacgctgcgaactgcgcctccgggagcagacccgggcccgcgccggcgcgggtaccttgcgtcgtcacctgccggatgaatttgtcgtcggcggacgcgccggcgagtag

SEQ ID NO: 104744 - DNA, 1344 bp, Zea Mays
cctcgggcgagccggagatgtgtccgccgttggaggggggccttgggcgagacggaaatcctccggggtcagctgcccctgtccgagtctaggctcggacgagacatgatcgagtcgctcgaatttactgatccctgacttaatcgcacccatcaggcctttgcagctttatgctgatggagttaccaactgagaattaggcgtcttgaggttacccataattatggttcccgacagacctaaaccacattccttcctttcatcgttgcatcttccctccgatccttccggtgggggcggccagatgcgaccaaattcctcctattccctctcctctccgcccacccttctctcgcccgcgtaactcctctctgtcgcctaccaaaagcggagcaaccgaggcaagaggaagggggtgggcgaggaaaagcgatttggcttctcttccagttccggattcatcgtaagaaacacatgactgcagtggatatttgaagcatgaaaaggcaaaccatctcactcttcaaacagttcacttagcacacttaatgacggaggtgtttgcatgacattctctttgagctgatatatatgggtggctgcattggtaatttaagaaaatctcagtcacttccagattctaagccgaaacgatctttaagaaagaaatctctggattcatctactggaaacagaagacgatggcaatcgagtctagaagcaatggagaagaatgttagcatatcagtttctcttgaggggaatatctcttctattcccaactcgatagtcaacgattctaaaacgttaatggaaaatggggtagatacatcatttatcaaccatgctgctaaagaatggactgagatgagaagacaatgggttggacatcaggcagaagttccgagaaaggcccctcaagagccagtgataagttggtccgcaacatatgatgatctcttgtcgacaagtgagcgttttccacagcgaatcccactatctgagatggttgattttttggtcgacatatggcacgaagaagggctctatggttagctgacgtctggctttctttccgccttgcatttagaatgtggtcaacttcctccccacaaaagatgtaatcttttgaagaaatgaaaaaaaaactacttagtcgcaaaattagttttagcatttgatttttttttaaaaaaactgttatttggaaagatactacagtggtttggtatatttggtgatgagctgtcagaggtttgtttatgttaaatgactcgatgacctgtcattcctgaatgggcggttgcttaagaatagaagagggagcattttctgtagtatcat

SEQ ID NO: 104745 - DNA, 1349 bp, Zea Mays
cctcgggcgagccggagatgtgtccgccgttggaggggggccttgggcgagacggaaatcctccggggtcagctgcccctgtccgagtctaggctcggacgagacatgatcgagtcgctcgaatttactgatccctgacttaatcgcacccatcaggcctttgcagctttatgctgatggagttaccaactgagaattaggcgtcttgaggttacccataattatggttcccgacagacctaaaccacattccttcctttcatcgttgcatcttccctccgatccttccggtgggggcggccagatgcgaccaaattcctcctattccctctcctctccgcccacccttctctcgcccgcgtaactcctctctgtcgcctaccaaaagcggagcaaccgaggcaagaggaagggggtgggcgaggaaaagcgatttggcttctcttccagttccggattcatcgtaagaaacacatgactgcagtggatatttgaagcatgaaaaggcaaaccatctcactcttcaaacagttcacttagcacacttaatgacggaggtgtttgcatgacattctctttgagctgatatatatgggagcagtggctgcattggtaatttaagaaaatctcagtcacttccagattctaagccgaaacgatctttaagaaagaaatctctggattcatctactggaaacagaagacgatggcaatcgagtctagaagcaatggagaagaatgttagcatatcagtttctcttgaggggaatatctcttctattcccaactcgatagtcaacgattctaaaacgttaatggaaaatggggtagatacatcatttatcaaccatgctgctaaagaatggactgagatgagaagacaatgggttggacatcaggcagaagttccgagaaaggcccctcaagagccagtgataagttggtccgcaacatatgatgatctcttgtcgacaagtgagcgttttccacagcgaatcccactatctgagatggttgattttttggtcgacatatggcacgaagaagggctctatggttagctgacgtctggctttctttccgccttgcatttagaatgtggtcaacttcctccccacaaaagatgtaatcttttgaagaaatgaaaaaaaaactacttagtcgcaaaattagttttagcatttgatttttttttaaaaaaactgttatttggaaagatactacagtggtttggtatatttggtgatgagctgtcagaggtttgtttatgttaaatgactcgatgacctgtcattcctgaatgggcggttgcttaagaatagaagagggagcattttctgtagtatcat

SEQ ID NO: 104746 - DNA, 1344 bp, Zea Mays
cctcgggcgagccggagatgtgtccgccgttggaggggggccttgggcgagacggaaatcctccggggtcagctgcccctgtccgagtctaggctcggacgagacatgatcgagtcgctcgaatttactgatccctgacttaatcgcacccatcaggcctttgcagctttatgctgatggagttaccaactgagaattaggcgtcttgaggttacccataattatggttcccgacagacctaaaccacattccttcctttcatcgttgcatcttccctccgatccttccggtgggggcggccagatgcgaccaaattcctcctattccctctcctctccgcccacccttctctcgcccgcgtaactcctctctgtcgcctaccaaaagcggagcaaccgaggcaagaggaagggggtgggcgaggaaaagcgatttggcttctcttccagttccggattcatcaaacacatgactgcagtggatatttgaagcatgaaaaggcaaaccatctcactcttcaaacagttcacttagcacacttaatgacggaggtgtttgcatgacattctctttgagctgatatatatgggagcagtggctgcattggtaatttaagaaaatctcagtcacttccagattctaagccgaaacgatctttaagaaagaaatctctggattcatctactggaaacagaagacgatggcaatcgagtctagaagcaatggagaagaatgttagcatatcagtttctcttgaggggaatatctcttctattcccaactcgatagtcaacgattctaaaacgttaatggaaaatggggtagatacatcatttatcaaccatgctgctaaagaatggactgagatgagaagacaatgggttggacatcaggcagaagttccgagaaaggcccctcaagagccagtgataagttggtccgcaacatatgatgatctcttgtcgacaagtgagcgttttccacagcgaatcccactatctgagatggttgattttttggtcgacatatggcacgaagaagggctctatggttagctgacgtctggctttctttccgccttgcatttagaatgtggtcaacttcctccccacaaaagatgtaatcttttgaagaaatgaaaaaaaaactacttagtcgcaaaattagttttagcatttgatttttttttaaaaaaactgttatttggaaagatactacagtggtttggtatatttggtgatgagctgtcagaggtttgtttatgttaaatgactcgatgacctgtcattcctgaatgggcggttgcttaagaatagaagagggagcattttctgtagtatcat

SEQ ID NO: 104747 - DNA, 964 bp, Zea Mays
aaaagtttagattgttttatcataatcagtggtagtggtatataaataactccaaactatatgtctatgtagattgtttttttaagtttttgaggagcaaaagaggtactgcgcctccgaaaacttgaccacgagatggaacccgccgcggccgccggagagtccgattcttcgccgcccccgcccccggaggacctttctactgtagagccttcaccctcctcctcgtcctccgccacggccgtcgttgctcccgaaacgcctccccctcccggggcgcaggcggtcgcggcggcgatggaggcggtggagcgggacgcggctgccatcgccgagagctacgcctccctcttcgcttcactccgcgtcgctctatcaaacgtcacctcgacgtcggcggagaacatggagtgcttgggggacgtcgtcggccgcttgcaggaatccgcacttgaagcatcttcgaaaggaaataagtacatcaattcgtgcttgaggttgaatgaggaaatgagaggcttggaaagcttagctatgcaactgaagattctacggaagaatgttgattcactagatttggctgtcagtcaattgcttcgccttccctagtcaatggatactatcaatgaagtgcttcaggttctaaggaaattgatacaccaaatatatgtcatgtctcatgttttttagttacaaggcaactgactgctggaaatatgaagtggcttatagcaacagaggactggacactggaggacttcccctttttatggcatgataaaacactactagttcttgatttgatttacgtttccatcttatctgtatttgtaaacaacacatttattgaaaacatctctatcttcttgtgatgcgtgcatgaagtttgtatgtaaaatgggtcattgagcccatggactatctctgtaaattggagggaaatggcaacagaagtttttctgta

SEQ ID NO: 104748 - DNA, 905 bp, Zea Mays
aaaagtttagattgttttatcataatcagtggtagtggtatataaataactccaaactatatgtctatgtagattgtttttttaagtttttgaggagcaaaagaggtactgcgcctccgaaaacttgaccacgagatggaacccgccgcggccgccggagagtccgattcttcgccgcccccgcccccggaggacctttctactgtagagccttcaccctcctcctcgtcctccgccacggccgtcgttgctcccgaaacgcctccccctcccggggcgcaggcggtcgcggcggcgatggaggcggtggagcgggacgcggctgccatcgccgagagctacgcctccctcttcgcttcactccgcgtcgctctatcaaacgtcacctcgacgtcggcggagaacatggagtgcttgggggacgtcgtcggccgcttgcaggaatccgcacttgaagcatcttcgaaaggaaataagtacatcaattcgtgcttgaggttgaatgaggaaatgagaggcttggaaagcttagctatgcaactgaagattctacggaagaatgttgattcactagatttggctgtcagtcaattgcttcgccttccctagtcaatggatactatcaatgaagttacaaggcaactgactgctggaaatatgaagtggcttatagcaacagaggactggacactggaggacttcccctttttatggcatgataaaacactactagttcttgatttgatttacgtttccatcttatctgtatttgtaaacaacacatttattgaaaacatctctatcttcttgtgatgcgtgcatgaagtttgtatgtaaaatgggtcattgagcccatggactatctctgtaaattggagggaaatggcaacagaagtttttctgta

SEQ ID NO: 104749 - DNA, 901 bp, Zea Mays
aaaagtttagattgttttatcataatcagtggtagtggtatataaataactccaaactatatgtctatgtagattgtttttttaagtttttgaggagcaaaagaggtactgcgcctccgaaaacttgaccacgagatggaacccgccgcggccgccggagagtccgattcttcgccgcccccgcccccggaggacctttctactgtagagccttcaccctcctcctcgtcctccgccacggccgtcgttgctcccgaaacgcctccccctcccggggcgcaggcggtcgcggcggcgatggaggcggtggagcgggacgcggctgccatcgccgagagctacgcctccctcttcgcttcactccgcgtcgctctatcaaacgtcacctcgacgtcggcggagaacatggagtgcttgggggacgtcgtcggccgcttgcaggaatccgcacttgaagcatcttcgaaaggaaataagtacatcaattcgtgcttgaggttgaatgaggaaatgagaggcttggaaagcttagctatgcaactattctacggaagaatgttgattcactagatttggctgtcagtcaattgcttcgccttccctagtcaatggatactatcaatgaagttacaaggcaactgactgctggaaatatgaagtggcttatagcaacagaggactggacactggaggacttcccctttttatggcatgataaaacactactagttcttgatttgatttacgtttccatcttatctgtatttgtaaacaacacatttattgaaaacatctctatcttcttgtgatgcgtgcatgaagtttgtatgtaaaatgggtcattgagcccatggactatctctgtaaattggagggaaatggcaacagaagtttttctgta

SEQ ID NO: 104750 - DNA, 3461 bp, Zea Mays
tctttcaccatgacaaacttgactaattggagaaattattattgaagcaggcatcttacatacatttcatgccatacagaagtttgaatgtcttattaacttctaaaagcaggaaataatgtaatgagattaacttattttgttcgctcacatgaagcacaatatgatctgacttaaggctattatacaacaatatatggggaacaaaaacaggtacaatagacattgttgatagctggtcttccaaggagctttacagcaaagaatctgtctttgcaggtagcctcctgaagaagtttgctggtgctgatggcaccttgtggcgaaaccgaggatgcctcatcccgaagaacccaaggcagagtgcaaccacttggaatggtgtcacatacagtataatcgcagtaatcaggcaaaatatcaggaacatagctgttgcccttgggtccctccagctgagcagtgactgtaatctttctccctgagtggcaatgtccccaacaacagtctgtatcctcccagcaacgtgtcgtaacctatcgtacctcatccggatgagatctgggctctttgaggttgggaatgtgtcaaattcctcatcaagctcatctggaagtgcaacatcagcgtaagatattcttgtgttcatgtgtggtgggaagcgtggccggaaccggtaattccacagccctatcaagaacatgtagaggaaaattgttggcaggataaggtctggatagagcacaagcatgataaagagcacatggaccagcactgtggtgaccgggtttttccactgacaaacatcagcaaaccatttccctgcagcaatgaaccctgagaagacttgcataaggcggaagaagttagctttgctccgtcgcatgctccacaggtgagagcgagcatctgacataaactcaacaacttccctgcggactggtggctccatgcgtcccaggcgctgcgcaacaagcagcacagcttggtggcggagcatttcctgctgaactattgacagaggctgtgcgtagtgcatcttgggcaagagaggcctagagtatgtgaagagcacattgataagggatgtgactgtgaaccggatggcaaggtggagctcacccatctttttaactcctgatgggctgaggaagagcaatggatatgagtgcgtgtacacacgcgccgtgtcaagtgtcgaaagccgaatcctcactttcccgatgggtttatccatgtggcctgaggaaccgtccttgttatcatctccacttatgtgacagttgtcaaatagaccaattgtgagcacagttccatgatcaaagacctcccatgtgtactgctcgttgaaccgagggctcaagctgtcaactatcgtgcgcgtccggacccatttggaaccatacttggcaacacagtacgcatcacacgacccacggctgtttctggtcttcgttggattgagaccgttcgcacttaagatgccgacttcaagcatgccgattggtggcttccacagctgcttcatcgtcggacggagatcgctgcagtactgtgtggactcatcaagcacatggtaaccaccttcaaggcagacacgaaggcttaccttcgcatagaatttgtcttccttcagctggttcacgtcgatgatccctggccttcttagatcgaaccatgctgggagtaccggtttgtgatcagcccgccttggaagcctcgcgagcggtatgatagcctcaccaatcacctcgtctttgtcttgtgccacacggtctactactgatatgagcaagtcgtcctcaaacggctctgctgccacgaacatcagctcctcgttccacatgaagtttctggtcggcgagcgaacctgccttgtcctcagcagttgatggcccagcctcacttttaccagcacatcaggtatgcggttctccattgggtatatgtcctgtccctcaatcacattgactctcacataccacattcttggcgcggggtacaccttcccgcggatgtagctgtgaagatgggaatcaaccggtgtcgatcctgcatggatggcgcttgggaagcattcatctgcctgagtaccgtaccagactgcaagcatcagctcccctctgtccctcacgccgtccttgcccatcagacggtaccactccggtgccagtgggctgtccggagggaccctgagagggacctcattcagatcaatgctcactcggccgacatagtcgtcccgaaggacatccttgtccttcacaacgacttgaagcatcgtcgactgcatgacttccttggggaacgcgaaaacctcgtcccactcaggcctctggttcttctcaaagtgctttgtcttcatcttgtagtttccaaggtgcacctccacgtaagggtcaaggcttccagtgatgtccatgttgggcaggtcgcgtgccttgaccacgcgcacgaagaggtactgcatcttctcgacaaggtcgtacgccccagccttctggccagggtacacccggccgccaatgacacggccgccgccaagcgttgggcttgtttccttgagctggaagtctacaggctgctgtggacctggagcatacatccttgacacctgaacctgaggctgaggggctgcagctttgttcgcaaccgcagaaaagcttctctgttgctgctgctggtctccgtatgaaccttcagcgtagtatggctgtggctgtgcaggacgctgctgttctcttggtaagtgctggaactgcctcactgggtttgctctggtctcttggaaaggatttgagatggagttggctgctgcctgctgctcctgcgcagtggtaggcgtgcttagcatatcgaactcctgctgagctggagcagcagacactcgtactgatggatcatctgtgaggaagactctaagcccaagctcaccgcgcgcacgtgataagatcgtgcgcttctccagcgggtagtgcaggggcatagcatcaggctggctgacgaaggatgtgcccgatatgcgaaccttgcccaggcaggacttggaattactggcacggtctgcatggtatacgtaggcctcaaggtgtagctctgggaggcgggatggatcagatatgttgaagtagaactgctcgttccagacagggttgaggtccctgtctttgacggctgtccggaacttctggccgtcgaagtcgacctcaacaaaaggattggccgtgtcctgctctttcgggaggagatcatgagcgctggtaacttcaacaccaagcttaagattgctcatcgtgccgtggcccgccaccggatcttgtagcaagaggatagggagctgaccttgagaaacgctgagggaggaagaagttgagcttctgctcttgctcttgctcttggtggtttctccccgatgatggtttcctcaaggggtgaggaggccgaagacgaagatgaggact

SEQ ID NO: 104751 - DNA, 858 bp, Zea Mays
gccatctctctctatcgcattgcttgcgcgagcgcagaaggcacacacgtacagccatggcgaactcgtcgtccggcctggcggtgagcgacgagtgcaaggtgaagttccgggatctgaaggcgcggcggagcttccggttcatcgtgttcaggatcgacgacaaggacatggagatcaaggtggaccgcctcggcgagccgaaccagggctacggcgacttcaccgacagcctccccgccgacgagtgccgctacgccatctacgacctcgacttcaccaccgtcgagaactgccagaagagcaagatcttcttcttctcctggtcccctgatactgcacgcacccggagcaagatgctgtacgccagctccaaggacaggttcaggagggagctggacggcatccagtgcgagatccaggccaccgaccccagcgagatgagcctcgacatcgtcaagagccggaccaactgatcgtcatcgtcctactatcaagcaacacgatcgaccaccacctcgattatatatgcatcattatagtatcgtttattaatttcagacccacccactgctaaccacatcgtccacgagagattatattcatccgtggactacgctctcgatcttacaatttgaaacctttctattttcctaattactatgtattccaggttcattttgattgtgaccattcttcagttctttctgtaaggatcggagcatattatatactctatgtggctatgccaattatattgttgggtataagaatgcattttgtttctgtaatacggaaaaatatattttctttaagcaacaacaaggtaaaaacttgcctcgttgcatattttcttta

SEQ ID NO: 104752 - DNA, 103 bp, Zea Mays
cgtcagttagcctacaatatgaaatttgtacggtaaataacacggtttataaaatgaagtttaaaatagtatataaaataagagagctaaaaataaagaaaaa

SEQ ID NO: 104753 - DNA, 1972 bp, Zea Mays
atgaaggggcggctgctgctgctgctgtgggcgtgggcggccgccacatgggtgtccgtcagcgccgtgactcgcctcggcagaggcgtcgccggagagcagccgctgtccaggatcgccgtcgagagggtggtcctcgccgtcaacgacgcggcgtacgtcaaggcgtcccctctggttctcgggcacaagggcgagaacagtgagtgggcggacgtggagttcttccacccgaacccgtccgacgacgactggatcggcgtcttctctcccgcaaatttcagtgatgcgatctgtgaggctgagaatacgggtaccccagtgctgtgcactgcacctatcaagtaccagtttgcaaacttcgaaaacgatggctataacaagactggaaagggctacctcaagcttcagttgatcaaccagagggaagatttctcattcgcgcttttctcaggtggtctctcaaagcccaagctgatttctgtctccaacaaggtagcctttgctaatccaaaggcaccagtgtacccgcgtttggcgcaagggaagtcttggaatgaaatgacagtcacctggacaagcggctacgatattacagaagcagttccttttgttgagtggggtgagaaaggaggtcgacgacttcttgctccagctggaacattaacatttgaccgaaatagcatgtgtggctcaccggcacgaactgttggttggcgccatcctggttacatccatactagcttcctgaaggatctgtggccagactcgccgtatacttacaggcttggccataggctgatgaatgggacccgcgtctggagcaagtcatacagcttcaaagcgtcgccttaccctgggcaagattctttgcagcgagttgtcgtatttggggacatgggaaaggcagaggctgatggttcgaacgagttcagcgacttccagcccggttcgttgaatactacttaccagatcatcagggacctcgaagacatcgacatggtggtccacattggggacatctgctacgcggatggctacttgtctcagtgggatcagttcactgcacagatcgaaccgattgcttcaagggtgccatacatgattggcctcggtaaccatgagagggattggcctggcactggttcattctacgggaaccttgactccggtggagagtgcggcgtccctgcccaaactgtgttctacactccagctgagaaccgtgcaaaattctggtacgcgacggactacggcatgttcaggttctgcatcgcaaacacggaagaggactggaggccggggaccgagcagtacaagttcatcgagcaatgcctgtcgtcggtcgacaggcagaagcagccgtggctcatcttcctcgcgcaccgcgttctcggctactcctcctgcacctactacgaatcggagggcacgttcgaggagcccatggggcgggaagcgctgcaggagctctggcagaagtacaaggtggacatcgccttctatggccacgtccacagctacgaaaggacatgcccggtctaccagtctcagtgcgtcgtcgatggatccgaccactacagcggcccgttccaggcgacgacgcacgtcgttgtcggcggcgcaggagccagcattctcgattctgagttcaccacctcgaagatccagtggagccacttcaccgacttcgaccacgggttcgtcaagctcacggccctcaaccattcctccctgctgttcgagtacaagaagagccgcgacggcaacgtgtatgaccatttcacaatctcacgcgactaccgggacatcctcgcttgctccatcgacaactgcccccggagcacactggcttcctgaagtcccacagtagttgcagaccagaaattttagttcgtagcttttctgtactgcaccgaccaataaatgaggccttttcttttttaataatatataattatatgcatgcact

SEQ ID NO: 104754 - DNA, 537 bp, Zea Mays
gcacagacgacgtcctgaaagcctaccctcgcctccgactgagtcatggacgaaaggttttagaagttcgtccgatggtagactggaacaaggggaaggctgtggagttcttgctggactccctggggctagctgactccgacgaggtgctccctatctacatcggagatgaccgaacggacgaggacgcgttcaaggtccgtggtcaatttggttctttccttgtcatgttagaaaatggacttcgatgctttaaaacctgcaggttctacggggaaacaaacggggtttggggattttggtgtcatctgtaccgaaggaatctcaggcgttgtactccctgttggatccacctgaggtcatggacttcctgaagagactagtgaaatggaaggaggaagaagaagcacaacgaataacagtcaagcagttgttagtatctgttgatgactttagggttaacctctgacaaagagggactagggaactcgactgcacctgatgccaattctgcagtctatagccaatctcttcatt

SEQ ID NO: 104755 - DNA, 2805 bp, Zea Mays
cggtgatctttgaaaccttcaactccactttttgcttaccgccttggctgcttgcaacaactccctcaactagtacagatgctccagtagtgacagagtctatctgacagtcatcattgaaaataatgacgaataaaacatattatagccttatcaactgcagccaatgcagtttaagagaagcttacgaaaggagtaaaatacatttttggtccttcaacttgtcgccttgtgtcatcctggtccacaaacttttgaagtgtgtcagcccagtccttaatcgttgttcgggtctcaattaggtccaaatgggtcgtggttgacatatggaccccacatgttagcctgtgtatcacttttctctcttttccacgtgtccgatgagagaaccgagaaaagacagagaaaatagatacacagactgatatgtggggtccatatgtcaaccacgactcgtttggacctaactgagacccgaacagcaattaggaccaggctaacacactttaaaggtttgtcgactagaatgacacaggacgacacgtttaagcacccttacgaaagtataaacttgcaaccttcgctagatgggcaaaacatagtacctggtcatagccttctgtttcaggagtcaatacacattgcatattggataagcaagagccatcattgacctaaaagttggagttttagaatgcattggactcttaaaggataagagctacttgagtcgacaaatataaattcctctgtggtgtgcaaaagcattatggtacgactggctcattagccaagtgtcatgacatgttagctagggtctcgttgtttattactgaagcaaaggagatacacttaggggtggtaatggatcatgataaaaaatgattcttcacaataaattagggcccttaaataattttagttcaaaaatgaatagaaatagagtctgatcctaatccgattcgatccttaaattttatagtgtaaaatctagaacccattaccacccctagatacactatcagttgaaacataaaacattatatttcattcagaatatttaaccaagcatcaaggcattgataacattgtgaaacgctcattgagcatttctatatattaaagcagggagcaattctgctttcaggtgcctccacgtcagcactctgtgttttagccgcatgatccaaatccaacggtaaagcagggagcaattatgctttcaggtgcctccgcgtcagcactttctgttttaaccgcatgatccaaatccaacggtaaagcagggagcaattctgctttcaggtgcctccacgtcagcactttctgttttagccgcatgatccaaatccaacggtcataatcacatctcacgcatcccagcggtctctaacacacgctctttctcctccaagcgaaggaccattctagatgatgcacgaaggagccatcaagcgaccgtttccgtataacccccagctacccctatggccctatccggtgtctccatttgccgtgaaggttctagacagtccactccccgccctcaaacgccgttacctaggtgcttcgtcgtcccctccacccccgtcaagagctctcccaagcgtcggcgcacaccgccacctcgccgtgctctacagggttgccctctacagggctgccgtgcctccgccccggttgctggctgtcaataagcacgacctcctcgcgcatatcgccagctttgattaccggcctgggatgatggctgagctcgacgcgcagatggggttcgtcgtgggcggaaccattctcatgctactcactgtcgtcttctttgagattcagatgtttgctaaaccaccaaagaaattatgcaacaacaaattcatatttgtgcatcagcatttgtttattatcatattagtgacaaacaagtaaagtcattttttgtagggctgctaagcatatacaagatcgagggaaaaactcataggaccaattactcattaatagcgccatggaaaaaacagtactcaagattattaacttttttatacacaaatttagtatttaaagtatataacaacctcaatgccaatatatatatatagggcaggtataacgggagccctgggcttccaatagttaaaggaagcccaggtcgatcatccctgcaacctggttcaacccagcgcaccgactggaccaggctgtcggttgcaccacccgcgcccacgtctctgcgcgcaaaaaggaatgcatgcatgagtcaaacacatccccttgcatgcgcataaatttaggaaagatacgtgtgacaatttctatttttaaatgctttatttcctccataaatttaggatctctgcaacagccatgcaactagactcgtaaggaccattttatgatatgtactgctactaaatatgctatcctgtgtagataattatgcaattcagtatactacgtaaaaatctgttaccagctgcatgcacacgaatttatgataaaaataatgtgcaacgaaaggaaataaattgcacgcatagaaacaaaaaatcgtatttaatgttttatttccttcataaatataggatccctccaacagctatgcagctaaacacactagatctagtttatgatatatattgatacaaattatactacatggtgtagctatttatgcaattcgttacactgcgtaaaaaatctggcatgttgttcactggtggacgcatctccaagttggagcgtaataaccttaagttttgagcataagatcctccaattataagcgtaaataccgagccaatgtgagag

SEQ ID NO: 104756 - DNA, 489 bp, Zea Mays
atgcacgaaggagccatcaagcgaccgtttccgtataacccccagctacccctatggccctatccggtgtctccatttgccgtgaaggttctagacagtccactccccgccctcaaacgccgttacctaggtgcttcgtcgtcccctccacccccgtcaagagctctcccaagcgtcggcgcacaccgccacctcgccgtgctctacagggttgccctctacagggctgccgtgcctccgccccggttgctggctgtcaataagcacgacctcctcgcgcatatcgccagctttgattaccggcctgggatgatggctgagctcgacgcgcagatggggttcgtcgtgggcggaaccattctcatgctactcactgtcgtcttctttgagattcagatgtttgctaaaccaccaaagaaattatgcaacaacaaattcatatttgtgcatcagcatttgtttattatcatattagtgacaaacaagtaa

SEQ ID NO: 104757 - DNA, 764 bp, Zea Mays
gtatttatgcaattcgttacactgcgtaaaaaatctggcatgttgttcactggtggacgcatccccgggtggagcgtaaaaaccttaagttttgagcataaaatcactaaattataagcgtaaataccgaatcaatgtgcgaggttgatagctctagtaggttgttattactatcctatttttatgacagatccaaaaatatggcagccgcatgcatgcggtttctatttttatacagatccaaaaattatggcaaaaatcgtgggagtttccattgcatgcgcgcaaattacaaacagcataaatcaaggaattgcctttccaatgtgcatgcagtaaactgatatacaaactctgtgtttaagcataaaatcgtacagtttttggcgtaaataatacatgtgataggcataaaacacaataatcgaaaagaaaactacgccggatcagaggatgtcacgcgcgatcatcgttgcgcgcatctcgggccttccgtgacgccgctcgctcgaagatcgcgcctcatgcgtcgccgtcgctactcgcacgtcgacgggcgtcgtttgctcgccggccttggaagtgccgcctcctcgggacctcggggacgccgccgcttgcccgcacaagggccccgctgtcgctcgccctctggatcggggagccgccgccaccgacctgggaactgccgccactactccggatcgaggaacctccgccaccgtgcgtcgaggtcatggagttgcggccaccggctggggatc

SEQ ID NO: 104758 - DNA, 694 bp, Zea Mays
attccattccgtcacatattcccgagaaaaaccgtcattcgcgcgcacacgcggtcgcagctgcggtgcccggctcaacgccgcggagatggagggcgacgccaccggagctgacggaggaggcggaggaggaagtggtgagcgttctagcttcgtgatcggcctcatcgagaaccgtgccaaggaggttggtgttgcagcctttgatttaagatcagcctcattgcacctatctcagtatatcgagacaagttgctcatatcacaatacaaatacactacttcatttctatgatcccatggttgtcattgtgcccccaaacaaaacagcagcagatggtatggttggagtttcagaactgatcgataaacattacccagcaaacaaaaaggtcactatggcacgtggttgctttgatgacacaaagggtgctgtcattgtaagaagtctttcagctagggacccatctgctcttggtttagatacttactgcaagcagtattatctttgtcttgcggctgccactgcaacaattaaatggtatgtgtgctcaacacactatgacagcatcaggaattcaggatttcaacttttacggttgccctgttatggaatagtaataacttttgaagtaactgcatgtttatttattgtaatatatctcctgtccgtataatgcaatactgcttcagta

SEQ ID NO: 104759 - DNA, 855 bp, Zea Mays
ttttttattttacttgtacatttgagaacatgaagctattctcttcgacgtgtttattccaggtctagattgttgaaagctaacttattacaaccattaaaagatattcagaccatcaatgctcgtctagattgcttggatgagctaatgagcaatgaggagctgttttttggtttgactcaaggtctacggaaatttccaaaagaatcagataaggttctctgtcatttctgcttcaagcccaaaaaggtcacagataaggtattgaagcctgccaatggtagaaagagccagatgttgatttctgatattattgtccttaaaactgctctggacgccataccattcttatcgaaggttttgaagggggcaaagagttttcttcttcacaacatctatcagactgtatgtgaaaaccctaagtatgctaatatgagaaagagaattggagatgtcattgacgaggatgtggttcattcaagggctccatttgtagcctgcactcaacaatgttttgctgttaaggcaggaattgatggtctgcttgatgttgctcgtcgatctttctgtgataccagtgaagccatacataacctcgccaaaaagtacagggatgattataatatgccaaatttgaagataacctataatattaggcaaggattttactttattattccccaaaaggacatcaccgataggcttcctaataaatttatccaggttgttagacatgggaagaatctccattgctcaagcttggaacttgcttcactgaatgttaggaacaagtcgtctgctgctgagtgcttctcgcgcacggaactttgtttggaaggtttctgtagtaattaa

SEQ ID NO: 104760 - DNA, 507 bp, Zea Mays
atggcggcaggcagccaggaacagggagatgggcttattgacaaaatcagaggagacattgctatccttacattgctcgccgaagtattatgtcttttggacatgattgtaaattcttttgcgcatacaatatctacaaagcctgttgatcgctacacaagaccagagttcacagatgatggtccaatggcaatcaatgctggacgacaccctattcttgagaccttgcatactaattttgttcctaacaatatatttctctctgaagcatctaatatggttcttgtcatggggccaaatatgagcgggaaaagcacatatctccaacagatatgtttaattgtcattcttgcacaaattggctgttatgttccagctcagtttgcatccttaagagttcttgatcgtatatttacacggattggtaacggggacaatgttgagaacaactcgagtacggatagcctggatctattctacatgatatcaagattcctcggacggtag

SEQ ID NO: 104761 - DNA, 678 bp, Zea Mays
tggattcaggatatctctgggggtctgactactgttgtcatcagggagttccttctggtttgggatctaattcaggatgttcatttacagacaggagttcctgatgtccacatttaggtgccttgcgcttctggcctttattcctctaaaacggcttataacagcttttggaacggtacaacatcttttgagccggctaaaagaatttggaagagttgggctcctccaaaatgtaaattcttcatttggctagcctctctcaaccggtgttggacggctgatagattggcccggtgaggtatggatcatcatgacaaatgcctcttttgcaatcaacatgaagaaacagtccagcatattttgctctcttgtgtgttctctagaaacatttggtggcaggtgtggtgtaaagtggggctgcaatatctggcacctgggcctgaggacatgattttccaagattggtggagcaatgccgaaggccaggttcctaaagagaagagaaaaggttttaacacgttggtaatccttgtggcttggtggctgtggaaacatcgaaacacttgtatcttcgagggagcttccccgagcactagagatatcctgtagcacatccacgaggatgctacgttgtggggtatggccggggctagagggcgtaggggcttatggccttaa

SEQ ID NO: 104762 - DNA, 1127 bp, Zea Mays
atcgcctcggtataaggtctctcctacgccgcggccacacagactccagtctcctctagccgtctcgcgcgcttcaccttccccaccccgccgccgccatcgcacgcccgcagccgcatccgctatgggtgcgtacaagtacgtctcggagctatggcggaggaagcagtccgatgtgatgcggttcgtgcagcgcgtgcgctgctgggagtacaggcagcagccggccatcgtccgcctcacaaggcccactcgtcctgacaaggcgcgccgcctcggctacaaggccaagcagggttatgttgtttaccgtgtccgtgttaggcgtggtggcaggaagaggcctgtgcctaaaggtattgtctatggcaagccaaagcaccagggtatcacccagctcaagttccagaggaacaagaggtctgttgctgaggagagggctggacgaaagcttggtggactcagggttctcaactcctactgggtgaatgaggatagcacctacaagtactttgagatcattcttgttgatgtggcccacactaccatccgcaatgatccaaggatcaactggctatgcaatcctgtgcacaagcaccgggagctccgtggtctcacctccgcaggcaagaagttccgtggcctgcgtggcaagggccacactcaccacaagaataggccgtcgaggagggccacctggaagcgcaaccagaccctttccctccgccgctaccgttgagcacatacaacttgatgttctgctactgtggaacctacctcatgcatgctctgatagtatttggtatttttgttgcatcgttaaattttgctacccatgttacaagctccttgaactctgttatcagtgtaccatggagaaattgaagcgaactatgtttgtggttatcctgtgttatctcgatgaaaatgatggtttagttgagtattatctatcgcttctgacatgtgttgtctgttgtcttctgattcttatcttcggcacgcgccggcgtctactttaaagtaaagtaaggctttgtaaatttgagataaccatgattgattaccttaaattaggggtgaaaataggttggtatacccgtctgatatttccatgcggattcgga

SEQ ID NO: 104763 - DNA, 1087 bp, Zea Mays
ataaggtctctcctacgccgcggccacacagactccagtctcctctagccgtctcgcgcgcttcaccttccccaccccgccgccgccatcgcacgcccgcagccgcatccgctatgggtgcgtacaagtacgtctcggagctatggcggaggaagcagtccgatgtgatgcggttcgtgcagcgcgtgcgctgctgggagtacaggcagcagccggccatcgtccgcctcacaaggcccactcgtcctgacaaggcgcgccgcctcggctacaaggccaagcaggcgtggtggcaggaagaggcctgtgcctaaaggtattgtctatggcaagccaaagcaccagggtatcacccagctcaagttccagaggaacaagaggtctgttgctgaggagagggctggacgaaagcttggtggactcagggttctcaactcctactgggtgaatgaggatagcacctacaagtactttgagatcattcttgttgatgtggcccacactaccatccgcaatgatccaaggatcaactggctatgcaatcctgtgcacaagcaccgggagctccgtggtctcacctccgcaggcaagaagttccgtggcctgcgtggcaagggccacactcaccacaagaataggccgtcgaggagggccacctggaagcgcaaccagaccctttccctccgccgctaccgttgagcacatacaacttgatgttctgctactgtggaacctacctcatgcatgctctgatagtatttggtatttttgttgcatcgttaaattttgctacccatgttacaagctccttgaactctgttatcagtgtaccatggagaaattgaagcgaactatgtttgtggttatcctgtgttatctcgatgaaaatgatggtttagttgagtattatctatcgcttctgacatgtgttgtctgttgtcttctgattcttatcttcggcacgcgccggcgtctactttaaagtaaagtaaggctttgtaaatttgagataaccatgattgattaccttaaattaggggtgaaaataggttggtatacccgtctgatatttccatgcggattcgga

SEQ ID NO: 104764 - DNA, 922 bp, Zea Mays
gttttgagtagaatgaacagattgtacttgtcagtgtaatgctttgaactagttcactattaaattgtctctgactctatatttgttcagggttatgttgtttaccgtgtccgtgttaggcgtggtggcaggaagaggcctgtgcctaaaggtattgtctatggcaagccaaagcaccagggtatcacccagctcaagttccagaggaacaagaggtctgttgctgaggagagggctggacgaaagcttggtggactcagggttctcaactcctactgggtgaatgaggatagcacctacaagtactttgagatcattcttgttgatgtggcccacactaccatccgcaatgatccaaggatcaactggctatgcaatcctgtgcacaagcaccgggagctccgtggtctcacctccgcaggcaagaagttccgtggcctgcgtggcaagggccacactcaccacaagaataggccgtcgaggagggccacctggaagcgcaaccagaccctttccctccgccgctaccgttgagcacatacaacttgatgttctgctactgtggaacctacctcatgcatgctctgatagtatttggtatttttgttgcatcgttaaattttgctacccatgttacaagctccttgaactctgttatcagtgtaccatggagaaattgaagcgaactatgtttgtggttatcctgtgttatctcgatgaaaatgatggtttagttgagtattatctatcgcttctgacatgtgttgtctgttgtcttctgattcttatcttcggcacgcgccggcgtctactttaaagtaaagtaaggctttgtaaatttgagataaccatgattgattaccttaaattaggggtgaaaataggttggtatacccgtctgatatttccatgcggattcgga

SEQ ID NO: 104765 - DNA, 1817 bp, Zea Mays
ctcgatgccgccaatcagaatccaagcatccaaccaggcagaggcacacagagtctcagacacaggcacagcagacagcagagcgccccccaacaaaaacccaactcgttttcagctcgcgcaacgggcggcctcgtagcggagtcccagtcctctcgctttctccctgcgattcgcctcagcttccatccgatccgattcgggagtcgggactcgggagatagaggcagacggagagagagaagaaaggcaaggcaatcgccgcgcgcgtgcttcctgccttctcggtcggctccagctcgccgttcattcccgcaatcccgttccgctcgcggtatcgggccgtggtagtgatgccgctggctgagccgccccagtggcgccgcaaagccacggatttcttctccacatctagtgtcaagctgaagcaggcagggcaatcggccggggataatatagctgatgttgctgggaaggttgggtccgcggtgaagagtcggtgggtcgtcttccaggaggctaggcagcagcagcagcagcaacggccaccgcatgagacagtgcaagagcgtatcatcaccgctgctgccaccactggtttgcttttcaggaaaggcatttcagagacaaaggagaaggttgcagtgggaaaggttaaagttgaagaggctgctaaaaaaactgcagataaaagcaagagtatcttgaacaatattgaacgctggcagaagggagtcgcaagcactgatgtgtttggtgttcctattgaagccactgtacaacgagagcaatctggtaaagctgtgcccttggtgctagtgagatgtgcagactacctggttatatcaggtttgaataatgagtacttattcaaatctgaaggtgacaaaaaagttcttcagcagttagtttctctttacaatgaagactctggcgcatctttacctgaaggtgtgaatcctattgatgtaggtgcactggtgaagtgctaccttgccagtatccctgagccgcttactacattttcgctttatgatgagcttcgagctgcgagggttagcattcctgatcttagggatatattgaagaagcttccaaatgtgaactacatgacaatagagtttgttacagcattgcttcttcgagtcagccataaatcatcacttaacaagatggactcccgcagccttgctgtggaatttgcgcctttgatcatgtggcggcaaggtgatgctggcacagatttgcgtaaccacctcaagttaaccctgaaaccgcctccaaaaattgtggatacaacatcaaatactgccacgtgggacctgtttgatgaggatggcgaggatgcttcatcccagatccccttggacgatgcttcacccccagactacaactccattgaggtcatccagtgtctgatcgagcatcataatgccatcttcactgatgcaaatgaaaccgtgtggagatgatcaaggtctcttctagatctctctggtgttagctcgtgctacgtattagttccaggtaggaaggtggattaccgtccgttattgttaggtataagcattttggctggaacatttttggagtaggtttgtatatatgccgctagtgttaattctccccgggactaagatctggtcatgttatagcaatataagtcttgggtggatgtaaaccagatggacacaggacacgattgtgctgcatttgctgaattcggcttatacactgatgttaatctagggaactgttgccctgtacgttcacggttagctggtagcgtttgtcgtcaaaacaaatcagtgtagata

SEQ ID NO: 104766 - DNA, 1674 bp, Zea Mays
ggcacagcagacagcagagcgccccccaacaaaaacccaactcgttttcagctcgcgcaacgggcggcctcgtagcggagtcccagtcctctcgctttctccctgcgattcgcctcagcttccatccgatccgattcgggagtcgggactcgggagatagaggcagacggagagagagaagaaaggcaaggcaatcgccgcgcgcgtgcttcctgccttctcggtcggctccagctcgccgttcattcccgcaatcccgttccgctcgcggtatcgggccgtagtgatgccgctggctgagccgccccagtggcgccgcaaagccacggatttcttctccacatctagtgtcaagctgaagcaggcagggcaatcggccggggataatatagctgatgttgctgggaaggttgggtccgcggtgaagagtcggtgggtcgtcttccaggaggctaggcagcagcagcagcagcaacggccaccgcatgagacagtgcaagagcgtatcatcaccgctgctgccaccactggtttgcttttcaggaaaggcatttcagagacaaaggagaaggttgcagtgggaaaggttaaagttgaagaggctgctaaaaaaactgcagataaaagcaagagtatcttgaacaatattgaacgctggcagaagggagtcgcaagcactgatgtgtttggtgttcctattgaagccactgtacaacgagagcaatctggtaaagctgtgcccttggtgctagtgagatgtgcagactacctggttatatcaggtttgaataatgagtacttattcaaatctgaaggtgacaaaaaagttcttcagcagttagtttctctttacaatgaagactctggcgcatctttacctgaaggtgtgaatcctattgatgtaggtgcactggtgaagtgctaccttgccagtatccctgagccgcttactacattttcgctttatgatgagcttcgagctgcgaggcattgcttcttcgagtcagccataaatcatcacttaacaagatggactcccgcagccttgctgtggaatttgcgcctttgatcatgtggcggcaaggtgatgctggcacagatttgcgtaaccacctcaagttaaccctgaaaccgcctccaaaaattgtggatacaacatcaaatactgccacgtgggacctgtttgatgaggatggcgaggatgcttcatcccagatccccttggacgatgcttcacccccagactacaactccattgaggtcatccagtgtctgatcgagcatcataatgccatcttcactgatgcaaatgaaaccgtgtggagatgatcaaggtctcttctagatctctctggtgttagctcgtgctacgtattagttccaggtaggaaggtggattaccgtccgttattgttaggtataagcattttggctggaacatttttggagtaggtttgtatatatgccgctagtgttaattctccccgggactaagatctggtcatgttatagcaatataagtcttgggtggatgtaaaccagatggacacaggacacgattgtgctgcatttgctgaattcggcttatacactgatgttaatctagggaactgttgccctgtacgttcacggttagctggtagcgtttgtcgtcaaaacaaatcagtgtagata

SEQ ID NO: 104767 - DNA, 1452 bp, Zea Mays
atgtctgctttgcctagaactttaactttgctgtgccgatttaatgcaggtgtcaagctgaagcaggcagggcaatcggccggggataatatagctgatgttgctgggaaggttgggtccgcggtgaagagtcggtgggtcgtcttccaggaggctaggcagcagcagcagcagcaacggccaccgcatgagacagtgcaagagcgtatcatcaccgctgctgccaccactggtttgcttttcaggaaaggcatttcagagacaaaggagaaggttgcagtgggaaaggttaaagttgaagaggctgctaaaaaaactgcagataaaagcaagagtatcttgaacaatattgaacgctggcagaagggagtcgcaagcactgatgtgtttggtgttcctattgaagccactgtacaacgagagcaatctggtaaagctgtgcccttggtgctagtgagatgtgcagactacctggttatatcaggtttgaataatgagtacttattcaaatctgaaggtgacaaaaaagttcttcagcagttagtttctctttacaatgaagactctggcgcatctttacctgaaggtgtgaatcctattgatgtaggtgcactggtgaagtgctaccttgccagtatccctgagccgcttactacattttcgctttatgatgagcttcgagctgcgagggttagcattcctgatcttagggatatattgaagaagcttccaaatgtgaactacatgacaatagagtttgttacagcattgcttcttcgagtcagccataaatcatcacttaacaagatggactcccgcagccttgctgtggaatttgcgcctttgatcatgtggcggcaaggtgatgctggcacagatttgcgtaaccacctcaagttaaccctgaaaccgcctccaaaaattgtggatacaacatcaaatactgccacgtgggacctgtttgatgaggatggcgaggatgcttcatcccagatccccttggacgatgcttcacccccagactacaactccattgaggtcatccagtgtctgatcgagcatcataatgccatcttcactgatgcaaatgaaaccgtgtggagatgatcaaggtctcttctagatctctctggtgttagctcgtgctacgtattagttccaggtaggaaggtggattaccgtccgttattgttaggtataagcattttggctggaacatttttggagtaggtttgtatatatgccgctagtgttaattctccccgggactaagatctggtcatgttatagcaatataagtcttgggtggatgtaaaccagatggacacaggacacgattgtgctgcatttgctgaattcggcttatacactgatgttaatctagggaactgttgccctgtacgttcacggttagctggtagcgtttgtcgtcaaaacaaatcagtgtagata

SEQ ID NO: 104768 - DNA, 1144 bp, Zea Mays
agttgttcaaccattttacattaagagcagcaatgaacaacaaataaatgatccactattacatcacaatcttgcagtgtttggtgttcctattgaagccactgtacaacgagagcaatctggtaaagctgtgcccttggtgctagtgagatgtgcagactacctggttatatcaggtttgaataatgagtacttattcaaatctgaaggtgacaaaaaagttcttcagcagttagtttctctttacaatgaagactctggcgcatctttacctgaaggtgtgaatcctattgatgtaggtgcactggtgaagtgctaccttgccagtatccctgagccgcttactacattttcgctttatgatgagcttcgagctgcgagggttagcattcctgatcttagggatatattgaagaagcttccaaatgtgaactacatgacaatagagtttgttacagcattgcttcttcgagtcagccataaatcatcacttaacaagatggactcccgcagccttgctgtggaatttgcgcctttgatcatgtggcggcaaggtgatgctggcacagatttgcgtaaccacctcaagttaaccctgaaaccgcctccaaaaattgtggatacaacatcaaatactgccacgtgggacctgtttgatgaggatggcgaggatgcttcatcccagatccccttggacgatgcttcacccccagactacaactccattgaggtcatccagtgtctgatcgagcatcataatgccatcttcactgatgcaaatgaaaccgtgtggagatgatcaaggtctcttctagatctctctggtgttagctcgtgctacgtattagttccaggtaggaaggtggattaccgtccgttattgttaggtataagcattttggctggaacatttttggagtaggtttgtatatatgccgctagtgttaattctccccgggactaagatctggtcatgttatagcaatataagtcttgggtggatgtaaaccagatggacacaggacacgattgtgctgcatttgctgaattcggcttatacactgatgttaatctagggaactgttgccctgtacgttcacggttagctggtagcgtttgtcgtcaaaacaaatcagtgtagata

SEQ ID NO: 104769 - DNA, 1546 bp, Zea Mays
gggctgcattcatccatctcgtgcttatcgcctaccccaactccgactcctgctcgtcgctcgccgctcgccgccacgtccagctctctccgcccctccggactagcctagcccctcccgctcaccgtgtcgtctccagaatctggcctacgaccgttgacggctggtgccccctctggcaatcggtggtcgtggtctgtccttgctcaccccatccagatccgctatgcgcgagcctcccctttcctaatcacgcgccccctgccccagcgatccacagctgccgccccctgtatcgccgatccgtggctgccgcctcctccttcccataatcacaccctccggtcccgtcgatccgtagttgtcgcctccccccatcccctaatcacgcgcgtctcgctcccgccgatccgcggatcggctctgctccaaccctcctccgcccctgagatgcagcgagcatcacgggggatttctcccttgaggtgttgcctgagaggtgctgctgaccgagtagcatcattgaagagttactatcgagcacttggattatgtgatcgatgtgcagagaagtggttccaagggaacaagtgtgccaacacggtgcaacttcacgccattgaggaagtctaggatttgctcaccttggatgaagctacagtggaagtcattgaaccaacagaggaactgatgatggttgtatccctgtctaatgcggcatggttcggatctgacatgatatcaaccacgagattacagggtcagattcaacaacataatctcttagttcttattgattcagggtcttcacatactttcctcaatgacattcgtcgaccactattgtttggagtccaagaattgacaacaccaattacagtttaggttgctaatggccaagttattacctgctcacaccaccttccagcagctcaatggaccatcagtatagcccgacgagagtggattggacaaacaagcggatggttatttcttatcaggaaaatactatctaccttactagtgggaatggtggtggaattattgttactatctgaaacatcattatccacatctgactctagcatagcagctgttgcagtggattccagagtgcaagctctactcgacagttatcctagcattttcatcgatccagtgggactcccaccaacccgcccgtgtgatcattcaatttcattgatccccggtgcccagccgttccacataaggccataccgttaccctccaaccctcaaagatgaaattgaaactcaagttaaggaaatgctatccagggggtgatacgaaagagtagcggcccctttgaatctccaattctcttggtcaaaaagaaagaccactcatggagattctgtgtagattaccgttatttgaatgccacgacggtgaagagtaaataccctgtgctgatattcgatcagttctttgtgctcaggcactaggcatgtagaggtattttttgttgttattttctctttatgtggatgtggttacaaggctgttgacaaaatattactactcc

SEQ ID NO: 104770 - DNA, 2932 bp, Zea Mays
gggctgcattcatccatctcgtgcttatcgcctaccccaactccgactcctgctcgtcgctcgccgctcgccgccacgtccagctctctccgcccctccggactagcctagcccctcccgctcaccgtgtcgtctccagaatctggcctacgaccgttgacggctggtgccccctctggcaatcggtggtcgtggtctgtccttgctcaccccatccagatccgctatgcgcgagcctcccctttcctaatcacgcgccccctgccccagcgatccacagctgccgccccctgtatcgccgatccgtggctgccgcctcctccttcccataatcacaccctccggtcccgtcgatccgtagttgtcgcctccccccatcccctaatcacgcgcgtctcgctcccgccgatccgcggatcggctctgctccaaccctcctccgcccctgagatgcagcgagcatcacgggggatttctcccttgaggtgttgcctgagaggtgctgctgaccgagtagcatcattgaagagttactatcgagcacttggattatgtgatcgatgtgcagagaagtggttccaagggaacaagtgtgccaacacggtgcaacttcacgccattgaggaagtctaggatttgctcaccttggatgaagctacagtggaagtcattgaaccaacagaggaactgatgatggttgtatccctgtctaatgcggcatggttcggatctgacatgatatcaaccacgagattacagggtcagattcaacaacataatctcttagttcttattgattcagggtcttcacatactttcctcaatgacattcgtcgaccactattgtttggagtccaagaattgacaacaccaattacagtttaggttgctaatggccaagttattacctgctcacaccaccttccagcagctcaatggaccatgtaagtttatcagttttcaacatctctcaagtttttgactctaccatcatttgatttggtggttggtatggaatggttgcagcagtatagcccgacgagagtggattggacaaacaagcggatggttatttcttatcaggaaaatactatctaccttactagtgggaatggtggtggaattattgttactatctgaaacatcattatccacatctgactctagcatagcagctgttgcagtggattccagagtgcaagctctactcgacagttatcctagcattttcatcgatccagtgggactcccaccaacccgcccgtgtgatcattcaatttcattgatccccggtgcccagccgttccacataaggccataccgttaccctccaaccctcaaagatgaaattgaaactcaagttaaggaaatgctatccagggggtgatacgaaagagtagcggcccctttgaatctccaattctcttggtcaaaaagaaagaccactcatggagattctgtgtagattaccgttatttgaatgccacgacggtgaagagtaaataccctgtgctgatattcgatcagttctttgtgctcaggcactaggcatgtagaggtattttttgttgttattttctctttatgtggatgtggttacaaggctgttgacaaaatattactactccattgtcctccctctcacccataaggtatttgatatattactttgtccagtcgatgcagcttacaaggctgttgacaaaataatccaggtttgttggcacacttttaatctttcttgtacgggtacactacttctaacaatggaatatgaatgttgttttttgcgcaaaagttgcctggcttttagcatcgtttgatgggtgaggacacacatcgcctccaaatactagaacgctagggatatttgttctctcaaataaagctttacctgttatattatataatacttccgtaagaagagctgttagtggctggagtgaatagaatttggttggtcggtgcctccaagttgtttggtctaccgttcaaatgccttattattctgcgagttgttttaagactaggcctcaatttttttccaggcagaaagtgctactgcctctctcaactatagcggtgtggtactgggatccttgccaataagtgtgttttcagggtgagcccgtccatgacgccagtgcgtccccgtgcccctcgccagctgatgtcgtcctaggctctgaagccatcttctggacctcacaagtccagggagtgcatgcctctgatcctcatcatcaggaacatgctcaagtatgcactgacgtaccgtgaggtcatttctatcctgatgcaacgccatgtacttgttgatggcaaggtcaggactgacaagacctaccctgctgggttcatgggtatgccgatatctctattaatgcataaagatacctatacacatatcttggtagctgtgtgaggttgctgtttttcgttagtagatctatgtaccttatccttgctatactgtccatatatgttgtgtgcatgaaagtcttgcattgaaaatgtcatgtgctacaatcgttaggactattaatagatgttgctctttctatctatccatttacatcgctggaaattcccatgccctttcatagtacgcctgtgaaatgctcactgcttttctataggtttgtgtgtagttcaagctctacaaggtgaggtttgttcagtttggccagaaaggcatcccctacctgaacacctatttgttgtacaggaaaacatagaatggaattcaaatttggtggccgcaaaagtgtggagacttgaattcatataaagttaggcttaatattagtgcaaacagttgtattttagtttagatttagagtacacttatgtatgccttgtttgataatgcttatttatgatgtattgagttgtacttatttatattatattaattataatgttgttcaat

SEQ ID NO: 104771 - DNA, 1817 bp, Zea Mays
gggctgcattcatccatctcgtgcttatcgcctaccccaactccgactcctgctcgtcgctcgccgctcgccgccacgtccagctctctccgcccctccggactagcctagcccctcccgctcaccgtgtcgtctccagaatctggcctacgaccgttgacggctggtgccccctctggcaatcggtggtcgtggtctgtccttgctcaccccatccagatccgctatgcgcgagcctcccctttcctaatcacgcgccccctgccccagcgatccacagctgccgccccctgtatcgccgatccgtggctgccgcctcctccttcccataatcacaccctccggtcccgtcgatccgtagttgtcgcctccccccatcccctaatcacgcgcgtctcgctcccgccgatccgcggatcggctctgctccaaccctcctccgcccctgagatgcagcgagcatcacgggggatttctcccttgaggtgttgcctgagaggtgctgctgaccgagtagcatcattgaagagttactatcgagcacttggattatgtgatcgatgtgcagagaagtggttccaagggaacaagtgtgccaacacggtgcaacttcacgccattgaggaagtctaggatttgctcaccttggatgaagctacagtggaagtcattgaaccaacagaggaactgatgatggttgtatccctgtctaatgcggcatggttcggatctgacatgatatcaaccacgagattacagggtcagattcaacaacataatctcttagttcttattgattcagggtcttcacatactttcctcaatgacattcgtcgaccactattgtttggagtccaagaattgacaacaccaattacagtttaggttgctaatggccaagttattacctgctcacaccaccttccagcagctcaatggaccatgcagaaagtgctactgcctctctcaactatagcggtgtggtactgggatccttgccaataagggtgagcccgtccatgacgccagtgcgtccccgtgcccctcgccagctgatgtcgtcctaggctctgaagccatcttctggacctcacaagtccagggagtgcatgcctctgatcctcatcatcaggaacatgctcaagtatgcactgacgtaccgtgaggtcatttctatcctgatgcaacgccatgtacttgttgatggcaaggtcaggactgacaagacctaccctgctgggttcatgggtatgccgatatctctattaatgcataaagatacctatacacatatcttggtagctgtgtgaggttgctgtttttcgttagtagatctatgtaccttatccttgctatactgtccatatatgttgtgtgcatgaaagtcttgcattgaaaatgtcatgtgctacaatcgttaggactattaatagatgttgctctttctatctatccatttacatcgctggaaattcccatgccctttcatagtacgcctgtgaaatgctcactgcttttctataggtttgtgtgtagttcaagctctacaaggtgaggtttgttcagtttggccagaaaggcatcccctacctgaacacctatttgttgtacaggaaaacatagaatggaattcaaatttggtggccgcaaaagtgtggagacttgaattcatataaagttaggcttaatattagtgcaaacagttgtattttagtttagatttagagtacacttatgtatgccttgtttgataatgcttatttatgatgtattgagttgtacttatttatattatattaattataatgttgttcaat

SEQ ID NO: 104772 - DNA, 90 bp, Zea Mays
gcggtcaatcaagtcagttcttgcaaatcaaactttgcgacacttcaggcactcctcaagctattctatgctgttgcaaatgaaaaccag

SEQ ID NO: 104773 - DNA, 749 bp, Zea Mays
gcctgcgtcgtcgaacagcccaaggccaccgcatttgcacaccgtcagggatgggggcaaccgtgcacctcaccgtaaccggtgccctcggcgtgacgtcgccgcctctcgctccgtcccactgcacctgcgccggcgccaagaagcagagctgctcgctgcgttcgccgcggcagcagaggaggcgcctccgcgtcgtcgagatgggcgcgccttccggcggggagccttccgccggaggaggtggaggagccgtccatcgacttcgcgttcgtcagcgcctcaggcgtctttctggaactgattcgttttcgctgctgctctctgctggttgccgcaggataaagttcttctcaactgctcagggggcggtggtcgaaggcaaggaaatgctatccccaaaaaccgaagtggagaaggagttgctcaaaaggaaacccaagacgtggagattggcgtgccaggcaacggtgggcaatgcagattcaaccggacagatgatcattcaacagttgccagagtggaagatacatgagtgggacaagtagaagggcagatgccatggaaaatggggaaaatgagaagcagttgatcagtagaatagctggtgcagattgatgaagcttttcatactcaagcaaaatcttgggcatgtttttcaccatttgtagcacaactgaatggagcatggatgaattagcatcgtcctttaaaatgttctcttataataagatcctgtttggaagcaa

SEQ ID NO: 104774 - DNA, 825 bp, Zea Mays
gcctgcgtcgtcgaacagcccaaggccaccgcatttgcacaccgtcagggatgggggcaaccgtgcacctcaccgtaaccggtgccctcggcgtgacgtcgccgcctctcgctccgtcccactgcacctgcgccggcgccaagaagcagagctgctcgctgcgttcgccgcggcagcagaggaggcgcctccgcgtcgtcgagatgggcgcgccttccggcggggagccttccgccggaggaggtggaggagccgtccatcgacttcgcgttcgtcagcccacggctgctgccggacgggacgccggacgtgcattaccggacggcgcgcggcgggcagaagctcagggacgtcatgctcgacggctacatcgacctctacgggccctacgataaagttcttctcaactgctcagggggcggtgtgtgcgggacctgcgtcgtcgaggtggtcgaaggcaaggaaatgctatccccaaaaaccgaagtggagaaggagttgctcaaaaggaaacccaagacgtggagattggcgtgccaggcaacggtgggcaatgcagattcaaccggacagatgatcattcaacagttgccagagtggaagatacatgagtgggacaagtagaagggcagatgccatggaaaatggggaaaatgagaagcagttgatcagtagaatagctggtgcagattgatgaagcttttcatactcaagcaaaatcttgggcatgtttttcaccatttgtagcacaactgaatggagcatggatgaattagcatcgtcctttaaaatgttctcttataataagatcctgtttggaagcaa

SEQ ID NO: 104775 - DNA, 1307 bp, Zea Mays
gcattgtcttattggtggagcccaacatcatctaatggcatcaaattaattaaacaacattctacatataagagttatatattttaggtttttattggtattcttgtataatgcgatgctttttttaggagtgcgttggcaacgtcctcctgttgctccaagccgtccatagtttcattttcattgcaccggacatgcatccacaagcaaagcacgcatgcatctaaaaatggcaggtgcatgcctgcgcccctacgtatatattactatcacgtagctagcttgctataccaaggacaaatcaaaccatagcatcaatcatgtctggtcgttcgtggacaataatggcgcctctcctggcgtcgatgctgctcgtcgggctcgccgtgggctccgaggaggaggaggacggcggcggcaaaaagaagccccacgtcaaccacggcaagtttaaggcggagccgtggacggacgggcacgcgacgtactacggcgggcgcgacgggttaactgacaccacggacggcggcgcgtgcggctacaagggcgagctggggaaagactacggcaccctgacggcggccgtgggcccgtcgctgtacaccaacggcaccgggtgcggcgcgtgctatgagctcaagggccccaagggcaccgtggtggtgacggccaccaacgaggccccgccgccggtgagcgggcagaagggcgagcacttcgacctcaccataccggcgttcctcaagatcgccgaggagaaggccggcatcgtgcccatcacctaccgcaaggtggcgtgcgagaggaaaggcggcatccggtacacgatcacggggaaccagcactacagcgaggtgaaggtgaccaacgtgggcggcgccggggacgtggtggcgctgtgggtgaagggcaacaagcgcgtcaagtggacgccgatgaagcgcagctggggccagctctggaccacggaggtcgacctcaccggcgagtcgctgacgttccgcgtcatgaccgccgaccaccgcaaggctacctcctggcacgtcacgccccgcgactggcagttcggcaaaacgtaccaggccaccaagaacttctagggccggatcgggccggggagctgagccgcgcccttctttatatgtatatgcatgcagcggattatattggactgttttgtactgtgtactaccttctttattccatgataaacatgttccaatttcaacaccattggtttgagcggtcagcaggcagcagcacagcacagagcacaaaagttctgatgcgtcagcttctacgatttg

SEQ ID NO: 104776 - DNA, 1643 bp, Zea Mays
cagccaggcgaatggatctcctttttctcggccatttccatttctaattcaatcggcgacgggggaggcgctgcaacgccacagcagtacaggcttcctccgccatcggcaatggacgacagcgacctcgactccgcagcgctctgggccgccatcgactccgccgctgccaaggcctcctcccgcgtccgctgcgccgccagcgacgacgaccaccgcggcgaggtgctgcagccggcccgcccgttcaaaaacccgcggctcgtctccgcctctcacgccacaccgcctccccccgcaccgctgcctctgccctcgccatcgccccggcttcatgcgtctccctacgccacgcccgacgcagcggcagccaggaacaggctccaggtcgttgagagccccccgccccatgagctctgggggcttcccatggcgagccccatcgccgccgcctatgacgggggcttgctcccctccctctccgtggccaacttcaaaaactaccaggacgtagctctctcgattttggagagaagtgactacaccactatcagtgggaacccgtacataaagaagtcagggtggagaaaaatatcttgcttcttcaatgtctcgtttgaaatcaaggatcactccattgagtttgatgaaaaccgcaatgtcaaccgtgctgaatttcttgttcgagcgtcaatgacaggtgggagattctcagacggttggggctcctgcgatcgacgagagaaaaaattcaacaaacctaaccatgacattcccagcacagctgaaaccagagctaagaacaaggcttgccaggatcttcttggaattggacgtccaggatgagaagtggaggtcactggaccccaaaggtggagtccatgaggtgtttacctttagatcagctactcatcaccagatcctgaagtggagtccacaaattttggttatagtcaaggttgtctgtgtggctgttagctcagtgcaagaatatactggtacgtaggtttcttaacatttgaagcaaatgagaagggcgtagtaatgttttctgaactctgaaggtttagcatttagggtattttagctaatgctaattcggtgaaagagtgtaacacccttcttgcagatatgaagttagtagaagggcgcaatgttctgctcctctttgttagtgaaaagcctatcagatcggggggaggggggatgtgtgctcggatcacctgtggcactgaactttttttgttgtggtgtggacattggctgcccctctaaaatggaagtttgtttgcgcatcgagatgcgtcagctgatgaaagaaccaaatacaaggagcaggagcgatcttcctttttctcagatggaaactgcaaacgggaaacagtgtggtgtaggaagaactcgaacgaactcaagaactctagcaaatgtgatatgagtgaattattatcacaaaatcaaggcgtctggaaatatgtccggagcaataggcgagcgagccagcgggacgcaaggtaccagcaatactctcagcaatacgctcggtgatcatctgtcatctgggacatgtatgtatatgagtttttttttttattgatcaaagaattactttttttaagaaaattatcaagtgattactttgt

SEQ ID NO: 104777 - DNA, 336 bp, Zea Mays
atgacaaatgacaaatgtgatgatgtacaaaagagcaataacttgtttgactacatatcctcttattgcgtacagatcacaaggtgcaaacagagaacccaagtggcgtgcgcgagatgggagagcggcggtacctcgggcctcggcccagcgggcggagaggaagcgccagggccgggcgacgtggccgtggcggcggcagcggacttggcaaagtttctcgtgagggtttggagaggaagcgaaggcggcgagggagccttcgccaaggccctggagagggcgccggcctccgccgcagagttgcgggacgcggcagctgcggagatgctgtag

SEQ ID NO: 104778 - DNA, 2714 bp, Zea Mays
gcttcgcttccaggcttccacagtccacaccaccaccccactccgcccagctccctcgagcgcgcagcgcggcggtggcgatgccgagctcccggcggactacaggccgcggcggtgcaggcgcaggcgcaggcggcgcgggggcgggtgatgcaggaggcggcgacggcgaccgagtgccgcggttcatgggcaacaaccgcgaccacaacccgcgggagctgcgctcctgggcgcgccgcacggggttccacccctcggctttcttctcgggggagtccaactcctccttcgcctcctccgccgcgccgcagccaccgccgccgcctcccccggcctcctcgcgtcgcccgccgcgcccgccgccggagcgggaccccgatccggacgcggaggatgacctcgatcccgcgcccggccgcggacgcggcagacgcccgcgtcgacgcatcgacctccgcggcgagctccagatcccgccgggcttcggccgcgaggaggcggtgccggggtcggcggagccggacgcgcggaggggaggcgcgcgcggggacgccacccggaggaacggcggcgtcgagagaggccaggcgccggccaatgccggccggaacggcaacggagcgctcgcggacgcggacgcgaggaagaaggccgaggacgcagaggcgaagcggaaggcggaggaggccgaggcgaggaggaagaaggaggacgaggagagggatgccgagctggctgcgtactaccaggagcagtgggcgaatgaggatgaaggagctgcgggcgctgccgccgccgctgctgagacggccccgctgtatgaggcgtcgggactccggtgtggtgtaaccgagaaccccggatgggcacccctcatattttatggcatacaacattacctgtcaatagctggttcgcttgtctttgttcctttgatactggtacctacaatgggtggctctgatgaggatactgcaacagtcatctccaccatgttattaatctctggtcttactacaatactacatacttttttgggttctcggcttccactgattcaaggaagctcctttgtatatttggctccagcgttggtaattgcgaactcagaggagttcagaaatcttagtgacaataaattcaagcacataatgagagaactacagggggctatacttgttggttcagtatttcagataatattaggatacactggccttatgtcactgtttctgaggttaataaatccagtagtggtggcaccgactattgctgcagtgggtttggcattttttagttatggttttcctcaggctggcagctgtgtagaaatcagcatgccgctcattctgttggttcttctgtgcactctgtacttgagaaaaatatccctgtttggcaaccatatcttccttgtctatgcggtgcccctcagtgttgcaattgtatgggcatattcattcttcctaactgcgggtggagcatataacttcaaaggttgcagctcaaatatacccagttcaaacatattactggattcatgcagaaggcatttagaaaccatgagacgctgccgtactgatgtttctagtgcatggagaactgctgcctgggtgaggattccctatccgttccaatggggcccaccaacatttcattctaagacgggtatcatcatgataatagtgtcgctggttgcttcagttgattcgctttcatcgtaccatgctgcatcgctgctggtaaatttaagtccaccaacacgcggagttgtcagcagagcgattgggcttgaagggatttcaagttttattgctggagtgtggggtacaggtacaggatcgataacattaacagagaacatacacacccttgaaacgaccaaaatggccagcagaagggcattgcagcttggggcagccgttttagtcgtctgctccttctttggtaaaatcggagctctcctagcctctatacctcttgcattggccgcctctgttctgtgcttcacctgggcgctaatcgttgcacttggcttgtctacgttgcgatacacccaagcagcaagctccagaaacttgataatagttggatttaccctattcatctccctgtcaatccctgcatactttcagcagtacgaacccagctccaatcttatcttgccaagctatcttctcccttatgctgcagcgtcaagtggaccagttcgcacagccagcagtgggttgaattatgcagtgaatgcgctcctatccatcaacgttgtggtggctctccttgtcgcgttgatccttgacaacactgtgccaggcagccgacaagagcgcggtgtgtacgtttggacagatcccaaatctctcgaggtggatcctgctaccttggaaccctaccgattgccggaaaagatttcgtgctggttcaggtgggcaaagtgtgtcggcatgtaaaggttctcaaagtcaggggccgcgatgaaaatattctatttattccattggtaccttgttactgtaggatttactatatgagaatatataatatatatagatacagatgctacatagttaggggcctctcttgctgctgttaggttaggataagcacatgtaaagttttggtcatgttagaggggacacgttctatgagctatgctatgtaagtttgtagaaatgctacgttcaaatgaccagtcaccgagtttaaccgtt

SEQ ID NO: 104779 - DNA, 2506 bp, Zea Mays
atggccagcgctcacgacgatcttgtgacctactccgccaagatggacctcatcctcgcgcaactcgccaccatcaatgcccgtttggattcccacgacgctcgtctagccaagctcgagcaggcgtgggtcagcccctctgcttctaccgcgggctgtttgggcgcgagcgagggcggcctgggcgcgggcggaggcggccgggtcgaggacgatgggctgcaacccgacacacccagggaggaggtggaggcggcgttctacgttgtggtggccgtgccactgctgcagcccgccttcgtgctcgtggaggtccaggcgtgggccgactgtgcgcggatctgctcgcccaatctgcaacaatcgggaccatggtggcccaacctgtagaggtgctgctgcgggataaccctccacgccacagctaccaatcctccgcgtcgtggccatcaatcttctgcaccacagacaaccatctgctgcgtcgtcgcagctgtggtcgacgtcggccaccttggcccccgccgcggcgtggtcacctgagctacaacaccggagggtgccaccgacctttgccaggcgcagggagccctctgcgccaccgcagccacgtccttcattggtcgagctggccgccgacgcgtcctcttcggtagatccgaccaatttttttctaggtgaataaaagactaagtcgagatgtaaaagacttagtattgagtcattaagtgctagttttgtatgagtcaattcttcttgactacagctcgcggacgaactgtttttaaggagggatggaatgttatgggccttaagcccattagctagggcattatggttaggttagacgtggccactgttcacgcgcggttactgtagcgcgtgaacagtgccggccagatagggtttgttatgttgcttagcttttaagttagggttacgtctctatataaggaggggcgcagggtgttagttgagataagcaagaagaatagatctggtttactcctagggcctcctacgggagggctgagtaccgggactatcttacgagtgcatcacagttcacaacatacctgtttgtattttaatcattttcactggcatgtttttccctttgacttgtattgctccatgtctaactgattaatgtacttatccatttcagtacttgagaaaaatatccctgtttggcaaccatatcttccttgtctatgcggtgcccctcagtgttgcaattgtatgggcatattcattcttcctaactgcgggtggagcatataacttcaaaggttgcagctcaaatatacccagttcaaacatattactggattcatgcagaaggcatttagaaaccatgagacgctgccgtactgatgtttctagtgcatggagaactgctgcctgggtgaggattccctatccgttccaatggggcccaccaacatttcattctaagacgggtatcatcatgataatagtgtcgctggttgcttcagttgattcgctttcatcgtaccatgctgcatcgctgctggtaaatttaagtccaccaacacgcggagttgtcagcagagcgattgggcttgaagggatttcaagttttattgctggagtgtggggtacaggtacaggatcgataacattaacagagaacatacacacccttgaaacgaccaaaatggccagcagaagggcattgcagcttggggcagccgttttagtcgtctgctccttctttggtaaaatcggagctctcctagcctctatacctcttgcattggccgcctctgttctgtgcttcacctgggcgctaatcgttgcacttggcttgtctacgttgcgatacacccaagcagcaagctccagaaacttgataatagttggatttaccctattcatctccctgtcaatccctgcatactttcagcagtacgaacccagctccaatcttatcttgccaagctatcttctcccttatgctgcagcgtcaagtggaccagttcgcacagccagcagtgggttgaattatgcagtgaatgcgctcctatccatcaacgttgtggtggctctccttgtcgcgttgatccttgacaacactgtgccaggcagccgacaagagcgcggtgtgtacgtttggacagatcccaaatctctcgaggtggatcctgctaccttggaaccctaccgattgccggaaaagatttcgtgctggttcaggtgggcaaagtgtgtcggcatgtaaaggttctcaaagtcaggggccgcgatgaaaatattctatttattccattggtaccttgttactgtaggatttactatatgagaatatataatatatatagatacagatgctacatagttaggggcctctcttgctgctgttaggttaggataagcacatgtaaagttttggtcatgttagaggggacacgttctatgagctatgctatgtaagtttgtagaaatgctacgttcaaatgaccagtcaccgagtttaaccgtt

SEQ ID NO: 104780 - DNA, 756 bp, Zea Mays
atggagaaatctccaagatccattcctatcggatctggacctgctagggccgacacacgcaaagatgtcgcagaagctgcagaagggagtaggcgcacaggcatcgtcgacacgagtaacattgattatggcactagtagattacgcccgcgccatcgattatgtaggacacatggtccagcgcaaagatataatcgagtttgggatggtcttttagacgccattagacatatgcaattatctgccgatgagttgaggaagttgagccgccacaatcatgtgcctgagtatttggatatgttgcacaaaaattgcttggttaatgccatgagtgatgttactgaaattgcaaaaggtctagacattatgagcagggatttggaggaagttcttattggtccgcaacctctacttgaggattacgaagcccttggaatgtacgatgatttcaaaaccaatgttcattgtgattgtactgagcagtgtggttcagatgaggacaactcttcttttgactcggatgagatccctgatcgccgtatgaagggctctaaaacaagctacttcagaaattcagtagcattttcagagttcagttctgtctgcttggttttctgtcactttgccttgtcggccttctcttcgtgccttactgaccagggacgtgctgacagagttctacagggacgtgctcccagggaactgcatcgttcacgacatattggactgaagctaggactaattgaagctaactga

SEQ ID NO: 104781 - DNA, 2344 bp, Zea Mays
cttcgccctcctgccctcccggcgaggtcgcctctgcttccgactccgctcgactgcgcccgaccccagtctcgcctgcgtccaccggcatggcctcacccacggtcgcctccccgacccgggcgagccccgccgacatccccaccgccgcaccctcgtcggccccccggccgcggcgcctcgcgtcggcgccgcccgcagtctacgcgtctgcgtcctcctccccggcctccgcctactccggggaccagctctccgcccccgacgcctcgagcccgctgctcgcgagcaggagcgaggagtacaggcttctgttccggctgccgcccgacgaggttctcgtgcaagattttaactgcgctctccaagaaaatatccttcttcaggggcatatgtatttatttcttcaccatatatgcttctactctaacatatttggatatgagactaagaaaacaatacctttgcaagaggtaacagatgttcgtaaagcaaagacggctgccattttttctaatgccattgaaattgttgctggtagtagaaggcacttctttggatctttcttgtcacgtgatgaagcctatcaaattatagtagatggctgggaacaacatgttagtaatgcaagattactccttgaacgtcaggagacaaagtcagctagtagcagtgaagaaaatggttatgttttattggaaggagcaaaggaacctaaacaagatgaagattcatcaccgctggacaggtctgtcaatagtacggctgtctccagtggtagtgctgatggtggtgattcgaacatcaacatttccagaaggttttcaaatgttgaggagaatggactcgaagacaacatcatcacactaaacccattcaatttggagccagttgatgatactcctagtgtacctgaatcttacacttcggtcacggagtcaaagtttcaggtttgcaaggttccatttctttgtagtagtattgacaattgcgtttacaacactaacatctttaaaacaggtgcctgtggaggttctttttaatttgttattgtctgatggtgcttttggctttttggatgatttccacaaaaattgtggtgacaaagaatttagttgctccaaatggcgtacagatgaacaagggggacttgtaagggatgtctcatttttgcacccaataaaaatttatcttggtgcaaaatttgggacttgtcaagaggtccagaaacttcgtctttacaaaaacaggcgtctagtgattcaaacctctcagtcaataggtgatgccccatatggggaccatttcactgtagagggcatctgggatgttgaacaagatagcctagatgagaactgttgttacctcaggatatatattaatgtagccttctcaaagaaaacaatatttagagggaaaatagagcagtcaacaaaagatgaatgccgagaagttttcagtctctggattaagctcggccatgatcttttgaagcaggagtatgatcgatcaaaaggcacttccagcacaactgattctggtgctcaatcaggggctataacgaacgaggaaaataccggggaagtagcagtacccatggtgagtacctcacaggatgtatctggtgcgaggagcctcattcctccttttcaagatccccagcagagaacaggaagagattcttccatcgggtccacttcacaagaactgtggggttcactaacgtcacacatgagatcaagccaacttggtccagtactagcagtggcgctggtggctatcattgtcctattgcaggtaaccatcatagttctgctaactaggtccccccaggtccagatggctcctcacgggatctcgacgggcagtttcgggtacagcaaagaaagcatggagtgggcgcagaagcgcctcagcctactcagggaggagatgcaggtggctgaggcgcacatggagaggatgaggcacgagtttgcctggctcagatcttacctggagggactggagaggctgaggcgccgcacatgaccgcagcgcgtgtacacgacaggggcacgattccgcgatgcggattcgttggtatacagtacgaactcggagacgttgttcaggtttcttcttcttctgtgttgctacagaccgtacagatgcaaacggagagctggtgccgtggtggtggtgttgcagaggtattgccgtaaggcagaactgccagatcccggtacagcattcaatgtaaatagctgggggacgtgtcattgccatgacgatacagcggcgtgatgttagaaacctcgcactacttttttttttcagaaagtaaaaaactttttgtggttta

SEQ ID NO: 104782 - DNA, 2274 bp, Zea Mays
cttcgccctcctgccctcccggcgaggtcgcctctgcttccgactccgctcgactgcgcccgaccccagtctcgcctgcgtccaccggcatggcctcacccacggtcgcctccccgacccgggcgagccccgccgacatccccaccgccgcaccctcgtcggccccccggccgcggcgcctcgcgtcggcgccgcccgcagtctacgcgtctgcgtcctcctccccggcctccgcctactccggggaccagctctccgcccccgacgcctcgagcccgctgctcgcgagcaggagcgaggagtacaggcttctgttccggctgccgcccgacgaggttctcgtgcaagattttaactgcgctctccaagaaaatatccttcttcaggggcatatgtatttatttcttcaccatatatgcttctactctaacatatttggatatgagactaagaaaacaatacctttgcaagaggtaacagatgttcgtaaagcaaagacggctgccattttttctaatgccattgaaattgttgctggtagtagaaggcacttctttggatctttcttgtcacgtgatgaagcctatcaaattatagtagatggctgggaacaacatgttagtaatgcaagattactccttgaacgtcaggagacaaagtcagctagtagcagtgaagaaaatggttatgttttattggaaggagcaaaggaacctaaacaagatgaagattcatcaccgctggacaggtctgtcaatagtacggctgtctccagtggtagtgctgatggtggtgattcgaacatcaacatttccagaaggttttcaaatgttgaggagaatggactcgaagacaacatcatcacactaaacccattcaatttggagccagttgatgatactcctagtgtacctgaatcttacacttcggtcacggagtcaaagtttcaggtgcctgtggaggttctttttaatttgttattgtctgatggtgcttttggctttttggatgatttccacaaaaattgtggtgacaaagaatttagttgctccaaatggcgtacagatgaacaagggggacttgtaagggatgtctcatttttgcacccaataaaaatttatcttggtgcaaaatttgggacttgtcaagaggtccagaaacttcgtctttacaaaaacaggcgtctagtgattcaaacctctcagtcaataggtgatgccccatatggggaccatttcactgtagagggcatctgggatgttgaacaagatagcctagatgagaactgttgttacctcaggatatatattaatgtagccttctcaaagaaaacaatatttagagggaaaatagagcagtcaacaaaagatgaatgccgagaagttttcagtctctggattaagctcggccatgatcttttgaagcaggagtatgatcgatcaaaaggcacttccagcacaactgattctggtgctcaatcaggggctataacgaacgaggaaaataccggggaagtagcagtacccatggtgagtacctcacaggatgtatctggtgcgaggagcctcattcctccttttcaagatccccagcagagaacaggaagagattcttccatcgggtccacttcacaagaactgtggggttcactaacgtcacacatgagatcaagccaacttggtccagtactagcagtggcgctggtggctatcattgtcctattgcaggtaaccatcatagttctgctaactaggtccccccaggtccagatggctcctcacgggatctcgacgggcagtttcgggtacagcaaagaaagcatggagtgggcgcagaagcgcctcagcctactcagggaggagatgcaggtggctgaggcgcacatggagaggatgaggcacgagtttgcctggctcagatcttacctggagggactggagaggctgaggcgccgcacatgaccgcagcgcgtgtacacgacaggggcacgattccgcgatgcggattcgttggtatacagtacgaactcggagacgttgttcaggtttcttcttcttctgtgttgctacagaccgtacagatgcaaacggagagctggtgccgtggtggtggtgttgcagaggtattgccgtaaggcagaactgccagatcccggtacagcattcaatgtaaatagctgggggacgtgtcattgccatgacgatacagcggcgtgatgttagaaacctcgcactacttttttttttcagaaagtaaaaaactttttgtggttta

SEQ ID NO: 104783 - DNA, 2005 bp, Zea Mays
ttttcaaaattgtttgagttaaattacacacttatctttttatcttttaaggaaataagtgtaatactaaatttagcattcttaatggatttcatactaaaatgtgttatcttgcaggggcatatgtatttatttcttcaccatatatgcttctactctaacatatttggatatgagactaagaaaacaatacctttgcaagaggtaacagatgttcgtaaagcaaagacggctgccattttttctaatgccattgaaattgttgctggtagtagaaggcacttctttggatctttcttgtcacgtgatgaagcctatcaaattatagtagatggctgggaacaacatgttagtaatgcaagattactccttgaacgtcaggagacaaagtcagctagtagcagtgaagaaaatggttatgttttattggaaggagcaaaggaacctaaacaagatgaagattcatcaccgctggacaggtctgtcaatagtacggctgtctccagtggtagtgctgatggtggtgattcgaacatcaacatttccagaaggttttcaaatgttgaggagaatggactcgaagacaacatcatcacactaaacccattcaatttggagccagttgatgatactcctagtgtacctgaatcttacacttcggtcacggagtcaaagtttcaggtgcctgtggaggttctttttaatttgttattgtctgatggtgcttttggctttttggatgatttccacaaaaattgtggtgacaaagaatttagttgctccaaatggcgtacagatgaacaagggggacttgtaagggatgtctcatttttgcacccaataaaaatttatcttggtgcaaaatttgggacttgtcaagaggtccagaaacttcgtctttacaaaaacaggcgtctagtgattcaaacctctcagtcaataggtgatgccccatatggggaccatttcactgtagagggcatctgggatgttgaacaagatagcctagatgagaactgttgttacctcaggatatatattaatgtagccttctcaaagaaaacaatatttagagggaaaatagagcagtcaacaaaagatgaatgccgagaagttttcagtctctggattaagctcggccatgatcttttgaagcaggagtatgatcgatcaaaaggcacttccagcacaactgattctggtgctcaatcaggggctataacgaacgaggaaaataccggggaagtagcagtacccatggtgagtacctcacaggatgtatctggtgcgaggagcctcattcctccttttcaagatccccagcagagaacaggaagagattcttccatcgggtccacttcacaagaactgtggggttcactaacgtcacacatgagatcaagccaacttggtccagtactagcagtggcgctggtggctatcattgtcctattgcaggtaaccatcatagttctgctaactaggtccccccaggtccagatggctcctcacgggatctcgacgggcagtttcgggtacagcaaagaaagcatggagtgggcgcagaagcgcctcagcctactcagggaggagatgcaggtggctgaggcgcacatggagaggatgaggcacgagtttgcctggctcagatcttacctggagggactggagaggctgaggcgccgcacatgaccgcagcgcgtgtacacgacaggggcacgattccgcgatgcggattcgttggtatacagtacgaactcggagacgttgttcaggtttcttcttcttctgtgttgctacagaccgtacagatgcaaacggagagctggtgccgtggtggtggtgttgcagaggtattgccgtaaggcagaactgccagatcccggtacagcattcaatgtaaatagctgggggacgtgtcattgccatgacgatacagcggcgtgatgttagaaacctcgcactacttttttttttcagaaagtaaaaaactttttgtggttta

SEQ ID NO: 104784 - DNA, 4142 bp, Zea Mays
cgccgcatacgtgcgcctccctacttgcccctgccctgctcatgtactcaccacaatcttacgggatccccaatcttacacctaggaggaggctacgacctcaagaagctctgggctgtggcgagctgcgagcattgagtcgaggggcaccgagaagatggcaatggtgcggccattcttggcgccgctgatgatagcggcggtgtttcttctttcatgtatggcggcggcggcggcagacgacggcgacgtaatgctgcaggtgaagagcgcgttcgtcgacgacccccaggaggtcttggcgagctggaacgccagcgcgtcagggttctgttcctggggcggcgtggcgtgcgacgcggcggggctcagggtcgtgggcctcaacctgtccggcgccgggctggccgggacggtgccccgcgcgctggcgcggctcgacgcgctggaggcgatcgacctgtcgtcgaacgcgctcacgggccccgtcccggcggcgctcggcgggctgcccaacctccaggtgctgctgctctactccaaccagctcgcgggcgtgctaccggcgtcgctggtggcgctctcggcgctccaggtgctccgcctcggcgacaacccgggcctgtcgggcgctatcccggacgcgctaggcaggctcgccaacctcaccgtgctcggcctcgcctcctgcaacctcaccggcccgatcccaacgagcctcgggcggctcggcgcgctcacggcgctaaatctgcagcagaacaagctgtccgggccgataccgcgtgccctctccggcctggcgagcctccaggtgctcgcgctcgccggcaaccagctcagcggcgcgataccgccggagctcgggaggatcgcggggctccagaagctcaaccttgggaataactcgctggtgggcgccataccgccggagctcggcgcgctcggcgagctccagtacctcaacctcatgaacaaccgcctctccggcctcgtcccgcgcgcgctcgccgcgatatcgcgcgtgcgcacgatcgacctgtccggcaacatgctctccggcgcgctgcccgccgagctcggccgtctgccggagcttactttcttggtgctatccgacaaccagctcaccggcagcgtccccggcgacctgtgcggcggcgatggagcggaggctagtagcctcgagcaccttatgctctccacgaacaacttcacaggggagataccggaggggctctcgcggtgccgggcgctgacgcagctcgacctcgctaacaacagcctctccggcggtatccccgccgcgatcggcgagctcggcaacctgacggaccttctgctcaacaacaacagcctctctggggagctgccgccagagctcttcaacctcgccgagctccagacactggcattgtatcacaacaagctcaccggtcggctgccggacgccatcggccgcctaggtaacctagaggtgctgtacctgtacgagaaccagttcgccggcgagataccggcgtccatcggcgactgcgcgagcttgcagcaggtcgatttcttcgggaaccggttcaacgggagcataccagcgtccatggggaacctgtcgcagctgatcttccttgacctcagacagaacgacttgtccggcgtgatcccgccggagctgggtgagtgccagcaactcgaaatctttgatttggccgacaatgctctgtccgggtcgattcccgagacgttcgggaagctccgttcgctggagcagttcatgttgtacaacaactcgctgtccggcgcaataccggacggcatgttcgagtgccggaacatcacgagggtcaacatcgcccacaaccgcctcagcggcagcctcgtgccgctctgcggcacggcgaggctgctgtcgtttgacgcaaccaacaactccttcgacggcaggatccccgcgcagcttggccggtcgtcttcgctccagcgcgtgcgcctgggaagcaacatgctctccgggccgatcccgccgtcgcttggcggaatcgccacgctgaccctgctggatgtgtcaagcaacgagctcaccggtggcatcccagcggcgctcgctcaatgcaggcagctcagcctcatcgtcctgagccacaaccgcctgtcaggggcggttccgggctggctgggctcgctgccgcagctcggcgagctggcactctccaacaacgagttcaccggagcaatcccgatgcagctcagcaactgctccgagctcctgaagctgtccctcgacaacaaccagatcaatggaacagtgccgcctgaactcggcggcttggtgtccctcaacgtactgaatctcgcacacaaccagctctcaggtccgattccgacgacggtcgcaaagctgagcggcctctatgagcttaacctgtcgcagaattacctgtccggcccgatccctccggatatcggcaagttgcaagacttgcagagcctgctggacttgagcagcaacaatctcagtggccacatccctgcatcgctcggctcactccccaagttggaaaacctgaacctgtcccacaacgctctggtcggcgcggtgccgtcccagctcgctggaatgagtagcttggtgcagctggacctgtccagcaaccagctggaagggaagctgggcaccgagttcggccggtggccgcaggccgcattcgctgacaatacagggctctgcggtagccccttgagaggttgcagcagcagaaacagccattcggcgctgcacgcggcgaccatcgcgttggtgtctgcggtggtcacgctgttgattatcctcctgatcattgcgattgcgctgatggtggtgcgccgcagggcccggggttcaggcgaggtgaactgcacggcgttctcgtcgtcgagctcgggcagcgcaaaccggcagctcgtcgtcaagggctcggcgcggcgggagttccggtgggaggcgatcatggaggccacggcgaacctgagcgaccagttcgccatcgggtccggcggatcaggcacggtgtacagggcggagctgtccactggcgagacggttgccgtgaagaggatagcgcacatggacagcgacatgctgctccacgacaagagcttcgcgcgggaggtcaagatcctgggccgcgtccgtcaccggcacctggtcaagctgctcggcttcgtcacgtcccgcgagtgcggcggcggcggcggcatgctcgtgtacgagtacatggagaacggcagcctctacgactggctgcacggcggcagcgatggccggaagaagcggacgctcagctgggaagcgcggctcatggttgccgccgggctggcgcagggcgtggagtatctccaccacgactgtgtgccccgcatcgtgcaccgggacatcaagtccagcaatgtgctcctcgacggcgacatggaggcgcacctcggcgacttcggcctcgccaaggccgtcgccgagaaccggcaggccgccttcgataaagactgcaccgagtcagcttccttcttcgccggatcatacgggtacatcgctccagagtgtgcttactccctgaaggcgacggagagaagcgacgtctacagcatgggcatcgtgctaatggagctcgtcaccgggctcttgccgaccgacaaaaccttcggcggcgacatggacatggtgaggtggggtgcagtcgaggatggatgcgccgttgccagcaagggagcaggtgttcgatcctgctctgaagccgctggcgccgcgtgaggagtcgtcgatgacggaggtgctggaagtggcgctccggtgcacaagggcggcgccgggtgagaggccgaccgcgcggcaggtctccgatctgctgcttcacgtttcactcgattactgacgcgtctgcgagatgaattagactttgttcgtttgtgtcggattgatgggtcagaacgattcctaaccggattgtttctctaatttatataaactttgattagctagaacgatttcgggtgtaatccgacacaaacaagactttaggatttgaaaagtgggctggattgtcttagcagccgctttgactgagtcgtgcttcagctagcctatctttaattcaagaaattagggcgagcgg

SEQ ID NO: 104785 - DNA, 1586 bp, Zea Mays
gtccgctccaccaatcccgtctcccccgaccacggccgcgcctggagcggcgggccgcgcgcggccaccctcgccgtctccacgccaccgcggcgagcgcggcgcccactcgcccaccgggcgcaccctcccccacgtgtcccccctgccgcctgagggccccgcctgtcacccaccgtccccggggtgggcagccgaaagcgacgcgtgaagcgctctgccctgcctgctgccctcagcgctcgcctctcgtcacgcgcccccttcacaacccccgatgcgatgggtgcccctgcccctcgatagtcgcgccgctctcctgcccgttcggccgttccccatttgcctcgtcgcccaccgccccattagcgccgccctcccctatccgacccaacgccgccgccgccgccgcatagacctcgccggcgcctctgcgccgccccgtggcctccagaggtgctattcgcgcgcgatccgccgctgcgtccgtcgctctggcatcgattcggcggcgctgggagtatgtctctggtgcaagtgtgctgaagatgaaggagaggagctctttatgtgaaagtgcagccgatggaaactggggtttgaaatataaaaggaaaagaagcaagttaaccgttagcccatctaatgagaatgaggctacctcaccaacatctgactctccaatgagccatggttccaccaaaaagaagttgaagcatgacactaacatttctccatcagccaagaagataagaggacacgatgggtatttttttgagtgtgtagaatgtgatcttggtggcaatttgctatgttgtgatagctgtcctcgtgtttaccacttggaatgcctcaatcctcctcttaagcgtctaccccctgggaagtggcaatgtccaagatgccgtccgaaaaaaggtagcttgaagatgttaggtaatgcagaggttggcacttctaaacatgaaaaaagtacaaggacatatgcaggtacgacatcaggtagtccaccttcgcatacaaaagtctcctttaagaccaggaactccacacaagacaaaactggatcaaaagaacaaggaaaacagtcatctggtggcacaatgatgggtggtgacccgaataatgaagttgagaaaaagaacacattgatattacatttgaagaagcactcaatgaaggaattatcagagaatgctaaacctttgaagtcaaaatttgttggagagccttcagaagagaaaattgttaaacatggaagtgtcttgaaactcaagaaacattcagaccgtatggacttgtctccaaataaatctaaaagcagggggcaaaatagtcagagagagagtaaaaggcctggcacaaaaaagcttaaatattcaatgtctgatgatgacagtgtttcctcatcagaaccatcgacatctcttgataacaatgaaccaccaccaaaaagaaaaccctcagatggaaaagcaccttcatccagtaccaagaaagggaaaaagaaagtgaagttcattgagaaaaggcactctgaggtattgaagctaacactttgccatgttcaaatattcatggagtaa

SEQ ID NO: 104786 - DNA, 315 bp, Zea Mays
ggagatctttctaacagtaatctcttacttccctctgttaaacagtcaatagactggaatgatgagctgaatgaccaccctggtaccaatgaggatattgcacctattgataatgatgggagtgagttggcatctgaatcaaagcaaggtgctactaatcgtttagaagaaaatgaatgggataaacttttacgtgtcagatgggagcaatatcaaatagaggaggaggcatctcttggtcgaggtaaacgtttaaggaaggctgtttcttacagagagacatttgcaacacttcctaatgaagcattaagtgag

SEQ ID NO: 104787 - DNA, 1822 bp, Zea Mays
gggcgctcaatgaaagtaatttatctaagatgaggatggagcagcctaaattgcagtcccacgtaactgatattcagttaggttcgagtgatatcctatccagatttcctcatgttgaggctcctaattacattaactcaggggagggtggcccacctcagataccatggcaggatttcaagcatagatcaagttatggtggtgattttcctggcggtgcatttgacaagttggagaaacctgatgttggactgatcccgccatttatgcctaatcctttcatgactgatagcattgattcacttcccataaacagaaaaaacaatagttccattccgcgtagtgaaatcagatcaagttctcgtgagaacattcttttttctggtgtttcggatggacaaatcaacttgcttcatgagatgcagcgtcatgtgaggtcaggcaaacaacccattgagataaagctcaaccacatagaccactcaaatcctcagcttggtaatgctagtgacctcggaggtttaaaatcaaacaagttacctcattggcttcaggaggctgtacgtgctcctgcttcatctaagccacctgaacgtgggctaccagcaactgtctcagcaattgctcagtccatgtgccttcttcttggagaacaagaaccatcaatacctccattcttgatcctgggaacccctctttctcccccaaaagatccaaggattaattcaaagaagaggaaactccgcaaagctcatcaatctacctctcatgtaggtgattgcatcgctacccaagcacccccatccgttaaagcttcagctgctcctcttgctgtcgattgcaatgatggtgcgccttcactcaacttgaactctgcattgctgtcatcttcagctgtaagcaagaagctagatgagttacctcccacatttaaagaatcaaaccaaaccatggatggttcagaagctgttgcaggcaagttggaggctcctgaaattggttgtcaggtaactggttcctctccagtagatgacaaagctagagaatcttcaggatcaccagtgaaggatactcctgatgctggagtcagattgcaaggatcagataactcagctatggcattttctgcactcccacttgaagcacctgtgacaagcagcagagcagagcctgtggcatgtgatggcagtgacatgaaagaggatattccactagacgctgaaagcaacgggaacctggaggagcgatgaactggctcctcttgtgaacatggatgcatcacatcaagtatctgctaaaacgtcaacggagattggatgaaatgttctcagatgagcattagacttgagccagttagctcgacattcctttctcttccgttgagcagaatactgggattttccctctcccaatgtttccagtgttgatgatctcatgttgtgtaatgctttagtgcagagtgcagataggataaaattcaacgacaagtggtgcttcttagcagtagttgggcactagtccgtcgggagcaactcttggaaacctgtatacaagaaatgtatatttttgctaacatggtgttggttgggtgtgtagactgtagaccgctattcatttatttatgcgtatatggttcagtaatttgccgtctgtctagcggtcgctgtaagagtagacatggtgatgataatacctcgccttgagtggtggcctgatagaacatgaaactcactttccccagctgttattgtttgataattgtagcggatgcctttatggttggactaaagagaaagctgagatgttgtgtttacttcgcaaa

SEQ ID NO: 104788 - DNA, 961 bp, Zea Mays
ctctactccaggccggccccagaaaagcccgaacagccttcgtctatgccgttgcgttgcatacgtacggccgacgaccacggccgtcccgggggttttcgttgcgagcgcgctactgcggcgcggcgctgtcagcctgtcacccacccactccccgagtccccggccccggccgtgaccgtgagggtagcctactggctactgttccggagtggccgcattaccctcttcccatccctccctcctcctacaaaaaggagacgatgtgtccgtggccagtggccatcaccagtttaccgctccactccccagtccccactaccgccgccacccccagaacacaaaccccgcgcccggccgtaggggatagagagcggaaggaaggaggcgaacaagagcaacccaccggcggggatgcagatcttcgtgaacgcaattacggggaccatcacgctggatgccaagagcagcgacaccatcgccaacatcaaggccgtggtccaagacagggaaggcatcccgctggactggcagcggctcatcttcgcagggatgcagctggaggatgaccgcaccctggccgactactgcatccagaaggagtccacgctgcacctgctgccccgcctccgcggcggcggcaggggtggctacccgctcaccagcgtcccgtaggacctcatcaaccttgcccgcaagcacaacacaacgagagcaagatgatctgccgcaagttcgtatcgagtctctaattctcctggctctattgatctcttatgaaaatgatatgatttggtacagtatgtgttgtgtggtgcgttgtcttgtttaagatccgggtaagtggtaactgaacgtcgcccaagaggtcgctctctgttttcgtgtatatggtcgttgactgcccccaaacgaagtacatgtaatgagattgatgcagttacatgtatgattgtatgat

SEQ ID NO: 104789 - DNA, 691 bp, Zea Mays
accacgttttttcatgcaaaacaaaagctttcgtgccatttgccgtccggtccgaccgccttctccgcgagcgctaggagcaataaacggcaggcaccattctcggactcggaggcaacgcccagacgcgcaaacggaaggaagggggagcgcaacacgcgcggtcgccgggagagagagagagaaagggcgagctagcgagcgagatccccctctcccgctgccggatccgatctgacctgacctcgtcgccgcctgccgtgggagggagaagaggaagaggaggcggaggcggcggagatggcaccggtgtcagcgctcgccaagtacaagctcgtcttcctgggggaccagtccgtcggcaagacgagcatcatcacccgcttcatgtacgacaagttcgataacacctaccaggtcaagtcctttttaactgcatttggctggactgtggagccggtcctgttcttcccattccaccatgttaccaaaagctatcaagtgtcaggcactaaaagtgagagttggaggaaagaaaactaatcggctatcagattctgcaatggcttgatgcataaacatgattgccgttccgtttgttttcctctaatatctcaccttcactagacagaagatgtacgctaccaacattcatttgtgccatttgaagtgcagatttgaggtaagtaaa

SEQ ID NO: 104790 - DNA, 1371 bp, Zea Mays
accacgttttttcatgcaaaacaaaagctttcgtgccatttgccgtccggtccgaccgccttctccgcgagcgctaggagcaataaacggcaggcaccattctcggactcggaggcaacgcccagacgcgcaaacggaaggaagggggagcgcaacacgcgcggtcgccgggagagagagagagaaagggcgagctagcgagcgagatccccctctcccgctgccggatccgatctgacctgacctcgtcgccgcctgccgtgggagggagaagaggaagaggaggcggaggcggcggagatggcaccggtgtcagcgctcgccaagtacaagctcgtcttcctgggggaccagtccgtcggcaagacgagcatcatcacccgcttcatgtacgacaagttcgataacacctaccaggctacgattggtattgatttcctgtcaaagacaatgtaccttgaagatagaactgtgagactccaactctgggatactgctggtcaggaaagattcaggagtttaattccaagctatattagagactcttcagttgctgtcattgtattcgatgttgcaagcaggcagtccttcttaaatacatctaagtggatagaggaagttcgcactgagaggggcagtgatgttatcattgtgcttgttgggaacaaaactgaccttgttgacaagaggcaagtctcaatagaggaaggggagggcaaggcgaaggaccttggagtcatgtttattgaaaccagtgctaaggctgggtttaacattaaggcgctgttccgtaaaattgctgctgcacttcctggaatggagacgctctcatcagcgaaacaggaagacatggttgatgtgaacttgaggtccggcaatgcaaactcgtcccagtctcaggctcaggctgggggatgcagttgttagttgcagtctctgacacttgcttgctcatgatctttgggactctgagcatcagaaggcgttatcactgatgcttctctcgggaagaagagttgattgcctctcgccagtgaacacaccatagtctttacccggtgaatggaccgtttgcattggaacgatacgttttatgagttttctgttatttcctcagtggcctaagctagcaacagtgtatagttgggttgacacttcaaacttctaccattcgagttgggtattagaactagttattattggttcatgttgaacttatatatatttccatccttttgcagttagtttgagtcgtatttgctgtgtaccaaacatgtattgcaaatttggaatttttgtaagctataataaggccagcacggcaatatccccacatgataaccccgaaatttgtatcgttcaaagttcaaa

SEQ ID NO: 104791 - DNA, 703 bp, Zea Mays
ggatgaaaagcttcctggcaggcaagtctcaatagaggaaggggagggcaaggcgaaggaccttggagtcatgtttattgaaaccagtgctaaggctgggtttaacattaaggcgctgttccgtaaaattgctgctgcacttcctggaatggagacgctctcatcagcgaaacaggaagacatggttgatgtgaacttgaggtccggcaatgcaaactcgtcccagtctcaggctcaggctgggggatgcagttgttagttgcagtctctgacacttgcttgctcatgatctttgggactctgagcatcagaaggcgttatcactgatgcttctctcgggaagaagagttgattgcctctcgccagtgaacacaccatagtctttacccggtgaatggaccgtttgcattggaacgatacgttttatgagttttctgttatttcctcagtggcctaagctagcaacagtgtatagttgggttgacacttcaaacttctaccattcgagttgggtattagaactagttattattggttcatgttgaacttatatatatttccatccttttgcagttagtttgagtcgtatttgctgtgtaccaaacatgtattgcaaatttggaatttttgtaagctataataaggccagcacggcaatatccccacatgataaccccgaaatttgtatcgttcaaagttcaaa

SEQ ID NO: 104792 - DNA, 768 bp, Zea Mays
atggcgggtgatagactggcgcgggaggaggcggggatggtggaggtggggaatgcgatagtggtggtgacggcagaagttgaggtggcggtggtgaaggcagcggcggaggtggagatggcggcggcagcgatggtggaggtggcgaaggcgggggcggtgaaggaagccgtcgcggcggcggcatgggcgggacgaacggcaattgctccggtcgccgtcccgcgccacgatgcgcgcacaagacggcggctcacacgtgaagaagttgtaggccaacatgaagttcttgaggcgcggcaggtcgcatatccccggcggtaccgcaccggtgagcaggttgtgcgcgacgtccagctgctccagcttcctcatcagggcgagctccggcggcagcaggccggcgagctggttgaagctgacatcgagcacggtgagctcccgcagcagaccgatctccggcgggaagcaggaggagaggccattgttgatgagaaggatctccttgagcgtgccggacatggttgcgacgctcgccgggaggcagccgccgaaggcgttgtgcgtgaggacaacgacagacgtcggcgccggctcgggaaccgccacgacgggtccacctccactgccaccgtcggccgcccctctgaagccgcggtcaccgcgccgaagaaggaggaggcggcggcggcaaggagcgcgagtataacggatcctctcatctcatctccggcgccgaaggaaggtgtagcggcagaatcgtggtag

SEQ ID NO: 104793 - DNA, 89 bp, Zea Mays
ctgaactatctcctccacaagagccattcgacccactggccgacccagagacaaagaaagcaatagaaattattaatatgattgaagct

SEQ ID NO: 104794 - DNA, 2768 bp, Zea Mays
accccaccatccttcccgagtcgtcctctccattttcccctcccgattcgccccgtcttcccaagccctacgccagcgacaaaaccctaaccggtgggatggcgacgcagccgccctctaccgccactgccgcggttgacctctatgagacggcctcgcagccggacgcccccgccgccggcgacgcctacacttttctcgagttcaacacgcagggggacgacttcgactaccccgacttcccggagctctctcaaccacctccccgatccacgccgctgacgtcctccatccccggcgccggcacgtcgtcctcgtcgtggcctgccccaccgcctccgccgtccgacgcggcctccccggaacccgatctcacgtctcaagacgtccacaccccgccggcctcctcctcctcgccgtcgccgcgttccgcctccaaggcgcgtccgtcggctgcggcggatgggctcgcctccggggttgtcgcacttaacttcgaggatcctgtaggaaccggcgccgtggaggacgggtacgactacagcaagggagacttcgtggaacacgcatgccggtactgcgggatccacaaccctgcgtgcgtggcgaggtgcaacgtaccctcctgccgcaagtggttctgtaactcgcgggggaacacttcaggctcccacattgtcaaccacctggttagggcaaagcataaggaagtatgccttcacaaggatagccctttaggagaaacaattctcgaatgctacaactgtggttgtcggaatgtatttcttcttgggtttatctcagcaaaggcggagaatgttgtcgttcttttatgcagagaaccatgtttaagtgttaatgcactgaaggatatgaattgggatctcagtcagtggtgccctcttatcgacgacaggtgttttttgtcgtggcttgtaaaggtaccttcagagcaggagcagctaagagctcgccaaattagtgctcaacaaatcaacaaagtggaagagctctggaagacaaatcctgatgcatctcttgaagatcttgaaaagcccggtgtagatgatgaacctcagccagttgttttgaagtatgaagatgcttaccagtaccaaaatgtttttgcaccactgataaagcttgaggctgattatgacaagatgatgaaagagtcacagagcaaggataatgtaactgtccggtgggatattgggttgaacaagaagcgtgtagcttactttgtctttccaaaggaagacaatgagttgaggcttgtgcctggagatgaactacgcctgagatatcctggtgatagctcacatcccacatggcaatctgtcggacatgtgattaagctcactgcacaagaggaggtggcacttgagcttcgcgctagtcagggggtgcctactgagctaaatgttggattcagtgtggattttgtttggaagagtaccagttttgataggatgcaaggagcgatgaaaacttttgctgtggacgagacaagtgtcagtggatacatataccatcaccttttgggacatgaagttgagcatcaaataatacgtaataccctaccaagacgctttggtgcacctggacttccagaactaaatgcttcccaggttttagcagttaaaagtgtcctgcagaagccagttagtttgattcaaggtccacctggcactggaaaaactgtcacatctgctgcaattgtgtatcacatggcaaaacaaggtcaaggacaggttcttgtatgtgccccaagtaatgttgctgttgatcagctggcagagaagataagctcaactggtctgaaggttgttagactgtgtgcaaaatctagagaagctgtttcgtctcctgttgagcatctcacacttcattatcaggttaggcaccttgatacttctgagaagagtgaattgcacaagctacaacaactgaaagatgaacaaggtgaattgtccagcagtgatgagaagaaatacaaggcactaaagcgtgccactgaaagagagatactgcagagtgccgatgtcatttgttgcacctgtgttggtgctggagatcctcgtctttcaaacttccgtttccgacaagttcttattgatgagtccacacaggctacagagccggaatgtcttattcctttagtgcttggtgtcaagcaggttgtccttgtcggtgatcattgtcaactgggtccagtcatcatgtgcaaaaaagcagcccgtgcagggttagcacaatctctctttgaacgccttgttatccttggagtgaagccattcaggctacaggtccagtatagaatgcatccttgcctctcggagttcccatccaactgcttctatgaaggcacactgcaaaatggagtgactgttaatgagaggcaatcgtctggaattgattttccttggcctgttccaaatcggcctatgttcttctatgtgcagatgggacaagaagagatcagtgctagtgggacatcctatctcaatagaactgaagctgcaaatgttgaaaaaattgtaacaacatttttaagaagtggtgttgtaccaagccagattggagttatcacaccttatgaaggacagagggcttacatcgtaaattacatggcaaggaatggctctcttcgccaacaactttacaaagaaatcgaggttgctagtgtagactcatttcagggtagagagaaagactacattattctatcttgtgttagaagcaatgagcaccagcttagagtgtga

SEQ ID NO: 104795 - DNA, 282 bp, Zea Mays
cattttgactgcagcttcgcgaagtttgctgctgttatgatctgtgtatattgttattgactgatctgatgctgtcttgtgtattatttggtgtgtgttcaggttttagcagttaaaagtgtcctgcagaagccagttagtttgattcaaggtccacctggcactggaaaaactgtcacatctgctgcaattgtgtatcacatggcaaaacaaggtcaaggacaggtataggaataggattactaaaaatttgttgtttgatatagtgatatatatagcgag

SEQ ID NO: 104796 - DNA, 240 bp, Zea Mays
atgccacctgggatggcgtcttcgatcgccgacaagcttacagcaaaggaggcgtggaagaccattgcagacctgtgggtcgacgatgatcttttgaagaagactgctgccgtgctgcttcagaggaagtttgatttggcgacgttcaacaatggtgaatccgtcaaaggtttcgtgctgcttctaaatggcatggcagcggaactctccaccctcgaactcggcgttgaagagaagatc

SEQ ID NO: 104797 - DNA, 2141 bp, Zea Mays
tgtaaatttatgccttctatgctctttcagggaatcgggtttctcaatgatccgcgcaggttaaatgttgcgctaactcgtgcacgttatggcatagttattcttggtaatccaaaagtactaagcaagcagccactttggaatagcttgttgacacattacaaggagcatgagtgcttggtagaaggacctctgaacaacttaaagcagagtatggtgcaatttcagaagccaaaaaagatatataatgaccggagattgttcctgggcggtggtcaaggtgttatgcatggaactaactttggggctggggcctcaagccaagcagcagataagagaagtggcagagggaaagaaggacaatcgtttgctccttatggccctccaaatggggtgcataagcctggtgtgcacccggttggctatgctgtaccacgtatgccttttcctccatttcctggggctccacattctcaaccatacgcaattccaacccggggtttgcatgggccccttggagctgttccaccggtgcatcaacctggaagtagaaactttgggtcagctcgttcaaatactggtgggcctattggtggccaccttgctcatcaacagaactcccagcaagctatggggagcattgggtcaaattttaactacactggaatggagaatccaagtagtcagccttctggtggagcacaaatgtcccaaactggattaatgacccaggtgcctgtccaaggactaagtcaaacattccgtgatggtttttctattggtgggatgtcacaggacttctttgtagacgattttaagagccaagggtcacatgtgccatacaatattgctgaattttctacccaggcttctcaaggtggttatggtgttgagtttactcaagcgccccaatctggatactctgggaattatatgaaccaaaattcacatcctggatactcccatattggtacaacaaatgacattgtatctcaggatcacatggcccatggatctcatgggatgtttacacaagcgggatataatgatccctcacaagatgagtcgtctcagattcattatggaatggctgccgctggccctctacagtcgcagggcatgatgaaccccttgtactctcaatcctatgctcactacaacacccaaccacagtctcttcaacctccgccccagtgataatgaaagcttgtgataggatgaagccaaattttggaagtttggtgggttgcatcttttggcccacatgtgcacttctccgctgtttcagactcgatggtgcatagacatcagatgcaagcaatgaaggcacactatgtattggctatttatcggggcaggcttgactgaggggcacaaggattgcaacgtatcattgatcgttgtagttcactgcccactttggccacaggagaggtcatatcatcgagaggttgacggcactaccctcatccctcacctgtatagaaaggcaatcggggccaatagtggtacgatgtgaatattccaggatttgctgccattcagaaagtcaagttgcagcaactgcatgcctccatggtaccatgaagacacgcccgtagagtggctttgtatagaggtgctataggcgaggtggacaaccctttcggatatcgcacatggcaagatatttacattgacattttgtatgcacctgatatggttttgatatttatgccacaaatcatttaggtggtgatgcaagtagtttgttgtgattggaaatttgggagtgttcgtgaaagcaagtttgatcctgaaatcttatgggggaatggttgagtgggggttattttgttgtgaaacaggtgtctttgaaaagaaacctttccaggagtgatttcatcaagattgattgttagaatagacattagtaactgttataaatggttaacatggtcaccaaagcggtacgtctagttaacatggccacaaagacattaatcaactttgagacgaatgacaggacctaaaggggcatgttctttggcaaagtagaagtggtcgtctcgcagttttatagcaagacggccattgacttatggttccaccactcccaccccttcccatctttggtagattttctatcatatctcatattt

SEQ ID NO: 104798 - DNA, 1106 bp, Zea Mays
cctgttaccccaactctagtcgtcggaaccccaaccgagttccccagtactccgcagtccgcacggccgcatccgtcaagatccgcgaagagcaacgaggcgaggcgaggggagggaaaacaagtgagtgagagagagagagagaggagggaaaatgctgcgccacgccgcccgccgcctcgtttcccgcgccgtcgctccgcccaccgcgcgccgggcgctcgccacggcggaggtgcccgcggaggccgtcgaggactccacgttcgtcgaggcctggaaaaaggtcgcccccaacatcgagcccccagcgacgcccctctccctcatgcagccgcgcccgcccacgccagctaccatccctaccaagctcaccgtcaacttcgtcctcccctacaagtccgagatcgccaacaaggaggttgacatggtaattgtaccagctacaactggtcagatgggtgttttgccaggccatgttgccacaattgcagagctcaagcctggtgttctctcagtacatgaaggaaacgatgtgagcaagtactttgtgagcagtgggtttgctttcgtccatgcaaactccattgctgatattgtggctgttgaggctatccctgtggatcagatcgacccagcattggttcagaagggtctcgctgaattcactgccaagcttggttcggcctctactgacctggagaaggctgaggcccagatcggagtcgatgttcacagtgccctcaatgctgcattgaccggttaattggtggcattttaaattgtcttgtctttttcatctacagttttagagtgagtttaagtttgcaaactcatgggcatgggatggagggaatgatcctaaataaattatactccatctaaaacatggacatatgtttcttgtttcctgaatcctgcatggatttctttttgtactggtaaacattttaactctgagctcaagacctggagctgctttctgcccccgttgagtttgggccatggatcagatgaaattgatgtttgtccgtaggttatgttaattgttaaatgttattatgtctatttttaagagaaatataaagtactgctcgggttactgc

SEQ ID NO: 104799 - DNA, 720 bp, Zea Mays
ggcaactattttcaccctctgtggctttgtgttgatgtgattttgtttttcaggttgacatggtaattgtaccagctacaactggtcagatgggtgttttgccaggccatgttgccacaattgcagagctcaagcctggtgttctctcagtacatgaaggaaacgatgtgagcaagtactttgtgagcagtgggtttgctttcgtccatgcaaactccattgctgatattgtggctgttgaggctatccctgtggatcagatcgacccagcattggttcagaagggtctcgctgaattcactgccaagcttggttcggcctctactgacctggagaaggctgaggcccagatcggagtcgatgttcacagtgccctcaatgctgcattgaccggttaattggtggcattttaaattgtcttgtctttttcatctacagttttagagtgagtttaagtttgcaaactcatgggcatgggatggagggaatgatcctaaataaattatactccatctaaaacatggacatatgtttcttgtttcctgaatcctgcatggatttctttttgtactggtaaacattttaactctgagctcaagacctggagctgctttctgcccccgttgagtttgggccatggatcagatgaaattgatgtttgtccgtaggttatgttaattgttaaatgttattatgtctatttttaagagaaatataaag

SEQ ID NO: 104800 - DNA, 169 bp, Zea Mays
tcgagatcatctacaattatggcaaggaggaccactaaacaagagtcccacgagcgggggcacaatttccagagttccaaatcacttcctgtctaatcgagttgtacgagaaataagaatgaaaattactggactccatccatacttctcatttgtgagctaaaataat

SEQ ID NO: 104801 - DNA, 1332 bp, Zea Mays
aagacttccacaatggttggtagggtgctcacacttctcaaagagggtattccaccaccaaacattcttgctatgacattcaccacggctgctgcctcagaaatgagagagaggatagggacagtggtgggaaaggcagttgccaaggatattgcaataagcacatttcactcattttgcttgcagctttgcagaacacatgctgaaaagctaggacgcacatctgaattcataatctacggacatggacagcaacgaagggcgcttattgagacagagcgccttttggaaaatgacaaaaataatggtgttggagatacaactaaacagtatgatggggacataaaaaattctttcaaagacaaagctaaaaagtggcagaaatttattacacaggcaaaagcttcaggaagaactccagaggactatgaaaaaaagggtgatttgacaggagcttctgttcttcgacattacaatgaaatattaagatcttgtaatgctcttgattaccatgatttcattaactcatctataacccttctcacaaattttcctgaagtgtacaaagagtgtcaggatatgtggcgggcaattgtagttgatgagtttcaggataccagtgctatgcagtattgtcttctgaagattctagcttcccacaatcatataactattgtcggtgatgaagatcagtccatcttcagtttcaatggtgccgatgtatctggctttgattcatttcgtaaagattttccggatcataaagagatcaggttgagcaagaattaccgctccacacgtgcaattgttgaagcagcaactgctctaattcagaacaacactaagcggcatcatcctaggcttgtagagaccgacaacccttctggctgtaagatcactgtcaaggagtgccacagtgaagattcacaatgcgcatttgttattgacaaaatcattgaaattacatctggtaccgctgaggggtgcaactttggcaacattgctgtcctatatcgaagacagataactggcaaagctttccaagtctccttccgcaacaggaaaattccctttaacattcatggtgtggctttctacaggaaaaaggtgatcaaagctatcatggcaatacttcggaccacattacctggttgtgatgatggtccttggcgtcaagccttcaaggcccttttacccggtgacaaagaagaaaagaagaagattatatatcatgttcaaaagatttcactggctagaacgtgtagttttttaactgctgctagtgacatcttcagcgctaaggtctctgccgtacaaccacctccaacttaa

SEQ ID NO: 104802 - DNA, 1521 bp, Zea Mays
aactgaaaattttcgatcccgaaaggaggaaaataagaattctatcacattaacaactattcatcagtcaaaaggtttggagtgggatgttgtgtttattgtgcaggtatttctttactcttcaggacgagcttgcatatacaaatactctgccatatatgtagtgttaggcagacagtgtggtagcgtctggcatctaattgctgattaagcagcttgtcctctgtgatctggctgaagaaacaattcagtactgtctggccacatgtgtgtttgctagagaggcctggaccctcctcttattcatcaaattgagatggctgactctctcacctcatccaaatgacagaatcctacgctggtggagtcaatctgttaaggcaaatgattcggaaattcctttgttgcatgagtacaatggtagtgtgaaagaagctggaagcacactggaggaggagaggaggttactctatgttgcaatgacacgagctcggaaaaagctgtacatcttgcatgttacaattgattctaaccgtcagcttctgcaaccatcacgttttctcagggaaattcctgatcaccttcttgaggtgcagggcgaagagcctctgagaaaaatgcctgaacgaccttcaggtgatgttccttttgatgactctgaagtggatacatcaatcggaaagccaattatgggaccaaacgaagcttcatcttatccagaacaggctcaggcatgccttgctaatgatttcttgagaaggtttgatattgatgatagatcggtagtctcacatatatttcatcattggggcaagaagcaggcatttcaaaatccaaagagattacttgaaaagatcagttttgtaattgatgaacgcctacgtggtaaaggatacaagcgcaaggatgtcttgcgaaagctgaaatcgttcctaagcggtgatgaagcattgggctacgcacaatatgttatcaagtgggaacagattcctatagaaaagcggaatcatttgataagagaaaggcaggaacatttccaaaagcagaggattgagaactctatgggttcgtcagaacccacagccaagcagatatcgtaccttcgaagcttggggtgcaccatcactccgacttctcgcttacacgcatcacatcttatcgaaaagtacaaatcgctctaacttggttgaagaaagtacaaatcacaacattttattgttttttatgtacatgccgtccatactacaaatgtagtagtgttgtgtactggatacatcaaggttgtacggcagctccgatcatatctattgtctgttcttcttagccatattcctgtagtacatgctgcattgttgtgacaccaagagtttttgcttctcttgggccttggcagtggtattggctaggcactggctaaccttgtactccattcctacttatatgaactccattgtgtttattattcatgagataaaaaaacattacactgaataaactgtcatctaagcaaatgaaaaaaaa

SEQ ID NO: 104803 - DNA, 1247 bp, Zea Mays
aactgaaaattttcgatcccgaaaggaggaaaataagaattctatcacattaacaactattcatcagtcaaaaggtttggagtgggatgttgtgtttattgtgcaggcaaatgattcggaaattcctttgttgcatgagtacaatggtagtgtgaaagaagctggaagcacactggaggaggagaggaggttactctatgttgcaatgacacgagctcggaaaaagctgtacatcttgcatgttacaattgattctaaccgtcagcttctgcaaccatcacgttttctcagggaaattcctgatcaccttcttgaggtgcagggcgaagagcctctgagaaaaatgcctgaacgaccttcaggtgatgttccttttgatgactctgaagtggatacatcaatcggaaagccaattatgggaccaaacgaagcttcatcttatccagaacaggctcaggcatgccttgctaatgatttcttgagaaggtttgatattgatgatagatcggtagtctcacatatatttcatcattggggcaagaagcaggcatttcaaaatccaaagagattacttgaaaagatcagttttgtaattgatgaacgcctacgtggtaaaggatacaagcgcaaggatgtcttgcgaaagctgaaatcgttcctaagcggtgatgaagcattgggctacgcacaatatgttatcaagtgggaacagattcctatagaaaagcggaatcatttgataagagaaaggcaggaacatttccaaaagcagaggattgagaactctatgggttcgtcagaacccacagccaagcagatatcgtaccttcgaagcttggggtgcaccatcactccgacttctcgcttacacgcatcacatcttatcgaaaagtacaaatcgctctaacttggttgaagaaagtacaaatcacaacattttattgttttttatgtacatgccgtccatactacaaatgtagtagtgttgtgtactggatacatcaaggttgtacggcagctccgatcatatctattgtctgttcttcttagccatattcctgtagtacatgctgcattgttgtgacaccaagagtttttgcttctcttgggccttggcagtggtattggctaggcactggctaaccttgtactccattcctacttatatgaactccattgtgtttattattcatgagataaaaaaacattacactgaataaactgtcatctaagcaaatgaaaaaaaa

SEQ ID NO: 104804 - DNA, 1044 bp, Zea Mays
agtgtctgcgcatgcatgcgcgtagtcgtccgctccccgcgcttgtcgtccagcctcttgctctgcagcagactcttcttgcctccccaaggagatctcccggcctagctccgtccagttggccaagccggagcaaaaagcttgtgcgtctggctgtctccggccggccgggcttgtcgtacgtcctccaatccgttgacggtcaggccctctagcttttgctcggtgttctggagacagagcgagagagagagagagagagagaggtagacggagatggagtgcctgctggggctgctcaaggtgcgggtggtgcgaggagtgcacctggcaatctgcgacccgctcacccacagcagcgacccctacgtcgtcctccgccacggaaagcagaaagtgaaatcaagtataaaataccgcacgatcaacccagaatggaacgaggagctcaccctgtccatcacgaacatgatgaacccggtcaagattggactcttcgaccacgacacgttcaccaaggacgacagcatgggcaacgccgagttctgcatcctcaacttcgtggagatcgcgaagcaggacctgagcgacgtccccgacggcacggtgataaagacgatccgcccggagaagggcagctgcctcgccaccgagagccacatcacgtggaaggacggcaaggtctcccaggacatggtgctcaagctcagggacaccgagaccggagagctcgtcctgcacctcacctgggtcaacatcccaggcgtcgcgatgtgaatcccctgctgcatgaggcggcgacgcctgcccagctggttttactacactaaatatatacgattatacgatatgaagtctgtaaatgtggctccgtacgtttaccaggtattggcaaacaaggagacccttgcatgcgtgtcttgcttgtttgcagttagcttagctcacgctactgggactgggagcaatgcctgtgctcagcttttgcttctgcggggaaatgcatttgttctcaacatctgtgaagctattccatactgcagc

SEQ ID NO: 104805 - DNA, 585 bp, Zea Mays
tctctctatgccgatgatgctgctatctttatcaacccctctagagaagacctcctggcggtcaaagacatcctgcacgcttttggctgtgcctcgggcttggtcaccaaccttgagaagagctctatccacccgataagatgtgataacatagacctagaccacgtgctccagccattccaagggaccagggggaccttcccgtgtcgttacctaggcctccaacttcacacccgggcgctccagaaaattcatgtccaacctctgatcgagaaaatctagaaccgtctggccggatggaaaggaagcatgctcaatcgggctggttgtctcacgcttatgtcttccgtcctgtccgctatggccacataccacttgtcgttctttcccctcgcgacatgggcccgtaaacgcatcgataggatccgccgctccttcctctagagaggaaaggcagaatcaaatggaggccattgtcttgtggtctggccactagtcagcaagcccaaaaccctaggcggtctgggcatcctcaacctcgacaaattcagttgtgccctccggctaagatggatttggaagagc

SEQ ID NO: 104806 - DNA, 3484 bp, Zea Mays
atggatcaccatgccatgtgctatggaagcaaacggataagcttgagtcctggacaaaaaccaaagcttccgcaaacgtcttctctcatcgtcgctgctccagcccagaagcaaagaactgaacagggtaccctcaacagaaacatcgaaaatcggtttggtgtcaagattagggttgtctactgcagccctgctcttacctaccaaagccgctccaatgatgaactcgcttgtatcattacttcgttagccacttccctcacacatcctgtttcttgccgcactagaaacgtcgatccagcaatggctgctaccccgaccatcgttctggtgcccgtctggggcattggccacttcgtaccaatgctcgaggtcggcaagcggctgctcgcacgcagcgcactgcccctcaccgtcaccgtgctcgtaatgccgttgcctgcagaggcgaagcgggcgtccgagatcaccgagcacatacgccagcaggaagcctccggcctcgccatccgcttccaccatctgccagcggtggaacccccaaccgaccactcgggcatcgaggagtacatatcccgctacgtgcagctgtactcgccccacgtcaaggcggccgtcgccgggttgacgtgcccggtggccggcgtcgttgtcgacatcttctgcacggcgctgttcgacgcggcgcaccagctcggcgtgccggcctacgtgtacctgatcaccagcgccgcgatgtgcgcgctcttgctgcgctccccgacgctcgacgaggaggtagccgtcgaggtcgagttcgagcaaatggaaggcggagtggacgtgccagggctgccgccggtgccggcgtcctgcctgccgacggggctggagaacagaaagatcccgacctatcgctggttcctgtacaacggcaggcgctatatggaagcagcaggcatcatcgtcaacaccattgccgaggccgagccgcgcgtcctcgcggccatcgccgacgggcggtgcacgcgtggtgtcccggcacctccggtgtactcgatcgggccggtgatcccctccaccccgcccgccgagcagcaggcgcaggagtgcgtgcgctggctcgactcgcagcctccgagctccgtggtgttcctatgcttcggcagcggtggctgcttcacggcgccccaagcgcacgagatagcgcacggcctggaccgcagcgggcatcgattcctgtgggtgctgcgcgggacgccggagcccggcacgaagttgccctcggacgggaacctcgcggagctgcttccggcggatttcttggcgaggacgaaggatagagggctcgtgtggcctaccaaggcgccgcagaaggagatactcgcccacgccgccgtgggaggcttcgtcacgcactgtggctggaactcggtcctcgagagcctctggcatggcgtgccgatggtgccatggccgcttggcgccgagcagcactacaacgcgttcacgctggtggccgacatgggcgtcgccgtggcgctgaacgtggaaaggaagaggaagaatttcgtggaggcgaccgagctggagcgagcggttaaagctctgatgtgcgacggcgagacagcgaggaaggttagggacaaggtcatggagataaaagccgcgtgccggaaggcaatggaggagggcggatcatcgaacatgtcgttgcagaggctctgtgatgcgctcgtcgaaggcgcggtgcacccgggaaagtgatgcccacagagttcaatcaggaggctctgtccaccagccatccaatggtgtacatgtattctgttatgagttctctgtttttagagcaagttaaataatattttttatgagttctctatataatgctcaaataatttatctaacataaatattatagcgataattattttagaatatagacagtatatttcttctattttaaaataaatattgtatttggcttcgtgctcatcatattttcagatttataaaaaaaatgttaaccaagcaatctacggaacatcctcgtacgcagccttcacccccctcggtgtcgcgaaatctcgcacatcagtctctgcaacgtggcacacgacgacccgccttcctctccggcgttccggcacgcggccttggcctcagcggccttcgccctcgccttcctcccctcctccgacgcgcccatcagcgtccgcaccgcgcgctccagctccgcggcctccacaaagttgccccgcttcctgtccacctccatcgccacggcgacgcccagggacgccacaagcatgaacgcgttcatgtgctgctccgcgtacagcggccacgccaccagcggcacgccgtgccacaggctctccagcgtcgagttccacccgccgtgcgacacgaagcccccgatggaggggtgcgacaagatctccttctgcggcgcccatctcggccacacgaggcccctttccttggtcctctccaggaaaccacccggcaccagctcgtccacgttggcgtcggtcgggtacggcgacccggctggcggcgggccacggagcacccacaggaaccggtactcgctgcgttgcaggccctcagcgatctcgtgcacctgcggcacggacaggttgcccatgctgccgaagcagagcaggaccacggacgaacgcggctgcgcgtccagccagcgcaggcactcgtgtggctgctcggcaggcggatcaaaggcgatcacgggaccgatcgggtagatggtcggggcgcggcgcccgggcatgcaccggccgtcagcgacggccgcgagggcttccggctcgagctccgccaccgtgttgatgatgatgccggcggcctccatgaaccggttagcgtggtacatgctccacgtgtagcccgaatccctcttcatcacggcattcggcaggaaagccgctggcaccggcggcataccaggcacgttgaacgccgtttccgcctccccaaaatccccggcaacttcccggtccagcgtcggcaaccgcagcatgagcgcgagcatggaggccggggacgtgaagtacacgtacaccggcagtgccaactcgcgggcgacgtcgaacagcgtggtgcaaaagtagtccatgacgacggcggcgacggggcttgccaggccggcaatggccgccttggtgttggacgcctgcagctggatgaaactggagatcatgtcctccgggccggagaaggcggggagctccacgtcagggaggcggtggaagcggatgtcgaaccccgagcccgaggtggcctcccgctctacgatgtgcgcgaacctggccatcggcagtggcgcgaggagcacggtgagcgacatggccaggtcgccgccgccgctcatcagcatccgcttgccggcttggagcatggacgtcaggtggccggtgacgcagaacgggatgagcaccaccgttggtgccgccattggtcgagattattatttgatggcttc

SEQ ID NO: 104807 - DNA, 324 bp, Zea Mays
atggaagccaagcagagtgaagcgtgttgggagaagatgatgctggccatcgagaagttgatggggaaggtggatgccatggaagagaggacgctgcttcgcaaacaagtggaggagaccggtaaggctgtttctcttcttcggttggaagccatggctagagatatggatcgctctatggataattatgaagatgtagaaggaggtgagggtgaaggaagtgaagtggtggactggagggcatacttttacttttcccatgagagtattggatattgggtatatgattctattctccagttcaggtgggaacgaaggaaataa

SEQ ID NO: 104808 - DNA, 3018 bp, Zea Mays
atggaccgtcggagctggctgtggcggcgcaagtcgacggacaagagccccggggagaccgagacctcggcgtccgagaagattactgatgaacagacaatcatttcttatagctatcaaccatctattatcatcccttgtcccgttcacgtgttagggcaagttaccaatgcatctctaagactgtccgcaactgttaccattaggcaaaacgatacatacacagtatcaggcaagagaaaaagcaaatcattattttctatgttcctgtccgagacagtccagcctgtgtttaaaatagggaatgaaatagatgacagtacaatgggtagaggacgaggccggcagtgtgactgtcctggtggtttccataccaggtctgcagtctccaatggcaatgtggcacagtcagaccaggattctgccaagagctctccaaactcgactcggtcgccggagatcacgtcgaaggaactggaggacgataacgacgtgaaggtgaaggtattgagtgagaggctatcatccgtagttctggatgtccgtgcgaaggatgatctcgtgaagcagcattccaaagttgcagaggaggctgttctaggatgggagaaggccgagaaggagatctcatcgctgaaggcgcagctgagcgctgcaacggccaagaactccgcgctggaggaccggctcgtccacctggacggcgccctcaaggaatgcgtccggcagctccggcgcgccaaggacgagcaggaccagacggtgcaggacgcgctggcacggcaagcgcggcagtgggagtcccacaaggccgacctcgagctgcgcatcgttgagctcacggcgaggctggaggccaagtccgagcgctcggtggtgggcgccaccgacggcgacacccgttccagcaggctagccgccctggagaaggagaactcggcgctgaagttgcagctgctcgccaagacggaggaactggagctcaggacgatagagaaggagctcaaccggcgggcggcggagacggcgagcaagcagcagctggagggcatcaggaaggtggccaagctccaagctgagtgcaggaggctgcaggccgcggcacaacggagggcgtcctccgtgaacgtcgagctccggcgttctccgagctcggcctgcgtcgagtcgctcacggattgccagtcggactgctccgactcatgggcctcggccctcgtcacggagctcgaccagttcaagaaggacaagagcggcgcgagcaccaggacagcgagcctcgtggccgcggacatcgacgtgatggacgacttcctcgagatggagaagctcgcctccgcgaacggctcgtcgaaaggcgacgccgtcgaggacgcgagcgggcaggtggagaaggcgctgcacgaggctcagcgcgagctgaggacttgccgccgccgggtaatggtggcagaggagagatcagctgagctacagcggcagctgaaccatgccaatggcgacaaacacgccatggaggcggaggcggaagctgctgaggcgaagggaagggagcttgagggcaagctcgagctcgcccgtgccgatatcgcgggcttgctggacaaggggcgcatcctggaggaacggctcgagtctgagaaggcgctgacacttgagctcgcagccaagtaccaggacatggagacgctggaggcagagaagagggagctgaacgctcagctggagacgtcacggtccgaagccaagaagctcagcgacaagatcgccctgatggagaggaagctggaggtggagaaggccctgtcgatccgactggcgacgaaatgccatggcgttgatgctctggaagcaaagaagaagggcgtcgagctcgagctggagtcggcacgcgaggaaatcgcttccctgcgaaacaaggctagtagcttggaactgcaagtcatggaagagaaagcgtcgtccgctggactcgcaatgcggtgccaagaactggaggagcttagatcccagcttgtgtcttcaaactcacggatcgttgagctgaacgagaaggttaaaacgctcgaggatgtgatcgagaaacagaggccagtgacggcggaattggagtctcagctccagtcgagacacgacgaaatcagcagcttgaaggaggacataagcctgttgcagaagaagctggagtcccagaagaacctgtcgtcagcttacatatctgcgctgggcgcttctgaaaccgagaagaaagaactggctacccggtttgaactcggagagaaagaggccgaggaattgcgcgggaagacgagtttgctggaggaacagatccacgaagagagggcacggtcatctgagtttgcggtaaaatgtcggaagatggaggaacagttctcccgcagatctcttcttggccaccaaccagtgaaatcttcggcgatcaaagatattcagataagaaaggagacagagctggccaaggctgccgggaaactggccgactgccagaagacgatagcttcactgagcagccagctgaaatcgttggccgatttcgacgagttcctccctgaaaccgagactagtggcgccgactcagccgacgcctgggacggcgacctgaagctgctccaccctgcaagctatcccacgcagattggctgtttggcagtcacatgagtcacgatcctcgttggcaggtgggcggagaaactgtttttgttcgggttccaccgcatgattgctgtggtgagattgccatgatcttccaccacatgccatatagagttaagtttataatagtctataggtgagaaaatgttcatatgaaagctgtttatagagttggttggtgaagcttcaaaggaactcataaactttgatctcccattcttcctgtcccttggaaacggcttttaaccaccagcatgtgttccatcttgattgtcttccggctattttatattctgcaggagttcattgtgcaatgaaatgaatggaatattcagttagatctga

SEQ ID NO: 104809 - DNA, 739 bp, Zea Mays
ttaatttacctctgcaaaatacattttaatttagtcacaataatatagtgctcctattaatcagcaaaacgcaacaaaacccaactagtggaccagatactttcaccagaaatatccacaaataaaacacgcccctagtgacgcatatgcagttgcagccataaaaaaaagtatctcgtagaatggacggcgaaattcccttgcatagtttcaaaaggaatatactgttcaaaacaactacagcacaaaattgtgtaattctgcaaaatcaagcgaatgcaaatactgagataaatggctctagagcaataatagtgttagcatgggaccacgcagatgcccttggagaaaatgggattaatgaaaaatgccatttcaggtttacaatctaaaaaggttctaatgacaaaagggggctgccatctcaaccaccatgttattcaggcaacaattttacgatgatcattcttgcacaagaaggttccagcagtgaaccaaggtcgagtgaatatgccaagactatttgctcggggcttcagatgaaacaaaggaagaaaatcatttaataaatgatgaaggtatctatattagtatcaaagataaattaaagaagtcaatgagtgcttacagatttagcagaccatgtcttactactagatgtgatatcccacaagttcacttctatgcctttcctacaacaaacggaaccattatttatgaaacttgaaatttgcttaaa

SEQ ID NO: 104810 - DNA, 381 bp, Zea Mays
atggtccatcgttacctcactgagatctccgtgcgcccccttgtcgcctgcagccggtccacgacgatgacgtgctcgccccaatcactcatggacgagacatcgcctcccctgaccgatgtcatccaagaccccgcctcccctacatcatcaacgcctttgttcattgctgcaactggcactctcggcatcacccaattgttgctgggcactccaggccccaatctaagaaatcttttttgcaggtgtcaatacaagaacctgaagttatggttgcttgcttattatgtatccctacttctggtggcagtaaagctaactggaagtatcagcgaagcgttgagttattgcgatcatcagagtgttataggttcacattag

SEQ ID NO: 104811 - DNA, 546 bp, Zea Mays
atgttaattgtcataaacagttacaactctatcgcttctgaaaaggcatctatttcacagaggcaactgtttcacaacgatataaacacaggaaaatcctcgcaaattgcagacagcaataccgcagagcggtgttggtggccagctaactgtcagcagtgcagcaaacaagtcatgtttctttgctactttgtacaatatgaagaccaagcgaagttttgtcttcgtcagcggaaaatcggattagctgcctcggcattcactccatctctgtgcttgaacattttcagctgcacacagagccttccactttggaggcaatcagtgtcccttgtgattggaatttcatccccaccttcccgcctccgcttcattgattctggtgagcttgagtctagagatgaagaagatgtggtcatcgtcaaatgggactgggagacccgccagggatccatggccacttgttccttcaatgcctcacccccatttagtagaggaatggtgccatcaaacactatgtttaccggggtgcctagataccgatga

SEQ ID NO: 104812 - DNA, 1137 bp, Zea Mays
aacccggaggtgggactgggaggcaccgtgtcgtcgtcgtcccctttcccttctctactccgccgccgctcgctcgccggtgaagagcaaatgctgctgctgttacggcagcggctctgttggcgccgcgtatctccgacttacctcgcgcctttgtaggatctgtggagactcgtgagtacgtgacccccacggtggatgaggataggcgggcctcgtccggcagcctgtgctctctgggacgggaggcagagctggcaccagggttatgtccactgtccaccttcgaatgttgacattacattacatgtctacactttcaaatttaagagagagcacgaattgaggccggcccaggtgaacgctgctgaagctgctgctcaattaaaactaggggaacagatggggatgaagcgcgagcaagaaagaaagaaaggctgcacaactggcactgtgtatgatactttctgctcaccattttcttgcctgaaaaaaaatgatatgcttgatgtcacgttatggttatttatgatgaagaagatgaagaagactgttgatattgacaacagtcaacagccactttctgaagggcctggagaacttgtgccaaaagtaacaatggaagtttgttcatgggattgagttgacacagggcttagggagcccactgactggagacacttagcttggaggcctgttcatgaagaaagatatcgagaaagacgtcgaacatgaaatggaggacagcgtgtcaacctaccagaatgctgatgtcggggaaggagagatcagctgctgtcaatagtgtacctctctctattccaactgtgaacctgggattctatgatcatgtgcgtgctatgtaacctatgctgccactgtgcaacgtcacaagtcagcacatgctgcacgcctgcactaggatgtctagcgtatgctggacagctggagtacaatagttgggcgttgctgtctgtttttgtggttgtcatgtacagatgtgctagtgctaatgtatgttgtaggtgttccaggtctatgtaaactggacattctgtaaagaaggtaaaaaaaacaaagaatagtgagatatccatctatactatagttattatgtatcaatgtatgtgtttagag

SEQ ID NO: 104813 - DNA, 955 bp, Zea Mays
aacccggaggtgggactgggaggcaccgtgtcgtcgtcgtcccctttcccttctctactccgccgccgctcgctcgccggtgaagagcaaatgctgctgctgttacggcagcggctctgttggcgccgcgtatctccgacttacctcgcgcctttgtaggatctgtggagactcgtgagtacgtgacccccacggtggatgaggataggcgggcctcgtccggcagcctgtgctctctgggacgggaggcagagctggcaccagagagagcacgaattgaggccggcccaggtgaacgctgctgaagctgctgctcaattaaaactaggggaacagatggggatgaagcgcgagcaagaaagaaagaaaggctgcacaactggcactgtccactttctgaagggcctggagaacttgtgccaaaagtaacaatggaagtttgttcatgggattgagttgacacagggcttagggagcccactgactggagacacttagcttggaggcctgttcatgaagaaagatatcgagaaagacgtcgaacatgaaatggaggacagcgtgtcaacctaccagaatgctgatgtcggggaaggagagatcagctgctgtcaatagtgtacctctctctattccaactgtgaacctgggattctatgatcatgtgcgtgctatgtaacctatgctgccactgtgcaacgtcacaagtcagcacatgctgcacgcctgcactaggatgtctagcgtatgctggacagctggagtacaatagttgggcgttgctgtctgtttttgtggttgtcatgtacagatgtgctagtgctaatgtatgttgtaggtgttccaggtctatgtaaactggacattctgtaaagaaggtaaaaaaaacaaagaatagtgagatatccatctatactatagttattatgtatcaatgtatgtgtttagagaaaga

SEQ ID NO: 104814 - DNA, 715 bp, Zea Mays
tcccctattcagctattcgtgcacggagaagaagggaggcgaagagagggggcaccgtcggacggcggctcatcacgccatcggtagggtttcggcgatcccatggccaggcgccacctgcccctttcctgctcccgcgccgcgaccatccgcctcctccacttcaccacctcctcccgccacaccacctcctcggcgactacgacgactaccgctacccttcccgcctgccacccggccacccccgacatcttccaggagtcgccgccaccgcatctccgccattttgtgggccacggccacaacggcaccgatgtccccatgccacattgccaccccagccgcatgtggtggcatcgctggaggagcggcttggcgcggagatggacgaggcgcatgtgctgcttgcgcaggaccagcggttgacgcacatggcgctcgtgcaggaggtcgctgccgcgcggcgcgatctcggctgcaccgcgcacgagctcacctccgctcatgaggagagcgaccaatgccttcacgaatcacgaggcgtggtcactccccctcacgagcttacgggctgaatgcatcttcttttctatgcgttgcaattctgggtacttatctggaagcagcttgctccaattgaaccagaaattgaagttgtccatatccctagaggaacatgtttgtttggtgtctatacagtcctaattttctccca

SEQ ID NO: 104815 - DNA, 479 bp, Zea Mays
ataatttttaattatagttacacttgtatgtatgtgcattttccatgaaatttcatagttttgcattaatcgtaggtttgaaactgcattagcataattgcaggaatacattggatttcatgttttatcttgatgtaacgccccattttttcgagccaatacatgcatgttaacattatgtaaattcatgtaaataggaacccgcctgacttagttcaataagatagttctgttcgtttcaaatatatttatgttttatcttgaggtaaggccccattttctggaggtcgtctttggacatgtacaaacaatctcaacctatgttgaaaaagtttttattcaattagtgctatccctatcctataacatatgtcatcattctggactcgatcccatcttgtatggacataaatccaacgcaagatacacaattttgcaacacttatatattgaacatgttgtcttttttgtaggccaac

SEQ ID NO: 104816 - DNA, 512 bp, Zea Mays
tagaaaagtgtttttggggagtttcttgactgaaaggggtaaacccaggtgtggagaaacttcgagctgaggttggtaacgcgtagaagaggtcacgggccattgtgtcttcaggcaatcaaggttatattggaagctatgggaaccctaaggccaattatgctgcaaacccttttaactctgggtatggcattaatcaagcaagtgctgccactgattatggttcccagtatggaactggtgcagcgcatggttcttgggtgcctacgacttgcaaagggcacccggacgtagataagtactgccaatttgccaggcctttcaccaaagtgtacacatagctttggcaatgactgtatgaatgttgtggtggatcagatgtttaacggataggaatcaggtagatgaattgtacacatgtttacttcagtttagcttctatcggtctgtgcaaaggaacatatatttattgaatcaagcgtgaatatattgaagtaatgtgcaattgtgaa

SEQ ID NO: 104817 - DNA, 1906 bp, Zea Mays
cttttgtcagcgaaccttcgccctgaaaaccccacccactcttcctctccgatcctcctagcgcctcacttgcttcattccattccattccattccactacccaatacccatctccccgccggcctttcccctcccgcgtgccgatctgcctccggaggctagctcgaccggccgatctagctcgcgcgccgccgctttcagctcgatcagctgccgcacgtcgtccaccgacccgccgtcctgtgagcgcgatcgacagattactaagatggctggcgcggggtgtgcgacagccgtgcagcggccggcggcggcgggggcgccggctgctgtggcaaggaccgcggtcggggcaggcggcgcggtcgccgacccgcgcgcggaggcgctgcggtgcccgcgctgcgactcggccaacaccaagttctgctactacaacaactactcgctgtcgcagccgcgccacttctgcaaggcgtgcaagcgctactggacgcgcgggggcacgctccgcaacgtccccgtcggcgggggctgccgcaagaacaagcgctcctccaggagcggcggcggcgggaggaatgggtcctcctcctccttctcctcctcctcggcggactcgacggcgctgcccctcccgccgcctccgacgacgatggggtccctgccgtcgtcgctggggctgcccgggggcgcgtcgctcctcctcgggtccgcgctccctggcggtgccggtgaccaccaccacctcggccttttccaggcggccatgcagtcggtggtctcctccgacgcgaccgcctacgacgagatgcagcagcaacagcagacgcagctggaccacctgctgggcctcggatacggaggaggcgccggcgcgcagatccagctcaagccgtggatgcaggaggccgccggggcaggcggcgcgcccgggatcatggacagcttctacgcgccgctgctgtccagctccctcgtgccggggctggaggagctgcacgtcaaggcggaggccgccggagccggggatcaccagcagaagccgtcatcaagggaccagcagagcgccagctgggactgggagctgccgacgccgtcgtcgtccaacgtcgacgccaacgtcgtcaccgcgtctgacgcgctcatggccgccgccgccgccgcgtccatgaaccccgctgttagtgttagctccacgccctccacggcaccaaccgccccctcctcgttcttatactggggcaacagcggcattggcggcgctgccgcggcctggccagacctcgccaactgcggatcctccattgccacgctcttctagccaagccgcgcctggctgtcctgctggcctcgttaacttggtttttttgtaccttaatttctggttaatttttttcttgactgaaataacatgtaaatttgcggggaaaagaaaactgagatgagagagagagaacgctgtgaaagaagagagctagaccatctcaccacctcatagggcagaaacttagacaaatcaaacaaatgatccaatccaatatttcaagagaattccttcgccgcgactatgatcttcatgggatctacggtcttggccgtcaagcgatgatcaaggccggccgtccacaactggcatgcatggatttaggaggaggaggaggagatcctgagaccatggcgagctagagatcgatcgagactcgagagcaaagaaggcaagaagttgtaagtgccgtgctgccctgacactactccttgatttgctactttcttggctagcttctccgatccttgggtgttttgtacatagggcatatggtgtggggggtaatacaatatatataaggcggtggcccatgtgagatcatggtgcaagtcatgagcctctctctctctctctct

SEQ ID NO: 104818 - DNA, 1558 bp, Zea Mays
cacaaacattttaggatcgcgcgtcggccaggaagcaatcaacggggaaagcgcaggggcgaagcctgacacaggcaaacaccacgaaactgagagtgggtcgaccgtggcgcgcggacctggtgctgccgatacacgccggggacatcgagcgcctctgcagtcgtacaagcaggccaaccaagcagctctgcagtcgagacatgaagcgagccgtctccgctctctgggcgcgccgcgccgtccgccaagcctacctctacacccccaccgccgccaccgccacctcgtcgtcgcctgagtttggggcgtccacatcagaggcgtgggacgggcgtttccggctccacaagccgcgcgggcagcacctgctcaccaacccgcgcgtcctcgacgccatcgcgcgccacgccgccatcagtccaggcgacgccgtcctcgaggtcgggcccggcacgggcaacctcaccgcgcgcctcctcgcgtcccaggcggcgcgcgtcaccgccgtcgagatcgacccgcgcatggtcgaggccgtcaccgcgcgcgccgctgctctcggcctcgcgcacaagttcaaggtgattgcgggcgacgccgtggaggtagagttcccggagttcgacgtctgcgtggccaacatcccctacggcatctcctcgccgctgatcgccaagctgctgttcggcccctaccggttccggacggcgacgctgctgctccagaaggagttcgcgcggcggctcgtggccgcgccgggcgacggggagtacaaccggttggcggccaacgtgcgcctggtcgccgacgtcaggctgctcatggacgtgagcaagagggacttcgtgcccatgccccgggtggactcgtccctcgtcgagatccggccgcggggcaccgtgccaggggtcgacgtcagcgagtggctggcgttcacgcgcgtgtgtttcgggcagaagaacaagaccctcgccgccatcttcaagcagaagaggatggtcgttgagctgttgcgccggtcgctgagaacggagagatgtgccggtggtgtcagcctaggtccgcttgaggtcgacgacagtggagaagatgactgtgggggaaacgacgatggcagcaacagagtggttggtttcagcgaggaagaggtcgcggcgttcaaggagaaggttgctggagcgttggacaccgccgagctcgccggcaagaggccatcgaaggtgtccaacgacgagctgaaacgattgctccggctgttcaacgatcgcggggtgcggttccagtagaggtagcgcacggtgaggtttgtgtcgccaaggtcgcaccacgcctgatgcaatggcaggttcccagcacgctggaagtcattgtagacgtaagcgctacttgcctgtcttgttctgagttaatggcgtcagccttatccataccatgttcaatagtatgtccaatcttccattctgctgagttaatgttgaactcgagggcacgcattttgctgagttaaaacagtgaggtttgatgatatctgaaagactgaaagttgcccacgtct

SEQ ID NO: 104819 - DNA, 1521 bp, Zea Mays
cacgaaactgagagtgggtcgaccgtggcgcgcggacctggtgctgccgatacacgccggggacatcgagcgcctctgcagtcgtacaagcaggccaaccaagcagctctgcagtcgagacatgaagcgagccgtctccgctctctgggcgcgccgcgccgtccgccaagcctacctctacacccccaccgccgccaccgccacctcgtcgtcgcctgagtttggggcgtccacatcagaggcgtgggacgggcgtttccggctccacaagccgcgcgggcagcacctgctcaccaacccgcgcgtcctcgacgccatcgcgcgccacgccgccatcagtccaggcgacgccgtcctcgaggtcgggcccggcacgggcaacctcaccgcgcgcctcctcgcgtcccaggcggcgcgcgtcaccgccgtcgagatcgacccgcgcatggtcgaggccgtcaccgcgcgcgccgctgctctcggcctcgcgcacaagttcaaggtccgcccgcccgcccgccactcgctcgacagaatgtctaaaaggaaaagcttgctgactgagaacgacggttccccctccctcgtgttcggcaggtgattgcgggcgacgccgtggaggtagagttcccggagttcgacgtctgcgtggccaacatcccctacggcatctcctcgccgctgatcgccaagctgctgttcggcccctaccggttccggacggcgacgctgctgctccagaaggagttcgcgcggcggctcgtggccgcgccgggcgacggggagtacaaccggttggcggccaacgtgcgcctggtcgccgacgtcaggctgctcatggacgtgagcaagagggacttcgtgcccatgccccgggtggactcgtccctcgtcgagatccggccgcggggcaccgtgccaggggtcgacgtcagcgagtggctggcgttcacgcgcgtgtgtttcgggcagaagaacaagaccctcgccgccatcttcaagcagaagaggatggtcgttgagctgttgcgccggtcgctgagaacggagagatgtgccggtggtgtcagcctaggtccgcttgaggtcgacgacagtggagaagatgactgtgggggaaacgacgatggcagcaacagagtggttggtttcagcgaggaagaggtcgcggcgttcaaggagaaggttgctggagcgttggacaccgccgagctcgccggcaagaggccatcgaaggtgtccaacgacgagctgaaacgattgctccggctgttcaacgatcgcggggtgcggttccagtagaggtagcgcacggtgaggtttgtgtcgccaaggtcgcaccacgcctgatgcaatggcaggttcccagcacgctggaagtcattgtagacgtaagcgctacttgcctgtcttgttctgagttaatggcgtcagccttatccataccatgttcaatagtatgtccaatcttccattctgctgagttaatgttgaactcgagggcacgcattttgctgagtt

SEQ ID NO: 104820 - DNA, 2154 bp, Zea Mays
gccaggacgggtcgcgcgtgggcccgcttatccctttcccttcgcttcgacaaaacctccaatacacacacacacctccgttcctccctcacgccggcggcctgtatccctctccccatggctgctggactgggagcgcgcccctccgccaccttcgtggccggaaggttccggcctctcgctgcccctctccgccccgtccgctccggcaagttcgttgtgccaaagcgatgcttcattgtatcaagcaggcttgcatgggtggaagatgagcttatggagatacaaaaggatgagagcatacccacctgaattttcattgattgagtgtggcaaaccgctcggattacaacatcaacacatacaacaacaccacaagcatggacaaacttaggagggctcagaaagctcctttaagctcttggcagttcttttgcatcttgatatttagcagtatccagagtccttggtctagactcaagatattggatcctagatttcttgtaatctttggctgtctattagttcaaacacaccttgatttgtggcttctgataggtttcaactctaacctacctcaacttgttgggaactaaagggctttgttgttgttgtactagttcatacacatcttatgagaatcttgcagtttgtgggttatctacattgaactaatataccatggttctccaccataaaaaaacaaactaatacaccaagaccaactttcgccatgtgtcatatataataactctgctaacagaccaatacacttccacatttgaaggtcacaagagcaaagttcagtaaaatcaaagaaaaggccacctttgaggcgtggaaaggtctccccacaacttcctgtaccagggcacattccaagaccatcttatgttggtgcgaaaggattgcctgaactatgcaagggccaattacatgatgctcaaggaattactggaatgagagctgcttgcaaacttgctgcccgtgttcttgacttcgctgggactttagttaagccatccattactacaaatgaaattgacgcagcagtccataatatgatcattgaggctggtgcttatccttctccacttggctatcatggatttcctaagagtatatgtacatcagtaaatgagtgtgtctgtcatggggtacctgattcaactcagctgcagaatggggatattataaatattgatgtaaatgtgttcctgaatggataccatgggggtacctccagaacatttgcatgtggacaagtggatgattctatcaaacattttctcaatgcagctgaagaatgcttggagaaaggcatttctatctgcagggatggtgtgaactacagaaagattggcaagaaaataagcaagcttgcctatttttatggctattatgtggtggaacgctttgttgggcatgggattggaactatgtatcattctgagccactaattctacatcatgccaacgaaaactcagggcgtatggttgagggccaaacatttacaattgaacctatactcacaatggagaaaacagagtgtgttacatgggaagatggatggacgactgtcactgctgatggtagctgggctgcgcagtttgagcataccatactggtgactagggacggtgcagaaatactgacgaaagtctgagctattctcctgcccgataattattgtcagaattctcagctatggttcctgtcccaaggcatcctggtcatgtccgttgctcgccgcaatactcatttcagagttttgagatctgctgcaggccgacatacgggaaaggtttcccccatgtagcagcaacttgcaggtgataggtgagggcacacacacacacagagacacggctgcatctctgtgattaacacattactggtctcctgcagcctgctgtagtggtgttgctgtgcctttggattctagaagacattctgtatataaaacagcactcctaacagttcagtctagaacctagaagtagaaactgttattgttatgatacggaagcactttaggggaacagttggagacacatttttatgtttttcaaaaaaaaaatgatttagaaaagacttatagggagctcttggaaatgctctaataaaaacatctcctaaaattttgtttttgg

SEQ ID NO: 104821 - DNA, 1845 bp, Zea Mays
gccaggacgggtcgcgcgtgggcccgcttatccctttcccttcgcttcgacaaaacctccaatacacacacacacctccgttcctccctcacgccggcggcctgtatccctctccccatggctgctggactgggagcgcgcccctccgccaccttcgtggccggaaggttccggcctctcgctgcccctctccgccccgtccgctccggcaagttcgttgtgccaaagcgatgcttcattgtatcaagcaggcttgcatgggtggaagatgagcttatggagatacaaaagtcacaagagcaaagttcagtaaaatcaaagaaaaggccacctttgaggcgtggaaaggtctccccacaacttcctgtaccagggcacattccaagaccatcttatgttggtgcgaaaggattgcctgaactatgcaagggccaattacatgatgctcaaggaattactggaatgagagctgcttgcaaacttgctgcccgtgttcttgacttcgctgggactttagttaagccatccattactacaaatgaaattgacgcagcagtccataatatgatcattgaggctggtgcttatccttctccacttggctatcatggatttcctaagagtatatgtacatcagtaaatgagtgtgtctgtcatggggtacctgattcaactcagctgcagaatggggatattataaatattgatgtaaatgtgttcctgaatggataccatgggggtacctccagaacatttgcatgtggacaagtggatgattctatcaaacattttctcaatgcagctgaagaatgcttggagaaaggcatttctatctgcagggatggtgtgaactacagaaagattggcaagaaaataagcaagcttgcctatttttatggctattatgtggtggaacgctttgttgggcatgggattggaactatgtatcattctgagccactaattctacatcatgccaacgaaaactcagggcgtatggttgagggccaaacatttacaattgaacctatactcacaatggagaaaacagagtgtgttacatgggaagatggatggacgactgtcactgctgatggtagctgggctgcgcagtttgagcataccatactggtgactagggacggtgcagaaatactgacgaaagtctgagctattctcctgcccgataattattgtcagaattctcagctatggttcctgtcccaaggcatcctggtcatgtccgttgctcgccgcaatactcatttcagagttttgagatctgctgcaggccgacatacgggaaaggtttcccccatgtagcagcaacttgcaggtgataggtgagggcacacacacacacagagacacggctgcatctctgtgattaacacattactggtctcctgcagcctgctgtagtggtgttgctgtgcctttggattctagaagacattctgtatataaaacagcactcctaacagttcagtctagaacctagaagtagaaactgttattgttatgatacggaagcactttaggggaacagttggagacacatttttatgtttttcaaaaaaaaaatgatttagaaaagacttatagggagctcttggaaatgctctaataaaaacatctcctaaaattttgtttttggacgtataacattacaagccatgtccaacagatcccagtgtgtgctcccaatttgacggtgtcccaaaatcagacctcttttggcgtaaattttagcacacatacggacgctcccaatctttttttttaaaaaaaattggtctacggccccgcagctagaccccagcacaccgcccccgggatcttcgg

SEQ ID NO: 104822 - DNA, 2126 bp, Zea Mays
gtgggcccgcttatccctttcccttcgcttcgacaaaacctccaatacacacacacacctccgttcctccctcacgccggcggcctgtatccctctccccatggctgctggactgggagcgcgcccctccgccaccttcgtggccggaaggttccggcctctcgctgcccctctccgccccgtccgctccggcaagttcgttgtgccaaagcgatgcttcattgtatcaagcaggcttgcatgggtggaagatgagcttatggagatacaaaaggatgagagcatacccacctgaattttcattgattgagtgtggcaaaccgctcggattacaacatcaacacatacaacaacaccacaagcatggacaaacttaggagggctcagaaagctcctttaagctcttggcagttcttttgcatcttgatatttagcagtatccagagtccttggtctagactcaagatattggatcctagatttcttgtaatctttggctgtctattagttcaaacacaccttgatttgtggcttctgataggtttcaactctaacctacctcaacttgttgggaactaaagggctttgttgttgttgtactagttcatacacatcttatgagaatcttgcagtttgtgggttatctacattgaactaatataccatggttctccaccataaaaaaacaaactaatacaccaagaccaactttcgccatgtgtcatatataataactctgctaacagaccaatacacttccacatttgaaggtcacaagagcaaagttcagtaaaatcaaagaaaaggccacctttgaggcgtggaaaggtctccccacaacttcctgtaccagggcacattccaagaccatcttatgttggtgcgaaaggattgcctgaactatgcaagggccaattacatgatgctcaaggaattactggaatgagagctgcttgcaaacttgctgcccgtgttcttgacttcgctgggactttagttaagccatccattactacaaatgaaattgacgcagcagtccataatatgatcattgaggctggtgcttatccttctccacttggctatcatggatttcctaagagtatatgtacatcagtaaatgagtgtgtctgtcatggggtacctgattcaactcagctgcagaatggggatattataaatattgatgtaaatgtgttcctgaatggataccatgggggtacctccagaacatttgcatgtggacaagtggatgattctatcaaacattttctcaatgcagctgaagaatgcttggagaaaggcatttctatctgcagggatggtgtgaactacagaaagattggcaagaaaataagcaagcttgcctatttttatggctattatgtggtggaacgctttgttgggcatgggattggaactatgtatcattctgagccactaattctacatcatgggatcaatgaaacccccatgaccaatccaggtttgaaagctggcatgaacttcttgagaacaaaatcagtgggatgtctctcttgcctaccaacgaaaactcagggcgtatggttgagggccaaacatttacaattgaacctatactcacaatggagaaaacagagtgtgttacatgggaagatggatggacgactgtcactgctgatggtagctgggctgcgcagtttgagcataccatactggtgactagggacggtgcagaaatactgacgaaagtctgagctattctcctgcccgataattattgtcagaattctcagctatggttcctgtcccaaggcatcctggtcatgtccgttgctcgccgcaatactcatttcagagttttgagatctgctgcaggccgacatacgggaaaggtttcccccatgtagcagcaacttgcaggtgataggtgagggcacacacacacacagagacacggctgcatctctgtgattaacacattactggtctcctgcagcctgctgtagtggtgttgctgtgcctttggattctagaagacattctgtatataaaacagcactcctaacagttcagtctagaacctagaagtagaaactgttattgttatgatacggaagcactttaggggaacagttggagac

SEQ ID NO: 104823 - DNA, 868 bp, Zea Mays
ttcgacaaaacctccaatacacacacacacctccgttcctccctcacgccggcggcctgtatccctctccccatggctgctggactgggagcgcgcccctccgccaccttcgtggccggaaggttccggcctctcgctgcccctctccgccccgtccgctccggcaagttcgttgtgccaaagcgatgcttcattgtatcaagcaggcttgcatgggtggaagatgagcttatggagatacaaaagtcacaagagcaaagttcagtaaaatcaaagaaaaggccacctttgaggcgtggaaaggtctccccacaacttcctgtaccagggcacattccaagaccatcttatgttggtgcgaaaggattgcctgaactatgcaagggccaattacatgatgctcaaggaattactggaatgagagctgcttgcaaacttgctgcccgtgttcttgacttcgctgggactttagttaagccatccattactacaaatgaaattgacgcagcagtccataatatgatcattgaggctggtgcttatccttctccacttggctatcatggatttcctaagagtatatgtacatcagtaaatgagtgtgtctgtcatggggtacctgattcaactcagctgcagaatggggatattataaatattgatgtaaatgtgttcctgaatggataccatgggggtacctccagaacatttgcatgtggacaagtggatgattctatcaaacattttctcaatgtaagccattattgctgtgtgattctttcagtaatcaaataggtgatttgcataatgcacattttgctatgtttatgtgctatgtgtatgtcagattttcacgaacatttgtatt

SEQ ID NO: 104824 - DNA, 1388 bp, Zea Mays
ttcgacaaaacctccaatacacacacacacctccgttcctccctcacgccggcggcctgtatccctctccccatggctgctggactgggagcgcgcccctccgccaccttcgtggccggaaggttccggcctctcgctgcccctctccgccccgtccgctccggcaagttcgttgtgccaaagcgatgcttcattgtatcaagcaggcttgcatgggtggaagatgagcttatggagatacaaaagtcacaagagcaaagttcagtaaaatcaaagaaaaggccacctttgaggcgtggaaaggtctccccacaacttcctgtaccagggcacattccaagaccatcttatgttggtgcgaaaggattgcctgaactatgcaagggccaattacatgatgctcaaggaattactggaatgagagctgcttgcaaacttgctgcccgtgttcttgacttcgctgggactttagttaagccatccattactacaaatgaaattgacgcagcagtccataatatgatcattgaggctggtgcttatccttctccacttggctatcatggatttcctaagagtatatgtacatcagtaaatgagtgtgtctgtcatggggtacctgattcaactcagctgcagaatggggatattataaatattgatgtaaatgtgttcctgaatggataccatgggggtacctccagaacatttgcatgtggacaagtggatgattctatcaaacattttctcaatgcagctgaagaatgcttggagaaaggcatttctatctgcagggatggtgtgaactacagaaagattggcaagaaaataagcaagcttgcctatttttatggctattatgtggtggaacgctttgttgggcatgggattggaactatgtatcattctgagccactaattctacatcatgggatcaatgaaacccccatgaccaatccaggtttgaaagctggcatgaacttcttgagaacaaaatcagtgggatgtctctcttgcctaccaacgaaaactcagggcgtatggttgagggccaaacatttacaattgaacctatactcacaatggagaaaacagagtgtgttacatgggaagatggatggacgactgtcactgctgatggtagctgggctgcgcagtttgagcataccatactggtgactagggacggtgcagaaatactgacgaaagtctgagctattctcctgcccgataattattgtcagaagtgagtcatccattttcccagcgcgatggttcagagttttgagatctgctgcaggccgacatacgggaaaggtttcccccatgtagcagcaacttgcaggtgataggtgagggcacacacacacacagagacacggctgcat

SEQ ID NO: 104825 - DNA, 99 bp, Zea Mays
accttttgctctttaagatgtttatcagtactccgtcgacaaagctctggcagaagttatacgctaattcaattctgatgtaccagcagcagtcggcaa

SEQ ID NO: 104826 - DNA, 4693 bp, Zea Mays
atgccgcggtcgccgtcaccatcgccgtcgccatccccatcgccggagaggcgccagaaccagcaccagcccgcgcgccggagggccgccgccgcctcgtcccagatgctgctgctccaccaccaccaccgcggcggcggcggccgctcgccgtcgccgccgccccgccgctcgctccgcccgcgccgcgccgccgccccctcctcccgcccgctcgtcgacgacttcttccccttcccctcctcgccgtcctcctcaccctctcgcccccgccagcgggggctgtcgccggagccgtccagctccgactccggatgcgacggtggcgccgccggctcctcggtctccgaccggcgccggcgcaagctcaagctcgtcgtcaagctctctcagctgcccccggaccagaatcaccgccgggccccactccccccacagtactctgacggctccgacggggctgatgacctggccggggacggaagcggcgacgaggagcaggtcaagccgcccaagaagcgccggatcgagccgcgcgccgacagatctcgccatcgcgaggttgttgctggtggtaggagcgaccccgcgagcgcgccgcggacgaagcggtcttcggtgccagggacagcgaggacgacgccactgccggaccggaaggcgctggagatgattctcgagaaacttcaaaagaaggatacatatggagtgtttgcggagcctgtggatccagaggagctgcctgattaccacgatgtgattgagcacccaatggacttcagcaccgtcaggaagaagcttgccaggaatgcatatcgctcgttcgagcaatttgagtctatgggatatactggttccattgggttggagtcgctaaccatgtctcatctggatgatgtattcttaatttgcagcaacgcgatgcagtacaatgcacctgatacaatttatttcagacaggctcattccatacaagagctggcaagaaagaagtttcaggaactgagggatgaaggcatacctacagaaaatccgataaagagtgaacagaaaagtagaccaaatttctgcagtggagaacaggttaaaaaacctgttttgaggtatctggatgatgatctagacttcctgtcccgcaaagatcaagataaaagatccaattcaaataatgtgaatgatgacatgagcttcaacggtcatgttaagaaaaccttgtccaagaatgcaccggatcaaagttgcttattacagaaagagcggattaataaacccatctccagaaattcagaggacaatttaagttcctcattccacaaaaagcagcgtaagaaactgatctccagacattcggaggacgacctgaactgcccatctggcagagaccgagctaggaaagtcatttcaaaaaattcagaaaatgatgaaaactcccctttccacaaacatcaagtcaagaagtcagctccgcagagatcaatcgatggtctctcattccaggaaaagcacattaagaagccaattgatggaaatggagaagatccaggtttttcatcctgcaaaagacgcatcgaggatcccttttgcacaaatgttgaagatgcaagcttctcatctacgaaaaggctgtctgagaagcccatgtctgagaagcccatcagtataaacaaagaagaggaccttgaccattgccaccaggaatcatctaagaaacctagttgcagagttgagcaagatgatcatggttactcatgtgatgaagaggctgttaaaaagccgggttgtatggatagccacgatgcccaaggttcagatatctctgctgcaactattgcttctgttggagatggctctaatggtttaagcatgccacagcctaataattctgaacctactggttgtactgtcgccaatggggttatagacaaagatatcagctctccactagatgaaataagatctgagaagactgacgatattttggccaagcctagctacaagacaattgtggtagatgagaacagacggaaaacttatgatgcatctgaaggacagtctccaatggaatctgatccagtttttgatgttttctctgcggaaccaaaagagctcgtgaatgttggccttgatgctgaacactcatatgcatatgcaaggagtctggctcgttttgctggttcatttggcgctcaaggctggagaattgcttctgaccgcattcggcaagcattacctgctgatgtaaagtatggtcgtggttgggttggagaatatgagcccccattactgcctattcttgttgtgaatgatcaacctagatacctgaagagctctgagacaaatagacaaaggaatgcttctctgcctagggataatgaaaggctcagatcaacagaaacaaataatccgaaggatatgagacggatgaccactgacaacaatgtagttggagtgcctggacaattagacagtccagaatttaagccaagattatttggtgtttccaatgagcttcaacacaggagcacaggcacattatcactgcatgagaaccatagagtatctggtaatgttgcgaaaaccaaaagaacaaccaatgagaaaacgagaaaaggcacttcatcttccagtgcccgacctcgtgaaatgcagctacagaaaggagcttcttctggtgcacttgataaccttgcctcaaacaaaatggctggccagcctagaccgtttttgcaaccaccagaatcaaatagaacccagccaatgagaaaaattgactcatcaaaaaacaaaattccaattgaaatggcaccacagcaagttgagtgtgcaaaaggtgctgcttctggtgtgcatgacactcctttgtcagatgggcagcctaaacacttcttccagtcacaagcagcagcttcctctggtgtgcatgatatgcattcctctaatgggcagcctaaacactacttccagtcacaagcagcagcttcctctgatatgcatgctatgccttcctcaaatgggcagcctaaacactacttcaagtcacacgcagcagtttcctctgtcgtgcatgatatgccttcctccaatgggcagcctaaacaaattttccagtcacaagcagtagcttcttctggtgggcatgatatgccctcaaatgggcagtctaaacccttgttccagtcccaagaagcaactatactacagcccaaaaatgaagcaacgtgggtgtaccatggacgacctggtgatggaaaggttggaacatcaaacaaaagcagaccatcgaccagtattgggttcatcaataaaaatcatcaatcagtaaatgctgcaacttttgccatgaatttgaatggacagaagattgtcagtgaccatgcaaaatcagcaggcacaactgcaatgcctgtccaggtaaatataccaaacagaggtcttgatgctcctcggaacatgttctcagcatttccagctgctgttagggagaaccatagcattccaccagctccaatggctcaatcttggatttcatttggtgctactacagagaacaaaccaaccattgtcagcccaacttcccttgacaataattgtggctggaaaatgccatttgctaacgtccaaccttctgatgataccaaaataaatgccgttcctcagttatttaggcatcctgtccaggtagctagagagaactcggttcaaagcaagggtttggtaatatttccccagttggtgcagccagatttcgcgagatcacaagggcaaccacagtggcaggggctggttccccacatgcaacagaagccaggcaaggatgtactccgcccggacttgaacatcgggttcccatctccacgttcaccaccagcccgacaatcgtctggcatcaatttggaagcacagcagccagaccttgctttgcagttatgagctggggatagacactaccgggatttatgctataatctctaagcatgtaaaggcacgatgagctgaggtgtgaaagaaagcgaggacaattgggacatccggtacagggatcggtgatgatcgattgggatgtaggccttacatgccacatggcatcatcgcagctcatcaactcatcgcgtcgctgtacaaaagatatcagaaaatggatggatggacactgcttgaaatgagatcatgtctactgggggcattgtgataggagttcaaatcccagcattcggagaaatgctttgggagtttgggtggcatacatgtaggtagcatactagcaatgcccatgatcagaatactttggaggaacctctctgaccacaatacagctttcttcggtggaaattttggcaccagaatttaggctttcatttggtagtgtagacccctgtgtaatgcccgtatcgaaatgtatgttggttgtaaatggttttgcgttgaatagattgttagagtagggcagtggggagtggcctttacccccgtcttctgaatgaaattgcttcttttgtccatgatgtatgtagtagcaggaagccaggaactgaggtctgtgccctattcagttcaaatggcatgctgaagctaaaaaaggttgccaattctctcgttgcgatgcactgattcgtttgtccttgcatttgattctagccttgaagctgggatgtcattaatgatgagcaacgccaggcatgactttgctgataaa

SEQ ID NO: 104827 - DNA, 3295 bp, Zea Mays
gcctcctacctggctacctgtccgctgccggtggggccgcgcaccttctcgcgcgcggacgcggctggcggttcgagttccctccaaagcagccttcctttcggcgggggcagctcgcagctcgctccccctcttctttatcactcgccaatcgccgcagcgcagcgaagatgcacagagcggccgcctcaccgctccgacacagcctccgccgcctctcctcctgctccgcggctacccctctcgtttgggctgcccgcttcttcgtgccctgctccgagagtcgtctccccgcgttcacctcgtctcgcttcctccggtcggcggcggctgcgccgtgccggtgttgctcaggcgctgcgatcaccgagcggcctgcgtctgcgtggcgcggagtcgccaccatggccgatggtagtagccgcttcgggcatgtcctcacaagcctcccaaagcccggtggtggagagtacgggaagtactatagcttaccagccctgaatgatcgtaggatagaaagattgccatactctatccggtatctactggagtcagccatccgcaactgtgacggttttcagattacagagaaggatgtcgaaaatatcattgactgggagaataccgctcccaagctagtggagatacccttcaagcctgcccgtgtgcttctgcaggattttaccggtgtcccagctatcgttgatcttgcaagcatgcgtgatgctatggcccgactgggtgatgatcctggaaagattgatcccctgattccagtggatctagtcattgatcattcggtacaagctgatgtggtaagatcagagaatgccctccaagctaatatgcagcgcgaattcgataggaacaaggagcgcttcgctttccttcggtggggctctgtggcattcaataatatgcttattgttccaccaggttcaggaattgttcatcaggtgaatcttgaatatcttggacgagttgttttcaataccgatggcattttatatcttgatagcgtgctgggaacagattctcacactactatgattgatggaatgggggttgcaggctggggtgttgggggaattgaagcagaagcaacaatgcttggtcagccaatgagcatggtcttgcccagtgtagttggatttaaactgtcagggaaattgcgtgatggtgttactgcaaccgatctagtattgacagtgacacatattcttaggaagcatggtgttgttggcaaatttgttgagttttatggcgagggaatgagtgagttagcagttgctaacagggcaacaattgctaacatgtcaccagaatacggtgcaacaatgggcttcttccctgttgatcatgtgacccttggatacctgaagctgacagggagaagtgatgaaaaggttgagatggtggaggcatatcttcgagctaacaatatgtttgttgattacaacgagactcaaacagaaagagtttactcatcttatctagagttagatttagcagacgttgaaccatgtgtttcaggcccgaaaagacctcatgaccatgttgctctgaaagatatgaaatcagactggcattcctgtctcggtaataaagttggttttaagggctttggtgtacctaaagagcaacatgataaattcgtcaagttcaccttccatggacaacctgcagagattagacatggtagcattgtgattgctgccataacaagttgcacaaacacatcaaatccaagtgtcatgcttggcgctggccttgttgcaaagaaggcgtgtgagcttggccttgaggttaatccatggattaaaactagtcttgcgccaggatccggggcagtgaccaaatatctgctgaaaagtggcttgcaaaagtatttagatcatctaggtttcaacttaattggatatggttgcacaacatgcattggtaactcgggcgagcttgatgaagatgttgctaaggcagttaccgacaacgatatcattgcggctgcagtactctccggtaacaggaacttcgaagggcgaattcatgcattggttcgggccaattatcttgcctcccctcctctggttgtggcctatgcccttgctggcactgtttatattgattttgagacggaaccaattgggaaaggaaaagatggaacggatgtgtactttaaggacatatggccatcaaatgaagaaattgcagaggttgagcaatcaagtgtgctgcctgacatgttcaggagcacctatgaagcaatcacgcagggcaacccaatgtggaaccagctgtcagttccaaaggcagaccgcttcccatgggaccccagttccacctacattcatgatcctccattcttcaaggatattacaccgactccgccaggtccatgcagcatagagaatgcctattgcctgctgaagtttggtgacagcatcacgaccgaccacatctcaccagctgggagcatccccagggacagccctgctggcaagtacctgcttgagcgtggtgtgcagccaaaggatttcaattcttatggaagccgtcggggcaacgatgaagtgatggcacgaggaacctttgcaaatatcaggattgtgaataggctgttaaatggagaagttggaccgaagacgattcacgtccctacaaacgagaagcttttcgtgttcgatgctgcaatgagatacaaagctgatgggcatcacaccatagtgttggctggagaggaatatggcagtggaagttctcgggattgggctgccaaggggccaatgttactgggggtcaaagcagtaattgccaagagtttcgagaggatccaccgcagcaaccttgtaggaatgggagtgttaccgctgtgtttcaaacctggtgaggatgctgattctctggggctcaccggtcatgagcgctacacgataaggctccctaccaatgtgagcgagatacaaccgggccaagatgtccaggtgctcagtgacactgggaagtcattcacctgcaagctccggattgatacaatggtggagctggcttacttcgatcatggcgggatccttcactacgttttgaggaacctggtgaggcagcaacagcagtaaaacgctaaaaccgcatgcaaacatgtgaatatcttgtctgtttcgaaaaaggctatgataagaataaaattggactcaagaagaagccgatgtaaatgtccatgagatgagctgtggtgttttgtatagtaccctttttatgtgataataaaggtgcatttgtgtcatgtacgggcacaagt

SEQ ID NO: 104828 - DNA, 258 bp, Zea Mays
cttataatttatgacttgacctgtggcatgcttactctaccaagaatttatttctattgggtatgcctttttcaagaggattcattcaatctgttcttttttttttgtcagggtaaaatcatgcctaatggtacaagagatattacacactggaacttcttggtgataatggatgggttacacactgaaaacggcatcagctattcacttgatgcaacaaaaggcatgttttcttctggtaatctttcagagaagctt

SEQ ID NO: 104829 - DNA, 252 bp, Zea Mays
atggcgtgtgcgcccccaaagcggaagattcaccatgcaggtgcttttgacttctccacaagaatgatccttccattccactcagtctcgtcacaagcacggattgctgcatcagcatcctcatccttatccaaggataagaatccaaagccacgggaatctccagttcgtttatcacgaacaacacgtgcacttgttacacgtccaaacttgcaaaatttcttctccaaatctcgctcagtggtggcatag

SEQ ID NO: 104830 - DNA, 1693 bp, Zea Mays
ctcggtcagtccgtctcgtcggcggcggcgcagagtggaactggaagccaacgtccaagaggctcttcagctgcgagttcgttttcgtttatggattagaaaatgacgtgacgagctagcatccggccgccgcggcggcagcggacagagccagatgcggtcagggtcaatctctccttgagctctcctctccaccgcgctgagaccagcctttcggcccttgcacgccgcacacgccagtccaggtctcaccgtcgggctgcttcaccggtgcctaatagcgatgcccaccaccatctgcagtttgagcaagcaacataaatggaagatagcagtctctgtgatgctgttctccgtgctcctaatagcatgtgattcgccattcagggccttttttagcaagtacctcagctccattgtaccatcatctggatcatcacatgacactgcactaacccaggagaatcgacatttatactcagaggtcagagcatgccactaacctgactaacagcaaggcagcgaaacagatcgaacatggcatgtacaacatgaacaccagttcgatcaatgcagcttccagttggagcattatgaaggaggagttcacatttcaagcacatgatcgccctttcaataattgtcatgcttccaccattgtagaggttgagaaagaaatttttttggtttcatattttggtggatccatagaaggggctcctgatgtcaaaatctggacacagagatacagtgatggctattggcatcctccagtagtagctgatgaagaaaatgcgacagcaatgtggaatcctgttttatttcagctcccctctcatgagttgcttctcttctacaagattggtgaacaccctcaaaactggagcggtgccatgaaaagatctctcaatggtggtatgtcctggttagagagggagcaattaccacctggtattcttggccctattaagaataagccctttttgcttgatgatggccgtttactatgtgggacatctgttgaaagttggaactcttggggtgcatggcttgaggtaacagaagatgctggccggacatggagcaaatatggtcctatatttatccaaggcgagaaacttggtgtcattcagccagtaccttatcagaccaccaatgggagtatacgtatgttgctgaggtctcaccaaacaatcggttcggtatgcatggctgattcctacgatggaggattaagatggagttttgcgcgcaagagtgtgcttccaaaccctaattcagggatcgatggaatcaagatgaaagatgggagagtggcacttgcctacaacaccgtctccagaggcacgctcaaagtggccgtctccacagacgacggcctctcatggcaagaggtggtgacgctggagaacgcggaaggctgggagttctcgtatcctgcagtgatccaaacccagggccggccctgagggtatgcaggatatacgaccgctcaggaccctcaaggtttatagggcccccgtttattcaacttatatccaaatacatatacattacagataaatctatattctcgttcttttgttgtgtctctttaattttctggcaatcatctcttcgaggtcgcgcaacagtctgcttgatgacgaatactaaatattgattaacgtgggaaggacggatggtgttgtac

SEQ ID NO: 104831 - DNA, 1085 bp, Zea Mays
gagaaccacatcgtcggcataaagagaaacccggtgttgtagctgcctagaagaaagaggttgcaataaaccttcatcatctgctttagagaaaagctgaccaagcacatccatgacaagcacaaacaacatcggagaaagagggtccctgtcgcagccctcttttatgtgaaatgaggcttcccagccctttttgcttgatgatggccgtttactatgtgggacatctgttgaaagttggaactcttggggtgcatggcttgaggtaacagaagatgctggccggacatggagcaaatatggtcctatatttatccaaggcgagaaacttggtgtcattcagccagtaccttatcagaccaccaatgggagtatacgtatgttgctgaggtctcaccaaacaatcggttcggtatgcatggctgattcctacgatggaggattaagatggagttttgcgcgcaagagtgtgcttccaaaccctaattcagggatcgatggaatcaagatgaaagatgggagagtggcacttgcctacaacaccgtctccagaggcacgctcaaagtggccgtctccacagacgacggcctctcatggcaagaggtggtgacgctggagaacgcggaaggctgggagttctcgtatcctgcagtgatccaaacccagggccggccctgagggtatgcaggatatacgaccgctcaggaccctcaaggtttatagggcccccgtttattcaacttatatccaaatacatatacattacagataaatctatattctcgttcttttgttgtgtctctttaattttctggcaatcatctcttcgaggtcgcgcaacagtctgcttgatgacgaatactaaatattgattaacgtgggaaggacggatggtgttgtacacttatgcgtgtcgcgttgcttaattctagcctatccgagggtcaaccctaataacctatgttgcttaatcattgtttagtttgttgaactttgttttcaaaaaaaattgctcgaatgtatatagatttggtttactgtgcattttaaggtttaggttagtttgacaaattaaaagtaaaaa

SEQ ID NO: 104832 - DNA, 689 bp, Zea Mays
gcgcgcagcggacgccgcgaaaccctcgctccctgcccgcacccgcaacagcctcccgcacccagccagccccttccccagcagcagtctccagccgcagccatggccaagccaccgccacccacctccacctccgacccgcgctccccaccactgctacaaccacctcgtcggcccccaagtcgtcgtctcgccctaggccccgcccccggggcctcctcgatccgctcggagcctccgcgcgctccctactcgcctcggcgcgccgctccccggtcaccacgctagccgccgccttcttcctcctcgcgctcgtcatgtacggtgaggacgcccacaccatcgccgagctctccatcgacgactacctctacccggacgccgacctctacaacgtctccggcctgccgcccctcgcgctgcccccgctcacctgcgacctctcccgcagcaaatgggtcttcgacaacgtctccgttccggcgtaccgggagaaagactgcaccttcctcaccaagcagttggccagttgtgtgattcgattgattgacaagaaggtcacggtcgtggtgtcgccgacgccgtcgtcgtggcgggcggaagagcccggggcggctagcaagctgagcccgcaggccaagcggaaggtggtgaccgggctggcgtccttgctgccgctcgcaagctga

SEQ ID NO: 104833 - DNA, 2235 bp, Zea Mays
gcttatctgtgtaagcatcatatcatggaaagtgactacaggatcggattctatgtgtctgtgccagagaaaattaggtggcccattatggcaattgctattcttgcaacagttgtgggaagccaagccgtcatcactggtacattctcaatgatcaagcagtgcgcttctctgggctgctttcctcgggtgaagataatccatacatctgccaaagtacacgggcaaatatacatccctgagatcaattggattatgatgataatgtgcttagctgtaaccattggttttaggaacacaaaacacttgagaaatgcatcaggtatgtcaatgttaacatatatacatactaaaagtgagtagtaatggatgtccatctgaccatctcacatctacttgttatttttacataggatgggctattattactctgtgtgcagttgcaaacatgtgacttattgatttgttatcatgggcatggcagattagatgatagtgacctcccttccttgcgactcatggtttgctggagctgtaggattctcccggcacaatggaggtgctattgtctgatttggagcaacaaggaaatataaagtagtaaaacaatttctttacgaaagataaacttttcagggtcattgaaaattatgagtcaaaacctagagcataatctttagaatgccttgcttttaataagtgattacctattttgttacagagccgaagagcatttaccaaacacattgcgacaagctctaatttgcaaagtaatactctctaccttcttttatcttgttttttataatccatatccctgacacttcataaatattcttgttgtaatgttatgtacttctacacctggatttgcaatgtgtttttttgctcatgtttcacttattctagctcctgatagaagtaaactgtctaaatgacatggagctacttctatggggcacgttacttaccgattgtttcctatcttaaaactctaccaacatatcttgttttattcaaggcataagaatgaaccatgatgtattttttcctgcacaatataaagaaatgggctatcagcctcacgtaatggtgaattatttagcactactgggctggggtgatggtactgaaaatgagttcttcactatcgatgacctagtccagaaattcactacaaaccaagtcaataaaagtggagcagcctttgatccagtctgccaccagaagttgcttttatgctgaatttcggtacatcatgttgactaggactgctaatgactccagttttaatccacttagtttccacatttaataatctctacctggttctcttgtcattgcacttattgcttctaaaatttttctgcttcaaggagttcaacacggggcgcttcacttgtttgtaattgaggcaaattagtctgctttgatacctctactacttattaaggacgcaagagtagcctgtctctgactttgttctgtcaccggccgttccgacatccgtgaatctgatagcccattttagggtcgctatgcacactttcttctgtgtaatgcaacttcattagtgttgctatgcacactttcttctgcaccaaccacaatattcttttgggatgctgtcaatgggatgaatgaattgcatattttagggtctttgctacactatagagtagatgggttataaatatacaaatctcagcttcctatccattctttctatctagagttgtagacaccacatagtatacagcagcaggagcagtgctttgctcagtccacctttgttgaagctgggctgagagtgtaggagtgaagccacaaggctctctgggccgtcgaggatcgatcaggcggtggcgccgtcgggcagaagcggtcgtcaccggacaagatgcacaggtccaccatggacgccgtctaccaccaccaccaccaagagtcgccgttgacgggcaacgtcgccgccaccgccaccgccggtaagaagctgggcgtggagcggttcaagttgccgccgatctacatctcgctgtcgcggaaggagaaggacgacaatttccttgcgatgaagggcaccaagctaccccagtggcccaagaaaagggccaagaacgtggagaccctccaatttatcttcccggggatgtggtggggtaggggccataggatggatttgaattcatgatagtatctacacatgtacactgcttaacgatactatgtacg

SEQ ID NO: 104834 - DNA, 97 bp, Zea Mays
ttaaccatttcgtggttgtcccacttcttgctcccgaggttgcgcacttggttcaccaaggtcttgagccggttgtacatgtgttgtggctcttccc

SEQ ID NO: 104835 - DNA, 2248 bp, Zea Mays
ccatcatctttgattcctgtctccgcagcttgacccacaaacgcgactagggcagtcaccgcggcgtagctgccgcgtcttgccccgaaacacaaccgtcaacgccgtcccggaccgcagcagcgcggcgcaaccccaatcggagccggagctagcgaagcgagcgcctcgcttccacaagtcgctagctgcatctggagcgccgccggcccgaccaacgcccgagccagccgtgggcgttcggccgccgattcctctgggctctggtggatgtcttgtaggaacacacttggatgaggttacaatacgcgtggaacgccatacccttcattctgctattttgtgctatctccacaaataaaatcttctccaacaacaaacctttcagcttcaccatagcgtctgctaggtcgttgcttcagattgacccaaattcaggacttgttcaggacaaggtaaaagttggacaaattttggaagaggacacccaaaacattgtcaatatgactatgaatgtgtcgtctggatggagcattgtgaaagaagaactcatacttcctgctagaggtgcccctttcaatagttgccatgcttctactattgtacagattgaggaagacaattttttggtagcatatttcggtggatccagggaaggtgccccggatgttaaaatctggttacagagatatagtgatggtcactggcatcctccagtggtggctgatgaacaagatggggtgcccatgtggaatcctgttttgtttcagcttccctcccgtgagctgcttctcttctacaagattggtcaagaagttcagaagtggagcggtgccatgaaaagatcgttagatggcggtgtaacctggtcacctagagagcagttacctcctggcatccttggtcctattaaaaataagcctttcttgcttgaagatgggcgcctactgtgtggatcatcagttgaaagttggaattcttggggtgcatggcttgaggttacgaaagatgccggatggacctggagaaagtatggccctatatgtataaaaggtcaaccacttggggtgattcagccagttccctacaggactgacgatggaactattcgagtgttgctgcgatcatttgaaacaattggtcatgtctgtatggccgattccattgatgaaggtgtgacatggagttatgtccgtgagactgagcttccaaacccaaattctgggattgatggagttaagatgaaggatggaagagtactgcttgcctacaacaccttctccagaggaacgctcaagcttgcagtatccttaaacgacggtgattcatgggacgaagtaatgacactagaggacacaaaaggaaggcggctttaaattattgtccgctggtggtgtcatgtcacgagccccagcccccaggaccggaggagtcgtcagcatccggccccgcccggcccggccctggcggatcggacatcggaggaaatgaacaaaatccacgcgtgcgcgcgcccttggagaacggagtgcagacggccggcaacccggcaggtcggctgcacgcggggcccgggcgagaccgcgagcgaggtgtcccagtcggcaagccaggccgccacctttggctgtggcagtgtggtggaacccccggaggacaacttcgtggcagttgcatggcttcttcccgaacaaaagacgagacgaaaaacgtcgcgacaggagctcagctcagctaccgggggcggacggtggtcactgttcctccctcgatcgcttggcccagggcgcgcgagaaagccgccaaagagcgcgagggcacgggatcggacgatgcatgctgcaacgcgcgcgcgccacgacaggggagctagagcgatggttccggcgggaccgggccgggccggctcacgcaccgcgcgctagcggcagccaggacgacacgtccttgtccccgaaaagcgggagggcccggccggactcggactgttgcgcttgcgctgcggagcgacgtgtcgtgtgtaccggacgggctccacgctttggtggtctgcctccttcgccctgtcgccgctgatcctcgtcgtcgtcgtcgtcccgcccgcgatgcaacgcctcgctacgcctcctcctggattggacggcctacagttgtcacgcttttgtctggatctggaaactttttctatcgaattattaaactgccatcaaattattctagcggtcaagaaaatttctctgcgcggtct

SEQ ID NO: 104836 - DNA, 1288 bp, Zea Mays
tttcagtctttcagtctactcatcattttttgttcttcctaattattattcctagaactgtgcttagcatcgcatcatcagcaggagagaaaacatattaaaaaaaaattagctttggatcacaacacaggaaagaaagaaaacatataaaactttgagctttggatcacaacacatgcccaagagaatcagcaggacggttccaaccaatttgagttggagccagccacagccagtatccaactgtccaatcggcaaccaggtcattattcaaccaatcaatgtactggttgagctatactctgctactactgctgcacatgacacataacattctttctttgccattgattttagtactaaaccagcgagaaatgaaccggaggccaaaacaaacaagcacggtaccgtccttgttacaaaatttccattccatccaaaagcaaagagaagcagggagagaaatctgagagagagaatgaagaaagaggaggaagcaaagggagatcaaaaatctgtccaagggctcgcttcgctcgctcgtccacactacccgtcgaagcccgtccggctccagacggcgtcgcgcacccgcgacatgtcccggcccttgagcgtccggccggcgccctccaccacggacgcccgcgcctgccgccgcgccaggtacacgtgcggcggcacccacccggcgccctgcccctgcctgccgtcgtccccctcccgcccttcgtcgtggtcgtcgccccccatctccatctcgaacagcagcgacgggtccgcgtccgggaacgcgaagcgggcgggccacgcgggcacctcgacgggagccgacgccgccgcctgccgcccgggcccgtcgccgaacgcccggctcaggccgccctgccgcgggccgcgcctgccctccgccgcctccacctgcctggacgccgtggcgcgtgggctccccgggtcgttggtggcggcggcggcggcggccgagtaccagacgtcggcctcggcgaggtccggcaggtcgtcgaaggcggcgggcgccggcgccacggcccccggcgacggcccgccgcgggggaagccgaggaaccgctcagcggcggcgaacggcgacctgcgcgccttggccatcgccgaccgcgctcgcgtcgtgcggcgcgaggagaggaaagccgggcgcgcacgagacctgctgacctgatgagagagagagagagagagagagagagagagagagagggcggaaggtgtggaagggaagcgaaggcaggagggattttggttaaggttt

SEQ ID NO: 104837 - DNA, 2011 bp, Zea Mays
caggcaccacacatcataccacatatcatcacacaccataccacatcgacgacttgagcgcgtgcgtgcgtgccctgatcgagcaccgattgccatggactcgacgacgacgacagcgccgctgctgcagccggccgccgccgcctcgagcaaggaggagccggcaccggcgtccccgcacggcgcgggcagctgggagctggaggcggtcctggccgacgcgtcgtcgccggtcttgcggcgggcctgggaaggcgcccgcctggagctgccgctgctgctgcgtgtggcgctgccggcggtgggcgtctacgtgatcaacttcgtcatgtccatgtccacgcagatcttctgcgggcagctcggcaacctggagctcgccgccgcgtcgctcggcaacaccggcatccagtccctcgcctacggcctcatgctggggatgggcagcgcggtggagacgctgtgcgggcaggcgtacggcgcgcacaagcacggcatgctgggggtgtacctgcagcggtcgacggtgctgctgatggccaccgccgtgcctctgaccgtggtgtacgccttctcggcgcgcatcctggtgctcctgggcgagtcggagcgcatctccagggccgccgccgtgttcgtgtacgggctcatcccgcagatcttcgcgtacgcggccaacttccccatccagaagttcctgcaggcgcagagcatcgtggcgcccagcgcctacatctccgtggccacgctggggctccacctgggcctcagctggctcgccgtctaccggctgggcctgggcctgctgggcggctcgctcgtgctcagcttcagctggttcgtcatcgtcgcggcccagttcgcgtacatcgtcaccagcccccggtgcagggacacgtggaccgggttcacaatgcaggccttctccggcctcggcaccttcttcaagctctccgccgcgtccgccgtcatgctgtgcctcgagacatggtactaccagatcatcgtgctcatcgccggcctgctcaagaacccggagatctcgctcgactccctctccatatgcatgaccgtgaacgcatggggtgtttatgatatccgtgggcttcaacgccgcggcgagcgtgcgggtcgggaacgagctcggcgcgggcaacccgagggcggcgtcgttctcggtgctggtggtgacgtcgctgtcgttcgccgtgtcggcggtgtgcgccgtcgccgtgctctgcctccgcgaccagctgagctacctgttcacgggcggcgaggccgtggctcgcgccgtgtccgacctctgcccgctcctcgccctcacgctcgtcctcaacggcgtgcagccagtgctctcaggcgtcgccgtgggctgcgggtggcaggccttcgtggcgtacgtgaacgtcggctgctactacgtcgtcggcgtgccgctcggcgtcttcctcggcttctacctcgacctcggcgccaagggcatttggagcggcatggtcatcgggggaaccatgatgcagacgctcatcctgctctgggtcaccttcagaacagactggaccaaggaggtggagaacgccagggcgaggctggacaagtgggacgacaagaagcagcccctcctagcctagaagaagactgattgaaggtcactgtagcgcgcgctgatggacctttttttggcgatgattgagagaccacaccaggcgcgcgtcggaggggatgcaacgcaacgcaacgcaatcatttgggttttgaagctatttaatattatcgcattatagagtgtgcgcgtgcagtttcgagtgattaaagttttgttacgctttcttcggtgtcagctccaacttagggcgactagatgcgaccatcacaccagggtttggaccgtggtgggtggattctattcgtttttttttaagcacaaatatgtctagggcgaaggaaaaaaatgtagtgtgcaattattgtttcttgagctctcaataaatctcacgattctcacgag

SEQ ID NO: 104838 - DNA, 2561 bp, Zea Mays
caggcaccacacatcataccacatatcatcacacaccataccacatcgacgacttgagcgcgtgcgtgcgtgccctgatcgagcaccgattgccatggactcgacgacgacgacagcgccgctgctgcagccggccgccgccgcctcgagcaaggaggagccggcaccggcgtccccgcacggcgcgggcagctgggagctggaggcggtcctggccgacgcgtcgtcgccggtcttgcggcgggcctgggaaggcgcccgcctggagctgccgctgctgctgcgtgtggcgctgccggcggtgggcgtctacgtgatcaacttcgtcatgtccatgtccacgcagatcttctgcgggcagctcggcaacctggagctcgccgccgcgtcgctcggcaacaccggcatccagtccctcgcctacggcctcatggtacgtgccctcgcccgcgtattaaccctgtcagtctgtcacccaccaatataaaaacctgccattaagggaaatatcgtactgctccaggccatgcatgattgttgacctgttcagcgctgcttgccttgcctgctccccccgaggagagcgagctggtagtaaaatagtaaaatacacaaaaaggttggccgttttgccggcatggatgtgacctgcctatttctagctccaaatcctatactcgtggagtagccaacccgtccctactgccctgcagctgcaggcataggacacttgtccagacacgacagacagtagtagtacagtaaaaagcggttaataacactgctgagcgcccatgtgccaaacgcagtggtcacagctcgccagccagtcacgtggccctcgcatttggcaaacgccaagcgcgcagtactcctacagtacagcacagtatcacctcacgtacgtaaaaacacaagtcagctttttttggtccatctcatcatctctcatggtcggccgccgcccgccggatggtgtgcagctggggatgggcagcgcggtggagacgctgtgcgggcaggcgtacggcgcgcacaagcacggcatgctgggggtgtacctgcagcggtcgacggtgctgctgatggccaccgccgtgcctctgaccgtggtgtacgccttctcggcgcgcatcctggtgctcctgggcgagtcggagcgcatctccagggccgccgccgtgttcgtgtacgggctcatcccgcagatcttcgcgtacgcggccaacttccccatccagaagttcctgcaggcgcagagcatcgtggcgcccagcgcctacatctccgtggccacgctggggctccacctgggcctcagctggctcgccgtctaccggctgggcctgggcctgctgggcggctcgctcgtgctcagcttcagctggttcgtcatcgtcgcggcccagttcgcgtacatcgtcaccagcccccggtgcagggacacgtggaccgggttcacaatgcaggccttctccggcctcggcaccttcttcaagctctccgccgcgtccgccgtcatgctgtgcctcgagacatggtactaccagatcatcgtgctcatcgccggcctgctcaagaacccggagatctcgctcgactccctctccatatgcatgaccgtgaacgcatggggtgtttatgatatccgtgggcttcaacgccgcggcgagcgtgcgggtcgggaacgagctcggcgcgggcaacccgagggcggcgtcgttctcggtgctggtggtgacgtcgctgtcgttcgccgtgtcggcggtgtgcgccgtcgccgtgctctgcctccgcgaccagctgagctacctgttcacgggcggcgaggccgtggctcgcgccgtgtccgacctctgcccgctcctcgccctcacgctcgtcctcaacggcgtgcagccagtgctctcaggcgtcgccgtgggctgcgggtggcaggccttcgtggcgtacgtgaacgtcggctgctactacgtcgtcggcgtgccgctcggcgtcttcctcggcttctacctcgacctcggcgccaagggcatttggagcggcatggtcatcgggggaaccatgatgcagacgctcatcctgctctgggtcaccttcagaacagactggaccaaggaggtggagaacgccagggcgaggctggacaagtgggacgacaagaagcagcccctcctagcctagaagaagactgattgaaggtcactgtagcgcgcgctgatggacctttttttggcgatgattgagagaccacaccaggcgcgcgtcggaggggatgcaacgcaacgcaacgcaatcatttgggttttgaagctatttaatattatcgcattatagagtgtgcgcgtgcagtttcgagtgattaaagttttgttacgctttcttcggtgtcagctccaacttagggcgactagatgcgaccatcacaccagggtttggaccgtggtgggtggattctattcgtttttttttaagcacaaatatgtctagggcgaaggaaaaaaatgtagtgtgcaattattgtttcttgagctctcaataaatctcacgattctcacgag

SEQ ID NO: 104839 - DNA, 2054 bp, Zea Mays
ccactgttgtcttacatgccaccaccacccgagcacgtgtcagactcaggcatcaccctttgcccgcctctctttggtgggattcttatcacaaccgcacacaccaaaaagcagagacaaacttataagaactttacggcgtgctatacctatcaggctatcactggctctccccgtcaactaaactctagccagtgagtggatgatgggtcggacgggtgacggccgccgccgcgacgtcgacggccggctggaggcgctgctctctggcgccggcggcgaggagccgtggctccggcgcgtggcgctcgcgacggctctggagctgcggctgctggcgcccctggccgcgccggccgtggtggtctacatgctcatcatcgtcatgtcgtcgaccacgcagatcgtgtgcggccagctcggcaacgtccagctcgccgccgcctccctcggcaacaacggcatccaggtcttcgcctacggcatcatgctgggtatgggcagcgcggtggagacgctgtgcgggcaggcgtacggcgccgagaagtacgagatgctgggcgtgtacctgcagcgctcgacggtgctgctcacggccaccggggtgccgctcgccgccgtgtacgcgctgtcggagccgctgctgctgctgctggggcagtcgccggagatcgccggcgccgccgccgagttcgcctacggcctcgtcccgcagatcttcgcgtacgccgccaacttccccatccagaagttcctgcaggcgcagagcatcgtggcgcccagcgcctacatcctggcggccagcttcgcgctccacgtgccgctcagctggctcgccgtctacgggctgggcctcggcctgctcggggcctcgctcacgctcagcctcacgtggtgggtgctggtcctgggccagttcgcgtacatcgtgtggagcccgcgctgccgggccacctggaccgggttcacgtgggctgccttcgccgacctgcccgggttcgccggcctgtccgccgcgtcggctgtcatgctggcgctcgaggtctggtacttccaggtgctcatcctcctcgccggcatgctgccggacccgcagatcgccctggactcgctaacggtctgcacgtcgatccagtcatgggtgttcatgatctctgtgggcttcaatgcagctgccagcgtgagggttgggaatgagctgggcgccggcaaccccaggtccgccgcgttctctgcgtgggtggtcaccgccctgtcggcgttcgtctcagggatagctggcctcgtcactttcctgctcagggacaagctcagctacatcttcaccggtggcgaggccgtctcgcgcgccgtcgccgacttgtgcccgctgctcgttgggaccattgtgctctgcgggatccagcccgtgctgtcaggtgtggccgttggctgcgggtggcaagcgatggttgcctacatcaacgtcgaatgctactacttcatcggcgtacccctcggcgtgctcctcggattcaagttcggtttcgggatcaagggactgtggggaggcatgattgggggtaccctcatccaaacacttgctttgatctggatcacgttaaggactgactggaacaaggaggtcgaagaagcgcggaaaagattggataagtgggacgacacaaggcagcctcttgtcgcaagcaaggagtgatggatgatggtacaggagtggatgaagaagattcagtaggcttctgctagctgatccagtctgaaatcatcttgtagtcgccaccgctaactgcaattcagggatgtactaatgcagagcttctctggtctcggctctcaggaacataccataccacagtcagtttcggttgatggggccttgcgagccgggcgtccgttcaatcggtatgcgtggacatggcggccgttggctttactcccgtagtacgagcgacagtgccattattttttgtttgctccggtaattttggtggctgccttgcctttttttaaaaaaaaaactcttatgtctccactcacgtcacagtgagttcgtt

SEQ ID NO: 104840 - DNA, 2248 bp, Zea Mays
atcacaaccgcacacaccaaaaagcagagacaaacttataagaactttacggcgtgctatacctatcaggctatcactggctctccccgtcaactaaactctagccagtgagtggatgatgggtcggacgggtgacggccgccgccgcgacgtcgacggccggctggaggcgctgctctctggcgccggcggcgaggagccgtggctccggcgcgtggcgctcgcgacggctctggagctgcggctgctggcgcccctggccgcgccggccgtggtggtctacatgctcatcatcgtcatgtcgtcgaccacgcagatcgtgtgcggccagctcggcaacgtccagctcgccgccgcctccctcggcaacaacggcatccaggtcttcgcctacggcatcatgctgggtatgggcagcgcggtggagacgctgtgcgggcaggcgtacggcgccgagaagtacgagatgctgggcgtgtacctgcagcgctcgacggtgctgctcacggccaccggggtgccgctcgccgccgtgtacgcgctgtcggagccgctgctgctgctgctggggcagtcgccggagatcgccggcgccgccgccgagttcgcctacggcctcgtcccgcagatcttcgcgtacgccgccaacttccccatccagaagttcctgcaggcgcagagcatcgtggcgcccagcgcctacatcctggcggccagcttcgcgctccacgtgccgctcagctggctcgccgtctacgggctgggcctcggcctgctcggggcctcgctcacgctcagcctcacgtggtgggtgctggtcctgggccagttcgcgtacatcgtgtggagcccgcgctgccgggccacctggaccgggttcacgtgggctgccttcgccgacctgcccgggttcgccggcctgtccgccgcgtcggctgtcatgctggcgctcgaggtctggtacttccaggtgctcatcctcctcgccggcatgctgccggacccgcagatcgccctggactcgctaacggtctgcacgtcgatccagtcatgggtgttcatgatctctgtgggcttcaatgcagctgccagcgtgagggttgggaatgagctgggcgccggcaaccccaggtccgccgcgttctctgcgtgggtggtcaccgccctgtcggcgttcgtctcagggatagctggcctcgtcactttcctgctcagggacaagctcagctacatcttcaccggtggcgaggccgtctcgcgcgccgtcgccgacttgtgcccgctgctcgttgggaccattgtgctctgcgggatccagcccgtgctgtcaggtgcttttcctctctttttttttcccttttccttttcctttttccagactgaaactgtggtgcaccttcagagttcagacctgacactcatccaaattcaagtggtactacagtgttacataagttaattcgctggagaacagacttattcgggctattaatctttgagccgtcgcattacactgcgacgggatccttcaccttcagtgatgcgtttgttctgttcttcttcccactggtactgaactttttgctcactggacgacgacgggtgatgaaaggtgtggccgttggctgcgggtggcaagcgatggttgcctacatcaacgtcgaatgctactacttcatcggcgtacccctcggcgtgctcctcggattcaagttcggtttcgggatcaagggactgtggggaggcatgattgggggtaccctcatccaaacacttgctttgatctggatcacgttaaggactgactggaacaaggaggtcgaagaagcgcggaaaagattggataagtgggacgacacaaggcagcctcttgtcgcaagcaaggagtgatggatgatggtacaggagtggatgaagaagattcagtaggcttctgctagctgatccagtctgaaatcatcttgtagtcgccaccgctaactgcaattcagggatgtactaatgcagagcttctctggtctcggctctcaggaacataccataccacagtcagtttcggttgatggggccttgcgagccgggcgtccgttcaatcggtatgcgtggacatggcggccgttggctttactcccgtagtacgagcgacagtgccattattttttgtttgctccggtaattttggtggctgccttgcctttttttaaaaaaaaaactcttatgtctccactcacgtcacagtgagttcgtt

SEQ ID NO: 104841 - DNA, 1991 bp, Zea Mays
atcacaaccgcacacaccaaaaagcagagacaaacttataagaactttacggcgtgctatacctatcaggctatcactggctctccccgtcaactaaactctagccagtgagtggatgatgggtcggacgggtgacggccgccgccgcgacgtcgacggccggctggaggcgctgctctctggcgccggcggcgaggagccgtggctccggcgcgtggcgctcgcgacggctctggagctgcggctgctggcgcccctggccgcgccggccgtggtggtctacatgctcatcatcgtcatgtcgtcgaccacgcagatcgtgtgcggccagctcggcaacgtccagctcgccgccgcctccctcggcaacaacggcatccaggtcttcgcctacggcatcatgctgggtatgggcagcgcggtggagacgctgtgcgggcaggcgtacggcgccgagaagtacgagatgctgggcgtgtacctgcagcgctcgacggtgctgctcacggccaccggggtgccgctcgccgccgtgtacgcgctgtcggagccgctgctgctgctgctggggcagtcgccggagatcgccggcgccgccgccgagttcgcctacggcctcgtcccgcagatcttcgcgtacgccgccaacttccccatccagaagttcctgcaggcgcagagcatcgtggcgcccagcgcctacatcctggcggccagcttcgcgctccacgtgccgctcagctggctcgccgtctacgggctgggcctcggcctgctcggggcctcgctcacgctcagcctcacgtggtgggtgctggtcctgggccagttcgcgtacatcgtgtggagcccgcgctgccgggccacctggaccgggttcacgtgggctgccttcgccgacctgcccgggttcgccggcctgtccgccgcgtcggctgtcatgctggcgctcgaggtctggtacttccaggtgctcatcctcctcgccggcatgctgccggacccgcagatcgccctggactcgctaacggtctgcacgtcgatccagtcatgggtgttcatgatctctgtgggcttcaatgcagctgccagcgtgagggttgggaatgagctgggcgccggcaaccccaggtccgccgcgttctctgcgtgggtggtcaccgccctgtcggcgttcgtctcagggatagctggcctcgtcactttcctgctcagggacaagctcagctacatcttcaccggtggcgaggccgtctcgcgcgccgtcgccgacttgtgcccgctgctcgttgggaccattgtgctctgcgggatccagcccgtgctgtcaggtgtggccgttggctgcgggtggcaagcgatggttgcctacatcaacgtcgaatgctactacttcatcggcgtacccctcggcgtgctcctcggattcaagttcggtttcgggatcaagggactgtggggaggcatgattgggggtaccctcatccaaacacttgctttgatctggatcacgttaaggactgactggaacaaggaggtcgaagaagcgcggaaaagattggataagtgggacgacacaaggcagcctcttgtcgcaagcaaggagtgatggatgatggtacaggagtggatgaagaagattcagaacataccataccacagtcagtttcggttgatggggccttgcgagccgggcgtccgttcaatcggtatgcgtggacatggcggccgttggctttactcccgtagtacgagcgacagtgccattattttttgtttgctccggtaattttggtggctgccttgcctttttttaaaaaaaaaactcttatgtctccactcacgtcacagtgagttcgttttttgctatcgtttaggtggagattagtatctgatacaaaccaacccttccgtgcaatcgtaaaaaacttctaatatgtaccatataatcttgatcaagtggacacacgggaatgaataattttgcactt

SEQ ID NO: 104842 - DNA, 1896 bp, Zea Mays
aacttataagaactttacggcgtgctatacctatcaggctatcactggctctccccgtcaactaaactctagccagtgagtggatgatgggtcggacgggtgacggccgccgccgcgacgtcgacggccggctggaggcgctgctctctggcgccggcggcgaggagccgtggctccggcgcgtggcgctcgcgacggctctggagctgcggctgctggcgcccctggccgcgccggccgtggtggtctacatgctcatcatcgtcatgtcgtcgaccacgcagatcgtgtgcggccagctcggcaacgtccagctcgccgccgcctccctcggcaacaacggcatccaggtcttcgcctacggcatcatgctgggtatgggcagcgcggtggagacgctgtgcgggcaggcgtacggcgccgagaagtacgagatgctgggcgtgtacctgcagcgctcgacggtgctgctcacggccaccggggtgccgctcgccgccgtgtacgcgctgtcggagccgctgctgctgctgctggggcagtcgccggagatcgccggcgccgccgccgagttcgcctacggcctcgtcccgcagatcttcgcgtacgccgccaacttccccatccagaagttcctgcaggcgcagagcatcgtggcgcccagcgcctacatcctggcggccagcttcgcgctccacgtgccgctcagctggctcgccgtctacgggctgggcctcggcctgctcggggcctcgctcacgctcagcctcacgtggtgggtgctggtcctgggccagttcgcgtacatcgtgtggagcccgcgctgccgggccacctggaccgggttcacgtgggctgccttcgccgacctgcccgggttcgccggcctgtccgccgcgtcggctgtcatgctggcgctcgaggtctggtacttccaggtgctcatcctcctcgccggcatgctgccggacccgcagatcgccctggactcgctaacggtctgcacgtcgatccagtcatgggtgttcatgatctctgtgggcttcaatgcagctgccagcgtgagggttgggaatgagctgggcgccggcaaccccaggtccgccgcgttctctgcgtgggtggtcaccgccctgtcggcgttcgtctcagggatagctggcctcgtcactttcctgctcagggacaagctcagctacatcttcaccggtggcgaggccgtctcgcgcgccgtcgccgacttgtgcccgctgctcgttgggaccattgtgctctgcgggatccagcccgtgctgtcaggtgtggccgttggctgcgggtggcaagcgatggttgcctacatcaacgtcgaatgctactacttcatcggcgtacccctcggcgtgctcctcggattcaagttcggtttcgggatcaagggactgtggggaggcatgattgggggtaccctcatccaaacacttgctttgatctggatcacgttaaggactgactggaacaaggaggcttctgttgtgtggccattttcttctctgtgttttgattttttttttcttgtgctgtagtttatctgttctttttttctctctttttggtgtctgaatgtaggtcgaagaagcgcggaaaagattggataagtgggacgacacaaggcagcctcttgtcgcaagcaaggagtgatggatgatggtacaggagtggatgaagaagattcagaacataccataccacagtcagtttcggttgatggggccttgcgagccgggcgtccgttcaatcggtatgcgtggacatggcggccgttggctttactcccgtagtacgagcgacagtgccattattttttgtttgctccggtaattttggtggctgccttgcctttttttaaaaaaaaaa

SEQ ID NO: 104843 - DNA, 743 bp, Zea Mays
attcttaaaaactttgttgcttccatcgaagtactctggtctctggtaatcccatcaacaattctacaaatataggaccagaatacaggaggatctgatatattacatttgttgatgaatatttgtcatcgattagtttatttttaaactaaaatatgacaaataaaaaaattagtaagtagtttgctgcttactatatagacacacacgtccccggccagacagccaacagctgcagaaacctcacgccaagagcgagagaccctttcccgatcccgccgcctcctcctcgccgtcgacgttgcttcgcgaagagccgaagatgctgctcctgcgggcatcgacggcgccgttcgcgtacgccaaggtggacaaggtggacgcggaggaggcgcggcacctcagggcgcagtacctcatccacaaggtgctggaggagaagagcccaaggccgccggcggcgctggcgcggaccagcaggcccagggtcggcgtccggctgaagaagctcaggctcgccgtccggggcctcagggcgcgcgcgtgccgggccctgctgaggcacctcaggaacctcaggcggctcgtcgggcacggagctcaggggtcgccgtgacgccgtcgccctactgatgacgccttgtgtccctggcgctttttctgggaggaggaggagggatccggaatccccgtgtctccattttggttttggttcttggctgttgctgcgtggtcgtggatct

SEQ ID NO: 104844 - DNA, 2229 bp, Zea Mays
ccctcctctctcgctttcgtctccacgcctagggtttctctgcctcgccggggaagcgatgcagccgctgcaccaaccgccgatgaacgggcaacacggcccgcctcctccgcagggatccggggttcccacggcttcgcagcagcaggcgccaccgccgtcgtactaccagcagcagcagcagcagcagcaggggccaccgcctcagtactaccagcagggtcccccacagccgtgggcgcagcagcaacagtacgctccaccgccgccgcagtacccgcctcagatgcagcagtacgctccaccaccgcagcagtacgcccctccgccgcagcagcagtacgccgctccgccgcagcagcagtacgccgctccgccgccgcagtacgcgcctccgccgccgcagtacgcgcctccgccgcagcagtacgcgcagccgccgcagtacgcgcagccaccgcagtatgggacaacgccgggaagcggtgaggtcaggaccctgtggattggagatcttcagtactggatggacgagaactatctccactacaacgccttcgcgcctgtggcccagcagattgcctctgtgaaaattatacggaacaagcagactgggcactcagaaggttatggttttattgagttttactctcaagccgctgcagaacatactctgatgaacttcaatgggcagatgatgccgaatattgagatggcttttaagctgaattgggcttctgctagcactggggataagcgtggagataatggttctgaccatgcaatatttgttggtgatttggcccctgatgttacggactccatgttggaagatgtgttcagagctaactatccttcagttagaggagctaaagttgttgttgataggatcactggacggcctaaaggatatgggttcgtgcattttggagatctgaatgagcaggcacgtgctatgaccgagatgaatggaatgatgttatctacaaggaaaatgaggattggggctgcagctagcaagaagaatacagatgctcagcagacatatgcaactaatggtgcataccagagttctcaaggcaattgttcagagaatgatcccaacaatacaacagtctttgtgggtgggttagattccaatgtagacgaggagtatctaaggcaaatttttactccgtacggagaaatttcctatgtgaagattcctgtaggcaagcattgtggatttgttcaatttaccagcaggtcatgtgctgaggaagccatccaaatgctgaatgggagtcagattggtggacagaaagctcggctttcatggggccgtagtactcaaaacagacaggcttctcagcatgatgccaacagccagtataatgggaacaactattatcgataccaacagccgggtaatgaaggttatagctatggtgcacccaatgcacaagacccaagcattcaaaactactatggataccctggttatggtaactatgagcagcagtcaacacaggaacagcagcagcagcagcctccaccagcacaggagcagcctccaccggcaccacagtaacaatcatcgtggtgacgattgcttgggcacttctggaatgctatcagattagagggactacagtcagagcagtgccgtgccgaatgagacgtcctgaagatatggagggcatatagtcgcatgggtgttcttgggccggtgttaatctacgatgacactcctgatgtctcttttgtttgtcattgagatcttgacggctgaagtatgcaccgttgaaattgatgtattcgtcgtcgtcggattgtttatttgctcggaaccattttttgcactttacatctgggacgccaaccacgactcattccgcacctaccgttggcccaccagcccgtagtagatgtacgtaggggtggtggcaatggatcaagatctaaatggttcttcataaaatggttggactataaataaattttagttaaaaataaatagaaatatagcttgattttaatttgatcgtatccttaaattttatagtgtaaaatttagagcttattgtcagttatagctgtatctggttcggttcctttgaaactgtggcatggaatagtttctagcaagattttttgaaactgtgacatggaatggtttctagccagattgtttgtgtattttttgtaagccttgatcagttagaactattcctgagtggaattcaggac

SEQ ID NO: 104845 - DNA, 1675 bp, Zea Mays
ctctgcctcgccggggaagcgatgcagccgctgcaccaaccgccgatgaacgggcaacacggcccgcctcctccgcagggatccggggttcccacggcttcgcagcagcaggcgccaccgccgtcgtactaccagcagcagcagcagcagcagcaggggccaccgcctcagtactaccagcagggtcccccacagccgtgggcgcagcagcaacagtacgctccaccgccgccgcagtacccgcctcagatgcagcagtacgctccaccaccgcagtacgcgcctccgccgcagcagtacgcgcagccgccgcagtacgcgcagccaccgcagtatgggacaacgccgggaagcggtgaggtcaggaccctgtggattggagatcttcagtactggatggacgagaactatctccactacaacgccttcgcgcctgtggcccagcagattgcctctgtgaaaattatacggaacaagcagactgggcactcagaaggttatggttttattgagttttactctcaagccgctgcagaacatactctgatgaacttcaatgggcagatgatgccgaatattgagatggcttttaagctgaattgggcttctgctagcactggggataagcgtggagataatggttctgaccatgcaatatttgttggtgatttggcccctgatgttacggactccatgttggaagatgtgttcagagctaactatccttcagttagaggagctaaagttgttgttgataggatcactggacggcctaaaggatatgggttcgtgcattttggagatctgaatgagcaggcacgtgctatgaccgagatgaatggaatgatgttatctacaaggaaaatgaggattggggctgcagctagcaagaagaatacagatgctcagcagacatatgcaactaatggtgcataccagagttctcaaggcaattgttcagagaatgatcccaacaatacaacagtctttgtgggtgggttagattccaatgtagacgaggagtatctaaggcaaatttttactccgtacggagaaatttcctatgtgaagattcctgtaggcaagcattgtggatttgttcaatttaccagcaggtcatgtgctgaggaagccatccaaatgctgaatgggagtcagattggtggacagaaagctcggctttcatggggccgtagtactcaaaacagacaggcttctcagcatgatgccaacagccagtataatgggaacaactattatcgataccaacagccgggtaatgaaggttatagctatggtgcacccaatgcacaagacccaagcattcaaaactactatggataccctggttatggtaactatgagcagcagtcaacacaggaacagcagcagcagcagcctccaccagcacaggagcagcctccaccggcaccacagtaacaatcatcgtggtgacgattgcttgggcacttctggaatgctatcagattagagggactacagtcagagcagtgccgtgccgaatgagacgtcctgaagatatggagggcatatagtcgcatgggtgttcttgggccggtgttaatctacgatgacactcctgatgtctcttttgtttgtcattgagatcttgacggctgaagtatgcaccgttgaaattgatgtattcgtcgtc

SEQ ID NO: 104846 - DNA, 819 bp, Zea Mays
cataaaatgcttaaagctctttaattaactgttctgacactgatacatgtgagttaattctttgttacttgattgggttaccatgttttcaggtcatgtgctgaggaagccatccaaatgctgaatgggagtcagattggtggacagaaagctcggctttcatggggccgtagtactcaaaacagacaggcttctcagcatgatgccaacagccagtataatgggaacaactattatcgataccaacagccgggtaatgaaggttatagctatggtgcacccaatgcacaagacccaagcattcaaaactactatggataccctggttatggtaactatgagcagcagtcaacacaggaacagcagcagcagcagcctccaccagcacaggagcagcctccaccggcaccacagtaacaatcatcgtggtgacgattgcttgggcacttctggaatgctatcagattagagggactacagtcagagcagtgccgtgccgaatgagacgtcctgaagatatggagggcatatagtcgcatgggtgttcttgggccggtgttaatctacgatgacactcctgatgtctcttttgtttgtcattgagatcttgacggctgaagtatgcaccgttgaaattgatgtattcgtcgtcgtcggattgtttatttgctcggaaccattttttgcactttacatctgggacgccaaccacgactcattccgcacctaccgttggcccaccagcccgtagtagatgtacgtaggggtggtggcaatggatcaagatctaaatggttcttcataaaatggttggactat

SEQ ID NO: 104847 - DNA, 2685 bp, Zea Mays
gaatcccgctaatccaaatccatcgagcgggagaaccccgaattccaaaaatccccaaaacccaaccctagctcgctagcctcactgttccccttcgactcttccccttcgcacctctgattcctcgcgccctcgtcccccgctcaatttccagaagcttctagaaccgggtttccagccctaatcccgcaaaaagatgctttcttgcgcctagtagcctgggacggaggcatggacagcggcggcggggagggaggctcgactggcgggaggttccctattctgcaggcgaatagggaccccgagtcaaattgggaggtggacgttgccaaaagcctcgagcagtacctgctcaagatctgttcaggggaggtctccggcgaggacgagtcccattctgtcaactttgccgaagcggcgttactactccaaggatcggttcaagtatacagtaggaaggtggagtacttgtactccttggtgcttcacgcgatagagttcctctcacacaagaaacaggatcaacaggaaaatgtaacagctcaatctaatcaaagcgaccctagcacgattcccagtgaagattatatatttatggggttagatgatgtcctaatggaaacaaggacgtctctggataacaatgttgaccgagatgatttacaaagaaaaattgtgaggccaccagcaaatctactggtgtttgaaggggacgttctggatagtgaagcgagtgagctagactcatatttgttatcaacatgtgatttttatggagatttccttctgctggatccttgtgatgcaccatctgtttttgactttctgcaaggaaaacattctggtaaagaaaatagtgtggctcgccaaggcagtccagcaccttctaaaagccaagccaatgttttcacttccccaaatgcaagatcagcgggcacaggctgtaaagccgcctctggaaaagtcctaggaggtctagattcaactcagaagaatcctgaccaaccttcaactcaagaaaccagtccagatgacaaacattggtctgatcctgttgaacctaactttactgatgatgttgaaaagcctcacccagacgatataggggatcctgttggagattattctgatgacgaggatccgtggaaacctttaaatccacatgaacctggcagcttaaagattcggccttacaggagagtgaaaggttctctacggggggttattggcactttgagaaagaaaactctcacatctatatttcctgtggcaaagatggttggtgtcatcatacctgaacatgctaaatcttttgaagcacagcagtctcagcaggaggaacattatggttcccaatcaccccctcgttttgaaaagtatttggcatcatttgaatttggagaagaaaattccaatgtgtttggagatctgaaagatgacaatggatccgatattggcattaattttgattataatgatccagacatgccaaacgacatagatgttgatcctgacgttccaacatatcctgacgagattattgctgcaactcccaaaggtactcatggtacacaggatgacagagatacacgtgaaagcctcgatgacttgtgtcggtcacatctggtgaggtttttaatggttctatagcctatttgcatctatggggctatagcccatttgcatctatgtcttgtgtggctacaagctacatgcatcttggcgaccataatgctctccttgccagcattgctgaggttgaaaagcagagtgagatggatgctcgagtttcaacatggaaagaaagaatcgagattgccttggaagagcaggataaaaacccaccttttgatatcggttcatacggggagcaaatccttgacgcgctttcatcaagaactgacagcacaggaactgcatcttttagcgagattgtttgtggcagaccgaagtatgaggttgccagaacattctctgcccttctccagctggtaaacagcagaagtgtttatctggacaaaggacaagccacgaatgagttggtgtgttacacagctgagaatccattccatgtaaggctcatcagtcccaaccggaggccagagatggaggcacactttgctcggaagagagtcaagtccccactgcgaaacgctggcaaaggtggtgagtcctccctggcacgacatgagtgccccaagaagccattgcataaaaatggcaagattcaagtcaagacggcgatcaggttgactccagacgggaagcgaaggcgaaggtcagtcactcatctaatgcagccgatcaatctggaatcagcggatgaatgccaatggcagactgactcatgggcatctagagcctgatcgccaatggcagactgactgatgggcatctagagtctgattcttctaattgttgcaacttcagtggcggtttcattggcaggcaacgactgctgtgcaatcagctcccttgacgagacagtgaccatggttcctggttcagatggcgtactgctgacattaggcctagctagcgggtgtacatgtaacatgtacaatagttcattgtgctgttttgtacgtatttgtatcagctctcaagcctaatgctaacagggcaagatttgtctaccgacttgccgttttatacctaatgatattggtagattctttcctggtt

SEQ ID NO: 104848 - DNA, 2582 bp, Zea Mays
gaatcccgctaatccaaatccatcgagcgggagaaccccgaattccaaaaatccccaaaacccaaccctagctcgctagcctcactgttccccttcgactcttccccttcgcacctctgattcctcgcgccctcgtcccccgctcaatttccagaagcttctagaaccgggtttccagccctaatcccgcaaaaagatgctttcttgcgcctagtagcctgggacggaggcatggacagcggcggcggggagggaggctcgactggcgggaggttccctattctgcaggcgaatagggaccccgagtcaaattgggaggtggacgttgccaaaagcctcgagcagtacctgctcaagatctgttcaggggaggtctccggcgaggacgagtcccattctgtcaactttgccgaagcggcgttactactccaaggatcggttcaagtatacagtaggaaggtggagtacttgtactccttggtgcttcacgcgatagagttcctctcacacaagaaacaggatcaacaggaaaatgtaacagctcaatctaatcaaagcgaccctagcacgattcccagtgaagattatatatttatggggttagatgatgtcctaatggaaacaaggacgtctctggataacaatgttgaccgagatgatttacaaagaaaaattgtgaggccaccagcaaatctactggtgtttgaaggggacgttctggatagtgaagcgagtgagctagactcatatttgttatcaacatgtgatttttatggagatttccttctgctggatccttgtgatgcaccatctgtttttgactttctgcaaggaaaacattctggtaaagaaaatagtgtggctcgccaaggcagtccagcaccttctaaaagccaagccaatgttttcacttccccaaatgcaagatcagcgggcacaggctgtaaagccgcctctggaaaagtcctaggaggtctagattcaactcagaagaatcctgaccaaccttcaactcaagaaaccagtccagatgacaaacattggtctgatcctgttgaacctaactttactgatgatgttgaaaagcctcacccagacgatataggggatcctgttggagattattctgatgacgaggatccgtggaaacctttaaatccacatgaacctggcagcttaaagattcggccttacaggagagtgaaaggttctctacggggggttattggcactttgagaaagaaaactctcacatctatatttcctgtggcaaagatggttggtgtcatcatacctgaacatgctaaatcttttgaagcacagcagtctcagcaggaggaacattatggttcccaatcaccccctcgttttgaaaagtatttggcatcatttgaatttggagaagaaaattccaatgtgtttggagatctgaaagatgacaatggatccgatattggcattaattttgattataatgatccagacatgccaaacgacatagatgttgatcctgacgttccaacatatcctgacgagattattgctgcaactcccaaaggtactcatggtacacaggatgacagagatacacgtgaaagcctcgatgacttgtgtcggtcacatctgaatgctctccttgccagcattgctgaggttgaaaagcagagtgagatggatgctcgagtttcaacatggaaagaaagaatcgagattgccttggaagagcaggataaaaacccaccttttgatatcggttcatacggggagcaaatccttgacgcgctttcatcaagaactgacagcacaggaactgcatcttttagcgagattgtttgtggcagaccgaagtatgaggttgccagaacattctctgcccttctccagctggtaaacagcagaagtgtttatctggacaaaggacaagccacgaatgagttggtgtgttacacagctgagaatccattccatgtaaggctcatcagtcccaaccggaggccagagatggaggcacactttgctcggaagagagtcaagtccccactgcgaaacgctggcaaaggtggtgagtcctccctggcacgacatgagtgccccaagaagccattgcataaaaatggcaagattcaagtcaagacggcgatcaggttgactccagacgggaagcgaaggcgaaggtcagtcactcatctaatgcagccgatcaatctggaatcagcggatgaatgccaatggcagactgactcatgggcatctagagcctgatcgccaatggcagactgactgatgggcatctagagtctgattcttctaattgttgcaacttcagtggcggtttcattggcaggcaacgactgctgtgcaatcagctcccttgacgagacagtgaccatggttcctggttcagatggcgtactgctgacattaggcctagctagcgggtgtacatgtaacatgtacaatagttcattgtgctgttttgtacgtatttgtatcagctctcaagcctaatgctaacagggcaagatttgtctaccgacttgccgttttatacctaatgatattggtagattctttcctggttc

SEQ ID NO: 104849 - DNA, 1100 bp, Zea Mays
agtttagggtttggagacggccgtcatccctcgcgcagcgcggctaatcgttcgacacggagacgaccgccgccggcagccgagctgatcagtctgtatctattccccacgggagcaaaagcaaggttggcgaatgtcaaggagcttgacaggtagtctgtagctccctcggttgccgattcggtcggaggcgcagggaaccccgatgataaccataacttcctgatgattagcattgtttgcacaaagaacggagatcttaatgcgcatcccgtcgaagcctgcttggtcgcctcagctcgttgccatctctactactccctccgtttcaaaatatataagtagttttctctcgagggaaactacaaccacacacacacacacacatgatgtatacatttatgttagtgtatgtatatcctctgctcctcgtccaccacttggctggccgagcaggctccgggaaatgcgtctgtagatgcaaaagttatgaaggctgtcccagattggaagaatgccctgcctaaggtaatttttaacttgtttatcgagctttgcattgcagcctgggctgcttctgatttgctcagcatcacgttaatgatgtcgctttaatttgactgatatatgagttacaatgatggatatttgagttacatgactgatatttgagttacaaacatgcagtattttaccctatgggcaaaattggcagatgatgagaatcaaagacaattgcgtctgctgtgctccttattcatcggggcacaatgtcatgatgaccatgtctaggggaatctctgatgctaatgtgaattttcttatatactccatctcttccaaatcgttagatgttttggcttttatagatatattgcttttgctatgtatctaaataatactccctccgttcataaatagttcataaatatatgacacctcataaacataaacatatgacacggtgaccacccctcttatttaaaaaatattttaaataatgagttatcatttacttactcttcttattcaaaaaaataatgagttatcattaacttttttgtgatttgttttatcacttaaaggtagtttgtatttgg

SEQ ID NO: 104850 - DNA, 835 bp, Zea Mays
agtttagggtttggagacggccgtcatccctcgcgcagcgcggctaatcgttcgacacggagacgaccgccgccggcagccgagctgatcagtctgtatctattccccacgggagcaaaagcaaggttggcgaatgtcaaggagcttgacaggtagtctgtagctccctcggttgccgattcggtcggaggcgcagggaaccccgatgataaccataacttcctgatgattagcattgtttgcacaaagaacggagatcttaatgcgcatcccgtcgaagcctgcttggtcgcctcagctcgttgccatctctactactccctccgtttcaaaatatataagtagttttctctcgagggaaactacaaccacacacacacacacacatgatgtatacatttatgttagtgtatgtatatcctctgctcctcgtccaccacttggctggccgagcaggctccgggaaatgcgtctgtagatgcaaaagttatgaaggctgtcccagattggaagaatgccctgcctaagatatgatttagggagagatggtgtctgccaatgggagcatacattagctctgatcctgtgaagcgtgtcagtcaagaccatatagacagcagtagtaagaaccacccgaaaacaggcgagtcaccaagccatattgtatcagcgacgatgaaaatcatgttctcattctggatgttaaatttgagaccaaaagatggtgtattcgttcaagtgattttgtatcctattcatagttcccttaactgaaaaaatatgttccttttgtatgccctatccttatattagcatgaaaccattggcctgcaag

SEQ ID NO: 104851 - DNA, 840 bp, Zea Mays
cttcagcgcgctggtcccgctcgtggacgacgcctgctcgccgtcctcaagtccgtgctgctcgccgtgctcaagcccttcgcgcactgcgacgccaagtccgcgtcgccgcaaaagcacgcgcagcagcaccactcgcccgcccaggtgctgaggaacttcagcagcatccgcagcctccggatggagctcccggtctccgacgtgggcaccgacgacggcgtcgtgctcaggtggaaggccgtgttcggcagcacgctgcagagctgcgtcatcctcggcggcaccagggtggaccgcgccgcggccgcgggaccgccgcacgccccctcctccgctccccccgcgggcgacgacgacggcggcagcatcccggagtccctgtacaccaacggcggcctcaagctgcgcgtcgtctggaccatcagctccctcatcgccgcggccaccaggcactacctccttcgcgagatcgtcaaggagcaccccaccctggagcgggtggcgctgacggacgccggcgggcagggcacgctcagcatggggcgcgaccagctcagggagttcagggacagtccgctcgccgccgcgcccgccgccgccgccaaccgaacccaggtgcccgcctgcaacatgaagctgcgctacgcgccgctgctggagctctcggacggcaccaggatccacggcgccacgctcgtggtcatcaagcccatcggcgacgccggcgggaaggacctcgacgagctcggcgccggcgccttcgacgggcccatgaaggaggccgtggccgcgctcggcaagcgccgcgcctacctgctcgagatgaacggcttctag

SEQ ID NO: 104852 - DNA, 422 bp, Zea Mays
acaaattcaaataactccaccggcaagtcccctccgccgtccttcagtaccggaagaaggcgaggcgcccaaccgagagcaccaggggaaaggaagtgcgcctaggcatcgacatggaggacttctacgtcacgatcctctacggcctgctgctcgtagccggcggcgtagccggctacatgaagcgcggcagcgccgcgtctctggtcgccgggggcggattcggcgctgcgctccttctcgctggtgcgctcagcgcctgggccttcgcgcacggcagaggtggcgctgccgccatctttgccaccgtccttcagatcgtttgtgctgtgctattgactgttgtcatgggaataagatacgtcaaaacacaaaagataatgcctgctggaattgtcgcttctatcaggttatgtcagtaa

SEQ ID NO: 104853 - DNA, 2109 bp, Zea Mays
cgttaaaagttcttcgatatatgttttcacagttccatttgaaaagccactaaaagcaggttcagtggtgctttcagatttgcactgtgagaaagccagcttttagaaaaagctgcttcctggatctaaccctttggttggcttttggcttttagggggcaaaagccaaaagccaaaagtcaaaccaaacacacccacagtttgtttgtttgctagggggaatctgcgatgctagattccgttggtgaacacggtctggattgtcccagatgtttgtcacgctgcttccaaccgaacgaggcaggtgaaatcccggcccgatgctgcacgttacgtgaagatgccgctttgtccgcttcaccttctcgacacctcgccgatctctgccgcaccctaccaccatcactggtgccaactacataacgagtagctagtcaacgagctctaggctagctctagctagctagcacgcaacaatggcggcctccgtggccgttgcgctcctagtcgccttcctcacgccggccctttttctttacctgttcacaaggcccaacaagaagccgttgccgggcaagttgccgctgcccccgggctcactgggtctgccgatcatcgggcagagcctgggcctgctgcgcgcgatgcggagcaacaccggcgagcggtggctgcgggaccggatcgaccggtacggccccgtgtccaagctgtcgctgttcggcgcccccacggtgttcgtggcgggccccgccgcgaacaggctcgtgttcgcgagcgacgcgctggcgccgaagcagccccgctgcctgccgctcatcctgggccgccgcaacatcctcgagctcgtcggcgacgactaccggcgcgtgcgcggcgccatgatgcagttcctcaagcccgacatgctgcggcggtacgtgggcgcgatcgacgccgaggtcgcgcgccacctggacggccggtgggcggggcgccgggccgtcgccgtgctgccgctcatgaagctgctcacgttcgacatcatcgccacgctgctcttcggcctcgatcgcggcgccgtcagggagcgcctcgccgccgcgttcgcggacatgctggagggcatgtggtccgtgccgctggacctgcccttcacggcgttccgcaggagcgtgagggccagcgcgagggcgcggcgggtgctcgaggcgacgctcggggagaagaaggccaggctggagcgcggcgaggcgtcgcccgcagacgacctcctgagctgtctcgtcagccttcgcgccgaggacggcgccgggggccagcggctgctgacagacgaggagatcgtggacaacgccatggtcgtcctcgtcgccggccacgacacgtcgtccgtgctcatgaccttcatggtccgccacctcgccggcgatcccgcgaccctcgccgccatggttcaagagcacgacgagattgccaagaacaaggccgacggcgaggcgctgacctgggaggacctgcaccgcatgaggttcacatggcgcgtggccctggagacgctgcggatgatccctcccatcttcggcagcttccggcgagcgctggaggacatcgagttcgacggctactgcatccccaaggggtggcaggtgttctgggcgtccagcgtgacgcacatggaccccagcatcttcacggacccggacaagttcgagccgtcccggttcgagagccaggcgccgccctactcgttcgtggcgttcggcggcgggcagaggctgtgcgcggggatcgagttcgccagggtggagacgctggtgaccatgcaccacctggtgagacgcttcaggtggaggctctgctgcggggacaaggacaacacattcgtcagggaccccatgccgtcgccgctgaacggactgcccgtccagctcgagcgcagagaaatggctccaaacaagagcgcctgctcagtaccttgattccacctaagatgttcgcctcacctgcgtgtaatctgtcttttctttttctccctaaaattttaaccatacagcaggtcccaaaatagttaaaaatgtcgacgcagtctttgtagttaaaacacacataaaaatggttttttactgg

SEQ ID NO: 104854 - DNA, 3619 bp, Zea Mays
gctggaaccaagaaccccgaatgcggcttcgtggcgctcgcctgtggacgtggattgtctccgtccgcttctcgcttggttctggcttcctagttcgcaccacggcaccgcaaagcagatggtagtcggtaagcaccaggtcttcattttcgttggattttaggagcgctgagcgcgcagagcttactgaatttggttttgtgtttctatcgcagactagggattaaccccagctctgctcgccattccggtccgtcgagtatttcgtcgaacagttggtaggggacctctagaacggatgggcagaggacaggatgagtcggtttcgtgattctcgaaatctagtcatgccttcagctttctcgcggtcaatcaatccatcgctcatccggttgtaattgccgaatgggtagtcaagaaaccagatgagctcttcgggttcctgtatgcgacctctgtcccccgtttcatgctctgcggactacgtataactgaagaatctgttcggacaccaaattaaggtcgttggcaagacgggtactcttttcttggtcctcgggaagatgggctctgctcactttgctgccctgcttctgtgcgcctgcttgttcgtcagtggaaccgtggcagctgaccagaacggtaacctcacaaggccagctgaggtgcgcatcggtgcactgttcacgtttggttcggttatcggaatggcggtgagacctgctatcgagctcgccgttgcggatgtcaatgctgaccctagcttactctgggggacgaaactgagtgttcttatgcaggacaccaattgcagtggctttgttggcaccatagaagcattgcagcttctggctaaagatgtagtcgccgtattaggtccacaatcctcggctgttgctcatgtcatttcccatgctgtcaacgaactccatgtcccacttatctctttcgcggccactgatcctaccctttcttcccttgaatacccgtattttgtgagggctactcagagcgattactaccaaatgggtgctatcgctgccatcattagtcaatatgaatggaaacaagtcattgccatatatgttgatgatgactacggtagaggtggcatcactgcactaggtgatgcccttgcaaaaaggaagtgcaagatatcctacaaagctaagttgccacctggtgctgcaaaaactactatcgaggatatcttgatgcaggtaaatgacatggagtctcgcgtctatgttatccacgttaaccctgactctggtcttaacgtgttctcagctgcaaaatctttgggcatgatgagcagtggctatgtatggattgcaacagactggctttctgcagtgatagattcttctgtgcatggtattcctgatgtgatggaacttacacagggtgttcttgtgcttcggcagcatatagctgattctgatatccagcatgcctttttgtccaagtggaataatctaactaggaatggaagctcttactttatgcatgcttatgactctgtatggctagttgctcatgctgttgagcgctttctgagagaagggaatgccatgtctttttctgctgacccaaaattgcaagctaaaaagggaagtagccttcagttagattctctgaggattttcaacagtggagataaactactggagaaagtgtggagtgcaaacttctcaggggtttctggtccagttcaatttactttggaccgagatttggtacacccagcctacgatattctgaatattggtggtacgggattaagaaccattgggtattggtcaaattcttctggtctctcagctgttgctccagaaaacttaagctcatcagcacgggactcttcagccaacaatgtacaactccgtggtgttatatggcctggtcagacttctgagaaacctcgtggttgggtgttttcgcatcacgggatgcctatgaggatcggggtaccactccgaacgagctacaaagaatttgttatgcaagacgatggtcctgacggagtaaaggggttcgcagttgatgtcttcaaagctgcaataagtttgttgccctacccagtctcatgcaagtttgttttgttcggcgatggtttgaagaatcctagctacagtgaacttgttcagaaggtatctgaaaattacttcgacgccgcggtaggggacatagctatagtgacgaatagaacaagacttgttgattttacccaaccatatatagaatcgggtctcatcattgtagctccggcaagggtgattgaatcaaacgcttgggctttcttgaaaccattcacattccagatgtggtgtgttctagttgttatattcctctttgtgggtgcggttgtttggatactcgaacaccgcagtaataccgagttccgtggacctccaagccaacaaatcatgacagtgtgctggtttagtttctccaccatgttctttgcacacagagagaacacagttagcgcgcttggcagatttgtgctgcttatctggctcttcgctgtgctcattattaactcgagctacacggcaaacctgacatcgcttctcacggttcaggagctgacttcagggatacagggcctcgatagcttgatatctagttcgagtgcgattggctaccaagttggatctttctccagaaactacctcgtggacgagctcagtatcgcagagtcccgtctggttgcactaaacagcccatcggattatgcgagagcgctagagctaggttcaggaaacggtggcgtcgccgcaataatcgacgagctcccgtatgtcgagatcttcctgtcgaaatactgcaagttcaagacggttggtcaggttttcacaaaaagcggatggggatttgccttcccaagagactcccctctcgccgaggacttgtcgacggcaatcctggcgctatcggagaacggcaagctccagaagatgcacgacgagtggttgagcgggacggagtgcagtgcagacaacggggctgggccgtcgaactccttgagcctgtcgagcttctggggcctcttcctcatatgcggcctcgcatgcttcctcgccctcgtgattttcttcctccggatattctgccagtacagcagatacagtaaccaggtcgaggcgcagttcgctgagccccgggttctgaacaggccggcgaggctaactaccatcaagtcgctgatctctttcgttgataagaaggaggaggaggtgaagaacgctctcaagaagagacccaatggtaccggtcagcagcatccaagcactcccaacgcggaagaacagcccacattaccaccgtgaggtctacgtaacgtcccgctgcgtaactaatgactgccaaaataatgtggaatcctgctttgaagcgaaagttgtactaacgcacaggcctagttgatgctgctgaaggggtttttcctgtatgtggctttctggctgtggaaacatagcatcggaatcagcttcagactattgtcttcagagaaaatgcaactgcgttaggttaggttgtatttttccaacagcagcgaatctgggcctcctaggccctagcagcaatatctgggagaagtagaattggactt

SEQ ID NO: 104855 - DNA, 1774 bp, Zea Mays
aaaaagcgtcgcggagccacgaccacgacccctattttggcacgcccgtcccccgcttatacgccgcgccggcgaggtcgctgctccgaatcaccttcccttcctattccctctctctctctctctctctctctctctctctctctctctctctctctctcccgcccgctccgcggcctcctcctctacccgccccacaaaccaaggccctccgctgtctgcacggcgacggcggtgcatgggcggcgggcgcgccgggacgacgacgacgacgaccgcgccgccatgaccaccaccaccacggccgcggccgcggtcgcgcagctctgcgccgggccacggcggcgcaagcaggcagcaggggctcggctcgacctgcgctgggcgcgcctgctccgcctcgccgtcgtcaccagggtgctccgcctcgcgcgcgaccagctgctcgcctgctcctcctgcgggggcggcaccgccgcccgccgccggtaccgccgcctcggcccgcccaccagcgccagcgccggtcccgtgctgtcacccgtcgacagggacgacgactgcgccgcggacgccgaggccgcggcccctcgcgacgcggccgacgacgaagacaacgttgtcagcctcaaggtcagcctgctcggcgactgccagattggcaagaccagcttcatggttaagtatgtgggagatgacggggaggagcagaacggcttgcagatgacgggcctgaatctcatggacaagacgatgcccgtcaggggagcaaggattgcctacagcatctgggatgtggcaggagaccaccagtccgtcgaccacgtcccaatcgcgtgcaaggacgccgtggcgatcctgtacatgttcgatctcacgagccgctgcacgcttaataacattgtagattggtacgggagggcgaggaaatggaataagacggctattccaatcctaatcgggacaaagtttgatgactttgctcagcttcctcttgagatgcaatgggccatcgttaaccaggccagagcatacgcaagagcgatgaaggcgaccctcttcttctcgagcgcgacgcacaacatcaacgtgaacaagatcttcaagttcatcacggccaagctcttcaacctcccgtggacggtggagcgcaacctcaccatcggcgagcccatcatagacttctgacgaccccttcctctaactagtaactcggcagcacacgcacgacgacccttggtatatatcatgggttgacagggtcgtgtctttcgatcctcttgccctgtgcgagccgccggagccatgaagtgaccgagcatgcccgtcgtcctcttcctcctggtggccggctgcagcaggcaagatgccctttgtaaatatagccataggtgacggtcccgcgtgcgtgcggccgtgcgggagcgtcgtcaaatgggaagaaaaccgcgaggtgtgactgtgatgtaacaccccgtctgtaacattcgccagagtatataggaaatccatgttaatataccctccattccaactgacaaaggcatgcgctggcgcgtggcggcttgctgccggtgcagaacctcttctttctcctcacccgggcctatttggttcagcttttttctgaccagtttttctgagaatctagctgtggaaagaatctggctgtgagagaatctgagtattgtgtggattacgtgcggaggaagatgaagtggtccaaagggttcaggatctagaaagcaataaattcctactatcatgacgattc

SEQ ID NO: 104856 - DNA, 1771 bp, Zea Mays
gagaagaacacggcattgattcccggagaaaaccctagactgcggcgggcgccttcccataaaagcacagctcttgtgtccccgccgccgccacctgctgcagcttctcaaccggataggtagcaccggagcaggtagaacgctgcacaatccccttcgccgccgccaagatggtaaccgccttcttccccgtctctctctgttgagtagatgagggttttcagattggtgcgtgggagtagatgactgttttcacttccatttctggatgtgatggctctctcgggtttaacttggtcggtggctgttatttatgtagatacttgtgattcttcgtccgttattttttcttgtgtgtggtagttggatttgtagcgttgcccctatatgttgttagatctgtggagcatgctgcatcacaaggaaatatgcgattcctagtgggacccatcctcggtgcttgtatttctttgtttttagattcagtctagaggatttatgttaaacttgaggtgtgcagcgcataactttgtttgttgaactgatgtgatgctgcaatggctgcttatactttctataagttctcttggatgcactgtcacaattgtacctgaactttggtgtgattcctggttatcttttgttcaaatgcgtaatgcttttgttgggtcttatgatggcatgaatctttgagacctgattattctcatgatgacaaactatacacaatcttctgaggacctatacgttctgatttgagtttcaatttcatttcccaacttatattgaacttgtctacgcatctgtttacgatttgatcttcagctactaagagcaaacaccaagagactacattcttcctaattaatatgaatagaaaaaataccctccaacagcttatctaaatggttatccaaatataaccatcttttattcctggtttctcgctagtcgaagatagaaaacgtgaactgctctctagagtgcaaacaagatatacaaagtgtttttattcaattgaccctcatagaaagtgttttttattcaattgactgctctctagagatggatatgaaatgttgttttaacatgtgcagtttgtttcacatgttatacaggtgaacgttcctaagaccaagaagacgtactgcaagaacaaagagtgcaagaagcacacactccacaaggtgactcagtataagaagggcaaggatagcctgtctgcccagggaaagcgccgttatgaccgcaagcagtcaggatatggtggtcagaccaagcctgtcttccacaagaaggtaatgcagcatatctatttgattgtacttatacctttgtctgttttgatgctagcatgaatgtctgaaaatatctgcgaattctaaatgcctgttcagtgattaatgtgggatatgacaaatgagattgtatttatacctttcaggccaagaccaccaagaagattgttctgaagctgcagtgccagagctgcaagcactactcacagcacgccatcaaggtactgtcttgattctcccgtgctaaacttgctgctgaacaaagcatttctccattggttatagctcactctttgctgactccctgtgtcacagagatgcaagcattttgagattggtggagacaagaagggcaagggcacatctcttttctaagcttctcgtccacctgtctggttgttgagttgaagctgtgggtctactactactgttataaaaacatgtcgccaaatttcaatgttaatgtagcaatg

SEQ ID NO: 104857 - DNA, 1752 bp, Zea Mays
gagaagaacacggcattgattcccggagaaaaccctagactgcggcgggcgccttcccataaaagcacagctcttgtgtccccgccgccgccacctgctgcagcttctcaaccggataggtagcaccggagcaggtagaacgctgcacaatccccttcgccgccgccaagatggtaaccgccttcttccccgtctctctctgttgagtagatgagggttttcagattggtgcgtgggagtagatgactgttttcacttccatttctggatgtgatggctctctcgggtttaacttggtcggtggctgttatttatgtagatacttgtgattcttcgtccgttattttttcttgtgtgtggtagttggatttgtagcgttgcccctatatgttgttagatctgtggagcatgctgcatcacaaggaaatatgcgattcctagtgggacccatcctcggtgcttgtatttctttgtttttagattcagtctagaggatttatgttaaacttgaggtgtgcagcgcataactttgtttgttgaactgatgtgatgctgcaatggctgcttatactttctataagttctcttggatgcactgtcacaattgtacctgaactttggtgtgattcctggttatcttttgttcaaatgcgtaatgcttttgttgggtcttatgatggcatgaatctttgagacctgattattctcatgatgacaaactatacacaatcttctgaggacctatacgttctgatttgagtttcaatttcatttcccaacttatattgaacttgtctacgcatctgtttacgatttgatcttcagctactaagagcaaacaccaagagactacattcttcctaattaatatgaatagaaaaaataccctccaacagcttatctaaatggttatccaaatataaccatcttttattcctggtttctcgctagtcgaagatagaaaacgtgaactgctctctagagtgcaaacaagatatacaaagtgtttttattcaattgaccctcatagaaagtgttttttattcaattgactgctctctagagatggatatgaaatgttgttttaacatgtgcagtttgtttcacatgttatacaggtgaacgttcctaagaccaagaagacgtactgcaagaacaaagagtgcaagaagcacacactccacaaggtgactcagtataagaagggcaaggatagcctgtctgcccagggaaagcgccgttatgaccgcaagcagtcaggatatggtggtcagaccaagcctgtcttccacaagaaggccaagaccaccaagaagattgttctgaagctgcagtgccagagctgcaagcactactcacagcacgccatcaagagatgcaagcattttgagattggtggagacaagaagggcaagggcacatctcttttctaagcttctcgtccacctgtctggttgttgagttgaagctgtgggtctactactactgttataaaaacatgtcgccaaatttcaatgttaatgtagcaatgaaagcagaccatgctatgtatccaaattccaatgcctgacatttgttctggggtgttggtcgacttttggctaaatgaaagttttgtagcttgaatctgttttgtgtttgattttgttctgccattgcctatgcctgttcttgtgccaaaaaagttcgatcatttttacaccgaggatggattatgtaatgtatcttgctgaatggaatcccgtagaatgg

SEQ ID NO: 104858 - DNA, 827 bp, Zea Mays
gagaagaacacggcattgattcccggagaaaaccctagactgcggcgggcgccttcccataaaagcacagctcttgtgtccccgccgccgccacctgctgcagcttctcaaccggataggtagcaccggagcaggtagaacgctgcacaatccccttcgccgccgccaagatggtgaacgttcctaagaccaagaagacgtactgcaagaacaaagagtgcaagaagcacacactccacaaggtgactcagtataagaagggcaaggatagcctgtctgcccagggaaagcgccgttatgaccgcaagcagtcaggatatggtggtcagaccaagcctgtcttccacaagaaggccaagaccaccaagaagattgttctgaagctgcagtgccagagctgcaagcactactcacagcacgccatcaagagatgcaagcattttgagattggtggagacaagaagggcaagggcacatctcttttctaagcttctcgtccacctgtctggttgttgagttgaagctgtgggtctactactactgttataaaaacatgtcgccaaatttcaatgttaatgtagcaatgaaagcagaccatgctatgtatccaaattccaatgcctgacatttgttctggggtgttggtcgacttttggctaaatgaaagttttgtagcttgaatctgttttgtgtttgattttgttctgccattgcctatgcctgttcttgtgccaaaaaagttcgatcatttttacaccgaggatggattatgtaatgtatcttgctgaatggaatcccgtagaatggacatatgtagttctgtgtaa

SEQ ID NO: 104859 - DNA, 926 bp, Zea Mays
gagaagaacacggcattgattcccggagaaaaccctagactgcggcgggcgccttcccataaaagcacagctcttgtgtccccgccgccgccacctgctgcagcttctcaaccggataggtagcaccggagcaggtagaacgctgcacaatccccttcgccgccgccaagatggtaaccgccttcttccccgtctctctctgttgagtagatgagggttttcagattggtgaacgttcctaagaccaagaagacgtactgcaagaacaaagagtgcaagaagcacacactccacaaggtgactcagtataagaagggcaaggatagcctgtctgcccagggaaagcgccgttatgaccgcaagcagtcaggatatggtggtcagaccaagcctgtcttccacaagaaggccaagaccaccaagaagattgttctgaagctgcagtgccagagctgcaagcactactcacagcacgccatcaagagatgcaagcattttgagattggtggagacaagaagggcaagggcacatctcttttctaagcttctcgtccacctgtctggttgttgagttgaagctgtgggtctactactactgttataaaaacatgtcgccaaatttcaatgttaatgtagcaatgaaagcagaccatgctatgtatccaaattccaatgcctgacatttgttctggggtgttggtcgacttttggctaaatgaaagttttgtagcttgaatctgttttgtgtttgattttgttctgccattgcctatgcctgttcttgtgccaaaaaagttcgatcatttttacaccgaggatggattatgtaatgtatcttgctgaatggaatcccgtagaatggacatatgtagttctgtgtaatgatgtcctaatcaatttgcgtaatccatctatcttgctatgtc

SEQ ID NO: 104860 - DNA, 800 bp, Zea Mays
tttgagttacttgagagaacgccctataaaattttaaccaaattttataaaatgatgcactgttggagtagtttttagtatcatattttagtttaaggcattgttggagatactccaaaagatacttttccttgatgtctaaaatgcggagcctgaaatgtatgtgtaaataaaccagtcgtttgaagggaaaaagaaggaaacgtatacaacagattttcaaaggaaaaggacgatgcctacaagagtaggaagctccctccttacctccggaaactggacggccctcgcgtgccgcggcctgccggccatactcgtcaacagcgattgcccggggacgagaggcgcgatcaaaacgcggtgcctcgtgttctctagccaagctgtcgccgtttcaccgccggcggcaaggcaagctctggcctggctatctcgccgaacggccgggccgacgacagatcgatcgaacggacgacgcgcgcacccccgcgtgtccccgtcagcggtcagccccaccacctgacgcgcgccgtcccctgtcgtctgtcgacctcctctctcctctagcgaccgtcgatcagctctctcgtcccggcgcgggaggggtccccggtggtggcgcgatacgcgttttcacggctgggagcgcccgcggcccggcgtggcagggcgtcgcgacgcgcgcgggcccgcggcacgggagcgctgcccaccgttggtgcggtccgcgggacaccagacgcctgctgggccagttggttgttgcgttccggcgagatttttttgccccggtggtctag

SEQ ID NO: 104861 - DNA, 2184 bp, Zea Mays
aggtctagagaggtccaggccttcgcccgagccccgccagccactaccaacttgggacgggcaggccggcccgtgttacatacaggcccaggcccagaagccgtcagaagacatccagccctaggctaggcgcacggcggcacgggaggcagacgaggcgagaagtggcaactggcaactggtacctttggggaggcgaggaaggacacgaggtcggtgcgttcgtgcgtgcccttctcactgcacgccagtgagaattgagatcccagcaccgagacgacgacacaagtctcacctccatcctcctttactcctcatcctagatccctctctccgaaccccgccgcccgccgcagatccgaaggtcattggcagccatgatctcgtccagcaagctcaagtccgtcgacttctacaggaaaatacctagggatttgaccgaggcatcactatctggcgctggattatccattgtagcagcattagcaatggtttttttgtttggaatggagttgagcagttacttagcagtcaatactaccacatctgtgatcgttgataggagttcagatggggagtttttacggatagatttcaatatgagctttcctgcgctttcatgtgaatttgcatcagttgatgttagtgacgtgctgggaacaaacagattgaacataacgaaaactgttcgaaagtattcaattgatcggaatttagtaccaactggatcagaattccaccctggccctatccccattctcaataagcatggagatgatgttgaagaggatcacgtggatggtgcattttcattgtcatctcgcaattttgatagcttttcacaccaatatcctgttttggttgtcaacttctatgctccctggtgttactggagcaatcgactgaaaccttcatgggagaagacagcaaaaataatgagggagagatatgaccctgaaatggatggtagaatccttctaggcaaggttgactgcactgaggaagttgaattgtgtaggagaaaccacatacaaggatacccatccattcgtgttttccgtaaagggtctgatataaaggagaatcagggtcaccatgatcatgaatcatactatggtgaacgtgatactgagagtttagtcgcggcaatggaaacatatgttgcaaacatcccaaaagaggctcatgctttggaagacaaatccaataagactgttgatcctgcaaagcgccctgctccaatggccagtgggtgcagaatagaaggctttgtgcgtgtcaaaagggttccagggagtgttgttatctcagctcgatctggatctcactcgtttgatccatcccagataaatgtttcgcactatgtgacacagttctcatttggcaaaagactttccccaaggatgctgcatgaattcataagacttactccctatcttcgtggataccatgatagactagctggccagtcttatactgttaagcatggtgaggttaacgccaatgttactattgagcactacctacaagttgtaaagactgagcttgtaacacagaggtcctcaaaggaactgaaagtgcttgaggaatacgaatacacagcacacagcagcttggtgcacagcttctatgttcctgttgtgaaattccattttgagccttctcccatgcaggtcttggtaactgaagtcccgaaatccttctcccatttcatcacaaatgtctgcgctatcatcggtggggtcttcacggttgctggaatactggattccatctttcacaacacactcaggatggtgaagaagattgagctaggaaagaacatttaaatttcgacgccgctgcaagtttaggcggatgcactaggtagccattgttttgttataactaggtaatgactcatgaaaatcggtatatgaaagatggcgtgctgaattgacggttgaaattcggggggtcatgaaatcatcatataataactagggatctcactgtttcgctaaaccactcacaataagacagtggattgctgctagtgtgccactgtgataagtaaccgagttggataatatattcagtatattatcttgccgtgcttgaattgcgcgtagttcgggttacacagcgtcacctcgatggccacctcagctccggtgggaggacgacggaggtggatagcctccg

SEQ ID NO: 104862 - DNA, 1858 bp, Zea Mays
tagagaggtccaggccttcgcccgagccccgccagccactaccaacttgggacgggcaggccggcccgtgttacatacaggcccaggcccagaagccgtcagaagacatccagccctaggctaggcgcacggcggcacgggaggcagacgaggcgagaagtggcaactggcaactggtacctttggggaggcgaggaaggacacgaggtcggtgcgttcgtgcgtgcccttctcactgcacgccagtgagaattgagatcccagcaccgagacgacgacacaagtctcacctccatcctcctttactcctcatcctagatccctctctccgaaccccgccgcccgccgcagatccgaaggtcattggcagccatgatctcgtccagcaagctcaagtccgtcgacttctacaggaaaatacctagggatttgaccgaggcatcactatctggcgctggattatccattgtagcagcattagcaatggtttttttgtttggaatggagttgagcagttacttagcagtcaatactaccacatctgtgatcgttgataggagttcagatggggagtttttacggatagatttcaatatgagacagaagagctgccgattatattaataaaggagaagggttcggattggacaaaataacaaaacaacaaacaataggcagttggattgggacatcaacacgccgacaccatacaaactcaacccgccggttcgattgggacatcaacacgacacaacactcaccgcctacacaatgcacaaaacagcccagacaacggaagcccccccccacacacacaacccatccagacttgacttatcgttgccgagctcgacctaagggacaagcagctccgactccgcaagacgggccacacatggccaaagaaaacacgacaacacctataaccaaacaccggcacagaaggaggaagatcgcggtgcgccgtcgttgcaagcctcaacacaccccacgcgaggcagctccgattcttcaccaacgagcttgaacctccgtcgtgcccccggcagatgcccgaacctacgaaccaattcagtccacgaagaaggggtctcgacaggtgtcatcgttgtcgagccacaacctctgatgcagcattttcgagttcacgctgcaaaggcccaccttcacctgcatgccagacgccgagaagcgaaagcaactaccgaaggcgaatccgaggccgagacaaacttcaggaagggagtgacgttggggacgacaccgtcgcgagtccgagatggatcgggctttctcccaaggaagacaatgctggggaatgtgacgcccccaacaggggaagcggcgcccacgggtgtcgccgttgccgaggcttttgcccaagaagcccccccagcaccaacgtccggccaagaaccactgtcgccgccgtccatacatcccgcaagaaaccctccagaggggcgtcgacgcgatggatgccgcaccagccgcaaagccgtgtcggccgccacccccactggcctggcacacagaaccggacaactccttgccacgtgtgtcacactggcgcgtgcaggagctgaagccggtagccgctgatggccctggcacacgccgccaccgaagccagttgccgccggacgaccatgcttccacactgcaccacaagctccgcggcagcaccacgccgccacagcaccaccggccgccgccgcagcctcccactagaaagacatggatctgcgtgccgggagacaacatctgcctaggggcagacggatctgggcgcagcgggccacgccgccggacgtcgcccccatgcagtcccatgcttccacactgcaccacaagctcc

SEQ ID NO: 104863 - DNA, 584 bp, Zea Mays
ggcgaccctggtagcagtccgtgccccatgctcttctcacatactccgctccatccccaagatctcctccccacgccatgcgcttcttccagtgagccctcgcgccaaggatagggagcaacatgagaagtttggcggtccacgtcgacgagagcaacagtggtgagcctcaccgtgttgtgtcccgtcttcaatccgtgggcttgaagatttcctgttcgcctgctgttctctacagcacactcattcctcaacatgcctctaattgatgcaggtacaaaaactgttttggaaatcttgcaagttgtatttaccaccagcttttcaacatcatcaacagctggtttggaaaccttaaaagttctatctacgacagcaatttgtttggaaatcttgcaagttctatctaccaccaactttatcaacatcatcaacaactgctttgaaaaccttgcaagttctatctacgacagcaggttcgttacttttcaaaaaaagggacgaaaagaagaccaaccaacattttccatcccctttcccctcttcttccctcattttagttgcatttcctttgggaaacaacc

SEQ ID NO: 104864 - DNA, 833 bp, Zea Mays
gttggagacttggagtgaagctgtccattttcgaccaaccctactcgtctcgtaccgtccaagacggggcaaagaatgcccggggaagccggcgagctggagcctggcggcagcttggcaccgatcgtcctccattcccgtcgctcccgacctcctcctaatttatcccacccggcctccccggttcgccccgaccacatcccccccttaacctcccctcctcctcctcctgcggtcccaactcccatccttcggttcaggagggaggcaggcaggcaggaaggcaggttcgaggagggattggctccgctcctgctccattgcgcgtgatccggctcgttcttttgattgatctaggcgtttcttggattagtcctggaaggtcaaacggttgttggaagcctcgctgggtgcttcaacgaacgcgaaggtgttgctgtcatttagagcgtcttgattggatttgacctgttggcctggtggcgtgccgtcgttgattgagctcgaggatgatcaagtgggggctcagcagcggcacgcccgcggattcctactacgaggtccggtcagattgcacggacggtgtgcccaagagcaagttcaagattaaggtctgggttttctaccttcgtatgtctgtctgtcttttgtttcattctgtatccattaattttgattgtggtgtgattgtgtttgatggtatcgcaatttggccactctatacattttcctttgggccctgtagtattggtgtgatcaaggaaacataaacaaaatttacaaatgagtatcgtgtagctggaaagatggagaaactatcggttcattgctgc

SEQ ID NO: 104865 - DNA, 2189 bp, Zea Mays
gttggagacttggagtgaagctgtccattttcgaccaaccctactcgtctcgtaccgtccaagacggggcaaagaatgcccggggaagccggcgagctggagcctggcggcagcttggcaccgatcgtcctccattcccgtcgctcccgacctcctcctaatttatcccacccggcctccccggttcgccccgaccacatcccccccttaacctcccctcctcctcctcctgcggtcccaactcccatccttcggttcaggagggaggcaggcaggcaggaaggcaggttcgaggagggattggctccgctcctgctccattgcgcgtgatccggctcgttcttttgattgatctaggcgtttcttggattagtcctggaaggtcaaacggttgttggaagcctcgctgggtgcttcaacgaacgcgaaggtgttgctgtcatttagagcgtcttgattggatttgacctgttggcctggtggcgtgccgtcgttgattgagctcgaggatgatcaagtgggggctcagcagcggcacgcccgcggattcctactacgaggtccggtcagattgcacggacggtgtgcccaagagcaagttcaagattaaggctggcaaaacattaagtgctcggaaatggcaggctgcatttagtcctgatggctgtcttgatattgcctcagtcctaagcaggatacagagaggaggtgtccatccaacagtcagaggagaggtttgggaattcttacttggctgttttgatcccagaagtacctttgatgaaagggaagagatcaggcaaatacggaggatacagtatgccagatggaaggaagattgtcgacagatggattctcatgttggtagtggtaaagttatcacagcaccacttatcactgaggatggcagacctattaaggatcctctggttttacttgaggctacttctgacacgaacacttcaggagatgctccaactaccagcataaatggaaatgaagttgatgaatctgcagaacgcattaccgataagcaaattatcgagtggaagctgacattacatcaaattgggcttgacgtcctacggactgatcgcaccatggtattctatgagaacaaagaaaacctttccaaattatgggatattctagccgtgtatgcatggattgacaaagatgttggttactgccaaggaatgagtgatttgtgctcaccaatgatagttctactaaacgatgaagcagatgcattttggtgctttgagaaattgatgcgtagattgcgaggaaatttcagatgcacagatcaatctgtgggagttgccaaccaacttcaacaccttgcgtctattattcaggttcttgaccccaagctacatgaccacctagaaactcttggtggaggtgactacctttttgcgttccgtatgttcatggtgctttttaggcgtgaagtatcatttggagactccttatacctctgggagatgatgtgggctctggaatacgaccctgacattttcttcgcagcgtgtgaagaacaaggtgcagtaaataaaaacaaagtttctaaatccaaactgaaaggactgcgccattttggcaagtgggataataaggataaggacaaggataaggaagatgctaaaaatggggctgaggatggtgaagacggtcctgttccaatttcagttttcatggttgcaagtgtccttaaggaaaagagagaaaagctgttacaagaagctagaggactggacgatcttatcaggatattgaacgatgtaaatgggaacttagatgccaagaaagcttgtgctggagcattgaaacttcacaagaaatacctgaaaaaggtacaagaaaagaaaccttaaacgtgccatggaacacacctacccaatgggttattcttaccatttgaacatacacgaccattttctacacaccacttttgagtgaagatttacaggacaaaggtggtagacgactgacatgttctcagatatggtaccaggctagtgggttgagtacaggatgagtgcaaccggtagtttgtattgtattgtatctcacgttctttgtactcaagaattttgttggctgtacaggcagaaggcggtgcgggtagcatgccttgcgtacataattatttgaatacaagttgaattgaacaccatcttacgact

SEQ ID NO: 104866 - DNA, 2219 bp, Zea Mays
gttggagacttggagtgaagctgtccattttcgaccaaccctactcgtctcgtaccgtccaagacggggcaaagaatgcccggggaagccggcgagctggagcctggcggcagcttggcaccgatcgtcctccattcccgtcgctcccgacctcctcctaatttatcccacccggcctccccggttcgccccgaccacatcccccccttaacctcccctcctcctcctcctgcggtcccaactcccatccttcggttcaggagggaggcaggcaggcaggaaggcaggttcgaggagggattggctccgctcctgctccattgcgcgtgatccggctcgttcttttgattgatctaggcgtttcttggattagtcctggaaggtcaaacggttgttggaagcctcgctgggtgcttcaacgaacgcgaaggtgttgctgtcatttagagcgtcttgattggatttgacctgttggcctggtggcgtgccgtcgttgattgagctcgaggatgatcaagtgggggctcagcagcggcacgcccgcggattcctactacgaggtccggtcagattgcacggacggtgtgcccaagagcaagttcaagattaaggctggcaaaacattaagtgctcggaaatggcaggctgcatttagtcctgatggctgtcttgatattgcctcagtcctaagcaggatacagagaggaggtgtccatccaacagtcagaggagaggtttgggaattcttacttggctgttttgatcccagaagtacctttgatgaaagggaagagatcaggcaaatacggaggatacagtatgccagatggaaggaagattgtcgacagatggattctcatgttggtagtggtaaagttatcacagcaccacttatcactgaggatggcagacctattaaggatcctctggttttacttgaggctacttctgacacgaacacttcaggagatgctccaactaccagcataaatggaaatgaagttgatgaatctgcagaacgcattaccgataagcaaattatcgagtggaagctgacattacatcaaattgggcttgacgtcctacggactgatcgcaccatggtattctatgagaacaaagaaaacctttccaaattatgggatattctagccgtgtatgcatggattgacaaagatgttggttactgccaaggaatgagtgatttgtgctcaccaatgatagttctactaaacgatgaagcagatgcattttggtgctttgagaaattgatgcgtagattggtatgtcttgtgttttgtaatttttcttataaaaatacaaaaacatacattggtactgttgcgagacacctaatttgctttctttcatgtttgacaacattctgatcacttcgatgattgaaatttagcgaggaaatttcagatgcacagatcaatctgtgggagttgccaaccaacttcaacaccttgcgtctattattcaggttcttgaccccaagctacatgaccacctagatgatgtgggctctggaatacgaccctgacattttcttcgcagcgtgtgaagaacaaggtgcagtaaataaaaacaaagtttctaaatccaaactgaaaggactgcgccattttggcaagtgggataataaggataaggacaaggataaggaagatgctaaaaatggggctgaggatggtgaagacggtcctgttccaatttcagttttcatggttgcaagtgtccttaaggaaaagagagaaaagctgttacaagaagctagaggactggacgatcttatcaggatattgaacgatgtaaatgggaacttagatgccaagaaagcttgtgctggagcattgaaacttcacaagaaatacctgaaaaaggtacaagaaaagaaaccttaaacgtgccatggaacacacctacccaatgggttattcttaccatttgaacatacacgaccattttctacacaccacttttgagtgaagatttacaggacaaaggtggtagacgactgacatgttctcagatatggtaccaggctagtgggttgagtacaggatgagtgcaaccggtagtttgtattgtattgtatctcacgttctttgtactcaagaattttgttggctgtacaggcagaaggcggtgcgggtagcatgccttgcgtacataattatttgaatacaagttgaattgaacaccatcttacgact

SEQ ID NO: 104867 - DNA, 1650 bp, Zea Mays
caccaagtctgtcgctttggaaaccgttggtgacaccataaccactcctgttcgtcgtgcacccacgcgggcgaacagtgaaaggcatcgtctcgacgtctcgtgaccgctggactcgccgccgccccaggctagctcgatgattgggtgcgccaagccgctcgcggcgccgctgcaggcatgggctcgcccgccgtctcccgccggtcgccgcctccccccctcgttctgcgcccctgacacctccccagctctcacccgcgccgtcgagagcccaggccagtctcagtctgacgacgccccgccaccacgctcgggtgaggccgcctcgtccctggcgccgcgcgcgagctcgcatctcgaccgatggtcccggtcgcgggcgctgcggtcgggccaccggccggcgctgaaccgcgcggctctctcctcggcctcggtctcggcgccgccggtgatcaagtcgccgcggcccgaggacgctgccgtggcggtggaggatggcgaggacgacgacgtgtgcgaggccgagagggacgccgcggccgggaaggccatctacatagtgtcagacgggaccgggtggaccgcggagcactcggtgaacgccgcgctcggacagttcgagaactgcctcgccgaccgcggctgcgctgtcaacacccacctcttctccttgattgacgacatggatcgacttattgaggtaataaagcaagcagcaaaggaaggggcactggttctctacacccttgccgatccttcaatggccgaggcgactaagaaggcctgcgatttctggggtgttccatgcaccgatgttcttcggcctactgtcgaagccattgcctctcacatcggtgttgctccatctggaattccacgaagctctccgagtcgaaatggtcggctatcagaggattacttccaacggatcgatgctatcgatttcaccatcaaacaagacgacggggctctgccacagaacctctaccgcgcagacatcgtgcttgccggcgtttcgcgtacagggaagacgccactgtcgatatacctagctcaaaagggatacaaggtggcaaatgtcccaatcgtgatgggagtggaccttccaaagtccctttttgagatcaaccaggacaaggtttttggactgacaataaacccagcgatccttcaggcgattagaaagaccagggccaagactctaggttttgatgggcgtcagagcaattacgctgagatggaccatgtgaggcaggaactggtccatgcgaatcaaatctttgctcagaatccatcgtggccagtcattgcggtcactggaaaagctatcgaggaaacagctgctgtcatcttggggatcctccatgacaggaagcagaagtgctccatgccacgcatatcaaaacgatactagcgctgtgttctatcccttctctactacaccttgtaacgtgtgcatgttttgaataagctttgtgtcaagcaccatagccttcatgtaatttttttttgttggaccaccttctaggtggtggcgtttgtatcataaacataacttgaagtttagtgcagcagaaacacatgtatattgcgttgcgtttacgaccttctattggcgttaaagcctcacgttatttggtcatt

SEQ ID NO: 104868 - DNA, 1896 bp, Zea Mays
atgtggcacacacagcacagggaccggcatgcaactggcgcttcaacttgggcacgtatacagtccaagcaatacaagaatgcggccgtggtccctgcctccaagcgggtccacgcgcagctgctacacggagaggcgcgggactacgcgatgctgcggagccatcgtcgagtcgccggcggtctccgttgcgactgtgctgcagcagtgacaggcatggccgacatagtgccgtcctctggtgatctgggtgcctgttgcctgggtgacttttaccgctgcttggaggactcgccgcttcggatttccggtcgtcgtgatctgggtgcttactgcttgggggcatcttcgaggagaccactcgccatttcgcgttttcgatcgtcggggctacgagccaatttttcaccaatgttacgtgacattcttctatgctatgcggtatatagtgctatgtctaattctccatgcgtgcgtgttgcgagtcgccacgaagcgaagcgcccgaggcacagtgcatttgcacaggattgcccggtctttgagacagctgatggccatcgcattttccatgctgaagccgaaatagactcgtctaaccttccggggacctctaaccagccaatacctgcgctacaagaatcacctggtacagccatgtttgcccattcgttccttcagcaaaaacaatatggtgttagtgatgcttatgtcgacacagcgcttgccgcatacaataggcgacgccggcgcagtagagtacgtcacatggtagctgacgagccattgtcaatcacgcttcctttggacaggtcatacgtagatgctctaaaagctgcttatatgggagacgtgttgatcccggagctccaacgtgggaacacttctgtgaccatatgcgctcgcgtttctcgtttatgggacttctgtgatcctcaggatgaagcaaagttgctccattgtgatatggtgctgcttgacgaagagatgccattggaattgtcacttccatctcggccgtggcaccgcaccgatccagagggcaacatacaaccagctctaagaggactatttccttgtgcagtgtcagatggactgtgcttgtctggcggctcaccctgtaagtggtacattaatcctgatgttcctgaagcatgtgccctcatggctagtgcgaggaaagcgcatagtcccattaagtggaacgaggttctatcttcgaatcagcctatgccccatgttcccgaggaacaaaaaatcgcttgtattagagatctgcacccatttgagaataaggatagggaattcttggtgacagtcactgtaaaaaagattggtgataggtggtggtacaatgcatgcaaaaaatgcacccgcactgctgtggctcatggggattcctacaagtgcagcgatcaagtttgcgctaccattggcacgcccaaccaaagatctgctcgagaagacgtcaacgcagtcgtggcagagataggtactgcaaaggactccatccaatcatcttcatcggggccaaaacaatcacaaactgtgctattgcaaggtgtacccagtggcattgaagacactcctgacaaagcctcgaacttggtcatgctttcgaccccgctcacaccacaaagttctccaaccagtgtgcaagataagactattggtattggcagcagcactgcggttccaagtggtactcccgccataacaaaggaactgacatccacgcctaggaagaggacaaggtcttcgcctgcaaagacagttacaaagaggttgttcaccgacatagatggaggaaccactggctttaaggatgccgcagataacactgctgctcctaggtaccttttccctcgtacctataggttctccatgaacgcctag

SEQ ID NO: 104869 - DNA, 918 bp, Zea Mays
atcatgcatggtgccggcgcaagatagacacgaacactaaggcagcggcgaagcaacgctagcagaggagaagaatgcggaactacgggcagtcgctgtacaaccggcagagcccggtggcgcggtgcgccaacttcgtgtgcgcggtgctgctcaccctggtcctcatcgccggcgtcatcctcttcgtgctgtggctgagcctccggccgcaccggcccaggttctacctcgccgacttctccatccccaacgttaaccggcagtccagctccggcctggccaacctgccggtgcgcttcacagtcaacgagcacaaccccaaccagaagatcggcatgtactacgatgaggtcgtcgcgtcggtgttctacggcgaccagctcgtcgcgacggggtccgtcatgcaccccttctaccaggtgcccaagggagacacgcccgtgcaggggaccctcaccgccaggggccccgtcccgtcggacccgtcgtgggggcggttcgccggcgaggtgtcggcggggagcgtcggcatgcggctggagctcagctccaagctgcagttccaggcgaagatgtgggacagcaagaatcaccacatcaaggtggagtgcgacttcactatgcaaggggatgggacgctccgtaagcaggacaaggactcccagtgcacgctctacttctagcgtgatcgccctgcttcttgaattggtgcaggctgacccctttcaactaaccttgatttcaaggttgtatttactgtgtgctttttccctgcatttggctgatgtttgtgattgttgtggtgccattatttgtaacacacgcgtgtcacttcaagagaatattttcaaaatctgacatgctcgtccaatccaatgttttaaaatacaaaggatgtgaactacttgttaaatt

SEQ ID NO: 104870 - DNA, 88 bp, Zea Mays
tttttttgtatttgtgcatattttattgttgtttactgattatgtgagtagtgatatacatatgtacatacatgtggtcacatacatc

SEQ ID NO: 104871 - DNA, 2362 bp, Zea Mays
atagtggtctatgtcaaatcttctagcgctcgcaattcttctcctctccaccacgccggcgccgacggccggtgaacagaccatctgcagcgatgccacgtacgagcgaaacagcacatacaagtccagtctgaggtcggtagccggcgcactgaccggggacgccgcgaggctgcactcgtccaccggcgctgcaggggagggccccgacaaggtctacggcgccgtgctctgccgggcggacacagcgggtgctgactgcgccaggcgcctccgggacgcccttgccgccatcaccgacggggacggccgctcgcgttgcgcgctccacagggacgtggccgtctactccgagctgtaccagctccgtttctccgacagggacttcctcgccgacttcagcaacgcgccggaatgggtcgacgtcacgaacccaggccccgtgccgctcgccgtggccgcgcggttcgaccagcgggtcacggagctgctgagcgcgctcgctgacgcggcggcggggcgaccgggcaggtgggccgtcggcgaagcgccgtggtcgtcgtcggggggcagggaccgggcggtgtacgcgctggcgcagtgcacgctggacatgccgccggaccactgccgggcctgcctcgatggcgccatggcagagcggcgacggaaggtcggcggcggcaagatgggcgcggcagtcttcggggcgcggtgcaccctgcggtatgagatggatctgcagttcttcaacgtcactggcaacagcaagatgctgtccctgcctgggaagaagaaagaccgtgcgttcgtcatcgttgcaacagcttacgcttcggcaatcctctgtacacgcttgcttttctggctgctaagcgtctggaggaaacaaaaaaggaaaatggacttgacggaggagccccagaatgtggatgaaatactcaggtcatggagaattgaagatgctagtttagagttctcgctgtatgatttctctcagattgctgatgccacagtcaacttctcacccaaaaatatgataggggagggcggatttggcccagtttacaagggagtacttactgatggacaagaggtagcgataaaaagactgtctgctcggtcacgacaaggtctagtagagttcaagaatgagatccaggttatagcaaagcttcagcacagaaacctcgtcaggctccttggctgttgcatccatgaagaagagaagatgctggtctacgaatacctgacgaacaaaagcttggaccacttcatttttgatccaatcagacaggcatcgcttgattggaagagacggattaaaatagttgatggtatagcccagggactcctgtacctccacaatctctcgagaatacgcatcatccacagggacttgaaagcaggtaacatcctgttagattctgacctaaacccgaaaatctctgatttcgggatggcgaggatatttccatcggatgccactcaagcaacagccagcagactcgtgggcacatagtaagggtattatagttactagttctgttactaatatttctatcaaagcatttgcattctgactacatgcattctctcctctagtggatacatggctcctgaatatgtgtctgatggccttctctcgatcaagtcagatgttttcagtttcggggtcctgcttcttgagattataagtggaaagaggagctcaggttttcagcacaatggagagttctacaaccttcttgaatacgtaagcaaccaaggactcgacaatctgtagaattggtaaaacagatatgttttcccttataacaagattgcattatactaacatatcagtaactattgatggtgtatctgtatggtgttgtacattatttctttccatgaagtatagggctcaaagcacagggtgttttcctgtacctccctgttttattgctattgtctagcagttgtagatacatctaacagctaaagatataccaccatacacatgtaaagaatcaattttcttttcaggcctgggaactgtggaaggatagaagatggaatgagttcattgatcaatcctttggtgatgactacgaactggaagagctgatgaaataccttgctgtggcattgctgtgtgttcaagaaaaaacagtagatcgtcccacaatgcctgatgttgttgcagttcttagcagcgatggcgtcactttgccagaaccaaagcagccagcttactcctatgcgaaagtagatgtgtcagtaaatgtcgctgtgttgagtagcagaaatgatgttaccatcactactacaaatggcagataatagaatgtaatactgttaataaagtgtgcgctacagg

SEQ ID NO: 104872 - DNA, 2402 bp, Zea Mays
atagtggtctatgtcaaatcttctagcgctcgcaattcttctcctctccaccacgccggcgccgacggccggtgaacagaccatctgcagcgatgccacgtacgagcgaaacagcacatacaagtccagtctgaggtcggtagccggcgcactgaccggggacgccgcgaggctgcactcgtccaccggcgctgcaggggagggccccgacaaggtctacggcgccgtgctctgccgggcggacacagcgggtgctgactgcgccaggcgcctccgggacgcccttgccgccatcaccgacggggacggccgctcgcgttgcgcgctccacagggacgtggccgtctactccgagctgtaccagctccgtttctccgacagggacttcctcgccgacttcagcaacgcgccggaatgggtcgacgtcacgaacccaggccccgtgccgctcgccgtggccgcgcggttcgaccagcgggtcacggagctgctgagcgcgctcgctgacgcggcggcggggcgaccgggcaggtgggccgtcggcgaagcgccgtggtcgtcgtcggggggcagggaccgggcggtgtacgcgctggcgcagtgcacgctggacatgccgccggaccactgccgggcctgcctcgatggcgccatggcagagcggcgacggaaggtcggcggcggcaagatgggcgcggcagtcttcggggcgcggtgcaccctgcggtatgagatggatctgcagttcttcaacgtcactggcaacagcaagatgctgtccctgcctgggaagaagaaagaccgtgcgttcgtcatcgttgcaacagcttacgcttcggcaatcctctgtacacgcttgcttttctggctgctaagcgtctggaggaaacaaaaaaggaaaatggacttgacggaggagccccagaatgtggatgaaatactcaggtcatggagaattgaagatgctagtttagagttctcgctgtatgatttctctcagattgctgatgccacagtcaacttctcacccaaaaatatgataggggagggcggatttggcccagtttacaagggagtacttactgatggacaagaggtagcgataaaaagactgtctgctcggtcacgacaaggtctagtagagttcaagaatgagatccaggttatagcaaagcttcagcacagaaacctcgtcaggctccttggctgttgcatccatgaagaagagaagatgctggtctacgaatacctgacgaacaaaagcttggaccacttcatttttgatccaatcagacaggcatcgcttgattggaagagacggattaaaatagttgatggtatagcccagggactcctgtacctccacaatctctcgagaatacgcatcatccacagggacttgaaagcaggtaacatcctgttagattctgacctaaacccgaaaatctctgatttcgggatggcgaggatatttccatcggatgccactcaagcaacagccagcagactcgtgggcacatatggatacatggctcctgaatatgtgtctgatggccttctctcgatcaagtcagatgttttcagtttcggggtcctgcttcttgagattataagtggaaagaggagctcaggttttcagcacaatggagagttctacaaccttcttgaatacgcctgggaactgtggaaggatagaagatggaatgagttcattgatcaatcctttggtgatgactacgaactggaagagctgatgaaataccttgctgtggcattgctgtgtgttcaagaaaaaacagtagatcgtcccacaatgcctgatgttgttgcagttcttagcagcgatggcgtcactttgccagaaccaaagcagccagcttactcctatgcgaaagtagatgtgtcagtaaatgtcgctgtgttgagtagcagaaatgatgttaccatcactactacaaatggcagataatagaatgtaatactgttaataaagtgtgcgctacaggtcttggtcatcctccttgtgttaactaattgcattgtgttctgctatttctccccagtaaaccagttaggctgatttgactatttattttacatatttattccctattattatatataaactgagatagcattaatttgtatttcagtcccaaactgtctaccactgggcgctggcacataagccatgttctggtgttgatgatgaattacatattcacacacacccaaaatagacagcatttccctaaaaaaatagacagcatttgttagataggcccccacaatagatatcatttatttggacattgtaaatctaaccatgactgtttttagtctttctttgctttttcacagtcaagacatcagcatgagaaattcggaagcacaaatacata

SEQ ID NO: 104873 - DNA, 304 bp, Zea Mays
ccaggcatgtaggagtcatcaagaacagggagaagcacaagggcagctttgagaccatccacgtgctgcttggagctttttgctatgtctagttttctcctatttgttgtacaggaaaacatagaatagaattcaaatttgatggtcgcaaaagtgtggagactttaattcataatataaagttaggcttaacattagtgcaaacagttgtattttaattagtttagatttagagtacacttatgtatgcgttgtttgacaatgcttatgatatattgaatggtacttatttatattatattaa

SEQ ID NO: 104874 - DNA, 1575 bp, Zea Mays
atgattcttgctgccctcctcctacttctctctttcccgaagcagctagctggaagtcagtccgtctgcagcagtgctaacatcgtgtacatgcaaagcagtacctacatgtccaacctgaatgcccttgccggagcactattcgccaaggtgacaagttcaaactcacactcagcccatggcacagctgggacaggttccgacatgatctatggagcagtgctttgccgaggagacatgatccccggcgctgcctgtgcaaaacgtctcaaggaggtccttgatgcagcaatggacaacccagctaatagttcttgctcttcccagaaggacataaccttgttcgacgatgggtacctggtccagctaagattctctgaccaggatttcatctccaacttccgcgactctcaggaatgcgtagtaagggctaatttgaaccctccgctgttgggcgatgtttcagagcagttccatagtcttgtttccaagctcatgaccaagctcacagatgctgcagtgaagaatatgggcaggtatgagacaggccaaggctggctcactgagaagagccagactgtatatggacttgtgcagtgtcaagaggacatgctgaagggcacttgccaggattgcttgagtagtgccatggcaaagagggagcagatggttgaccagatgggtggtgcaatcctcggcgtgggatgcagcttgtggtaccaaacagaagttcagttctttgctggcacaccagcgttgtcgttaaatatgcccacacaacgagcaagatacgaactacagttgctgtcaatggcaatacaaaatgtaataaatctgtggaggattgaagaaggcaattctggattttcactgtacgatttctctcagataaaagaagctacaggaaacttctctagtgaaaacaaacttggacaaggtggttttggaccagtttataagttcattaatagcaatttttttgtttctgaaaaacatccatgcacacgattggtagtctgtaaaattaatgtccagacatacaggaaaatagaacctaatgttaacaaaggagtacagttgaactggtctatgcgcctacgtataattgatggagtagcacatggaatcttatatcttcacaaacattcacgcttatgtgttgttcatagggatcttaaagcaagtaacattctcttggacagcgacatgactcccaaaatttctgatttcgggatggcaagaatattcagctcaaacatgacagaatcaaacacaacgagaatagtaggaacacatggctacatttctccagagtatgcttttgatggagtttgctcaatcaaatcagatgtcttcagctttggagtcttggtcttagaaattataagtggaaagaggactactggtttctatccatacggtggaaaattatataatctaatttcatatgagaatgcagaggacagacctgctatggatcttgtggttaacatgctgaacaatgagagtgtgatcttgcccaagccaaagcaacccgcttacttctttacacgctctaggtgtatattagtgtaa

SEQ ID NO: 104875 - DNA, 745 bp, Zea Mays
taaatgataaagacaaggttcaactctcaccctctgaccaatccaaattttacaccggcgattgctacatatttcagtatacttatcctggagatgataaggaggaatgtcttattggaacctggtttgggaaaaagagtattgaggaggatagggtaatagcagtttcacttgcaagtaagatggttgaatctgctaagtttcaggctgtccaggcgcgcttttatgaggggaaagaaccgatccagttctttgtgatatttcaaagcttccaagtgtttaagggtggtcttagttctggatacaagagatttatcgctgaaaatggcatcgatgatgaaagttattctgaagatgggcttgcactctttcgtattcaaggttcaggaccagaaaacatgcaggcgattcaagttgaacctgtggcctcatcattgaattcatcatattgttacattctacataatggaaacactgtgttcacttgggctggaaatctgaccactgcattggaccaagagttaatggaaaggcagcttgatgttattaaggtgtggaactatcgtccctagttaatggaaaggcatcttgttgcagagatgtaactattcaaactttctagattttttctgtaaatttagtcataatctcatttgatggtttacctggattctgcacaaatgtgcgctgtaaaatctgagcctgataggaggataaaatggtatctagcatgcctttaggggtt

SEQ ID NO: 104876 - DNA, 630 bp, Zea Mays
taaatgataaagacaaggttcaactctcaccctctgaccaatccaaattttacaccggcgattgctacatatttcagtatacttatcctggagatgataaggaggaatgtcttattggaacctggtttgggaaaaagagtattgaggaggatagggtaatagcagtttcacttgcaagtaagatggttgaatctgctaagtttcaggctgtccaggcgcgcttttatgaggggaaagaaccgatccagttctttgtgatatttcaaagcttccaagtgtttaagggtggtcttagttctggatacaagagatttatcgctgaaaatggcatcgatgatgaaagttattctgaagatgggcttgcactctttcgtattcaaggttcaggaccagaaaacatgcaggcgattcaagttgaacctgtggcctcatcattgaattcatcatattgttacattctacataatggaaacactgtgttcacttgggctggaaatctgaccactgcattggaccaagagttaatggaaaggcagcttgatgttattaagccaaacacacagtctaggtcacaaaaggaagggtcagaaacggaccagttttggagtttactggggggcaaatctgagt

SEQ ID NO: 104877 - DNA, 565 bp, Zea Mays
gtactacacaagataaatcccaacgctccagaagcatgtccttcagccctgaacgtgtgcgtgttaggggaagatctccagcattcactgcattggctgctaattttgaaagttcaagcaacagaaatctttccactcctccacctgtagttaagaaactttacccgaaatctgttacacctgatccgtcgaatactgcttctaagtcacctgcaattgctgctctggctggttctttggatcacccttctcaaactcctgctctagaattcatgaaaggtggctccgagtcagagaagccaaaacaggagggagatggtaaagaaggtgttgatactgtggccacaagagttgaatctctgactataaatgaagatgtaaaagaaaacgagccagaagatgacgagggccttccgatttacctgtatgaacgtctgaagaccacagctgctgatcctgttactgaaattgatgtcacgaggcgagagacctacttatcttcaactgagttcaaagagaagtttgggataaattgctcttcaacttttttagcctgatcatcaac

SEQ ID NO: 104878 - DNA, 976 bp, Zea Mays
gtactacacaagataaatcccaacgctccagaagcatgtccttcagccctgaacgtgtgcgtgttaggggaagatctccagcattcactgcattggctgctaattttgaaagttcaagcaacagaaatctttccactcctccacctgtagttaagaaactttacccgaaatctgttacacctgatccgtcgaatactgcttctaagtcacctgcaattgctgctctggctggttctttggatcacccttctcaaactcctgctctagaattcatgaaaggtggctccgagtcagagaagccaaaacaggagggagatggtaaagaaggtgttgatactgtggccacaagagttgaatctctgactataaatgaagatgtaaaagaaaacgagccagaagatgacgagggccttccgatttacctgtatgaacgtctgaagaccacagctgctgatcctgttactgaaattgatgtcacgaggcgagagacctacttatcttcaactgagttcaaagagaagtttgggatgacaaaggaagcatttagcaagcttccgaagtggaagcagaacaggctaaaaattgctcttcaacttttttagcctgatcatcaacacttccaatgtaatcaccatctgcaatgccacatcaattttcacattgtcctggatcggtctcctttttcctagtttggatttgttttgctagctaagtagctctcttattcttccagttcataggtgtgctattccctttttcctttttttgtcaagtgctcttcattgattcaaggtcacacaggtttgattctgaggcttgatttttttgtgtatcaactctgcctgctgtgttctttttttgtttttgagatgagttgcggtttgagggagcgataagtatgtacagcagagtgccggcactgtaacatcacaataccgttatctttgatcaatataattattttttgtgtgtaact

SEQ ID NO: 104879 - DNA, 1189 bp, Zea Mays
ggactccaggtctaggcgtctagctctagctgtagttggaagttggaacagctcggtgccggtgggcattttcaaccatcgtttgctttacttcacagttcacactcgccctgttctagggttattatcaacccagttcatccatcaccgaccggcgtcaccacttgccagtcacctcaccaccatgaagaatccttggctcctattcctcgcccccttcctcttagccgtgtcgtcatcgctgcctcataccgccgccgtgccgctgcgtttccctgccgcagggcggtcgcctgtccagtgcatcggcgacggcgtctacgctgctaacagcacctaccaagccaacctccgccgcgtcgccgccctcctcctagccgaggtgtccgcctcccccggccagttttactacacgacccatgccgtcgggtactggcctaaccggttgctcgccagctccttatgccggcgccgcgacgtcaacggcacccacgttggctacccctgcgccgactgcatcgccggggccttcctcgaaatggagagagcgtgcccgtaccgcagggaggccttctatatcgatcgcaactgcagtgtcgaacttgccgagattcgcatcttcgggactggcggcatcttccaacggaacatactgatacaagccatggcttcgggattggtacttcaagcaattggatttgcttggcttttcttcttgctatttcaagaatggcgcagccggaaaagaggcaacttgatgcattccacccctcttttatctggagatgagaatgttggcaacatgtctaccaaggcgtaacggcaaatgttgcatacttgcatgaagggatcggattttctctcatcaagggaataaagattaaagaatgaatacttgctctccaaattgcaggccttcaattcggtcgtttaatttcaagccagctgaaatgttcattgttttcacacattcttatgttttcattggaatttcattcccacttgtcctgttcctagcttgaaatgtacatgtgaatacaaaaaaaaaaccaaaacttgccacgattgggcagtcggcactgaaacagcagtgtaccatattataatgtatatacgtaagaacgtaacctactaaaatgactacttgttctcaattgcaagatcaaaacagaattacaacctttatttt

SEQ ID NO: 104880 - DNA, 966 bp, Zea Mays
ggactccaggtctaggcgtctagctctagctgtagttggaagttggaacagctcggtgccgggcggtcgcctgtccagtgcatcggcgacggcgtctacgctgctaacagcacctaccaagccaacctccgccgcgtcgccgccctcctcctagccgaggtgtccgcctcccccggccagttttactacacgacccatgccgtcgggtactggcctaaccggttgctcgccagctccttatgccggcgccgcgacgtcaacggcacccacgttggctacccctgcgccgactgcatcgccggggccttcctcgaaatggagagagcgtgcccgtaccgcagggaggccttctatatcgatcgcaactgcagtgtcgaacttgccgagattcgcatcttcgggactggcggcatcttccaacggaacatactgatacaagccatggcttcgggattggtacttcaagcaattggatttgcttggcttttcttcttgctatttcaagaatggcgcagccggaaaagaggcaacttgatgcattccacccctcttttatctggagatgagaatgttggcaacatgtctaccaaggcgtaacggcaaatgttgcatacttgcatgaagggatcggattttctctcatcaagggaataaagattaaagaatgaatacttgctctccaaattgcaggccttcaattcggtcgtttaatttcaagccagctgaaatgttcattgttttcacacattcttatgttttcattggaatttcattcccacttgtcctgttcctagcttgaaatgtacatgtgaatacaaaaaaaaaaccaaaacttgccacgattgggcagtcggcactgaaacagcagtgtaccatattataatgtatatacgtaagaacgtaacctactaaaatgactacttgttctcaattgcaagatcaaaacagaattacaacctttatttt

SEQ ID NO: 104881 - DNA, 848 bp, Zea Mays
ggactccaggtctaggcgtctagctctagctgtagttggaagttggaacagctcggtgccgggcggtcgcctgtccagtgcatcggcgacggcgtctacgctgctaacagcacctaccaagccaacctccgccgcgtcgccgccctcctcctagccgaggtgtccgcctcccccggccagttttactacacgacccatgccgtcgggtactggcctaaccggttgctcgccagctccttatgccggcgccgcgacgtcaacggcacccacgttggctacccctgcgccgactgcatcgccggggccttcctcgaaatggagagagcgtgcccgtaccgcagggaggccttctatatcgatcgcaactgcagtgtcgaacttgccgagattcgcatcttcgggactggcggcatcttccgcattccacccctcttttatctggagatgagaatgttggcaacatgtctaccaaggcgtaacggcaaatgttgcatacttgcatgaagggatcggattttctctcatcaagggaataaagattaaagaatgaatacttgctctccaaattgcaggccttcaattcggtcgtttaatttcaagccagctgaaatgttcattgttttcacacattcttatgttttcattggaatttcattcccacttgtcctgttcctagcttgaaatgtacatgtgaatacaaaaaaaaaaccaaaacttgccacgattgggcagtcggcactgaaacagcagtgtaccatattataatgtatatacgtaagaacgtaacctactaaaatgactacttgttctcaattgcaagatcaaaacagaattacaacctttatttt

SEQ ID NO: 104882 - DNA, 770 bp, Zea Mays
cagcagcactcaccttgctctgccctctgcgccccttagctgctgcaggagagcatggcgctcgctcgcctcctcgggacagcatttctgctgctcctgttttctcatgcagaggccgctggcgaggtaggcgtgaactatgggacggtggcgaacgacctgccgaacccggcgtcggtggtgcagctgctgaagcagaacggcatcaccatggtgaagatatacgacgccaacgcaaacgcgctgacgtcgctggcgaacacgggcatcaaggcgatggtgatgatgcccaacgcgaacctggcccgcgcggcctcggacccaacctacgcggcgcagtgggtgcaggacaacgtgatgccctactacccggccacgcagatcaacgccgtcgccgtggggaacgaggtgttcgacgaccccagcgtcgacaagatggacctcgtcccggccatgaccaacgtgcaggcggggctggcggggctgggcgtcgccggcgacatcaaggtgtcctcgccgatcaagttcgacgcgctccaggtgtcgtggccgccgtcctcgggcaggttccgcgacgacatcgcgcagccggtgatgaagcccatgctggacctcctgcagaggaccggctcctacctcaccatcaacgcgtacccgttcttctcctactacagcgatcctcgcagcatctcccttgactacgccctggggaactccaaccctggcgtctccgacgacaaagccaacctcaggtacgacaacctcctgga

SEQ ID NO: 104883 - DNA, 2302 bp, Zea Mays
ttcgaactacgctgaatttggcagttgaacatttcaaggacgagacacaatttctcagtacaccatgctaacggcctcgccgtcgtctcaggtgaagccgcaacaatggggtacatgcggggtcagcgtggcatcgacgccggcgcttcttccgccaccggccgccggacggcttgtcgccgtcgataccaggaggaggacgaggacggttgcctccgccgcgcttggtcctgtggccaccgagcccgcagaaaggtctcccgtgccacagcccccgccactgtccagcgacgaggagacggtgctccggctcggcaactacgtcccggtcttcgtcatgctcccacttgaagtggtgaccaccgagaacgacctggaggacgcggggaagctgcgggagcagctgcggcggctgcggggggccggcgtcgacggcgtgatggtggacgtgtggtggggcgccgtggagggcgccgggccggcgctgtacgagtggcgcgcgtaccgggacctgttccgggtcgtgcagggcgaggggctcaagctgcaggccatcatgtcgttccacgcgtgcggcggcaacgtcggcgacgacgccgtcagcatcccgctcccgcggtgggtgcgggaggtcggcgaggccgaccccgacgtgttctacacgagctccagcggggcgcggaaccaggagtgcctctccattggcgtcgacgacgagccgctgttccatggcaggactgccatccagttgtatgccgatttcatgaagagcttcagggagaacatggcggacttcctggactccggcctgatcgtggacatcgaagtcgggcttggccctgcgggggagctgaggtacccgtcgtatccggagacgcaggggtgggtgttccccggcatcggacagttccagtgttacgacaagtacctggaggcggatttcaaggcggcggcggcggaggccgggcacccagactgggagctaccagacgacgccggggagatcaacgacacgccggaggacactgggttcttcgcggcggagcgagggacctacctcaccgagcaggggaggttcttcctgacatggtactcccgcaagctgatccagcacggagacagggtcttggacgaagccaacaaggccttcctggggtgcaaggtcaagctcgccgcaaaagtgtccgggatacactggtggtacaggcacccgagccacgccgcggagctgacctcggggtactacaacctcggcggccgggacgggtacgcgccgatcgcgcgcatgctggcgcggcacgacggcgccgtcctcaacttcacctgcgcggagatgcggaactcggagcaggccgaggaggccctgagcgccccggagcagctcgtccagcaggtgctgagcgccgggtggagggagggggtcgaggtggcgtgcgagaacgcgctgagccggtacgaccgccgcgggtacaaccagatgctgctcaacgcgcggcccaacggcgtgggtctctccggcgccggcgccggcgccgcgcggcgcagggtcgcggcggtgacgttcctccggctctcggacgagctcctggcgagcaacaacttccggatcttccggaccttcgtccggaaaatgcacgccgacctggattactgccctgatgcggaccggtacggtcggcccctcaagcccctagagcggtccgcgccagagatgcccatggagcggctgctggaagccaccgcgccggcgccggcgttcccgtttgatccggagaccgacatgagcgtcggcggcgggctcgcagaggctgtcgactgggtgctcgacaagatcgcgtggctatttggataggatcagaatcagatcacactcaggcgatcagcatttccgttggacacgaaccattgatccgcaacaggaatggcatggccagtgatacatgcagttgcgctagcagcaccatgtcatgacaccgacattgtacctgtacacgcttctgcttcgtcctccttttagcggaaggctatttatgatatactgatgaaatttacagcatcttgggtaagatgttttagatgttgtttgaattttcacgtattcatgttaatgtacgtgtattaggggtggtttcgtgtagagtttagtttaaatttcacgtaaatttggctaccatatagattgaggtggatacatgtcctgagccaggcttaccgaagaaatcgatggtctgtcctacgaatttttttcccagaagctttatgtaaaaggaattagttaaatatatttaagagttgtgtcgtc

SEQ ID NO: 104884 - DNA, 1232 bp, Zea Mays
acgagcacgagactgctcggccgacgaaataataaagcgcgcgcgcgcacgcggagaggctcggagagctgagtgagatggcacaagccatggcgtccatgaccggcctctcgcagggcgttctgcccagcaggcgcgccgccaacagggccaggacggccgccgtcgtcagggcgtccgccgaggcgcaggcgcaggcgcaggcgggccgccgcgccgtgctcgggctggtggccactggcatcgtcggcggcgccttgtcgcaggcggtgcacgccgagaccgtcaagaccatcaagatcggagccccgccgccgccctccggtggactccccgggactctgaactctgaccaggcgagggacttcgacctccccttgaaggagcggttctacctgcagccgctgccgccggcggaggcggtggcgagggtgaagacgtcggcgcaggacatcatcaacctcaagccactcatcgacaagaaggcgtggccgtacgtccagaacgacctccgcctccgggcctcctacctgcgctacgacctcaagaccgtcatcgcttccaagcccaaggaggagaagcagagcctcaaggagctcaccggcaagctcttcagcaccatcgacgatcttgaccatgccgcaaagatcaagagcaccccggaggccgagaaatacttcgcagcaaccaaagatgcgctcggcgacgtcctcgccaagctagcctagatggaagctaatagatgggttaacgatggccacgtaatttcggacttgtgtttgttcatatggagccggcaaatgtaccgtttcctgttcatattatatcccaagttcttgacaagtacctttgcgggcggatggaacatcagaaacattttccagcagccttaacaagtgatccacgtaatatatcggaaggcgtcaaattggaagttccgcgcctgagatgaacattggccatgagatgagttgaagcataatagaaatcgtgtcacagttatccgcaaaaacaaaataacaactgtacccagatcactcggccctacaaattcagttaagcaacataggagtggaacaaaaatgagctagaatgtcagacctctagctaatttagcattattatttcgacaactcagttaagctgcagaaaatgatagattctaaaagacaaactacccccacaattcaggcttttgagatctcaataattgtacgaagtttccaacacat

SEQ ID NO: 104885 - DNA, 288 bp, Zea Mays
ctatgcttattatcatgataagttcagtgaaccaacagtagttcattgtcctctaatgttgctatatcatattggcagcttgtttgcttggcaacattgctcaaagtacctgagaatgataggtttgacccctatcaggagttaatgaaagtttttattggattcatagatgtagctggactgtattttgctttgacacagctgacccacagaaacatctctcagaatcataagttccaggctgttggtcttggtaagtacagagttatctctaaagtttgattcatg

SEQ ID NO: 104886 - DNA, 1486 bp, Zea Mays
cacacgatcccagatggagtgtcacgtcaccgatccggaaccgcacaaaacgaaacgaaaactctcacgcgcgacctccaccgcctcccgccggttccggatcgcggaccagcgcccctcgcccaccccacgcatccgccgtccaccagaacgcattctacggctccccacccacgatccgtgtggtcgattcccattggctgttcgctgcggaccctcgcctttatatattctcgccctcccacaggagacgcattcgcctctcccgcgacccgtaccccgcctcccggttcaaccaaatccctctcgcctcatccccaccagcgcaaagccgccctatcgtcctgtcgtgagaagcaatggcgggccgtggcaaggcgattggcgctggtgccgcgaagaaggcaacgtcaaggagctccaaggctgggctgcagtttcccgtcggcaggatcgctcggttcctcaaggccggcaagtacgccgagcgcgtgggcgccggcgcccctgtctacctcgcagctgtcctcgagtacctcgccgctgaggttcgtgccccgtttccatttcgccttaactgtggggttcgcttcgggtccctgtcgctgccgtcctatctggttgttgctccgtctgcggtgcgacagctcctagatctgaatcgaatagtctcgttgatttgttgcataattataaagtgatttcaaaggatttgtcgccggcattatctgcacttttgctttattggtgaccaaaacaattcctcttgattatttgctagaatagtaaatctatctaggagtcctataattaagctgtcatcagtaattttgtacatcaaacgttctagaaacatgagctaaatgcctctttactatttttgcctgtagcattctgtctcggcttcgccttttatcccgcgaaaccccaagcgccagaagcaatttcatctgacctaccttttcgtttttattcgatgcttcaacaggtcctggagcttgctgggaacgcagcgagggataacaagaagacccgcatcgtgccgcgtcacatccagctcgccgtgcgcaacgacgaggagctgaccaagctgcttggtggtgccaccatcgcgagcggcggcgttatgcccaacatccaccagcacctcctccccaagaaggctggctcgtccaaggcttccaccgtcgatgacgatgacaactgaagctgcccactggagaaggcattcgctaccgtcttgtttcctaggtttagcacgcagttagtcgccatgtctttgagagagttcgatgtgtttgggaatgacaatagttcctttcttggttccctaagttcgttgaatcagatgtgaatacggctaaggtttttgggttatgcaactctgggacgtacgccagttgatttgatcgtttgaaaagaaatggaaggacgttaaagtttgaacaattctgatgcgttttatttcaatttctgttcagaatta

SEQ ID NO: 104887 - DNA, 1066 bp, Zea Mays
cacacgatcccagatggagtgtcacgtcaccgatccggaaccgcacaaaacgaaacgaaaactctcacgcgcgacctccaccgcctcccgccggttccggatcgcggaccagcgcccctcgcccaccccacgcatccgccgtccaccagaacgcattctacggctccccacccacgatccgtgtggtcgattcccattggctgttcgctgcggaccctcgcctttatatattctcgccctcccacaggagacgcattcgcctctcccgcgacccgtaccccgcctcccggttcaaccaaatccctctcgcctcatccccaccagcgcaaagccgccctatcgtcctgtcgtgagaagcaatggcgggccgtggcaaggcgattggcgctggtgccgcgaagaaggcaacgtcaaggagctccaaggctgggctgcagtttcccgtcggcaggatcgctcggttcctcaaggccggcaagtacgccgagcgcgtgggcgccggcgcccctgtctacctcgcagctgtcctcgagtacctcgccgctgaggtcctggagcttgctgggaacgcagcgagggataacaagaagacccgcatcgtgccgcgtcacatccagctcgccgtgcgcaacgacgaggagctgaccaagctgcttggtggtgccaccatcgcgagcggcggcgttatgcccaacatccaccagcacctcctccccaagaaggctggctcgtccaaggcttccaccgtcgatgacgatgacaactgaagctgcccactggagaaggcattcgctaccgtcttgtttcctaggtttagcacgcagttagtcgccatgtctttgagagagttcgatgtgtttgggaatgacaatagttcctttcttggttccctaagttcgttgaatcagatgtgaatacggctaaggtttttgggttatgcaactctgggacgtacgccagttgatttgatcgtttgaaaagaaatggaaggacgttaaagtttgaacaattctgatgcgttttatttcaatttctgttcagaattagctatctgttgctgctccga

SEQ ID NO: 104888 - DNA, 857 bp, Zea Mays
tatcgtagctatataacacaactacccaccgctttcatagtcctgattacaaacccgtcctctgtccgtcctaccaccacagctcaccgcggtttggctttctcccctcttccgcacccgcttctcgctccggattccctctgctctttccctaacgaaggtagccatggcggggagaggtaaggcgatcggctcaggcgccgccaagaaggccacgtccaggagctccaaggctggcctccagttccccgtgggaaggatcgccaggttcctcaaggccggcaagtatgccgagagagtcggcgccggcgcccctgtctacctcgctgccgtgctcgagtatcttgctgctgaggttcttgagctggccggcaatgcggcacgtgacaacaagaagacccgcatcgtaccgcgccacatccagctcgccgtccgcaacgacgaagagctctcccgcttgctgggcacggtgaccatcgctagcggtggtgtcatgcccaacatccataacctgcttctcccgaagaaggccggcggcggcagcgccaaggctgcggctggtgacgaggactaagtccttgactacgcctggtggcacgtcccaggatgctgccgtatcaacttgtgtctgtgtagtacgttaggtgttcgttgtagctgggtatgtgggttgctgtaacactgctaaactaagttactcttgtgcttgctaaggattaagttctgtatttgttgctataaaaggtgcatcctttgaatgactggttcatcaatcatagtgtcccaatttgcatttcgtgtgtctggatcatttcgaaatgttgcgctgtgttgttttggaatttatttctgagatt

SEQ ID NO: 104889 - DNA, 984 bp, Zea Mays
tatcgtagctatataacacaactacccaccgctttcatagtcctgattacaaacccgtcctctgtccgtcctaccaccacagctcaccgcggtttggctttctcccctcttccgcacccgcttctcgctccggattccctctgctctttccctaacgaaggtagccatggcggggagaggtaaggcgatcggctcaggcgccgccaagaaggccacgtccaggagctccaaggctggcctccagttccccgtgggaaggatcgccaggttcctcaaggccggcaagtatgccgagagagtcggcgccggcgcccctgtctacctcgctgccgtgctcgagtatcttgctgctgagaacaccaggcggattttggctgaagatctaaacctatcgttggttgatttgctattttctgttgaaccagtaaggattctgattcaataattgggggctttctccgtgttcgttcgtgcaggttcttgagctggccggcaatgcggcacgtgacaacaagaagacccgcatcgtaccgcgccacatccagctcgccgtccgcaacgacgaagagctctcccgcttgctgggcacggtgaccatcgctagcggtggtgtcatgcccaacatccataacctgcttctcccgaagaaggccggcggcggcagcgccaaggctgcggctggtgacgaggactaagtccttgactacgcctggtggcacgtcccaggatgctgccgtatcaacttgtgtctgtgtagtacgttaggtgttcgttgtagctgggtatgtgggttgctgtaacactgctaaactaagttactcttgtgcttgctaaggattaagttctgtatttgttgctataaaaggtgcatcctttgaatgactggttcatcaatcatagtgtcccaatttgcatttcgtgtgtctggatcatttcgaaatgttgcgctgtgttgttttggaatttatttctgagattgaatgc

SEQ ID NO: 104890 - DNA, 936 bp, Zea Mays
tatcgtagctatataacacaactacccaccgctttcatagtcctgattacaaacccgtcctctgtccgtcctaccaccacagctcaccgcggtttggctttctcccctcttccgcacccgcttctcgctccggattccctctgctctttccctaacgaaggtagccatggcggggagaggtaaggcgatcggctcaggcgccgccaagaaggccacgtccaggagctccaaggctggcctccagttccccgtgggaaggatcgccaggttcctcaaggccggcaagtatgccgagagagtcggcgccggcgcccctgtctacctcgctgccgtgctcgagtatcttgctgctgagtaaggattctgattcaataattgggggctttctccgtgttcgttcgtgcaggttcttgagctggccggcaatgcggcacgtgacaacaagaagacccgcatcgtaccgcgccacatccagctcgccgtccgcaacgacgaagagctctcccgcttgctgggcacggtgaccatcgctagcggtggtgtcatgcccaacatccataacctgcttctcccgaagaaggccggcggcggcagcgccaaggctgcggctggtgacgaggactaagtccttgactacgcctggtggcacgtcccaggatgctgccgtatcaacttgtgtctgtgtagtacgttaggtgttcgttgtagctgggtatgtgggttgctgtaacactgctaaactaagttactcttgtgcttgctaaggattaagttctgtatttgttgctataaaaggtgcatcctttgaatgactggttcatcaatcatagtgtcccaatttgcatttcgtgtgtctggatcatttcgaaatgttgcgctgtgttgttttggaatttatttctgagattgaatgcaagaatatgacgccttctgtta

SEQ ID NO: 104891 - DNA, 94 bp, Zea Mays
aaatatcactatgatatgtaaaatccatgtggtgatttatctcactgactgtaagattattgtatacatgactgaagatatttagtcttcaaac

SEQ ID NO: 104892 - DNA, 941 bp, Zea Mays
agcggtagcggccagccgggtggaatcttctctccgtccctggtctagcaatcaagcgccctgccgctctaggcaccaaaacctcgcgaggcaaccgcccgccggcgccgccgacgtagcaagagggtgagctgaggactagaggagagggaagatgtcgttccgcgcgcgggagatgtacaagaaggtggtgcggcgcttgggtggcgaggggaagctgccggctgagctgatgaagtcggtgaaggacatactgccggacagcaacgtcgtcatggggcgggccaagcgcggcatcttcgcggggcgacacatccggttcgggaacaaggtctccgaggacggcggcaacaaacatatatttcgctcaatttatggttacattaaacattccttgacctcgtctattaggagctttgccgttgttggagtggatctagctgttatgggcgttggtcctgctgtggccattcctgctacagtgaagtctaccatccttgaggttggaaacatcgatctatttgaactgaatgaggtcttcgcctctcaatttgtctactactgcattgtagggagggcatattatggcggctacgaggaaccgatgttcctgtatggcggtgacaacgacaccgtggagccaaggcaatgtcagcaagctgatttatcagattgggatctatggttctttttaaagatcgaatatgttctagcatcttaaaaagttttgtcagaatgtaaacatttgttatgaggtcatttagacctcaaatagaatttcttggacttatttggttggagggaatggaacatctcgagatctaaatgtgtatagattatccaaatgtgtatagaacatatattttttatgggtatcaaatatgattatgtgcaaagcacggacataatactataacaatgaaacacacatttgtacataa

SEQ ID NO: 104893 - DNA, 2415 bp, Zea Mays
aagatatataattattattcgcagcaaagaggggcacaagcaagagaaggattaggacacaaacgctagagagagagagagagaggtggtggccggtgggacgtccgtggtggtggtggagttagatcggctgtgcttgttcctcgctcctcgctggttcagaggaggtcatgatcaactaatgcctattcatttattatggacttgcaccagttgttaaagtacagattaactggtgctaacgtctactacgaatttcctacagagaacaacttagcaaacactccttggccagctagtccactgaagtctgagttcagcagctcatcatacactcctctttcatcccagcttgagtgtgataatttgtctgcactcagcaatactccagataaccagagctccacagaaaccatttcagcacaatcaatatcaccactggaagtagacagctcatacaaacaggcagctatccttcgggagaacacccaagtgagacctgatccattgtacacaacatcaaggcataatatgcaacacgctttacgagaaatagagactgttctgatggcacctgatgctgatgatgcagctactagcaccaagcatgaatttgaggaacataaacctgctcagctgatgaggcagcggtcaaggacatggagtcatgaatctaggcagccatcaccaggagttgtacggacacaacttgcatctggataccccacagcaagctatgagttccgcccagagaaacggctaagggagttaagggaggatccgcagagcatggtgaagcagctattaaccaagtgtgctgaagcattaagtgaggagaggatagaggagttccttaaccttgttcagcaagctcgtggagttgtatcaattactggggagccaatccagcggttaggtgcttacctccttgagggtttggttgctagacatgcaaactcaggtacaaacatatatcgtgccctgaagtgccgtgagccagagagtaatgaactcttgtcttacatgaagattttgtataacatctgtccgtacttgaagtttggctatatggctgccaatggggcaattgcagaggcattaagaaatgaggacaggatccatattattgatttccagattgcccaagggacacagtggataacactgatacaagcgctagctgcaaggcctgggggtccaccacacgtgcggatcactggaatagatgacccagtgtcagagtatgcccgtggtgaaggtctggaccttgtagggaagatgttgaaaagcatgtctgaggaattcaggatacctttggagtttacccctctgcccggtatttatgcaactcaagttacaaaagaaatgctggacattaggtcaggcgaagcacttgctgtcaacttcactctgcagctgcaccacaccccggatgagagcgtggacgtgaacaacccacgggacgggctactccggatggtgaaaggcctgtctccgaaggtgaccacgcttgtggagcaggagtcgcacaccaacacgaccccgttcttgatgcggttcaccgagaccttggactactattcggccatgttcgagtcaatcgacacgaacctgccacgggacaacaaggagcggatcaacgtggagcagcactgtcttgccaaggacatcgtgaacatcatcgcctgcgaggggaaggaccgggtggagcgtcacgagctcctgggcaaatggcggtcgaggctgaccatggccgggttcagaccatacccgctgagctcgtacgtgaactcggtgatcaggaagctccttgcctgctactcggacaagtacaccctggaagagaaggatggcgcgatgctgctcggctggaagaacaggaagttgatatctgcttctgcttggcactgacagtaacgttttcagaagaccggaagtacacgtcaactcttacatatatatatgtatgtatgcataatgaattacctggtctgctttccgcaaaaaaggacgccctttgttgtacatgtacatgatgctgtacccttagttttcctgaagtgcagaccagagaagagaacattgacattagattgtagctgctaagctgtatggtaattacagttttcttttgctctcatgtattcacccctgtcatggacttctccaagcgtattcttagctaatcagcatgcatacatgctgagatgcttcttagtctttctttcatgctcttgagcgtgcaatgatgtcaacaagttaacatgccctgatgcccctccgagggaagatggatctcaagtcttccatctgcgagatccaagtttgggcaggcaaagtgtgctgatttttatcatctgactgtgaaccatcatcatcgttgaaaaggtggagcgcataggcaccattccattc

SEQ ID NO: 104894 - DNA, 1411 bp, Zea Mays
cgcgtactgatcgcaatcgaagaagggccgcgtcgtaaaagctcccacgcaagtacacaacacagtacttcagaaacaggacgcgggctcgacgacacaccgatcaggcgcgccgaagcagcgtccgcagccgacggtcatctcccggcgccggtcgcggccatgtcgaagaagaaggcggtcacgacgatgacgctcaaagacttccacggcggctccatcccctccgagctcccgctcccctccgcccccggcgtcaccccgcgccccgcggatcgcaccgtcgcctccgcatcccccgtcgcagccgcggtcgcacggccacgcgtaccggtcgcttcgcctgccgccgctgcggcggcagccgcgatgccttccttcctcacaaacccgtcccgaatcggccgtcacttcgacgaggacgagcgcacccccttcgagcccaccacgccacgccgtcccgcgccgtccccaacgtcgttcgcacccgctcccgtggtggcgcccaccagatcaggtccggggaacgcatggggcccgaagaaggaggcctcttcggcgccttcccctgtgggtcatgctcctgcctccgccggcgaccagatctggtccgcgacacgcatcgcccaggcgagcgcagtggagaaggtaatctccggaagatggcacccgccgaagcccacgtctccgccggcgccggtgtcagttccggtgttggagactcccgtggccccgccagagattgagaggcctaggtccgttggggtgagagagctggatagtggggtggagaggggcgccgcaccagtgagacccgcgtcacatgaaggaaggattggggaagggagagctggggaggtgccagagagacccaagttgaagctgcttcctcggtccaagccaattgaggatcctgaacagcgtcctacctatgtcgaagcgaagcaggtgcaccaggtccaggttactgctggcctcatgaaggctgaggataaccatgatctgcaccagaatgcaagggctactgaaacaggagttttgggagcagatgctgagagcagggtagcagagcgaccacggctgaatctgaagcctcgttcctatgtaacaggacagtctgatgaaattgctgtcaaggaaaggccatctctctttggtggtgctcgccccagggaacaagttctcaaagaacgtggagtggatgttttggccagtgatctcgagaagacttcaccagttggcaggttgttatatgttgtgatgcatcatgttaacattgatagatgcatttcagttgtggcagggcataagttctgatttatttattggatcttgatatcaaagggtgttagagcatcttcaagagttcctaaaaagacaattggtaaatcaatgaattctctatgtggtt

SEQ ID NO: 104895 - DNA, 2239 bp, Zea Mays
cgcgtactgatcgcaatcgaagaagggccgcgtcgtaaaagctcccacgcaagtacacaacacagtacttcagaaacaggacgcgggctcgacgacacaccgatcaggcgcgccgaagcagcgtccgcagccgacggtcatctcccggcgccggtcgcggccatgtcgaagaagaaggcggtcacgacgatgacgctcaaagacttccacggcggctccatcccctccgagctcccgctcccctccgcccccggcgtcaccccgcgccccgcggatcgcaccgtcgcctccgcatcccccgtcgcagccgcggtcgcacggccacgcgtaccggtcgcttcgcctgccgccgctgcggcggcagccgcgatgccttccttcctcacaaacccgtcccgaatcggccgtcacttcgacgaggacgagcgcacccccttcgagcccaccacgccacgccgtcccgcgccgtccccaacgtcgttcgcacccgctcccgtggtggcgcccaccagatcaggtccggggaacgcatggggcccgaagaaggaggcctcttcggcgccttcccctgtgggtcatgctcctgcctccgccggcgaccagatctggtccgcgacacgcatcgcccaggcgagcgcagtggagaaggtaatctccggaagatggcacccgccgaagcccacgtctccgccggcgccggtgtcagttccggtgttggagactcccgtggccccgccagagattgagaggcctaggtccgttggggtgagagagctggatagtggggtggagaggggcgccgcaccagtgagacccgcgtcacatgaaggaaggattggggaagggagagctggggaggtgccagagagacccaagttgaagctgcttcctcggtccaagccaattgaggatcctgaacagcgtcctacctatgtcgaagcgaagcaggtgcaccaggtccaggttactgctggcctcatgaaggctgaggataaccatgatctgcaccagaatgcaagggctactgaaacaggagttttgggagcagatgctgagagcagggtagcagagcgaccacggctgaatctgaagcctcgttcctatgtaacaggacagtctgatgaaattgctgtcaaggaaaggccatctctctttggtggtgctcgccccagggaacaagttctcaaagaacgtggagtggatgttttggccagtgatctcgagaagacttcaccagttggcaggcctaaaggcgaatttgcaaaggttgagcagaaggttgaagctatgtccattaacccttctgttgaaagacatgagagttttgcagctggtcatagaggcccaaggaatggtgataagaaagatcataagtggaatactgacagggctgatgcatataggcttactcgtcgagaggacaacaggagggttgctagagatatggagaagccacaggagcaaccacgcccagagcctgagacctggcgtaagccggtggagcctccaaagctagaggttgcaacacctcgttttgggaaagcagcaaccgcgttggagctcgcccaggccttctcaacgtctatgtctgatactgcaccacagagccggttgaccagtgctcccagtccaagagttcctcctagcccaggggctagtagggatcagtctggcttttcaaggctcactgacagcaggacgttacactcgggcccttcccagcgaaagataaatggctactgatcgcttggcacacatattacatgtgccacgatgatagcccaggcatcatggcctcgatgaagcgcccagctgtatcttcatactcaactgtccctgcgtggagaagtccagttgttgctctgtccaatggtggtacgcgagggtctctaatctcattgctggcaagcaaaaggctcctctcccataagtttctggtcagtgatttataactgacggttcgtttcctctcttgataacgagagatgtgaatttgtgaactgtttctgcttatgttcgccagccactatttattgctggggaataattgcagctgcctgcgcaccgtagttggttgcacttgcagacgccgcaaaattgggattttatcgtgctagttttgttttttttttttgccagaagaaactattgatactttgtagtcttgtttactttacggtgatattatgattagaggataggaccttcgttcttggttgtctatttggtacaatcctcg

SEQ ID NO: 104896 - DNA, 3353 bp, Zea Mays
gaggaggcagtggcagtgggagcctgggctgggaggagaaaaatcaggaaccagtcttacatattctccccaaagcttcccccctgcaagctccacagcacggcagagggcgcgagcaccaactttgcgtccattaactgctcagagcctcagagcatcaggtgcgcttcagcgtctagccatttggcggcttgggctttctgcgtgggtgccgcatcctctccctcccacctttgcttccattccatccccatcaccgcagccttttttttttgcctcgcatcatcgccatgttgctttaaagttcaaaacttgcggggttggggaggaacggagtcttaagatgagcggtgtcggtgtcgtccttaaggtggacgtcaacggcgaggagctcttcttcgttgataaggtgcggtgcggtgcggctccctcttagcttgtgttcacgttcttgcttcctcttcctcctccatggatgattatgccattttaaggtctcttcttgctctgctctcaactctggtgtgtttatgtttctctccatacacggcggcggcggcatgatgatgtcgatgcttttggttttggtgctgtactctttcccagattggcagcttgctgcccacagcctagcggccggctctctctatttttggactcactgttgtctagccgcttgtttcttgtggacaccttaccttagccttgggggatgagtgatgcttggcagcttgccatatcatatcctgctggaatcgaaccggcttctgattcttccttcttgtagtttaccttggcatcgtcttccccaattcggtcgcgtccaacccttcctctctggccttattccgacgttttcctcttgatttgtacccccgtcgcaggtttccgagacgtgtgcggcttgtcacactcacaccccgatggttggttccctgccagtctccgactgctagttcctatttcgcctcatggcttgaaaatccttgccttgtctgtcgtcccatcacttctagcctgccgttttgtgggtcaagacatcgatagcatgtttgtcacacgccaccctgatatttccactcattattatgctaacctgcaaccatgcttccacataatttgtgtcgacgaatcactcagattcatcaccctgcacttttttttgttcttgtttctgttcctctggaattttactgaccgcgctgtttctgagaggtggcgggaagggcagagcagcacgtcgcgactctttttctttacacacagtgatgtgaagctgtgtccgtttccccatcgctgtcatcaatgagctcgcaccatgcctggtccttccgttcatattaatggcgtaactgtaccgagcatttcccgcacccgctaacgttcttctccgtcctcccgctccattcctccactgctgggcgttaatggcgtaaacagctgcctatagctcatcttcttggccgttttctatgcgaggtttaatgcccgtttggtcactacgacttccccccaggcccccattgaagaagcttgctacactctgctccgcaaagagagagacctgatcttcttggcgtcggtgtttaatttggattcttgcaagtgggtggcgtctcgcgttcttgcgggcttgtgcttctttaatgcgctgacgcttcttgtcctgaattgccgttgcgttttttggatacgaattgccggacgttcttgcgcgtttctgcggtaggatcaggaggctggtggtcgccggcgcagcgtctgcgaggcggcatccgaggccgagggtaccactgcacggattccccggtggccccgaggcgttcgagctcgtcgcgaggttctgctacgctgacggcggacgcggcggggcggtgaccgcggccaacgcgtgcgcgctgcggtgcgcggcggagttcctggacatggcggcggccgcagacgcgcccgcgcccgaggccgcgtccacggccgcgccgagcctggtgcggatgacggagaaggcgctcgaggagatgccgcactggccgtggcacgccgtcgtggacgccgtgaagcagtgccagcgccgcctgctcccgctcgcggactccaccggcgcgttcgacgcggccgtggccgcgctggtgtcccagatggccgtgcccccgccggccggggacgccacgcccacgggctcctcgccggagagcacggcgttccgcttctcgtgcgacaccaagagcagcggcctaagcctgcgcggcgggtcctgcgtcagccgcacctggtggttcgaggacctcgtcgcgctcgcccccgccacggtggagcgcgtcgcctcggcgctcgtggccaggggcaccgaccacggcgtcgtcgcccggttcctcttctactacctcaagtgccgcatcgccggcgcgagcgccgacgacaagaaggcgatgctggaggcgtcggtcgccgtcatggccagcctcgaccggagcgcggtctccttcaagggcctcttcggcatcctgagggtggccgcgccgctgaggctagccgacgcgtgccaggaccggctcgtcgccatgatcggccgcaagctggaccacgcgacgctcgataacctgctcgtcccagcgccgccagggacggccagcctgtacgacgtgagtctggtgctcaggttcttggccgcgttcctccgcggcggcgccagcgacgagccggcgaagctgaagaaggtgggcgggctcacggacctgtacctggccgaggtcgctccggacccgtcccttcgcccggccaagttcctggatctcgctaccgcgctaccggctccggcgagggactgccacgacgcgctgtatcgcgccatcgacgtttatttccaggttcacgggcgactgacggacgaggagaagatgaacatctgcagggggctcagctacgagaagctatcgccggaatgctgcaagcacatgttgcggaacggcgagttcccgaccacggcggcggtgcaagcgctggcatcgcagcacacggtgttgaagagcgtcgtgctgcgcgaaccgggccaactgaagtccgtgtcgccatcccctaccgcttccacgggaaagcgccgcgacggctatgacgacgacaatggcggcggcgagaacgacgggcaggtgatcctgtacgcgagacggctggacctgtcggtggagaaccagaacctgcggtcgctccttgacgggatgcactggcgggtggtggagctggagaaggtgtgcagccggatgaagacgcggatgagcaagatgaagcaggccaggagaggcggcggcggccgcaccgccaggtcgctccctaggatgtgttcttgatccagctcgccc

SEQ ID NO: 104897 - DNA, 1789 bp, Zea Mays
aagctccacagcacggcagagggcgcgagcaccaactttgcgtccattaactgctcagagcctcagagcatcaggatcaggaggctggtggtcgccggcgcagcgtctgcgaggcggcatccgaggccgagggtaccactgcacggattccccggtggccccgaggcgttcgagctcgtcgcgaggttctgctacgctgacggcggacgcggcggggcggtgaccgcggccaacgcgtgcgcgctgcggtgcgcggcggagttcctggacatggcggcggccgcagacgcgcccgcgcccgaggccgcgtccacggccgcgccgagcctggtgcggatgacggagaaggcgctcgaggagatgccgcactggccgtggcacgccgtcgtggacgccgtgaagcagtgccagcgccgcctgctcccgctcgcggactccaccggcgcgttcgacgcggccgtggccgcgctggtgtcccagatggccgtgcccccgccggccggggacgccacgcccacgggctcctcgccggagagcacggcgttccgcttctcgtgcgacaccaagagcagcggcctaagcctgcgcggcgggtcctgcgtcagccgcacctggtggttcgaggacctcgtcgcgctcgcccccgccacggtggagcgcgtcgcctcggcgctcgtggccaggggcaccgaccacggcgtcgtcgcccggttcctcttctactacctcaagtgccgcatcgccggcgcgagcgccgacgacaagaaggcgatgctggaggcgtcggtcgccgtcatggccagcctcgaccggagcgcggtctccttcaagggcctcttcggcatcctgagggtggccgcgccgctgaggctagccgacgcgtgccaggaccggctcgtcgccatgatcggccgcaagctggaccacgcgacgctcgataacctgctcgtcccagcgccgccagggacggccagcctgtacgacgtgagtctggtgctcaggttcttggccgcgttcctccgcggcggcgccagcgacgagccggcgaagctgaagaaggtgggcgggctcacggacctgtacctggccgaggtcgctccggacccgtcccttcgcccggccaagttcctggatctcgctaccgcgctaccggctccggcgagggactgccacgacgcgctgtatcgcgccatcgacgtttatttccaggttcacgggcgactgacggacgaggagaagatgaacatctgcagggggctcagctacgagaagctatcgccggaatgctgcaagcacatgttgcggaacggcgagttcccgaccacggcggcggtgcaagcgctggcatcgcagcacacggtgttgaagagcgtcgtgctgcgcgaaccgggccaactgaagtccgtgtcgccatcccctaccgcttccacgggaaagcgccgcgacggctatgacgacgacaatggcggcggcgagaacgacgggcaggtgatcctgtacgcgagacggctggacctgtcggtggagaaccagaacctgcggtcgctccttgacgggatgcactggcgggtggtggagctggagaaggtgtgcagccggatgaagacgcggatgagcaagatgaagcaggccaggagaggcggcggcggccgcaccgccaggtcgctccctaggatgtgttcttgatccagctcgccctgccactagcgcttagcggtgatcgcaacactgtaccatagcgacgatgtacatactctagttgctaggaatcaatcaaaagcggatcgca

SEQ ID NO: 104898 - DNA, 941 bp, Zea Mays
ctacgtaacattccattccgacaacgtcctaatttcgacagcatttcacatttacttcgcattaactctgcttagattagacaacaattactactgcgcattaattgccagcatgtcagtgcttcctctgaatcctatatattcctatgtatgcatgttctctgaaccaattgattggccagcaagatagaaatgaccgtttactgctagtatcatattaatgttcatcgtgtcaggttcacgggcgactgacggacgaggagaagatgaacatctgcagggggctcagctacgagaagctatcgccggaatgctgcaagcacatgttgcggaacggcgagttcccgaccacggcggcggtgcaagcgctggcatcgcagcacacggtgttgaagagcgtcgtgctgcgcgaaccgggccaactgaagtccgtgtcgccatcccctaccgcttccacgggaaagcgccgcgacggctatgacgacgacaatggcggcggcgagaacgacgggcaggtgatcctgtacgcgagacggctggacctgtcggtggagaaccagaacctgcggtcgctccttgacgggatgcactggcgggtggtggagctggagaaggtgtgcagccggatgaagacgcggatgagcaagatgaagcaggccaggagaggcggcggcggccgcaccgccaggtcgctccctaggatgtgttcttgatccagctcgccctgccactagcgcttagcggtgatcgcaacactgtaccatagcgacgatgtacatactctagttgctaggaatcaatcaaaagcggatcgcagctgggatctgtccggacatgcgctgcgcggccggccgatccggcgccggcgggagccacagcatccacaagatgcgctagctatggtagcattaataactaactgctcgcaccgatcccaccta

SEQ ID NO: 104899 - DNA, 1596 bp, Zea Mays
ctaattttctcattcattttcttactaggcgagataaatcgtcagtacaaaaacaacttatgataataaaaaaatgaaccatatgtcaataccatttacacagtttcaaatcccattactttctctctcttaaaacctcatcgcccctcgttctcctcccgtccgccccctcctcccaccccccacacctgccctccccgccgccgcggaccccctcccatggcaaagctcccgcgtctacgctgtccgtttgccgtgctcgcgctcgtgtgcatcctcccgctctttgcgccgcggcccgccctgtcctcccgcgccgcgccgaaggacggtgtctccttcgccggcgcaggcaacacgatacatcaactccttaaagatcacggccttcccggaggactgctcccgcgcggcgtggagtcgtacaccctggacgaatcaagcggtctgctgcaggcgcggctgtcggcgccgtgctacgccaagtacgacaacggcgacctggcctacttcgacaacgtggtccgcggcaacctgagcaagggtgcgctccgcggcgtggagggcctctcccaggaggagctcttcgtctggctccccgtcaagggcatactcgtccaggaccaggagcccggggtcatcctgttcgacatcggcttcgcccacaagagcctctcgaggtcgctcttcgaggacccgccggactgcaagccgtcggccgccagcgggatgagcgccgccgccgccgtcgccgccgccaggtggaagggtaggcaaggtgttattactggtctgaggttgaggcgagaggtagcagcagacagcgacgagcatcaggagcagaggtgagggagggagacaatgcaacaccccgagacgacgccgaattccggtttcccgctttgtaaaatcctgtggtgagtgagagagagagagagagtgctgccgcaacaaaaaaaaacaacaactgcaacttcctgcagaggttggaatgtgctacgtatctactaagatatgggtacctttttgcggttctttttttttttatttcttctcccccttttttttggcctgagctcctctcctgttcatgcacctgtgtgatattaagtttgtcagtcaattgttagtataagcaagcacgcagaaaaaaaagaaaaggaaaaaaaggaaaagggttaagctgagaagccaatcgtcggggctgtggtctggctggccgcctatgatagattcttgttctcctcctcagggaggaaattcttctggtgagatgagagtaggttgttgttggtgcatgctccagctcagctgaggagtgagctgggcacagcacatccttcattcatgtggagctttgtgttggctggtggttggttcacttctccttgtggattgatgagtgtatatgtatataataaaaccatacaatatacttatatatgctactgcgattattcttcctgctagattaggttgggctacagggcgaccgctatacatagagagcatttataaagaataatgtaaaaagttgtagttcctcccatgtcttgtggtgtgcaagtcttgatgaagggtatgatctatctgcac

SEQ ID NO: 104900 - DNA, 885 bp, Zea Mays
atatgtcaataccatttacacagtttcaaatcccattactttctctctcttaaaacctcatcgcccctcgttctcctcccgtccgccccctcctcccaccccccacacctgccctccccgccgccgcggaccccctcccatggcaaagctcccgcgtctacgctgtccgtttgccgtgctcgcgctcgtgtgcatcctcccgctctttgcgccgcggcccgccctgtcctcccgcgccgcgccgaaggacggtgtctccttcgccggcgcaggcaacacgatacatcaactccttaaagatcacggccttcccggaggactgctcccgcgcggcgtggagtcgtacaccctggacgaatcaagcggtctgctgcaggcgcggctgtcggcgccgtgctacgccaagtacgacaacggcgacctggcctacttcgacaacgtggtccgcggcaacctgagcaagggtgcgctccgcggcgtggagggcctctcccaggaggagctcttcgtctggctccccgtcaagggcatactcgtccaggaccaggagcccggggtcatcctgttcgacatcggcttcgcccacaagagcctctcgaggtcgctcttcgaggacccgccggactgcaagccgtcggccgccagcgggatgagcgccgccgccgccgtcgccgccgccaggtggaagggtaggcaaggtgagattccgacacgccactgtttcagatttgttcgggggacgtggttcccttctcgatttgttaggaacctcttttttttctctcgcttggccggtaggtagatagatggtctgtttcttcgtcgcgcttttccagacgtctactccatggaattctttagctaccccaagattccgtccactcg

SEQ ID NO: 104901 - DNA, 520 bp, Zea Mays
acactgcagatctatcaagtatcccagaaagcaatggcaggaacaaacaaggtcgtgctctgctcctgcctcttgatgctgatggccttgtcatcaggttcagcaagagagctgtcgccactgctggagggagacgtggaccccggagacaccaagtcgcagtggaaatgcttccggctgtgggacaactactgcgtgaagaacaagagatgcgtcgacgagtgcctgggcgtcgaggggaagggctacacccacggacactgcgagctgtggacgtgcgtctgttgcaagaagaatggcgaggatgaaatactagctcctggcgggcagctgggcggccctgagcagcgagcagaatcacccatcagtgtcaaacaaacgaagcgttaggggggaggcggggagctcaaaaggtttccacatttcgctgtattgttgtgcgtttgcgcttggctaaactttttgaggctacagatcgattgagagaataagacgtcataagtacgcagtttttggttca

SEQ ID NO: 104902 - DNA, 1450 bp, Zea Mays
gacggccataagctggggcctgggggggccaagaacccgcaccagtgactgtcatcagtccacagccagcgtaactaaccaagcgcctccaaccaactcgccccggggaacaaggaccatcgccacccccagttgcgttcgagattcctcagccgccccgccctttataagccaccgcaaccgcgaaccccggacgcaaccgcagcagggcgttgggcgagtgagtgagtcagtgaggctgggatagcagcagcagtgcgccgcactcaacttctcttcttgccgtgcggaatgccgcgccggcggaggacgcgcagcagcgaggagctcaaggcggaggacttcgtcgactcggtgctcaacttcggcggcgaggaggatggggaagaggagaagcaggaggccggcggggacggccagccggcggcggagttcaagtccaagaacctggaggccgagcggaagcggcgcggcaagctcaaccgcaacatcctcgcgctcagggccgtggtgccgaacatcaccaagatgagcaaggagtccaccctctcggacgctatcgacctcatcaagaggctccagaaccaggtccttgagctgcagcgccagctcgccgacccgcccggagaggcctgggagaagcagggcagcgcgtcgtgctctgagtccttcactgccacggaaaacatgccgtatcagggtcagatcgagctggttcctctggggccatgcaagtaccacctcaggatcttctgcaagaaggccggcgtcttcaccaaggtgctggaagcactctgcagctacaacgcgcaggtcaccagcctgaacacgataacgttctacggctacgctgagagcgtcttcaccatcgaggtgaaaggcgagcaggatgttgtgatggtggagctaaggagcctcttatccaacatcgtggaggtcccaagcaactgacgagattcccgattgagctcacatgtttcagtgcagaaacctcactttcgacgaagaactctagcggtggagtgtttgtgcaggcagtgtgacaagagtacatggtcaaactggtttactgacggataaaggctggattttgtgttgaacgcatagcacgatgggcatcgaggaatgaacttgtgattgtggacaaattcacagttcctctccattgcgttcgcttccgttagacctggattctgtttgcaatgttagcaccatgatgatatctactgacccatgtaggcagcaagggtcgatgggatgctgtgctgtgctgtgctgtcctgatttcagctctcatagatagaaaaagcaaggcagtcgtgaaaaaactgtcatgctttgttaaaatgattcgaagtttagatcagtctgttacacaaggatctacttttacggacccatatacttcacctgaattttgcgatgactaaaatcctgcaaaaacaattta

SEQ ID NO: 104903 - DNA, 2112 bp, Zea Mays
gacggccataagctggggcctgggggggccaagaacccgcaccagtgactgtcatcagtccacagccagcgtaactaaccaagcgcctccaaccaactcgccccggggaacaaggaccatcgccacccccagttgcgttcgagattcctcagccgccccgccctttataagccaccgcaaccgcgaaccccggacgcaaccgcagcagggcgttgggcgagtgagtgagtcagtgaggctgggatagcagcagcagtgcgccgcactcaacttctcttcttgccgtgcggaatgccgcgccggcggaggacgcgcagcagcgaggagctcaaggcggaggacttcgtcgactcggtgctcaacttcggcggcgaggaggatggggaagaggagaagcaggaggccggcggggacggccagccggcggcggagttcaagtccaagaacctggaggccgagcggaagcggcgcggcaagctcaaccgcaacatcctcgcgctcagggccgtggtgccgaacatcaccaagatgagcaaggagtccaccctctcggacgctatcgacctcatcaagaggctccagaaccaggtccttgagctgcagcgccagctcgccgacccgcccggagaggcctgggagaagcagggcagcgcgtcgtgctctgagtccttcactgccacggaaaacatgccgtatcagggtcagatcgagctggttcctctggggccatgcaagtaccacctcaggatcttctgcaagaaggccggcgtcttcaccaaggtgctggaagcactctgcagctacaacgcgcaggtcaccagcctgaacacgataacgttctacggctacgctgagagcgtcttcaccatcgaggtgaaaggcgagcaggatgttgtgatggtggagctaaggagcctcttatccaacatcgtggagggccggcacgcggacggtgcttggactgcccttgtcatggatcgcgccgagctcaccacggagcaggttctcaagcgagatattccatgggagcattacatgtcaactaagcttatctccggaacgtgccttcagcttttacggcgatatgaccacaaaccggagagccagcgagctcctttacttgaggaggtcttactttactttgactatagtgcacgaccaaagcttcggaatggcacacttccaaatggagatgcttcgaattcgaagagcaagcttacttcaacacatgatgtattgagaggtttggtcaattggctctgttcacagctgaggaatcctacacacccgagctgctctattcctacttccatccattgcctctccacttcgctaagagaaccatatgttaggacattatttgttcaagctgatggcatcaagctgctcattccattaatttccccagctgccacacaacagtcaattcagctcctttatgaaacttgcctctgcatctggcttttatcattttatgatgctgcagttgattatttgtccaccacaagagttatgccaagacttgttgaggttgtcaagggatctactaaagagaaggtggtcagagttgctgtgttgtctttctgtaatttgctggcaaagggtgcatttgctgcccagatgatcgatcttggattgccgcaaatagtacaaaacttgaaagctcaagcatggactgatgaggatctgttagatgctttgaatcaactagaggtgggactcaaagaaaacctcaagaagttgagttcctttgataagtacaaacagcaagttcttcttggtcatcttgactggtctccaatgcacaaagatccaagtttctggcgtgagaacattaacaattttgaagagaatgatttccagattctacgagttctcatgacaatcattgacacatcaagtgacaccaccgctcttgccgtggcctgctacgacctctcacagttcctccagtaccatccatctggccgaatcgtggtggcagacctcaaggccaaggaccgagtcatgaagctcatgaatcatgaaaacactgaagtgcagaaaaatgcgctgctctgtgtgcagaggctcttccttggcgatttagatccagagaactcctggccattt

SEQ ID NO: 104904 - DNA, 1911 bp, Zea Mays
cgtggccacgtaaacgtgggccccatccacaccggtgcggactgcggagggactcggccacgggccgatcgtctcgcgctcatctctaatccgccccctgtccctctcctctcagatcgcttccttgttctcgcctcgtcttccccgatcgtcgccgggagcctcccgatccttcttccaccttgcacggtcgtgccagggccggcacgcggacggtgcttggactgcccttgtcatggatcgcgccgagctcaccacggagcaggttctcaagcgagatattccatgggagcattacatgtcaactaagcttatctccggaacgtgccttcagcttttacggcgatatgaccacaaaccggagagccagcgagctcctttacttgaggaggatggaccagcatatgtccgagttttcctgaatatcctgtggagcatctccaaggaagagactgttgaatacgtgcttgccctcattgatgaaatgcttgcgacaaatcctaaacgtgcagcactgttttacgatcaatctctgtctggtgaagatatttatgagcctttcttaaggttgttatggaaaggcaactggtttgtacaagaaaaaagttgtaagatattgactgctataatcagtgcacgaccaaagcttcggaatggcacacttccaaatggagatgcttcgaattcgaagagcaagcttacttcaacacatgatgtattgagaggtttggtcaattggctctgttcacagctgaggaatcctacacacccgagctgctctattcctacttccatccattgcctctccacttcgctaagagaaccatatgttaggacattatttgttcaagctgatggcatcaagctgctcattccattaatttccccagctgccacacaacagtcaattcagctcctttatgaaacttgcctctgcatctggcttttatcattttatgatgctgcagttgattatttgtccaccacaagagttatgccaagacttgttgaggttgtcaagggatctactaaagagaaggtggtcagagttgctgtgttgtctttctgtaatttgctggcaaagggtgcatttgctgcccagatgatcgatcttggattgccgcaaatagtacaaaacttgaaagctcaagcatggactgatgaggatctgttagatgctttgaatcaactagaggtgggactcaaagaaaacctcaagaagttgagttcctttgataagtacaaacagcaagttcttcttggtcatcttgactggtctccaatgcacaaagatccaagtttctggcgtgagaacattaacaattttgaagagaatgatttccagattctacgagttctcatgacaatcattgacacatcaagtgacaccaccgctcttgccgtggcctgctacgacctctcacagttcctccagtaccatccatctggccgaatcgtggtggcagacctcaaggccaaggaccgagtcatgaagctcatgaatcatgaaaacactgaagtgcagaaaaatgcgctgctctgtgtgcagaggctcttccttggcgcaaagtatgccagttttctgcgggcttgagagaaaccgagtcttttttgtatttagatccagagaactcctggccatttttaaaaatggctgttaagaaaaccttgaaaattcttgtccattatatcctattgttatttgatttctgagaccgatgtataataaataattagagccataccatgctcgatgtaataaagtgtccatgggcttgttgattcatttatgtaaattctgatctccaactttagcaatccttttttttctgtacacctgacttgtgtgaatatggacgtacatgtttgcaattgttccacaggtttttatgttagttcattctcctgaaa

SEQ ID NO: 104905 - DNA, 1538 bp, Zea Mays
gcctggcccattgcaatctcgagaagcaactccgtcgcgccgcactcaatcgcctccgattctgcggagactcagcatcggaatggcggcggcggctcgtgccgggttccggcggctcttctccgtctcggccttcgctgcaccgcctcctcctgccgcgcgccccgcggcgaacccttgcaacaacctcttcgtctcaggcaactaacctcgcctccatttcccccctttttgcatgttttgcaagagaaaaccctcgccttgattcttatgctgcgcgctttattagttgcttgttgtgctagcatgcggtggatgtttgcggtaggattaggaatgggggaagttgtttacttttgtctgagatctgttagccagtagttacttccaactttgatatacctgatgaactaaactgatactagtcgtagtcgaatagtgttatcttgcgaactgaatcgatttgctctatctgaacccactctgaacgagagaagtactgcacaggcgcatacaaacttattgtcgaatgtcgatgtcaactacttgaccttttataagcacacgtatatgttaaacttgaaactgagtctttttgtatttagacctagagaactcctggtcatttttcaaaatggctgttaagaaaaccttgaatttttttgtccattatatcctattgttatttgatttctgaaactggtgtataataaataatcagagccataccatgctcgatgtaatgaagtgttcatgggcttgttgattcatttatgcaaattttgttattccattaatattctactacttgacaacattgcctgacttgtgtgaatatggacgttacatgtttgcaattgttcctcaggtttttatgttaattcattctcttctggaacatcgtgcgcctgaaatattttgatttttccttgttgtgctacaccatccacatctttcgatttaacctgtattgtttttcatcataacgctcgatgttatttgctttttataaataacatatgagctttcacatatttcaaaaaacatatattccattgtcttcttgtcttgaaatatgagtgatggaagagtatcaggtatgaagtttgctgcaaagctataatcagagaaggcgatggtacaattgaagtcgtccttgttgcaagaaacgccatcctagaggatttgaaggcagctaaataccaaaattaaatgtgatgcatgctgccacttgtgactaatatatgttttgcaggtacgtcataataggaaaatgtattcatcagctgcaccacaaatttcataccaatgattagagagaagtgggataatggtcatcatctgccacctactggtttcagacttccaacctaggctggttttagactttcctttccaacctatatccatagtagctattgaccggtcgatatcgatcactgttagtccgctccacgacacaatctttacactacaaccactttattgttatatcattttttacatacttttatgtgacataaaacatgaaattttat

SEQ ID NO: 104906 - DNA, 792 bp, Zea Mays
gcctggcccattgcaatctcgagaagcaactccgtcgcgccgcactcaatcgcctccgattctgcggagactcagcatcggaatggcggcggcggctcgtgccgggttccggcggctcttctccgtctcggccttcgctgcaccgcctcctcctgccgcgcgccccgcggcgaacccttgcaacaacctcttcgtctcagggttaaataaacgcacaacgtccgagggacttaaggaagcattttctaaatttggtcaggttattgaagcaagagtaatcactgataggatatctggatactccagaggatttggctttgtcaaatatgcgactgtacaagaagctggtgaggccataaaaggcatggatggaaagttccttgacagttgggttattttcgctgagacgccacacaaccatcacaacaaggagcaccagcttatgattgaagttgccatacacggtcgatgacatacactgtatttttctgccgagtgtaatagtggatgttgattgccggccaaacatttgcagagagaatgtagcttgatgtgctccttgaacttcctttgttgtggttaacattggacttactgcaacctcatgcgcgtggcccataactttcgtctttcatttacaggtcactacattttttttgaccactgtgttggaaggaggttacactgcagcagaaatgcaatgtgttggaaggaggcccacctcctccttcggccaaaaacagtataaaataaatatgtcgaattatacaagaaaaaaaattgacccctcaa

SEQ ID NO: 104907 - DNA, 1190 bp, Zea Mays
aaatcagcctgttcggtcaccaaatcacttagaaaatcacgttgcgagtcgcccggtcgcccgtcgtggtggttaactggtctgggactctgggagtcatctccacgctccgggttcgcgcccgactcccctacaaattcgctccaccggcggctccggctgcaaaccgcgactgactgctgaccccgagcggcaccagcgcgcccgccccgccatggctatccccaacgcctttgactcccccctcgcggccaggtccgccgtcggcgcggcgctggcggccgtcatcgccgtccgcgcggtccgccgccgctccctagacgcctcgggcggggtcgccggcttcgtcgtcatggcggtccacatctcatgcggctacaggtacggggcgctgctgctggccttcttcttctcatcgtccaaggtaaccaagatcggggaggaccacaagcgccgcatcgaggagaacttcaaggagggcgggcagcgcaactggatccaagttctagcaaatagcacaattgccactgtactggttgtgatatttgcactaatgactggagggcaagatcagtgcatggactcaaatggttcaaagcttataactggcatcataggtggtatcattggccactactgttgctgcaatggagatacttggtcatctgaaatcggtgtgcttagtaatgaacaaccaaggcttattacatcccttaaggaggaggccttatcattggtctcactttcgttgttgttggactgttgactgctgaatgttcttccgatatggccatcaggcagctcctagtactacccatctctgctgcagctggtttgcttgggagtctaattgattcattgctgggagctacacttgaattcagtgggtattgcagtgttcggaagaaggtggtcagcaaaaggggccctacggttacaaagatttctgggatgactatcctggacaacgatgctgttaatgcagtatctattctgctaacaactgtacttacagcttatgtatgcatttgcatcttttaaaaaactagttgggtaaatcttgagttgaaccctatttttcattgagcaatgtattgtgaccttagcctgcacggttcctggaaatggaacagcctgcaacttctctgtgtattggtacaatttgtattatggcacagaaaggccgattc

SEQ ID NO: 104908 - DNA, 1329 bp, Zea Mays
aaatcagcctgttcggtcaccaaatcacttagaaaatcacgttgcgagtcgcccggtcgcccgtcgtggtggttaactggtctgggactctgggagtcatctccacgctccgggttcgcgcccgactcccctacaaattcgctccaccggcggctccggctgcaaaccgcgactgactgctgaccccgagcggcaccagcgcgcccgccccgccatggctatccccaacgcctttgactcccccctcgcggccaggtccgccgtcggcgcggcgctggcggccgtcatcgccgtccgcgcggtccgccgccgctccctagacgcctcgggcggggtcgccggcttcgtcgtcatggcggtccacatctcatgcggctacaggtacggggcgctgctgctggccttcttcttctcatcgtccaaggtaaccaagatcggggaggaccacaagcgccgcatcgaggagaacttcaaggagggcgggcagcgcaactggatccaagttctagcaaatagcacaattgccactgtactggttgtgatatttgcactaatgactggagggcaagatcagtgcatggactcaaatggttcaaagcttataactggcatcataggtggtatcattggccactactgttgctgcaatggagatacttggtcatctgaaatcggtgtgcttagtaatgaacaaccaaggcttattacatcccttaagcctgtcaggaagggtacaaatggtgcagtcaccttacaaggacttcttgctgccacaggaggaggccttatcattggtctcactttcgttgttgttggactgttgactgctgaatgttcttccgatatggccatcaggcagctcctagtactacccatctctgctgcagctggtttgcttgggagtctaattgattcattgctgggagctacacttgaattcagtgggtattgcagtgttcggaagaaggtggtcagcaaaaggggccctacggttacaaagatttctgggatgactatcctggacaacgatgctgttaatgcagtatctattctgctaacaactgtacttacagcttatgtatgcatttgcatcttttaaaaaactagttgggtaaatcttgagttgaaccctatttttcattgagcaatgtattgtgaccttagcctgcacggttcctggaaatggaacagcctgcaacttctctgtgtattggtacaatttgtattatggcacagaaaggccgattcatctccagcttgatactaatggttcactggaaactttttatattcccattgcaaaatgttacgatattggaatcacccttc

SEQ ID NO: 104909 - DNA, 1245 bp, Zea Mays
ctggtctgggactctgggagtcatctccacgctccgggttcgcgcccgactcccctacaaattcgctccaccggcggctccggctgcaaaccgcgactgactgctgaccccgagcggcaccagcgcgcccgccccgccatggctatccccaacgcctttgactcccccctcgcggccaggtccgccgtcggcgcggcgctggcggccgtcatcgccgtccgcgcggtccgccgccgctccctagacgcctcgggcggggtcgccggcttcgtcgtcatggcggtccacatctcatgcggctacaggtacggggcgctgctgctggccttcttcttctcatcgtccaaggtaaccaagatcggggaggaccacaagcgccgcatcgaggagaacttcaaggagggcgggcagcgcaactggatccaagttctagcaaatagcacaattgccactgtactggttgtgatatttgcactaatgactggagggcaagatcagtgcatggactcaaatggttcaaagcttataactggcatcataggtggtatcattggccactactgttgctgcaatggagatacttggtcatctgaaatcggtgtgcttagtaatgaacaaccaaggcttattacatcccttaaggaagggtacaaatggtgcagtcaccttacaaggacttcttgctgccacaggaggaggccttatcattggtctcactttcgttgttgttggactgttgactgctgaatgttcttccgatatggccatcaggcagctcctagtactacccatctctgctgcagctggtttgcttgggagtctaattgattcattgctgggagctacacttgaattcagtgggtattgcagtgttcggaagaaggtggtcagcaaaaggggccctacggttacaaagatttctgggatgactatcctggacaacgatgctgttaatgcagtatctattctgctaacaactgtacttacagcttatgtatgcatttgcatcttttaaaaaactagttgggtaaatcttgagttgaaccctatttttcattgagcaatgtattgtgaccttagcctgcacggttcctggaaatggaacagcctgcaacttctctgtgtattggtacaatttgtattatggcacagaaaggccgattcatctccagcttgatactaatggttcactggaaactttttatattcccattgcaaaatgttacgatattggaatcacccttc

SEQ ID NO: 104910 - DNA, 1240 bp, Zea Mays
gctcaaactcctggaagattatcccgccgccgagctcatcctctgctctccctgctcaccggcggaagctcccagccgtgttccagccgtcggtcttatcccgtcgcaggatatttcctgctctctctcctcggccgctcggttccttcccgtggacgggcctcaaattctgacccgtcgggcccccggcacgacccgcatagatgggtcgggcttgggccactacccgtggacgcgcgctccattcctgcttatctctctcccatgctgcgcgcgcgccctcgccttctccccctgttcgctcgcgtgcaggcgtgctccgctggctcggccgacgcgcgtgctctgtctctccctcagccgtcgcaccctgcttctcgtgcgcgcgcgcctggctagccccagcgctcggcctcctacgcgcgggtctttggcgctccgtcgtcctccctgcgcacgcgtcgcggcctccaactcctcccagccgttcttccctgtgcgcgtgagtctctctgcgcgcagctcgcctcagctccctatttgtccgtggcggccgagatctcccatggcgagctcgcatggatgcccctgcacgcaactgtgccctctgctcgaattcctgttggccgcgccccctatttctccgggccggtcaagttctttctgaccgtgagctctctcgtgtgcgcgttcagccgaggccccatcccttgctgtgacccgtcatgaattttcctgcgcgcgcatgttcccttgcgcacgcgtcgccgtcgaattctcgggtgttttcgcaccgtgaagttcctctagcatcgtggcttctcaattccttctaatcgcgcgcgtgaattttcttcgcccggccttgttgtcggcatcgctcgctgtagctcagcttgctagttcgtcgttgtttcgtcgtctcctcttgatgccagtccccacgtgttgtctccgactggtgttcgcgctgacaaaagcattccaaaaagatgtggagaagcaagcccgtggtcgatgccccaagtgctcggcgaaaggctagaacaagaatcatcgctgtttatgcggagttctacttaatatgaagagaaagtgaagctccgttctatactcgtcagtgagttgatcgaagattttattcggaaactatcaacgttctcgcaaacttttagtcggatttaatggacggtaagtggattcgttattccagtcgactaaatatgatatttattagact

SEQ ID NO: 104911 - DNA, 543 bp, Zea Mays
cagttgggcagcattcctatgaacattgcatcgcaatatcctcagcaacagccaaacaaacctgctgctgcacgtaaggctattgtaaaaattactcatccagacacacatgaagagttgaagcttgataagaggatggactcttctgggcagagagctgcaccgagtattgcacaacaatctcagcctggtgttaattatgctcctcatttgggcttctttcatcagccaccgaattcctacaaccagtcaggaatgtattactctactacagctagtgtgaaccaggttgctactggatcatcgggtcctagatataattatcctgtcactcagtctgcgcaagcgatgacatatatcagtccatctgcagcgcctccggtatctggtcagtcacaatatacagttaagccgcaccctatggggttgctgtctgaaaaatcaggtactcatgtcacaataagtgctccaccagcaaaatctgatccacctaagttacatgctgctggggatgctgcgtcaagtctgaaaaaggataatgaa

SEQ ID NO: 104912 - DNA, 338 bp, Zea Mays
atttcttctgatgctaccaaacatgaattgcctaaggaatgtgcagtggactctactgaacaagcatcagcagtgacttctaacactgatgattcatatgcagcacctctagtaactaatcaggagcagttgctgaaagggtctgcttctgagaaacaagctgtgatgaataactcatccatgaattccgatacttcagcacatttttttgatggcaatgatgtgggcgtgacaacttctggaacttcagagcctactgctcaaacttccaatgatgaaggtgactcagatattagtccagaaacagacctagctgtttataatgtccctctaggttc

SEQ ID NO: 104913 - DNA, 2070 bp, Zea Mays
acctcgcagcggctctgatgctgatagatggcagcaaaagggtctcatgccttctcctggcacacctgtacaagcaatgcacaaagcagagaggaagtatgttattgggaaagtttctgatgaggaagaggcgaaacagaggcagttgaaagctattcttaacaagctgactccacagaacttcgaaaaactttttgaacaagttaaggaagtcaacattgacagtgtagcaacacttactggggtcatttcacagatatttgacaaagctttgatggaaccaactttctgtgaaatgtatgctaatttttgcttccatctggctggtgccttgcctgacttcagtgaagacaatgaaaaaatcacattcaaaagattacttttgaataaatgccaagaggagtttgagaggggtgaaagagaagaagctgaagctgataaaacagaagaggaaggcgagattaaacagaccaaagaagaaagggaggaaaagaggatccgtgctcgaaggcgcatgctgggaaacattaggttaattggagagttgtacaaaaagaggatgttgacggaaaggattatgcatgaatgcattaaaaaattgtttggaaatcatgatgatcctgatgaggagaacattgaagcattatgcaaattgatgagtacaattggtgatatgattgatcatgtaaaggcaaaggagcacatggatgcctattttagtatgatgcagataatgtcaacaaatcagaagttgtcttctcgtgtaaggtttatgttgagagattcaatcgacctcaggagaaataaatggcagcaaaggcgtaaagtcgaaggtcccaagaagattgaggaggttcacagagatgcagcacaagaaagacatgcccagtcgagtaggttgggacgtggtccagctgttagttctgttccaagaagagcacatcctatggattatggccctcgtggaccatctgcatcagcatcctcaagttcccaacaagggagcattcgaggaatgcctccacattcgcgtggttcacaagacatccgacatgacgaaaggcaccagtttgacaatagaactgttcttccgcagcgggtagtcaaagatgaagccatcactcttgggccacaaggtggccttgctaggggtatgtctataagagggcagccaccagtatcaaatactgaaattccttctgttattgaccaccggaggatagtatctagttctaatggctataactctgcggctgattggacatcatcatctggaagagaagattctaattcaagacttccagatcgaacctctggccgaattcctgcttctagtcaatctgctgtaacttcgcagaggcctgccagccaggaaggccgttcaagaagtaaatcatattctgaggatgagttgagagaaaaatctgttttgaccattcgagaatattacagtgcaaaagatgaaaaggaggttgttttgtgtattgaggagctgaatgctccaaatttctatccatttcttgtgtcactttgggtaaatgattcctttgagagaaaagacatggaaagagagttgttggctaaacttctcgtcagcctttgcagtggtcgacataatttgttgagcaagcaacaactcagtgatggcctttcaaatgttcttgcctcattagaagataatctaagtgatgctccaagagccaccgagtaccttggacgacttcttgcaaggtttgtggaggaaagcatattgctcttgcaagaggtaggtaaattgattcaagaaagtggagaagaaccagggtacctaatacaaggcggtattgcggctgacatcctaggtgcagtcctggattccataaaatcagacaaagggaattcattcttggatgagatcaagacaacttcaagtttaaagttggttgatttcagaccacaacatcttaagcgatcaaagttggacgccttcatgtaggcacataagttattgttacctgattaccaatgggtgcggtcaccaagcagtttagtttcttcgcacctaaatacccaacggcctttttgatgtac

SEQ ID NO: 104914 - DNA, 2262 bp, Zea Mays
acctcgcagcggctctgatgctgatagatggcagcaaaagggtctcatgccttctcctggcacacctgtacaagcaatgcacaaagcagagaggaagtatgttattgggaaagtttctgatgaggaagaggcgaaacagaggcagttgaaagctattcttaacaagctgactccacagaacttcgaaaaactttttgaacaagttaaggaagtcaacattgacagtgtagcaacacttactggggtcatttcacagatatttgacaaagctttgatggaaccaactttctgtgaaatgtatgctaatttttgcttccatctggctggtgccttgcctgacttcagtgaagacaatgaaaaaatcacattcaaaagattacttttgaataaatgccaagaggagtttgagaggggtgaaagagaagaagctgaagctgataaaacagaagaggaaggcgagattaaacagaccaaagaagaaagggaggaaaagaggatccgtgctcgaaggcgcatgctgggaaacattaggttaattggagagttgtacaaaaagaggatgttgacggaaaggattatgcatgaatgcattaaaaaattgtttggaaatcatgatgatcctgatgaggagaacattgaagcattatgcaaattgatgagtacaattggtgatatgattgatcatgtaaaggcaaaggagcacatggatgcctattttagtatgatgcagataatgtcaacaaatcagaagttgtcttctcgtgtaaggtttatgttgagagattcaatcgacctcaggagaaataaatggcagcaaaggcgtaaagtcgaaggtcccaagaagattgaggaggttcacagagatgcagcacaagaaagacatgcccagtcgagtaggttgggacgtggtccagctgttagttctgttccaagaagagcacatcctatggattatggccctcgtggaccatctgcatcagcatcctcaagttcccaacaagggagcattcgaggaatgcctccacattcgcgtggttcacaagacatccgacatgacgaaaggcaccagtttgacaatagaactgttcttccgcagcgggtagtcaaagatgaagccatcactcttgggccacaaggtggccttgctaggggtatgtctataagagggcagccaccagtatcaaatactgaaattccttctgttattgaccaccggaggatagtatctagttctaatggctataactctgcggctgattggacatcatcatctggaagagaagattctaattcaagacttccagatcgaacctctggccgaattcctgcttctagtcaatctgctgtaacttcgcagaggcctgccagccaggaaggccgttcaagaagtaaatcatattctgaggatgagttgagagaaaaatctgttttgaccattcgagaatattacagtgcaaaagatgaaaaggaggttgttttgtgtattgaggagctgaatgctccaaatttctatccatttcttgtgtcactttgggtaaatgattcctttgagagaaaagacatggaaagagagttgttggctaaacttctcgtcagcctttgcagtggtcgacataatttgttgagcaagcaacaactcagtgatggcctttcaaatgttcttgcctcattagaagataatctaagtgatgctccaagagccaccgagtaccttggacgacttcttgcaaggtttgtggaggaaagcatattgctcttgcaagaggtaggtaaattgattcaagaaagtggagaagaaccagggtacctaatacaaggcggtattgcggctgacatcctaggtgcagtcctggattccataaaatcagacaaagggaattcattcttggatgagatcaagacaacttcaagtttaaagttggttgatttcagaccacaacatcttaagcgatcaaagttggacgccttcatgtaggcacataagttattgttacctggtaagtctgttctagtccaggtgtaaatattgttcttgggtagttatttgttctgaagacatacacttgatttaaatactctgaactattctgatgacagattaccaatgggtgcggtcaccaagcagtttagtttcttcgcacctaaatacccaacggcctttttgatgtactgtaaaacctctctgctcctacttgctgtccctgaccgtacactatttataagatggaaggcgatcggccacctatgtagcacggacggata

SEQ ID NO: 104915 - DNA, 525 bp, Zea Mays
atggttccagacggcgaacaaacggggtggggaaaaggacccaccgctcctccctcagtatgcgcctgtcgtccattgctcctagacgcatcgcggcgtggatcggctttctctgtgctccgcctcgccagcctcgtaccccgtagccccgactccccatccgccacctccacctcatgggccaccgggtccaccctcgctttccagcttggcaacatctttgaccgtggtgtcgacgagctccgcctcctgcaccccctccgcctcctcgtcccttctgctgaggcccgcgtcggcgcattcctgccgtagtcggcaaccaataggagcgtaaaactggagctagggattgcagatgttgtaggtacatgttatacatgaatggacatgagcaggcactcccactgagggcgcttcttggcttcgtctgcagaggcttgctgataattggcataggatattgttaactccagtgactggtggagtagttgtgggtatgatgcatgaattatttgagatctttga

SEQ ID NO: 104916 - DNA, 336 bp, Zea Mays
atggcggcgcagcagcaggcccccgcgtcgcgctcctcctcccgacctcgtcgtcgagtccctattcccgccggacctcgatatcttcgcaggccgctggaccccgccggggcgggtgaccgatgcagtgcgctctcgatccgtgcagagcgcagttcggcccttaacaagagaacgaagaccatgccgatgcgtggcgtcgatttcaagtgcataagctccggggcgcacatccgcagccacaatctctccctgcagcataagctcgtcaaggctatcaaggatgctgggaacatcaagggtgtcatctcgggacactggaaagactatggttga

SEQ ID NO: 104917 - DNA, 1539 bp, Zea Mays
aaatagagaccacaaaccattctctgcttcctggtaccgctcctggagcctccgcttcgctgcttccagcttcctattgttatccagaccatcatcgtaaaccttcggctttgccaactctagcttggctcctgccgaaggtcgagcgccgggccttgatttctacagcaaggagaatagataatgtgagtcatgaggtcttaaccatggtcaaaaacatgtgcctgagttgcgtgtacttacatctgtctggcttgccataggttttctttcgactgcaagatgctctcgagtttgtttaggtttcatgtcaccaaatggtctctgctgagctgcctttactggtctccccggtccagattcataacttgagggattattagactgcttgttgagcgcaccgcgaggtttggcttgcaaacttgaactttggagggtttgtgggttcgcttgcctcattggtggctcttgccttgccagttctagcctcctgggttgaactttttcgacaactccaggataagagcgaggtggatcttgccttgcaaccgttgaatggctttcaagtctcccaccattgttacccctcttgtttccaagtctcgagtcattactatgtctcaaatctggcaccgtatgcacaacgttaataattttcataatgttaaagctttgaacttacccaaaatattttcaatgcagttgcttctgaatgcattgaataagcaagttaggcatggtctgaatggttttataataaggtaatgtcaaatttactgtattattatggcatgtgtaatgtcgtgaaggatattttgttgcaacactactttggaaagggagtacgtggaggctcggttgaacctgaatcagatattgtgcaggcttgcagaagctttctagatcaacgacagtgcattaatgtgtggcgatttatccaaactatcaacgagagaaaagacttgacagagaacctgaagcagctacagtgcaggacactaatttttgttggtgagaattcccagttccatgctgaagttgtgcacatgactgcaaagcttgataggcgatatagcgctcttgtggaggtacaagcttgtggctcggttgtgacagaggagcaaccacacacaatgctgataccaatggagtactttctcatgggatatggactgtacaggccaagccagataaactttagccctcgtagccctctgaatccgttttgtatatcaccagagctcctctctcctgagagcaagggggttaagctaaagccaaccaagacacgagccaaccttaaagcataggaacaggtgatgagaatgcataggaactgatgtgcatcccttgattttttttttgtgctgaagtgacatagctgttgtttccgtgatgtacataagacaagaggttagtcgggtcaaggttgggtgggtggtcgattccattgatttgtagcctttaaaacagttgtacattgtcacagatttatttgttgaagggagaagaaataataaggggagatgagatgttgcc

SEQ ID NO: 104918 - DNA, 2411 bp, Zea Mays
gcagacatcagccggcgcctgtgttcctctccccgagccggtgcacgcaccacttcccccacttcgatctagcataatccgactccgccgactcgcctgaaccctagccagccgccgccatgccgccgcgacgcggtaggggaaagggtaagggtagggcaaagccaagagcgaagcccaccgagcccgagcccgagtccgatcccgaactagacgaagccgccaagtccgaaatcgaggcgggggacgcggaggctggggaggagtccagcgccgagagcgaggactcgaaggaagacgaatcggagagcgacaccgagtccatggatgcagaggccagcgaagaagctggcgagaacggaacggaggagatggatgcagagcctgaagccaaagccgtcgaggccaaggctgaaacggtggccacggaggcggaggcgaagcctgacgcctcggatgaagaagctggtgagactggctcagaccgcgaagcagatggcaagggtgctgatccgaaggcgaaagcggaggagtccgacggcgaggatgaggagggagccaccgccgtgaccgacggcgatagtgaagaggaagccgctgagacgggcggcgagagcgaagaggatggtggcgactccgacaccgaaggtgatgccgaggaatctcctccatcccctcctcgccgcagtcgccgccgtaagcgagcggccactcccgatgacgaagcagaggagacccctacgccgtcgcgtcgccggcgccgtcggaagtcaggggagcgtggtgactccccgccgccacttcctgaccacctccgctgccgtcgcagcgacgggaagaagtggcgctgctcgggccgtgcactcccaaccgttagcttttgcgagtaccactacgcgagggctaacaagggtaagaagttaccagcggatgaggaggtccttgctgttgttcttcagaggcagaagaacaagaggaagggcaggaggagcatcaatcctccgacgtcccctcaggcagccacgagtgacccccagaccagggatctcccaaatggactgatgacgatctcgccaggtagcagtggacctgcggcattgtcaactcctgtgaagattggtgtagaaattcctgcacccatacagcggtgctatcgttccaagaatgctgagccattgcctgttggtcctgtgaaggttacccagctaatctttaaattgttcaccactgataggttgatctttgttgtttagctttctgttgggtatttgcttattaccgatgtttgcttggtattaggttgttcctcgtgcgatgagtgtgacaaaaacagcaagaacatgtcactgctgtggaatgaagaaggctgcacgtgtggccaattgcaagaactgtgataagaacttctgtaacagctgcattaataaatggtattctaagttgtccaggaaagatataaaggctcgttgtccagcttgccgtggtctctgcaattgtaaaccatgcagccttggtaattccaagggttctacgcctaaggaaccgccaaaagttgaaaggaagatacttagcataaaaatttccaaccatcaattttacaagcttttacctgtaagacttgaccaggaacagctagatgagttggaactggaagctaaaatacaaggaacaaaaatatctaatgtctgcgtccaggttgctgaaactggtcagagtgagtcactctactgtaataactgtaagctctcgatgagccgattattaaggtgctgcccaacatgcccgtttaagctgtgcctaagttgctgtcagaagatacgtgaaggaaacatgtcggacaacacccctgaagataaattcaagaatcggttgattcaacaagagtctgtccatgaggatggcagtattacttgcccttcgattgagctgggtggatgtggtgacgccatgctgaacctaatatattcatctccatctagccagtccgaagagctcagttcagaatgtgagctagatgctgcaggcaatcattctggagtgaaggatgctcaggctcatgggtcacctgtacctgagagtaatggaagattattggctgctgcccaggcagaaacagtgtctgaggaatgaagatgcagctatggttggctcatcgttcaggtgggagcgcaagctgacatgttcactagcatgaagcctgaagatgtgtatgatacggtccggattcgatagagggtaggttgcttaatttagctaggttatcggcctatatggctattgattttaggcctgtgacctggggatatgtttcgtctttgatccgggagtcgttatgttaaacatcgttgtacatatggttatggctttatttttgtcattaccgagaggcgggagctgatggattggttgta

SEQ ID NO: 104919 - DNA, 893 bp, Zea Mays
tttaaaagcttcatctgtgtttctgctactagtagtgaagtcaaagcccgtggaagtcttggcaaagaggctctacgttttcaatttactgccgtcatccgcacaccccttggagccagcagccagccatctgcaagcaacaccacgatcgcattcacagccacgccgtcaatccgccatagtatttgccaaatccccggctatgcaaaataagctactcccttccctgctaacaacaactactacgtacaaaatacatgttatcaacaaagctccaccacgccacgccctccaaccacagccatcctgcatcgggagttcacaagaacgcatcccaccagcggccgaccgccaggctgagcgcgaggccaaggagggcggcggcggtggcgccgcgcggcgtcgcggaggcggcggccgcggaaccgcccgcgctggcggtgcgctcgaactgcagcgagtccacggcaagcggcatgttctcctggtcagggctgcaccgcggcgccgcgccgccgctgccggactccgtcgggcgcgcggtgtagagcatggcgcgcagcacggcggagacggtggggatgtaggccgtcttgttcttggccagcagccacgtgaggcccatcagctggcagtcccgccccagcatccgccgcgcgcggtcgccgccggcgccggagacctcgcggctcacgttccccttcagctgcacaagttggtgggtgcaagtgcaaccgaggaagctgcaggttagcaagtgcagttaatgtggttcatgcagcaggggacgttctcgcgatgcaggcagtgcagtttccactttccaccactgaacgttgcatttggcttgctcgacctctcagtaaatgctccccatgcacaacaaactgttc

SEQ ID NO: 104920 - DNA, 2261 bp, Zea Mays
catcatcccacgccacgcccacgcgaactaaacccgaaaaaacagcaggcggggcagggaaaccagagtaccataccaccgccccgataccgcgacgacccgacacctcgtccacctctccttccgagttccgactcatactggctatccaccgcctgtctctcaggcgatcaagtcgaccagagccggcaaccgatggtggtggtggcggtgggagggggcggcggcggcggtggctgggggacgtgggaggagctggtgctgggcggcgcagtgctccggcacgggagcgccgcgtgggccaccgtcgccgacgagcttcggacccgctctccgtgcaccttctcgcccgaggaatgtgaagcaaaatttgcagagatacagttgcggtactctgcgtgcaatgcttggtatgaagagcttcgtaagcagagagttgctgaactgaaaagggaattggagaagtcagaaaattctattggatccctccaatctgtgattcaaagcctcagcaatagcaaacacgttgatgggagttctgaatgccgcaccagtcatactgaatcatgtccacattctgaaaatacagcagatactaattcctcaggtaaagaaacgtccagggatagatcatcagctgctagtttcacagaggaagcaagcaacagtcagaaatctcagaaagtgcagcagtgtgatactgattcaattcaagttatcaatccatcaccagacgagtcatatccccaggcccaagttgaaaaggtcggtcccaaagatggcttgctttggggttctagaaaacaaagagtaatgagagctagaaggacacttctgaaagctggtgatagtagtggggatggtgagcctacatctacagcatgcatacagggggagggtttgtccaaaggctgcatgaagaacttcaaaactcaaaacttagaatcagttgttgtgaagaagggtgtgaaaactccaaaggtagaatctgatgtgatgaataaggatttgaaaaccctaaatgtaggatctggtataatgaagaagggcttgaaagctcccaaaacagaatctgatatgatgaagaagggcgtgagaacttctaaagcagagtctgatggtatgaagaaggggatgaaaataccgaaagtagaacctgatgttatggactggaaaactcccaaagcaggatctgatgttacgaagaagggcttgagatctccaaaggcagaatgttgccagcctgtgattgagagcgttaaactaaagctggcagagattttgaatactatatcaactcaagatgactgcaaaatgttgcaacaccaacttgatacccagaggaaaagagctagatataagaagatgattcgccggcatatggacttccgaatgcttcactctaagatcaagagtggcgcaatctctggcaccaaggagcttttgagagatatacttattttcatcaataatgtaataaccttctatccgaagactacattagagcacatggctgcggttgagcttcgtgactttgcatgcaaaactgtgaagcagagtgcaagcttgttcttgaaaagccatcgagagaccagaacagctggtgcccctgtaataaagaagaatgctcgagccctgcatttttcaagaacaagcttgcactctggggatgcaagggcaagcaaggtttcttcaagggatgctgctgccaaggaaggggatggcaagagaccttgcagtgatgagctggctaatcaaaagactacaaagagaaatgagccagccaagaagaggggtgtgggtcggcctccaaagagtgggcagaggattgctggggcacaggaaaatagccccatcaaaggcaggaaaagtagcgctggggcacaggtagatagccccagcaaaggcaggaagaggagtgtggaagcacatgatgatagctccagcaaagggggcaagaggagccggcggtgaagctaccatcagctcaatgccggtgaaactgtgtacagcttaaccatatatcataggctgttcccttccggtttgtttacctgacaaaaaaaagttattgtcccagtattcaaactgatgtaacaggaagggttagttgtttctgatgttgttttgtaaggagtaaggacaattagaagggaaccctcatttttatattgagattatccgagttaggctatacatatctgaccatgtaatgcttatagtagtttaagttgttataccatgtgaactgatgcttgaac

SEQ ID NO: 104921 - DNA, 799 bp, Zea Mays
gaggaaaagagctagatataagaagatgattcgccggcatatggacttccgaatgcttcactctaagatcaagagtggcgcaatctctggcaccaaggagcttttgagagatatacttattttcatcaataatgtaataaccttctatccgaagactacattagagcacatggctgcggttgagcttcgtgactttgcactctggggatgcaagggcaagcaaggtttcttcaagggatgctgctgccaaggaaggggatggcaagagaccttgcagtgatgagctggctaatcaaaagactacaaagagaaatgagccagccaagaagaggggtgtgggtcggcctccaaagagtgggcagaggattgctggggcacaggaaaatagccccatcaaaggcaggaaaagtagcgctggggcacaggtagatagccccagcaaaggcaggaagaggagtgtggaagcacatgatgatagctccagcaaagggggcaagaggagccggcggtgaagctaccatcagctcaatgccggtgaaactgtgtacagcttaaccatatatcataggctgttcccttccggtttgtttacctgacaaaaaaaagttattgtcccagtattcaaactgatgtaacaggaagggttagttgtttctgatgttgttttgtaaggagtaaggacaattagaagggaaccctcatttttatattgagattatccgagttaggctatacatatctgaccatgtaatgcttatagtagtttaagttgttataccatgtgaactgatgcttgaac

SEQ ID NO: 104922 - DNA, 1878 bp, Zea Mays
gcgtggggcgcgcgcgcgagcgagctgtgagcatcgccgttcctctcgcgctctcggctgtctcgctccttcccgcggtcgcctccgcccgtgcccgtgcccgtgccccgtcccaactcccacccaacatttcccaatccctccgggctccggcaccgcgagatgtttcgttagccattcccacgacacaatcagcaccaccggtgccctcgctgccaaggcgcccgctcgtgtgacgagtggcgctccaccaccgcccattgcgcgctcagctccgaggcctcccgctcgccgcggcatcatctccggctcctcccgccgccgtgggcgtcatgaaatgaacctgacttgcttgagttgcttcttgacaccataagaaggcgatccatctgtttccagttgcacacagaaagctagtgccttgaaagataagaatggtaaggggggcggtaggtgtcctaagatgaaactgcggttgcatctgttggtcctgtgcgtgatcatcatattcctggtgtacaacatggctagctttcaacataagcagacatcgtcggaagcaaaatcccatccatttgatacagtgacggtctctgacagagatgctgttaagttgccccaaaaagctgaggttaggattggttatttaccccatggtatagtggagtctaactccgacatgaagttgaaaccgttgtggttgacaacaagtgcgcagtcaaagaagtctaaacaaaaagatcacttcttgattgctattgctgccggtataaatcaaaagaaaagtgtggacgctataatgaagaagaaaattttacagctgtattgttccattacgacgggaatgtcaatgggtggaatgatctaccatggagcaaaagtgtgatacatatagctgcttctaaccagactaaatggtggtttgcaaagaggttcctccatcctgctgttgtgtctatgtaccagtacatctttctttgggatgaagacctggaagtagataactttaatccgagaaggtacttaaatatagttagatcagaaggactggagatatcacaaccaggtcttgattctaagctttctgaaattcatcaccgaataactgttcgtaaaaatacagggacctttcatagaagagttagtcgggctaacaaacgttgtttaagagaaggaccgccttgttctggatgggtcgaaggcatggcaccggttttctcaaagtacgcttggcaatgtgtgtggcaccttatacagaatgatcttatacatggatggggcatcgattacaagtttgggtattgtgctcagggtgacaggacaaagaacatcggcgtagttgatagtgaatttatagttcaccgaggagtgcagacattaggaggttctacaataacaaaggatggtattcgtggcaaaaatgcccagtcactccgccagaaagcagctcaagtccaaaaatcgagagggagggatcctggccttgatatgcgaacaaagatccggagaaaatcacgatcggagcttcgtgatttccagaagcgctgggcccgggctgcaagggaagacagaacatgggttgatccgtttgcccactcccgaagaaagcggaggaatagaaacccacagtagataagcataatcatcattgtttaagcttgcacagaattcgtctgcacctaccatctagggtgtgtttgatatagctccagagcagaattctaaggaggagctagcaagagtctactaaacactcgtaactctagagttgcaaactccataaagttttcagagttgtagtacatatagttggagtacttcttttgctgctctgaaaacttaaaaaaacaacctagacgtggagtttggagttattta

SEQ ID NO: 104923 - DNA, 217 bp, Zea Mays
attccaacatttctcagtatgtctcacagccatagcgatgaagactcatactcgagtgatagtgaggaggaaacacttatgcttgtcaatcttcttgtcctaaacatagaggcgagacgccacctccaaagacggtcccgtttgcctcgacgggttattcatagagatcattttcgtggagaaaatcttatccatcatcactacttcgccgagaacc

SEQ ID NO: 104924 - DNA, 178 bp, Zea Mays
atggcagccgtggacgctgtggccgtggctttggtaacaagcagagcgctggcactcccagtgcaggaaagaagaccacttttggtgatgattgatgatgaatgtggaggatgcggcaaaaggaggaatgatctgctgatctaatgaaactgagtttttttgggtcttgtgttgtggt

SEQ ID NO: 104925 - DNA, 4552 bp, Zea Mays
gagcccagcaggagactgcaggaggttccaagccagttcaaaccggattgcagctttctggctggaaatagacggcgaccaccgcctcaacggcgacggcagcgacggccaccattcccttccaatctgccgcacaacatggcgtcgtgcgtggccgcgatggcgctggtcggcgcccgacctccgtctcacgccgctggccctgcggcggccagctgcagtggccgcgcgcagcttagcttccaccgcctcggcgctcgcgctcgcgctcgggtcatccgcgcctaccgccgccgcccacaccatccctcttatgtgcctgaggatggggtcgttctggagtggctgaggagcgcggccgccgcgctcgccatagtaacccagatttccgtctcgctgccggcgaacgcggtgctttactcgcctgacactaaggtgccgaggaccggggagctggccctgaggagggcgatccccgctaacccgaacatgaaggccatacaggaatcgctggaggatatttcgtacttgttgaggataccgcagaggaagccgtacggttccatggagggcgatgtgaagaagtccatgaaaatagcaatggacaacaaggaggcaatcctggcaagcattcctgaagagcataaggaggagggtgccaagctatatacctcattactcgaagagaagggtggtttgcagactctcttgaaatatattaaggagaataaccctgacaaactttctatagcacttgcttcatcacttgacactgttgctgaattggagctgttacaggctcctggtctgtcctttctcctgcctcaacagtatatagaatatccaaggctgacaggaagaggagttgttgaattcacagttgaaaaaggtgatggttcaacattctttccaactggtggtggtgaaccgaaaagtgttgctacaattcaggtcgttattgatgggtactctgccccactgactgctggaaactttgcaaaattggtcttggatggggtatatgacggggtaacacttaaatgtgcaagccaagcaattattgctgataacgagactggaaaaaacgggtacactgttccattagaggtcctgccagcaggacaattcgaaccattgtacagaactccactaagcattcaggatggagaattgccagtcctgcccatgtcggtgtatggtgctgttgccatggcacatagtgtggattcagatgaatacaactcaccaactcagttctttttctatctttatgacaagagaaactctggcttaggaggaatatcgttcgacgaggggcaattttcagttttcgggtataccactgatgggagagatgttctgtcacagattaaggccggagataaaattcggtctgccaagcttgtacagggcagagaacgccttgtattgccatccatagcccccgaagagagctgatattatcgatcccaagcatttgcagcattcttttacactgatgaggcaaccaacattttgtatatccaagccactaaacctgaccgaacagtttacagtcaaatactgagtatagcatatataacaatcgttgtacatgaaacatttttcttgtgtatccatgcatccgaatgcttattcgacaggtatgttacggtgagttgcctgggctgtgcatctctcattgagccaggccaggatgtccccacggacacgctcgatgttctcgtccggttccccaaatagcaaggagtggagcatcccgtcgtatatcttgatagtcttatccttgctggcggcggcggcgtacagggcgcggctgacttccgggtcggtaacctcgtcggtgctgccgtgcacgacaaggaacgggatgctgacttcgccgaggcgcttggccagctcgtcggtggcacgcaacagctcgacgacggtgccgagcctgggacggccgttgtagcgcacagggttgcgcgctgcaacgatgcgcttggcgggcaccttgacggacttctcgatgaggtcggcggtgggcacgatggccgccgtgggcgcgaagcgcgcgacgaaggtgagaatctccggcagcggccacggcgggcggatccggtcggagatcctgcacatgggagcgacgaggaccgcccccgcccactcctccggccgtgtgcggaggtggatgagcaggcagatggccccgcccatggactccccgaacaggaagcagggcaggcccgcgtgctcctccctcgccctgacggcgcggaagaaggcgaggaggtcagcgacggcggcgtcgaggtcgggcacgaaggcgcggaggccgtgggagcggccgtggcccgggaggtcggccgcgaagcaggcgaacccggaccgcgcgaggaagaccgccgtggactggaacgtccagctgatgtcgttgccgtagccgtggaccatgaacacgagcgccctgggccgctcgggcgcgcggggcctccacgcgcgcgtgaagagccgccgggcgcccgcgtcgggcgtggtgaagtaggaggactcgccctccgtgccgtgcgccgagtagaactccgcctccgtggccgggtgctcgccccagaagtgaacggccggcgccagcgcctccccgtccgccggcatagtggtggggatcggagtttggtcccggacgttggcgtcgggtggtgtggtgtggtgcgcgttgtgtgtggatgtaaagggaactggtggccgctggccggcgagcgggggagtcgctgctatgctggatgcttgccagttgcgtcgcggcaggggcagccgggcagggctgcttgggggacgtttcgatgcgggaggggaaatcactggattcgtttcgggttggtgccttggtgggacggctcttgtgccgcagatccaccggctcgtccccgcgccggtgcaatgcaaaattcacgtggtatgctacttccttcatagttggcacacgcggggaacaataactagtaagcgcaggcaggtgctaagggcatgtaaaacctagacactgttgcacggtactccaaatataagacataactaaaacacaacataatataatggtcatgtctaaaacatatgtcttatcatattcattatacaaatcagagcattcaataaattaaagtgatcaatcaaataatctactgtctcgaacatagagctaagacactgtgtcttcgtcaagatacatgtcttgagtctttttacatttaccccctagacatactctaagacacaacttaaaacactcactgtacatgccataacggtcctgtagcatcccaaatctatccatgtgtttacaaaaaaaattacgaatagatatagaactaaatgttcttattttctcacattctgaataaatcaatacctagagttattttaaatcataaaaaaatttaagttttaagtttatagaaaagagcgtcgaggtttatgggactaaattagtagcattggacacatcataatgtatttttaacaatatgatcattcagtgtcataaatattgtttctctataaattcggttcaacaatcaaattttttgttgaagttattttagatattattttagatagctttaggagttagtttatttaggaacgaaggaggtacattttagtatcgacccagtcatggtaacatccgttctcgaatatttgtcgtctgcttattaatttttaaattaaactacagcaaataaaaaaacagagtgggtataatcaaacatgtagaggtagtacaagctacatcatttccataaacatgctctggacaaaaatgccagcgttggtggtaattacccggacggtgtaggacaacgccatacccgcagtggcgcgcaccttttttttttggctcgccctacaggtggtcctgtgggtcggcactcggcaggcacatctacctctcgtatctgacccgatctcctccggccatggggcctaagctcgccctttattcatcttcaacccccttttcacgcaaagaaattaaagctgaacaagaataaaggtcaccagaagggcagaaccggacggagatcagtacaggtgcgggtactttgcccctaaaatacactcgaggttctttctatctcgatcgatatgaaaattaaaatattcgttttcattttacactatctatctacagctacatcatctcttaattactattagctacattatatcactaaattttaatctcttagcatgggatatccatgtcatatctctacttaaattttatttaaaaaatattgtaatttcctgcagcaatgtgtggagtatcttcaatctaacaggagtacggtgctgcttacctgaacttcgtgcgtgctgatgctacccagcatggttttggtccaccgccgcagtgcttcacgtcacgttagagaagagaagtatggcaatgcacagttgacacagcgatagatgatgatagctatgtgtccagtccagcaaattttatttgtaacagtagtgaccgagaaacaagcagctgctaccaaccgggccatgcaaagttctg

SEQ ID NO: 104926 - DNA, 2966 bp, Zea Mays
aggagactgcaggaggttccaagccagttcaaaccggattgcagctttctggctggaaatagacggcgaccaccgcctcaacggcgacggcagcgacggccaccattcccttccaatctgccgcacaacatggcgtcgtgcgtggccgcgatggcgctggtcggcgcccgacctccgtctcacgccgctggccctgcggcggccagctgcagtggccgcgcgcagcttagcttccaccgcctcggcgctcgcgctcgcgctcgggtcatccgcgcctaccgccgccgcccacaccatccctcttatgtgcctgaggatggggtcgttctggagtggctgaggagcgcggccgccgcgctcgccatagtaacccagatttccgtctcgctgccggcgaacgcggtgctttactcgcctgacactaaggtgccgaggaccggggagctggccctgaggagggcgatccccgctaacccgaacatgaaggccatacaggaatcgctggaggatatttcgtacttgttgaggataccgcagaggaagccgtacggttccatggagggcgatgtgaagaagtccatgaaaatagcaatggacaacaaggaggcaatcctggcaagcattcctgaagagcataaggaggagggtgccaagctatatacctcattactcgaagagaagggtggtttgcagactctcttgaaatatattaaggagaataaccctgacaaactttctatagcacttgcttcatcacttgacactgttgctgaattggagctgttacaggctcctggtctgtcctttctcctgcctcaacagtatatagaatatccaaggctgacaggaagaggagttgttgaattcacagttgaaaaaggtgatggttcaacattctttccaactggtggtggtgaaccgaaaagtgttgctacaattcaggtcgttattgatgggtactctgccccactgactgctggaaactttgcaaaattggtcttggatggggtatatgacggggtaacacttaaatgtgcaagccaagcaattattgctgataacgagactggaaaaaacgggtacactgttccattagaggtcctgccagcaggacaattcgaaccattgtacagaactccactaagcattcaggatggagaattgccagtcctgcccatgtcggtgtatggtgctgttgccatggcacatagtgtggattcagatgaatacaactcaccaactcagttctttttctatctttatgacaagagaaactctggcttaggaggaatatcgttcgacgaggggcaattttcagttttcgggtataccactgatgggagagatgttctgtcacagattaaggccggagataaaattcggtctgccaagcttgtacagggcagagaacgccttgtattgccatccatagcccccgaagagagctgatattatcgatcccaagcatttgcagcattcttttacactgatgaggcaaccaacattttgtatatccaagccactaaacctgaccgaacagtttacagtcaaatactgagtatagcatatataacaatcgttgtacatgaaacatttttcttgtgtatccatgcatccgaatgcttattcgacaggtatgttacggtgagttgcctgggctgtgcatctctcattgagccaggccaggatgtccccacggacacgctcgatgttctcgtccggttccccaaatagcaaggagtggagcatcccgtcgtatatcttgatagtcttatccttgctggcggcggcggcgtacagggcgcggctgacttccgggtcggtaacctcgtcggtgctgccgtgcacgacaaggaacgggatgctgacttcgccgaggcgcttggccagctcgtcggtggcacgcaacagctcgacgacggtgccgagcctgggacggccgttgtagcgcacagggttgcgcgctgcaacgatgcgcttggcgggcaccttgacggacttctcgatgaggtcggcggtgggcacgatggccgccgtgggcgcgaagcgcgcgacgaaggtgagaatctccggcagcggccacggcgggcggatccggtcggagatcctgcacatgggagcgacgaggaccgcccccgcccactcctccggccgtgtgcggaggtggatgagcaggcagatggccccgcccatggactccccgaacaggaagcagggcaggcccgcgtgctcctccctcgccctgacggcgcggaagaaggcgaggaggtcagcgacggcggcgtcgaggtcgggcacgaaggcgcggaggccgtgggagcggccgtggcccgggaggtcggccgcgaagcaggcgaacccggaccgcgcgaggaagaccgccgtggactggaacgtccagctgatgtcgttgccgtagccgtggaccatgaacacgagcgccctgggccgctcgggcgcgcggggcctccacgcgcgcgtgaagagccgccgggcgcccgcgtcgggcgtggtgaagtaggaggactcgccctccgtgccgtgcgccgagtagaactccgcctccgtggccgggtgctcgccccagaagtgaacggccggcgccagcgcctccccgtccgccggcatagtggtggggatcggagtttggtcccggacgttggcgtcgggtggtgtggtgtggtgcgcgttgtgtgtggatgtaaagggaactggtggccgctggccggcgagcgggggagtcgctgctatgctggatgcttgccagttgcgtcgcggcaggggcagccgggcagggctgcttgggggacgtttcgatgcgggaggggaaatcactggattcgtttcgggttggtgccttggtgggacggctcttgtgccgcagatccaccggctcgtccccgcgccggtgcaatgcaaaattcacgtggtatgctacttccttcatagttggcacacgcggggaa

SEQ ID NO: 104927 - DNA, 1885 bp, Zea Mays
ccccccgagtgagcaacagtggggtctcaacatgggccgcctatgtagctcaacactgaaatgcggcagacgcgtgggtggtcggagctggggcctcagcttgatcccaggctgccgttcgcggaatctctcttcccactagcgacgactgggcgacctccgccgccacactaaaccctactccaggtgcccaggtctgcgtcgggcccttgccggcgacgagcacccgctagtttccaagatggctcgccgtggattgatggaacaggacttaagcaaattggatgtgacaaagcttgacccactgtcacctgaagttatctcacgccaagcaacaatcaatattggtaccattggccatgtggctcatggaaagtctactgttgtgaaggctatatccggagttcagactgttcggttcaagaatgagctggaacgtaacattactataaagctgggctatgctaatgcaaaaatctacaaatgtgaggatgacagatgtccacgaccaatgtgctacaaggcctatggaagcggaaaagaagatagccctctatgtgatgtgcctggatttgaaaacactagaatgaagctcctgagacatgtttcttttgttgattgcccgggacacgacattctcatggctacaatgcttaatggagctgctatcatggatggagctcttcttttgatcgcagcaaatgaaagttgtccacagcctcagacatctgagcatcttgctgctgttgaaatcatgcgccttcaacatatcatcattctgcagaacaagattgatcttatccaggaaagtgcagcaatgaatcaacatgaagcaatccaaaaattcatccagggaacaatagctgaaggtgcacctgtggtgcctatatctgcccagctgaaatacaacattgatgttatttgcgaatacattgtgaagaaaatccccatccccgaaaggaactttacctcgcctcccaacatgattgttattcgttcctttgatgttaacaagcctggttcagaggttgacgaaattagaggtggtgtagctggtggcagtatcctcaggggagttcttagggtgaaccagaagattgaagttcgccctggcattgttatgaaagatgagaatggaaacattaagtgcacgccaatctactcaaggattgtctcactctatgctgagcagaatgagctccaatttgctgtcccaggagggcttattggtgtgggaacaaccatggacccaactctaacgcgtgctgataggctggttggccaggttcttggtgaagttggttcactacctgatgtttatgtagagcttgagatcaatttcttcctactccggaggctgttgggtgtgaggacgaaaggtacagagaaggcagggaaggtgtcgaagctcaccaagggcgagatcctcatgcttaacataggatccatgtccacaggcgcccgtgtactcgccgttaagaacgatcttgccaagctacagctcaccgcgcctgtctgcacgagccgaggagagaaggttgctctgagccgtcgtgttgagaagcattggcgtctcatcggatggggccagatccaggccggtacaacacttgaagtaccaccctgcccgctctaaagcgtcatacacagacgtgagcttaatttgtgtgtgccaaagaaaaaaaatgagtttgttgttagtattgtctttgtgttactgcatatccaaagccttaggccattctagtttaattttgtttcgttcaattttggaggccacttccattatgattcctgtgaacattagcaggtcagaaaccagtactgtgaacattatgagtacgacgtgtggatcagtattgccaatgtcttgctttcacaccaa

SEQ ID NO: 104928 - DNA, 1928 bp, Zea Mays
ccccccgagtgagcaacagtggggtctcaacatgggccgcctatgtagctcaacactgaaatgcggcagacgcgtgggtggtcggagctggggcctcagcttgatcccaggctgccgttcgcggaatctctcttcccactagcgacgactgggcgacctccgccgccacactaaaccctactccaggtgcccaggtctgcgtcgggcccttgccggcgacgagcacccgctagttaccactgtgcggtttccaagatggctcgccgtggattgatggaacaggacttaagcaaattggatgtgacaaagcttgacccactgtcacctgaagttatctcacgccaagcaacaatcaatattggtaccattggccatgtggctcatggaaagtctactgttgtgaaggctatatccggagttcagactgttcggttcaagaatgagctggaacgtaacattactataaagctgggctatgctaatgcaaaaatctacaaatgtgaggatgacagatgtccacgaccaatgtgctacaaggcctatggaagcggaaaagaagatagccctctatgtgatgtgcctggatttgaaaacactagaatgaagctcctgagacatgtttcttttgttgattgcccgggacacgacattctcatggctacaatgcttaatggagctgctatcatggatggagctcttcttttgatcgcagcaaatgaaagttgtccacagcctcagacatctgagcatcttgctgctgttgaaatcatgcgccttcaacatatcatcattctgcagaacaagattgatcttatccaggaaagtgcagcaatgaatcaacatgaagcaatccaaaaattcatccagggaacaatagctgaaggtgcacctgtggtgcctatatctgcccagctgaaatacaacattgatgttatttgcgaatacattgtgaagaaaatccccatccccgaaaggaactttacctcgcctcccaacatgattgttattcgttcctttgatgttaacaagcctggttcagaggttgacgaaattagaggtggtgtagctggtggcagtatcctcaggggagttcttagggtgaaccagaagattgaagttcgccctggcattgttatgaaagatgagaatggaaacattaagtgcacgccaatctactcaaggattgtctcactctatgctgagcagaatgagctccaatttgctgtcccaggagggcttattggtgtgggaacaaccatggacccaactctaacgcgtgctgataggctggttggccaggttcttggtgaagttggttcactacctgatgtttatgtagagcttgagatcaatttcttcctactccggaggctgttgggtgtgaggacgaaaggtacagagaaggcagggaaggtgtcgaagctcaccaagggcgagatcctcatgcttaacataggatccatgtccacaggcgcccgtgtactcgccgttaagaacgatcttgccaagctacagctcaccgcgcctgtctgcacgagccgaggagagaaggttgctctgagccgtcgtgttgagaagcattggcgtctcatcggatggggccagatccaggccggtacaacacttgaagtaccaccctgcccgctctaaagcgtcatacacagacgtgagcttaatttgtgtgtgccaaagaaaaaaaatgagtttgttgttagtattgtctttgtgttactgcatatccaaagccttaggccattctagtttaattttgtttcgttcaattttggaggccacttccattatgattcctgtgaacattagcaggtcagaaaccagtactgtgaacattatgagtacgacgtgtggatcagtattgccaatgtcttgctttcacaccaaattttagacttgtattcgtagggttcttg

SEQ ID NO: 104929 - DNA, 86 bp, Zea Mays
agctctgaacaaaggtgcccttgctgcttcacctttcaggcatgcttatgagcatgtcatacctgaaggtagtaaaacacacacaa

SEQ ID NO: 104930 - DNA, 4548 bp, Zea Mays
gtccagttctctaggctctgggcaaaattctttgctccggctggaccgactgatcactcggtgggtgtccctgagaagtgggcaccttttttcatttcgaatcttcttcagccggaatccttcaactggtcaaagacttttcttctgtcaggtatccctttaaagttgcaggagcaaggtgtgaattccatcccttttgtggttcctaaggattgcccagttgacccctccctgggggatgtcacctctagggcctccaaggattccactggttctggtgggctgactccaatcattgtggagacagggctcagaagaagcaaaagattgaaggaatcgcgtgacgggttcaggcatggggcatgtccaaaaaggaactgcctcatgtgccagcataacttcgatggcccacccccgctatcctccaaggtgctgcggaatctgggaaccaggctttgcaacctgtctgaggaggacctgtctgagcagaggctgaagcagaaaaaatcgtctttaggacctattgggccgcagaaggttgacagggggatctgggcttgtgtgtgagccccattaacttttggatgtacttgatccttcttttggttcttgcaggacttttggactatggggtggcacctgggtgtgcctgttttaatactctgttaatttgtggcctgtggactaacttggattttatccactcgtgtggatatgtcccaaaaacttctggtgttatcaatgagtaatccgaattctgttaacttcatggagtggtctgtgctgagccataacgttagaggaattaactctaccgccaaatggaatgctattcgttgttctattaaagaggcgggttgtgaggttgtttgtttgcaggaaacaaagagggaattctttgatttggcatttcttaaaaacttttgccctgctgcttttgactcttttgcttttgtcccctcgatggggaactcgggcggatctgttatcatttggaagagctctaggcttacaggaaatgttatctttcaaaataattatgcccaatcggtggaattcacttcaagcttgtcggcctgctcctggattatcaccaatgtttatgctccttgcacccctcatgggaaaattgattttctcaactggctgcataatatttctatgccccctgacaaactttggcttctagttggtgatttcaatttaatccgtcggccggagaacagaaatataattgggggggattttaaccttatgctcaagttcaatgaagcgataagcaacttagatttgattgaaatccctcttcacagactcacgtacacctggtcgaacagatagcaggaaccactgcttcagaggcttgattggtttttcatctcgcaagaatggtcgactgtcttcccagactcctttgccaagacattgccgcgggacatctccgaccatgttccttgcttggtttcatttaagtccaaaattcctaaacctacgatatttcggtttgagaatttctggcttgaattggatggtttcatgaacctttttcaagctacttagaatgggatccctagcattcccgacaaggccaagaatctgactgccaagttcaaaattgttaggaaagttctgaaagagtggcagagatcgctgccaaaaatagatataacggtgaagaacattaagttgctaattgagcttattgacatcatggaagagcaccgggatctttctgttgaggaatggaacttcagggaaatcctgcaacaaaaggtggctgagttgcttaatattcaaaaaatttattggaagaagcgtgcggctattcggtgggttactgagggagacatttgctctcgcttctttcacgcccatgccaccattaaacacaggaaaaattcaatctctgctttgactgatgacaatgggaccatattctttgaacatgaacataagtctaatcttctctgggaggctttcaaatgcagactggggtcgtccgacttttctgatattgggtttgacctatcaggaattttaacttccaatgagcaattacaggggctagatcagccattttctaagctggaaattgatagcatcataaagctcctaccttcagataaatccccagggccagatggttttaatacaaacttcatcaaaaagtgctggcatgtcattgcccccgatttctatgatctgtgtgacaaattctttcatgaccaggcttgcctcagaagtatcaacggatcattcattgtcttgattcctaagattgagagtcctatgaaggtgggggattacaggccaatttctcttctaaacaatagtatgaaaatcttaacgaagctactggcaaatcgtctgcaaccgttcatgccccggctagttcacaagaatcagtatggtttcatcaaggggaggtccattcaagactgcttggcatgggccttggaatatattcacctttgtcactcctcaaaaaaagagatcattgtactcaagcttgatttcgagaaagcctttgacatgattgagcatgagttgattatccaggttcttatccacaaaggtttcagccctaagtggatcaactggatccggagcattcttcactctggcacttcctcagtgttacttaatggagttcctggtaagccttttcattgcaggagaggggtgaggcagggcgaccctctttcacccctgttgtttgtcctggcagccgaccttcttcagagcatcatcaataaagctaggatgcggaatcttctcaagctaccattgcccgacattggtgaacaggatttcccgattattcaatatgcagacgacactcttctgattttggaagcatgccctaagcaactttttttcctaaaggcaatcctcaactcttttgcctcttctactggtctgaaggttaactacaacaagtcaaatatgttccctattaacgtgtctccggataaaatggtgatcttatcccgtaccttcaattgtcagattggcgagatgccattcacctatcttggcttgcctttgggcctggtgagacctagaaaggaacactacttacctcttattcaaaggattcagaggaggctgtcttgctcttcaaattttttgtcccaggctaggcgcctggaattggttaattcggtcttctcagccttaccaatgttcttcatgtgcacgctcaagattcctaaaaccatcattaaggaaattgatattttcagaaagcactgcctgtggagaggaaatgacatcaactccaagaggccacctttgattgcttggaattcggtcactcaaaggaaagtgaatggtggcctgggtgttcttcgattagaaacgcagaacgaggctcttctaattaaatttttgcataaatttttcaaccacagcgacttaccttgggtccatctgatctggaacaattactatcttactcgaggtctccctggtaatagaagcgttggatctttctggtggaagagcattgtaaagcttctgccaaacttcaaaggactggctacccccgtcattggcaatggcagatcaatttcattctgggatgatcagtggagtcagggcatcccgaggcatattttcccagagctcttctcctttgctaagaactaaaaaatgactatcaaagaggtcaaggatcaagagcagtttcatgatctttttcatttacctgtctctgatcaagcgtttgatcaatttttggtactcaaggggtcttgggagcaaattattcttaataatgttcatgaccgctggaagtacatttggggatcggacaaattctcgtcccaaaaagcttacagatctttcatgggccagatgcagactcatcctatctacaaactagtttggaaaagtaagtgtcagcctaagcatagagtcttctattggctgtggcttaagaacaggctaaacaccagaaatatgttgagaaggagaaacatggagctagattcctattcttgcgaaaactgcctttggcaaagagaggagaccctttatcatcttttcctcagatgcaacttcgcgaaagcctgctggaactcaattggcattaccccacccagaatttccaaccctgaagaggcatctgtgaacctcaaacaccagctcaacgttcccttctctatggagatcactattcttatgacttggagcatctggaaaagccgaaacgagtggttgttttcaaacagagatccctccgtgctccgctgtactcaggaatttagtagagaattgcgactaatcattcacagagcacggggagaattcgacacctcaatcccgaactggctaaatttgtggcaaatatagaaatagctcttcctttttctcttctttttattgattgtaaaaggaccagggcctaacatttaattttcgctttctaataaaatgcgcagtaggggtttccccctcccgatccttcaaaaaaacacacacaacagggtgaaccctctgtactttccagaaagcacatctcttgctgtgctgaatgtcgcagct

SEQ ID NO: 104931 - DNA, 1296 bp, Zea Mays
cagcgagtcctcccttgctccgtcctcctcgtccctgccgttccccaaacccaaagcagagcagcctcggcttctcttatccggagaggagggcggccgccggcgtcgaccttcgcgaggaaggagaggaggccgttggatctcgctggattcgattgggctaggacgggatctccgcgggcagatgcgctgagctcttggcgtgtgcagtgcacgatggtcgatcttgctgatctcgagggtgcgggcgaggcggcgcgctcgcatcccgccgcttccggccagcgggacaggctggcggcgctgctggagctcgctgcggcggacgacgccgcggggttccgcgaggcgctcgcgggaggaggcggccagggcgacgcagcggagctggcggacggggtcgggctgtggtacggccgaagcaaggcgtacgagccgcgcacgccgctgatggttgcggcgacgtacggcagcgtcgaagtggtgtcgttgctgctcggcctcggatgcgtcgacgtcaaccggcgccccggcgtcgacggcgccaccccgctgcactgcgccgcttccggcggctcgcgaaacgccgtggccgtggtcaagctgctcctggctgccggtgcctgcccggtaacccccgactccgccggtcgcttgcctgccgacgtcatcttgcctcctgcttcgcccgacgccttgggcgatctggatatgctccttggccgccgccgagggctcgctgtcgcgacctcggtaccatcgctctcgtcgtccccgccgctctcgacctcgccggatgaaggtaacaggtcgccatcctcgcggtcgtcttcgttgtcaccgattaccgtggaccgcgccaagaaggagtacccggtggatccgacgctgcccgacatcaaaagcagcgtgtatgcctcggacgaattccgcatgttcgcgttcaaggtgcggccgtgctctagggcctactcgcatgactggacagagtgtccgttcgtgcaccctggtgagaacgcccgccgcagggacccccgcaagcacccatacacggctgtaccctgccccaacttccgccgccctggaggttgtcccagtggtgatagctgcgagttctcccatggtgttttcgagagctggctccacccatcgcagtaccgcacaaggccctgcaaggagggcgcagcttgtgcccgccgcatctgcttcttcgcccatgatgaagatgagctccgccatgtgcctcacaatagtggtgcaggcctgctgtctccccgagcctcttcatccattgac

SEQ ID NO: 104932 - DNA, 2448 bp, Zea Mays
cagcgagtcctcccttgctccgtcctcctcgtccctgccgttccccaaacccaaagcagagcagcctcggcttctcttatccggagaggagggcggccgccggcgtcgaccttcgcgaggaaggagaggaggccgttggatctcgctggattcgattgggctaggacgggatctccgcgggcagtgcacgatggtcgatcttgctgatctcgagggtgcgggcgaggcggcgcgctcgcatcccgccgcttccggccagcgggacaggctggcggcgctgctggagctcgctgcggcggacgacgccgcggggttccgcgaggcgctcgcgggaggaggcggccagggcgacgcagcggagctggcggacggggtcgggctgtggtacggccgaagcaaggcgtacgagccgcgcacgccgctgatggttgcggcgacgtacggcagcgtcgaagtggtgtcgttgctgctcggcctcggatgcgtcgacgtcaaccggcgccccggcgtcgacggcgccaccccgctgcactgcgccgcttccggcggctcgcgaaacgccgtggccgtggtcaagctgctcctggctgccggtgcctgcccggtaacccccgactccgccggtcgcttgcctgccgacgtcatcttgcctcctgcttcgcccgacgccttgggcgatctggatatgctccttggccgccgccgagggctcgctgtcgcgacctcggtaccatcgctctcgtcgtccccgccgctctcgacctcgccggatgaaggtaacaggtcgccatcctcgcggtcgtcttcgttgtcaccgattaccgtggaccgcgccaagaaggagtacccggtggatccgacgctgcccgacatcaaaagcagcgtgtatgcctcggacgaattccgcatgttcgcgttcaaggtgcggccgtgctctagggcctactcgcatgactggacagagtgtccgttcgtgcaccctgccccaacttccgccgccctggaggttgtcccagtggtgatagctgcgagttctcccatggtgttttcgagagctggctccacccatcgcagtaccgcacaaggccctgcaaggagggcgcagcttgtgcccgccgcatctgcttcttcgcccatgatgaagatgagctccgccatgtgcctcacaatagtggtgcaggcctgctgtctccccgagcctcttcatccattgacatgaccgctgctgctgctgctcttgggcttctacctggatctcctaccagacactttgtgccaccacctctgtcaccatctgccgccaacaatggtggaggtgctgctgctcattggcttcaaggtagcaggctacgatcttctttcaatgcaagggatgcacaggttgatgaccttggcgtgctcctggaatgggaatcacaataccttggagctctcagcctcccacaaagcagccgatcccagctgagtattcgtccaaccgcaattgctccatccaatcttgaagagatgtatgcttcagacatggctatgtcgccaagattctccaatgatcaagttcactcagtctactcaccagcacacaaatctgcacttctaaacaagtttcatcatcagcaaaagggccttctgtcgcctgtcaatactaacaggatatactcgcctaggggtcttgatccatcagttctccattctccatttggtggtatgtgtcctcggtcccctcggactatggagccagcatctcccttaactgtctgtgtcggggctactgctacacagcgtgatatgttggatcagttctcttccctgaacaagcatcaggtgccatctgcgggatcgccacggaatcttaatgtctcatggggcaacattggtaccccaaaaagtaaggtggattggggtgttgacaaagatgaactagtccgcttgaggcaccctgtgcaacctggaaatacagaagaggagccagatgtgtcttgggtgcagtcaatggtgaaccatgctgagctgagtggcaagaggggtgaaatggcaggcatggcttctcgaccaactaataggcctgaactgagcagtcaggatgactcactggatgagagtgttattgcttcttggcttgagcagcagatgcacttggagccgaagtaactgtgaaagaggtcttttgctctcaaggtggatgaaaccatctttttgccgggaaagcagtcgctcacagattggtagctgaaagcagctgtcaagaattggtaaacagcctcgttaccttggaggtcctaactagtattcttttgattagttcagatgaggtaaaattcatatattccaccgtgagagtcaatagtatctgtgttggtctctgtaacaagagaggttatagatatttttttttccatttatcattgaacgatttcatgaatacattgataattcccatttattcttctg

SEQ ID NO: 104933 - DNA, 2580 bp, Zea Mays
cagcgagtcctcccttgctccgtcctcctcgtccctgccgttccccaaacccaaagcagagcagcctcggcttctcttatccggagaggagggcggccgccggcgtcgaccttcgcgaggaaggagaggaggccgttggatctcgctggattcgattgggctaggacgggatctccgcgggcagtgcacgatggtcgatcttgctgatctcgagggtgcgggcgaggcggcgcgctcgcatcccgccgcttccggccagcgggacaggctggcggcgctgctggagctcgctgcggcggacgacgccgcggggttccgcgaggcgctcgcgggaggaggcggccagggcgacgcagcggagctggcggacggggtcgggctgtggtacggccgaagcaaggcgtacgagccgcgcacgccgctgatggttgcggcgacgtacggcagcgtcgaagtggtgtcgttgctgctcggcctcggatgcgtcgacgtcaaccggcgccccggcgtcgacggcgccaccccgctgcactgcgccgcttccggcggctcgcgaaacgccgtggccgtggtcaagctgctcctggctgccggtgcctgcccggtaacccccgactccgccggtcgcttgcctgccgacgtcatcttgcctcctgcttcgcccgacgccttgggcgatctggatatgctccttggccgccgccgagggctcgctgtcgcgacctcggtaccatcgctctcgtcgtccccgccgctctcgacctcgccggatgaaggtaacaggtcgccatcctcgcggtcgtcttcgttgtcaccgattaccgtggaccgcgccaagaaggagtacccggtggatccgacgctgcccgacatcaaaagcagcgtgtatgcctcggacgaattccgcatgttcgcgttcaaggtgcggccgtgctctagggcctactcgcatgactggacagagtgtccgttcgtgcaccctgccccaacttccgccgccctggaggttgtcccagtggtgatagctgcgagttctcccatggtgttttcgagagctggctccacccatcgcagtaccgcacaaggccctgcaaggagggcgcagcttgtgcccgccgcatctgcttcttcgcccatgatgaagatgagctccgccatgtgcctcacaatagtggtgcaggcctgctgtctccccgagcctcttcatccattgacatgaccgctgctgctgctgctcttgggcttctacctggatctcctaccagacactttgtgccaccacctctgtcaccatctgccgccaacaatggtggaggtgctgctgctcattggcttcaaggtagcaggctacgatcttctttcaatgcaagggatgcacaggttgatgaccttggcgtgctcctggaatgggaatcacaataccttggagctctcagcctcccacaaagcagccgatcccagctgagtattcgtccaaccgcaattgctccatccaatcttgaagagatgtatgcttcagacatggctatgtcgccaagattctccaatgatcaagttcactcagtctactcaccagcacacaaatctgcacttctaaacaagtttcatcatcagcaaaagggccttctgtcgcctgtcaatactaacaggatatactcgcctaggggtcttgatccatcagttctccattctccatttggtggtatgtgtcctcggtcccctcggactatggagccagcatctcccttaactgtctgtgtcggggctactgctacacagcgtgatatgttggatcagttctcttccctgaacaagcatcaggtgccatctgcgggatcgccacggaatcttaatgtctcatggggcaacattggtaccccaaaaagtaaggtggattggggtgttgacaaagatgaactagtccgcttgaggcaccctgtgcaacctggaaatacagaagaggagccagatgtgtcttgggtgcagtcaatggtgaaccatgctgagctgagtggcaagaggggtgaaatggcaggcatggcttctcgaccaactaataggcctgaactgagcagtcaggatgactcactggatgagagtgttattgcttcttggcttgagcagcagatgcacttggagccgaagtaactgtgaaagaggtcttttgctctcaaggtggatgaaaccatctttttgccgggttagtttcctagaagaatatttgtcctagtaaataataatattccttttgtattcttgaatttttttgttcgcgaagtcagagatggtggttttcaggaaagcagtcgctcacagattggtagctgaaagcagctgtcaagaattggtaaacagcctcgttaccttggaggtcctaactagtattcttttgattagttcagatgaggtaaaattcatatattccaccgtgagagtcaatagtatctgtgttggtctctgtaacaagagaggttatagatatttttttttccatttatcattgaacgatttcatgaatacattgataattcccatttattcttctgaatacattttccaatgtttttcctattttctgcc

SEQ ID NO: 104934 - DNA, 498 bp, Zea Mays
atggcggggactctcccgtctccctctagatcccggcggtggcagggcagggctagccttcttcctggagcattccagttcatggcgacgtggaggcctcgaggtgaagccacgtctccttcagcaggcagtgtacttcgtttcactattgctcctgctgcaccggcggcagcttccgggggacctggacgtccaacacggacacgtcccgtgctaaagattcgtgaagctatatctagcggcggtggatcgacgccgtccacggagggttttatgtacaggttgaacatgacgttggtgaagatggtgaggatgacgagtccaagcgtcgagaacgccacgtatgtcggagaaaactctggcagctcgtcggctgatgatccccgcccagttatcatcgtggctcggtccaggtacggatctgtttcaagcaaaccatacatacacacatacagtaacatggcgttcagaaaggctgtaatcgagcggcagctgtaa

SEQ ID NO: 104935 - DNA, 3652 bp, Zea Mays
atggcggcgtcgggatcgggaggcaacgagcccagcggacggccctggactgcaaccagcacgtggacccccggtcccgccggcggggccgtggcggacgctgtctcgtttgagacctccgacgacgacgcggaggcgtcaccggcgggcgtcgtgctctgccacccgtcggccgactcggaccgcgacatgactccctgcccctgcgaggtcactgttagtttcaggggaaagtatgagattcacagggtatatgtgcgaagcacggctcggatatatgaactataccactctcctgatgcaaagggtaccagcaaggattatctatgcactgtgcgttgtggacttgctgttaaagaaacacagtgctgtggtgaagaaagtatgtcacagtggactggcagtgctttaaacagtgacaagcgtgaacatgaggcaaaaagtgtaagcagtgcaagtgatgaagatagttgggttgatgtcaagattccagaatctcctgcaggaaataaaacaccagaatctcaagaaaggagtgtgattcgaacctgccgagaaaatactctgccacactatgaagctactgctgagatgactgatgtgaacccatgtgtatctcttactgtacgtcttctatcacttcagtcgaagacatccgtgcacattgaggaaatctacatatttgctgatcctgttgagcccaccgatgatgtttcagtaagaggtcctgtaaacatgggaggtagttctttgctggcaatgcttgttcctggccttatgcaaatgtctaaatcaaggaatttgaaaatcgatgacagttatttttctgacggatcaaggaatcaagaaagcagcaaatgtgaaagctttacacaggaagcagggccatgtagcacaaatgattcaaaacatacgtctgcaggaatagaaaatggaatgaactctacagtcggtgtttcagcatctgatgataaaagcagccaaggtgaattccatttcaaggacccagattctcttccactccctgtacaaacattagaaagtacacaagcgccttcagtgaagaaccagcatgaattaaacacaggttatcttgctaatcccatcatgagtgaaaaccttactccttctaatcatattgagagaaagctggacactctgctttcgaaggtagagaatatggaattattttgctctaggtttgaggacagcatgataaagccccttggtagcattgaggcaaggcttcagcgactggaggaacagtttagttcgttcgctgttgatattcagtctttgagagattattctgcatttaggtcagcaccagatggtatgcctaatacaaagagctcacaggaggaagcacataatgatgctaatgatagaagtacttctacatctgacaggaagccaggtttagttgtcagggcgccagattttgtgtcagatgattcatgtggttgtaatgtgataactaatggaagccgtgttaattgtcatgggcctaatgtggtgccaagaatacttgtgaaggcccctgattttatttcccaacctgagttaacggatgaaaacctccatgacggacatgctctatcttctgaaaaggagtgtaagacttccccaggtttagttgtcaaggttcctgaactcccagatgatgatgatgatgatggagtcgaagataagaaacaggcagaagtttgtggtgatggtgatgatcacacaaggtctgatgatactctaaggaaaagcacagctggcaacaccaagagcaaaaaatctgtatctatcaatggcgcgttggcatccgcattggaggcattactcacttctaccataggaacatcatattcaaaacctactatttgtgctaccagtaatttaagtgctgaaaatattaatggtttcttcagttgctccccttgtcctgaaaaaactggcgagatgtccactaaagatggttcagctgtccaaattctgggtacatctggtgatccaaatttggtcggtgccttcatatcttctcaggaaattgatacagctccacataattctctctcaaaggaaatgttggatagcaaggttgagataaatgaacagaactgtgacatcaatacagaaaatgtggcatttgttgcaatcacagaaccattggatgttccctcacaggctgatacagttgaggaatctattaatgatggaagttgggtgaatagacaaaactatggttctaatttgaatgcaatgccttatgccatgaacgttgaacctttggatcctcctaagcctcctacagtttctgaacctgttgatagtggagttcaggtgaatgaagatagaccttccatatccttggtggagtttcttgcagcaaggaatgctagctcttgtaagaatggtacttctgaggtatgccttggtaatgttgccgctgaaaaactgtcttttgagagaacatcggctggagctggtaaaaactcgaaaaatatcagtcagcttctagtgaagaaagctcttgaggttgatgcggacaagatattttttttgtttagtgtacccattgggccaaaatttgaaggatcaagcagtcccacccccagaactagtgggcacaatattaataatacagaagaagctgtctcagataaggaatgtggcgtgaaggataccaagaatggatttaggccctctttggggatggactctatattttctcagtaccatgctacagattctaagaaaaatttgagtgagaacagcagttcggaccggattctagatgagagtttctcaaaacagaatggagaacaatctcggtcaagtctgagtagtatggtgtcatttagtggagcatctgccacagaacccgttgttccagggagtggcacatcggaaaattacgtggaagatcttacaggcgttagagatcgtcctgttgcaacactaaattctggggaagagctccaaaaggtctgtgatttactttatgagtttaaggatgaaatgttgagggcctccgtagcgaagtgtacaaataagagcagcccgtcacttgaagctttgcttgctgaatcatctgattctgaagcgcaaatctctgatctggagggtactgacagtggtgctggcattggctccggtcgactgtttagtacactctcatcttcagatgacgatgatgcttctgctgcggacgagcctttagttgatgttgctgacctgactacgccaccagagcgatatacttctgtccccagcgacgagcctctggttgacatagctgacctgacaaacccttcagggatagatgcttcttcagtgaatgagcctccggctgatgtggttgatctgctacatacttcaaacgagcctttggtcagtttggatggtctgccaaaccatccagagatgtgttttggtgggagcagtggagaacataccgacagtcttatttaaaggataaggccatgcggtactgatagttcagagatgagcggaacatataagtccatgcggctgatgtgaacgacagtctcatataagtgtgttccaagttatgcataagtttttgtacgtaaataagcctttgtgtctgcatcagtttatactaaatactatgaaagcagagtaactttggttttgggtt

SEQ ID NO: 104936 - DNA, 810 bp, Zea Mays
atgcaactgaactgcacaggcggcgggcggcgacgacgagcagagcagggcagaggaactggtgaaggaggagaggcccggtgggcggtgggggagggttcagaagaaggagcgcttggcggagggcgccctccccacggccctcatgaagttggcgagctccagcacccgcgcgaccttggtgccccgcttggcctccgccgacgcgcgcttcgcctccgccttgtgccgcgccctggccacctcgttctgcgccttctccatcgccttggcgcgcttctcctcgagcttcctctcgtacttgttgagccaggcgccggccttctccacctggtcgccctcccagccgttgatgacgacctcctcgcgcttgaaccggttgttgaccttggccacctcggcgatctgccacgcggcgatcttggactccacctcctccttcctgacctgccccacggacaccccaccgtcgccgttggcgtgggcggcgccggcgcctggggtgggcgggccccgggcccggcgcggcgacgggatggggttgctgtccggcacgatggccagcgggttggtctcctcgtcctcggcctccccgagcctgtcggcggcggcaccgttggcgatggctgctgcggcggcgaccatggccgagaactccctgctcatggtcgggaagggctcgctggacgcggtgtcgctcccgacggacgcgtgcctgctccggcggtacgacgaaggctggctcggcggcgggctcagcgcgtggatgtccctgaactccgcctcctcgttctcccccaccggctgtag

SEQ ID NO: 104937 - DNA, 2265 bp, Zea Mays
cgccgccatttagcgtgcccccggtcgtctgctccgcgccctaggtttctctcttcgtttcctcctcatcgaatcggagcttcgcatagtgtccctcgtcgccgccggcgccggcgccggcagccatgtccatgctccttatacagaaacaacccctccctctctccgttcgtccccgcacgactctccgccagtgccgtctccccacgactcgattctccgccgccgccgccgactcggctagccgcgctgcccccttcgccgtcgaggactacctcgtcgccgcatgccacctaaccccggcgcaggcgctcaaggcctccaaggtgctctcgcacctcaagtcaccctcccgacccgacgccgtgctagccttcctctcgggcctcggtctctccgacgccgacatcgccgccgccgtcgcctacgaccccaagcttctctgctccgaggtcgagcgcacgctggccccgcgtctcgcggagctccgggatctcggcctctctccgtctcagatcgcccgcctcgcactcgtcgaccccgcgcgcttccgccgccccaccgtcgtctccaagctgcagtattatgtccccctcttcggttccttcgagaacctgctccaggctctcaggaacaacgcctaccttctcagctcggacctcgagcgcgttgtgaagcccaacgtcgcgttcctggtggagtgcgggctagatgcttgtgatattgccaagctgtccatacccgtccctaggttgatcaccaccaacccagaacgcgtccgggcaatggtggagcgagctgaagctgtcggtgtgcctcgtggcactgggatgtttaggcacgcactgctggctgttgcattcctcagcgaggaaaagatcaaagctaaggcagagtttttgaagacaacatttcggtggtcggatgctgaggtgggcgttgcggtttccaagctgccattggtgctcaagcactccaaggacaggctgcgccgcatgtcagagttcctgatcaccaaggttgggttggagccagagtacattgctcacaggcctgctctgcttacatatagcttggaacgccgcctcatgccccgacactatgttgtgaattacctgaaggaaaatggattgttggagcaggaccggagctactatactgctgtccagatgagtgagagtgccttcatggataagttcatatgcccctacaaggaagctgcaccaagcctcgccctagattatgctgctgcttgcagaggagaggtgcccactaccttcttggcaaatgtttaacccttcagtgtaaagcaatgttttgacacttagcagtgagctggtaattttgtttctttccttgcctaactgctacatcccgcagctgtgtctttagaattggctctggtacataagatgtgagccatggttattaccagggctagatttatctttgctctctgttattcaagctgatcaagtattccaatttcacctgtcactgtatggtatggatttagttggtgagtaccctgtatattgctctgcaactgttatcgatgcaatgtttctaaataaatatgcaggatgcacggttccaaatatttttatcggaagcagagctgtgctttctttctttggcaaagcattaggtggggagggcttggtgattaatcatgctactggactagtttctaaactggcggttgtaaatatgatatgattttgtaggttgatgcatcatatgaccattcccatctccttggattttattccccctttttaccgtgtaggggaaaactggaagccattttgaaccaaagacgattcagaaataagactgtctgggagattaatccactctggacttcacaaaagcacttgttatcggaaagttttgtattggattatcttaaagttggccaaacctgctacctacaacaaggctctttcggtgaaattctgaaagcaaattggcgaggaacacccattgctgtcaaacgcattcttccatccttatctgatgacaggctggtgatgcgcaggccaatgcagaaagtgttcactctgaagacgccccaacttgttcatacagtagtgtactttcagttattttgtttttgttattggtttgtatgaatgctgtagttggtttcatgtttggatatgcttgtatgattattaatctggaaatggtacaaacaattcagatgaacatttttagtgtacgaaaatatggtttaatttgtttatatgcctatatatttga

SEQ ID NO: 104938 - DNA, 1742 bp, Zea Mays
atcggagcttcgcatagtgtccctcgtcgccgccggcgccggcgccggcagccatgtccatgctccttatacagaaacaacccctccctctctccgttcgtccccgcacgactctccgccagtgccgtctccccacgactcgattctccgccgccgccgccgactcggctagccgcgctgcccccttcgccgtcgaggactacctcgtcgccgcatgccacctaaccccggcgcaggcgctcaaggcctccaaggtgctctcgcacctcaagtcaccctcccgacccgacgccgtgctagccttcctctcgggcctcggtctctccgacgccgacatcgccgccgccgtcgcctacgaccccaagcttctctgctccgaggtcgagcgcacgctggccccgcgtctcgcggagctccgggatctcggcctctctccgtctcagatcgcccgcctcgcactcgtcgaccccgcgcgcttccgccgccccaccgtcgtctccaagctgcagtattatgtccccctcttcggttccttcgagaacctgctccaggctctcaggaacaacgcctaccttctcagctcggacctcgagcgcgttgtgaagcccaacgtcgcgttcctggtggagtgcgggctagatgcttgtgatattgccaagctgtccatacccgtccctaggttgatcaccaccaacccagaacgcgtccgggcaatggtggagcgagctgaagctgtcggtgtgcctcgtggcactgggatgtttaggcacgcactgctggctgttgcattcctcagcgaggaaaagatcaaagctaaggcagagtttttgaagacaacatttcggtggtcggatgctgaggtgggcgttgcggtttccaagctgccattggtgctcaagcactccaaggacaggctgcgccgcatgtcagagttcctgatcaccaaggttgggttggagccagagtacattgctcacaggcctgctctgcttacatatagcttggaacgccgcctcatgccccgacactatgttgtgaattacctgaaggaaaatggattgttggagcaggaccggagctactatactgctgtccagatgagtgagagtgccttcatggataagttcatatgcccctacaaggaagctgcaccaagcctcgccctagattatgctgctgcttgcagaggagaggtgcccactaccttcttggcaaatgtttaacccttcagtgtaaagcaatgttttgacacttagcagtgagctggggaaaactggaagccattttgaaccaaagacgattcagaaataagactgtctgggagattaatccactctggacttcacaaaagcacttgttatcggaaagttttgtattggattatcttaaagttggccaaacctgctacctacaacaaggctctttcggtgaaattctgaaagcaaattggcgaggaacacccattgctgtcaaacgcattcttccatccttatctgatgacaggctggtgatgcgcaggccaatgcagaaagtgttcactctgaagacgccccaacttgttcatacagtagtgtactttcagttattttgtttttgttattggtttgtatgaatgctgtagttggtttcatgtttggatatgcttgtatgattattaatctggaaatggtacaaacaattcagatgaacatttttagtgtacgaaaatatggtttaatttgtttatatgcctatatatttga

SEQ ID NO: 104939 - DNA, 2337 bp, Zea Mays
atgttggtgcgttctcaacactcaccattcaaacagatggcccaaatgtcacaccacatgcttcctgtcctcgtcgccgccgtgctgtccatcaccgccgcagcgtcggcggcctcctcccattcccacccccacccgctcgaccccctcacccccgacgagattacggcggtccgcgccgcggtgctcgcctccccgcgcgtccccgcccgcccgctcaccttccactacgtcggcctcgacgagccagacaagcccgacgtcctcgcctacgcctacggcggctctggctcgtcctcccgcccgctcctgccgcggcgcgcacttgtgatcgcccgcgcgggcgggcagtcccacgagctccgcgtgagcgttgccagcaacggcacctccgccgccgtcctctcccacgccgtccacagcggcgcgggcttccccgtcctcacgctcgaggagcagttcgcggcggtggcgctgccgcaggcgtacccgccgttcgtcgagtcagtgcggcgccgcggggtggacatggacgacgtgctctgcgcggtgttccccgtcggctggttcggtggacgcgccgggacgacggccaagcgggtggcgaagatgctgtgcttcgtggccggccccacggccaacttctacgcgcggccgatcgagggcatcaccatggtggtggacctcgacgccatggccatcgtcgggtacagagaccgggtgacgtaccccgtgcccaaggccgagggcacggactaccgggccggcaagaccgggccgccgctggcgccgggcgtcgccgtgcaaccagagggcaggggcttccacattgacggccacgtcgtcaggtgggccaactgggagttccacgtgggcttcgacatgcgcgcgggcacggttatctcgctggcctcggtccacgaccacgacgccgacgccggcacgcggcgacgggtgctgtaccgcggcttcgtctcggagatcttcgtgccgtacatggacccggtggaggagtggtactaccgcacgttcctggacgccggcgagtacggcctgggcctctgggcgttcccgctgcagccaggcgctgactgccccgccaacgccgcctacttggacggctcctacgccgggcaggacggcaagcccgtcggcggcgagaacaggatctgcgtgttcgagcggtacgccggcgacgtcgcgtggcgccacacggaggccgggttcccggaccgattgatcacggaggtccggcctgacgtgaccttggtagtgaggatggtggtgtcgcccggcaactacgactacatcttggactgggagttcaagaccagcggctccatcaaattcgtggtgtctctcaccggcctcctggaggtgaaagggacgtcgtacacgcacgccgacgagatcacggtggacgcgcacggctcgctggtctccgagaacacgatcgccgtctaccacgaccactacgtgacgtaccacctggacctggacatcgacggcaccaacaactccttcgtgaagaacatcatcaccgccaagcgcaacacgggggacccggccacgggcggcgccggcacgccgaggcggagctactggacggtgcggcgcgaggtggccgagacggaggccgacgggcaggcggacgtgaacgccgcgcccgccgacctgctgttggtgaacccgggcaagaagacccggatggggaacgaggtcgggtaccgcctcatcccgtcgggggcgacggcggcgtccgtgctggccgacgacgactacccgcagcgccgggcgagctacaccaagaagcaggtgtgggtgacgccgtacagcaagtccgagaagtgggcgtcggggctgttcgccgaccagagcaccggggccgacagcctgacggcgtggagcaggaggaaccgggggatcagggaccaggacatcgtgctgtggtacacgctgggcctgcaccacataccctaccaggaggacttcccggtgatgccaacgctcagcggcggcttcgagctccggccatccaatttcttcgagagaaatccgatcctcaagattggtaggccacccatccggtccagcgcatccgggaactgttcgtgcgatgccagatgacgtgtgcacgtacagtacagctagctctgctcaggtcacgaatctgtatcaggacattgatgaattggttgagaacttgatttttttttttttgcgaggaaagagagagctcaatgaatcactcggaggaagtactactacactcctgagaaactgcatgctgtacacaaattggagaagtgaaacgtcagactgcagaatctcgtgttc

SEQ ID NO: 104940 - DNA, 451 bp, Zea Mays
ttcagagtgacctgttccaccaggcgtccaagcaacccggccggctgggtggctcgtcgtcgtagaactccttggtggccgggcgcgcggcgaacgatcgcctatttcagctgctgagcgggcggctgatcggcggcgttccacggcttgggttacctaccactaccaacgacggaacggaaccggccgggccggcggcatggcggcgtggatgcggtcgctcttgtcgccgctcaggaagctctggatccgaatgcattcggcgcagaacaagaaggggcggggcatctacatcctgtacgaggacgtcaagtcgtgcccctgcgaggacgtgcacatcctctggtccatcctcgtcgactcgtcccactcccacccgccgccgctgtctctgcgcctcaagcactgactgactccagagcagagcaggcttccctcaccgacaccgcca

SEQ ID NO: 104941 - DNA, 2113 bp, Zea Mays
gttcaacagtcaccgtcatccaccctccgtcttccccccacccgtccgtcaccagtcaccacctcactccacgtctcctcggtccctcccgcgctgctcactgcccaccgacactctcctgcgctgcgccgccatggaccgcgacccttccgtctccgacgaggacgacgacctcgagaccctcgtaccacagaaccacgccaagcccccgtccccctccgcccgctcccgctcgccgccctcctccttcagcgtcgccgcgctccgtccgacgcttccgtccctccgccgcctccctccggcgcgtcctctggtcccgccgctacctcgtgctcttcgtttccctcccgcttctcttcctaatcctcttcttctcctacgggggtgcgtcctccctccgcctgcccgcctccatccgcctcccctccgccgcacccgccgccgaccccgcggcctcccgcatgcgcgaggccgagctgcacgcgctctacctcctccgctcccagcgctccggtctcctcagcctcttcaaccgcaccgcagcccccaccaacggctccgcccccgcccccatctcgctctccgatctccagtccgcgctcgagagccagatcaagatcaaccgcgagattcaagcggcgctcctctcctcgcaccgctcagggtccggcaatgcgaccgaggacggcctggatctcgatctccctttctccggctgcaggaagagggaattgccggccagccggcggaccattgagtggaaccccaagaaagaccggttcctcctagtcatctgcatctccgggcaaatgtccaaccacttgatttgcttggagaagcacatgttcatggcagcgcttcttggacgtaccctggtggtgcccagccagaaggcagattaccagtatgatcgggtgcttgatatcaaccacattaatgactgcattgggaggaaggttgtgatcacctatgaggagtttgtggagaagaggaagaaagtggccatcgatcagttcatatgctatgcagcctcgcctccatgtttccttgatgaggaacatattaagaagctgaaaggacttgggatttctctgagcaagattgaggcagcttggccagaggatgcaaagctgaaggagccaaagaagagatctgttggggatattgcaccaaagttttcgacagaggctgaggtccttgccattggcgacatgttttatgctgacatggaggatgagtggctgaatcaacctggtggtccattggctcacaagtgcaaggcattgattcaaccaagtaggctcatagtgctcactgctcaacgtttcgtccagactttcttgggaggaaactatattgccttgcattttcgacggcatggattcctgaaattctgtaatgtgaagaaagagagctgcttcttccccatcccccaggctgcagaatgcattctgcgaatcgttgagaaggccaatgcacctgtgatatatttatctactgatgctgctgagagcgaaacaaatcttctgcagtccttggttgtgttcaacgacaggcaagtccctctcgtgaagaggccagagcaccacagctccgagaaatgggatgccttgctaaacagaaaccgcatgggtggagatggtcaggttgacgcgatgcttgacaagacgatctgtgcgctatcaaacgtattcataggatcgtcagggtccaccttcacggaggacatcttccggctgcggaggggctggggatcggcgtcgcactgtgacgagtacctctgccagggcgagctgcctaacttcatagcagagctagattgagaaggcaacttcccaggaggatcgatagctgcaattttctcccattcgtgtccatatgtcctgtaaaaaaaatggtggtgtgtacatctagtgtgatttgtggtggtgctggtgtgtgtgtgtgttggggggcggggggaaggtctctgtatcggggatgtccattgatttgttcggtgttattcttgcacaggtaggcaataagctttgagagaactctttgccgttgtgttgggggccttcggcttacgaaggtcctcaaaaacaggatttaacagtatttctggagc

SEQ ID NO: 104942 - DNA, 567 bp, Zea Mays
ctggtcacaagaatactgcctgggatgcggtccttacgggtgcacatgctatgtgaattccgtagagagatgcatgtagtggaagatcagctcggctgtgacctgattcaagtggacaaccagaaggtgaaatccttgctaccttacatgagtaagttcatgaagctgttgacctttgctctgaagatcggcgcgcatttcatcgttgggatgggagagatgatacctgacctgagcagggaggtggtgcgcctgctggactcctaggccttgtacggcacaactgcatctgccatgtccgtgggggctctgggcgtggtagcactgtatggcaagtcaaggaatggtagcacgagcgacatgggagaggatatgacagcagccaggcaatggcttgtggatttcttgaaagggcaaggggttctgacggggatggacatagcacagagatttggcctgtggcgtgttcgatacagagatgacggccacattgcatggatctacaggaaacacatcgcagcaagtgaagaggaaatcttcgagctgccactttgagcatccagaggc

SEQ ID NO: 104943 - DNA, 619 bp, Zea Mays
atggcggaggacaccaacctcaagccggtggtgcaggtcgtcgacctccggagcatcgcggtcaccggggccccgggctccgggcccaggttccgcgccatcatctccgatggcgtcgccacggggcacacgctcttcgcctcgcagctctgcgacctcgcgcgctccggcgtcgtccgccgcggctcggtcgtgcagctcctcgactacatcgtcaacaacgtcgcatttcaagatcgtggacaggagatacttggttgctcagctcgagagctcaacatttttaaagagaacaaagatcctcgctacacagatgtcttgagcaattgcttgtatcagaactatttgttcaggctaaaagtgaaagaagaacaatacggcgatgtacgacaagtgaaaaacactgtggccaaggtggagagggtggatcctttggctgagagtaaaattctgcttgattccatttcaaggtttataccatgagagttttgttcttacatctatcagctgctggtaagtgtgttgcccgcttagaagtggtaattaatatgtagctttccctactcacacgcccggaggtttctttctcggatagaattctatcattcaacgatcacgg

SEQ ID NO: 104944 - DNA, 2715 bp, Zea Mays
gtctctctagtactggatcagtccctcttccttttccctctcctcagtccctgtctgctgctgctagacagcacaaactgcggtccggtgcgctctcctcggcggtggagttggagctgcagtgcaggggaagaaccgaagaagcgagctagagccgcaagaatgataggcgccaaggccaacgccgccggcccgtgcccggagtatgcggaggtcgaccccaccggccggtacggacggttcagcgacgttcttggcaagggcgcgtccaagattgtgtaccgggcgttcgacgagtaccaggggatggaggtggcgtggaaccaggtgaagctgcacgacttcctgcagagccccgaggacctggagcggctctactgcgagatccaccttctcaagacgctcaagcaccgcaacatcatgaagttctacacctcctgggtcgacgtctcccgccgcaacatcaacttcatcaccgagatgttcacctccggcaccctccgccagtaccggcagaggcaccggagggtgaacatatgggcggtgaagcactggtgcaggcaaatcctcagcggcctgctgtacctgcatagccacaatccgcccatcatccaccgggacctcaagtgtgacaacatcttcgtgaacggcaaccagggagaggtcaagattggcgacctcggtctcgccgccatcctccgcaagtcccacgccgtccactgcgtaggtacaccggagttcatggcgccggaggtgtacgaggaggagtacaacgagctggtggacatctactcgtttggaatgtgcgtgctcgagatggtaacgtttgagtacccgtacagcgagtgtacacaccctgtgcagatctacaagaaagtgatctctggtactaagccagaatctctgtacaaggtgaaagatccaatggtgaggcacttcgtcgagaagtgcctagcaacggcatctcaaagactgtcagcaagagaactgcttgaggatcccttcctacaaagtgatgacgtggttgcttctttggatggtggaaattaccatgtgccggccaattatatacctcagccttcatatttagggcatacctacagcaatggctccatgatgagtaatggattctcagaaagcattgatgaagatgctctcagtgaagactgcgaggatgatgacatgaaaggccaagatggcattgacctgttcaacgagaatgaaggtgagcttcttggcaatgtggatataacaatcaaagggagaaagagtgaggatggaggcatattccttagattgcggatttctgatgatgatggacgggtacgcaacatctattttccttttgacgttgaggctgataccgcactaagtgttgctactgaaatggtagccgaactcgatataactgaccatgaagttactcggattgctgacatgattgatggtgaggtcagtgcactggtaccagattggaggcctggtccgggcatagaggaggctcctgacacttcatactgccacgattgtggatccatcgtgtcatcgtgtggttcactttacgcctacatgtcatcaggccgtcgaggttgccaatgtgcagaggtacatgggcggtttgaggagatcacgttcgaagctgatggagagcagtgtgatttgcaggaatctgcaggcagctctgatgatggaggtggcccaacagagcactatgtcaaaggcaaggagtccactcatgtgaatggccttctacagatgggtagaagagatctttctaatcagctttgcttcagttcattccaagagcaatcatgttcatctaaccattatgagaacgaaactaaccatcacacaaatgggttcgacatgaagcatgaggtaaagattgccaagtacaaagcacggaaaatggcacagttaaagagggctatccatccatctcttgacttcgacaatgcaaatggagtaaataggatgaagccttcactgaacaagctgcaatctttccatattggaaagaaccacagtttccgggtaccgaccggtgaccgaagcccgggtaaagtaagtacggattaccattctaatttgaacagccaattatcgcatagcaggcaccccgatccaggagcccaaagggcctggcattgtgaggtcaatgcagctgggagctctgattgtatgtttacagcaaggcgctactatgccggagctcagttgccaccaaatctcccgcgaacaaaatctgtacccctacatgctgtcgacgtctgaaatgctcttgccctgtaaagtttatagtgtacatctgttttggttctttctgtacccattatgaaacgtagttgctgagagcaggagactgaatgtgacgaggttgcatgtggattacggctgagctgtttgtaaatttccatcttgtgaattcagagaggttagattgttcgagtccaatccacatcatttgcctcactggggcaaccagttttatcctctttactataggcaagagccgatttccgagatgcaaaattgctgttaatcaggcagaaacaaggcatgggactctatccttgcgttggtactagatgccacctacctctcctagttccagttgaatatacatcaaatctgcattgccagcctatgcatttgcattgccaatgccaactgctgcatggacgctgcactaatcaattgacgcttccatgactc

SEQ ID NO: 104945 - DNA, 1964 bp, Zea Mays
acactttcttagcaggtaactgcagacggtcactgacgtgtgggcattatctaggcttggtccctaatgtcagtgacggagcaggttccaaatatgaagcttcagtagtgtatcgtgagaacacgtcggtgccaggctgccagcagcaacgaagccgcaccaggccccgcactgcccatggacgcacgcctcccggggctctcgtgtccctgtccgtctcccgtttgccgcctccaccgcaacgcggcgcgcggggtggcggtgctctcgcgatcctcgtgtcgattccagcggcgggggtgccattccctcccctggccgttgcccgcgcctcgcggtcgcgcaccggaaccggagccccgccgcgaatctagggttgcctccgcctcgccccctcctcccgagactcctagcggcaggaattaggacgagggtaacaggcgacagaggctgcgaaggacgccccctcgtcgaatgcgccggcgaccgatccgtggaggagcagccggagcacgcaggaggttagtctaggcacgtatcgcctctcaatccctcttcaccctagacggttcgatccaatgtacttgctaattgctgatcgggttacgcggatgcgtgtagattgagcggaattccagatgtactcccatttctacggagtagcagacctcataatcatatctccttgtcttccgcgattttctgcacttgatcgtctttagttggtggcgaaatgcttattctgggtttctacctttacctcgagcgcgacggtggtggacatttttatgcggtcttgaggaggaccaaggaggtgccctatagcttccacggggccaaatgtgcgagagtgacacggtgatgggtggcggggagaaggttttgtccgggtgcctgactcatcaaggatctagagaaagggaagcaggattggagagattgtttggataattcgagtgcgacgtgagtgaggaactgaggatagccggccagttcatttctaaactggtttagggggtgtttgaatgcactgaaattaatagttagttggctaaaaattgttagtggaattagctagctaacaaataactacctattcatgattattaaaacgtcgtttaaacgacgattaagcgtcgtttaaacgctaaaacgcgattagtagataaaacgtccgcacattttaccaaaactgcgtagaacgtccgttctggacgtttaaacgacgtttacacgtcggaacgcacgttctggacgttctatgcgctatatggacgttctatgctcatagcgttcgtgggccagccgctgatccaacgcgcgcagccattgatccatcgccgccagacgccatcgcgcccagccgcccagacgcctgtgctccagccgccgtcgtgcgcgcccaggagctgccagccgccatcgcgcgcgcccaggagccgccagagccagacgccgtcggccgtcctccaccgccctccaggtacgccgccggccccctcctccctcctccctccaccgccacccccaaagccgccaccgccgccagctactgcctctcccgtaccgccgccgccatcgtacgagcaggccgtaggggtgggtggtggccgaagggaggaggatgacgacgagggcgccggggcggtgatacgggcacacctgctctctgacttcaaggccgcggtgcgtgcaggaaaagtactggtgtccgacccgtcgtctggaaaggtccccactcgcatcctcttctgattctatagcgaattttggttgagagttcggagttctgcacttcctacttgccctgcaagagtttagtgttgatatttcattgggatagttggtcatttttccattctttctagctgacttatgtatgtcctcattatttttctggttgtattcttgtattgactattgagacatggagataaaagttatgtagtgtataatttttttat

SEQ ID NO: 104946 - DNA, 1615 bp, Zea Mays
acactttcttagcaggtaactgcagacggtcactgacgtgtgggcattatctaggcttggtccctaatgtcagtgacggagcaggttccaaatatgaagcttcagtagtgtatcgtgagaacacgtcggtgccaggctgccagcagcaacgaagccgcaccaggccccgcactgcccatggacgcacgcctcccggggctctcgtgtccctgtccgtctcccgtttgccgcctccaccgcaacgcggcgcgcggggtggcggtgctctcgcgatcctcgtgtcgattccagcggcgggggtgccattccctcccctggccgttgcccgcgcctcgcggtcgcgcaccggaaccggagccccgccgcgaatctagggttgcctccgcctcgccccctcctcccgagactcctagcggcaggaattaggacgagggtaacaggcgacagaggctgcgaaggacgccccctcgtcgaatgcgccggcgaccgatccgtggaggagcagccggagcacgcaggagttgaagggcaagctttgaaaatgtcatccactgtgccgaagtcatcaaatatcttctggcatgattgcctagttggcaagactgatcgccagaagctactcaaccagaaaggctgtgttgtctggatcacaggccttagtggctcaggtaaaagtaccttggcatgtacattaggccgggagctccacacaagagggaagcttgcatatgttcttgacggtgataacttaagacatggtctgaacaaggatcttggctttaaagctgaagatcgtgctgaaaatataaggagagttggtgaagtagcaaagttattttcagacgctggccttgtatgtattgcaagtttgatatctccatataggagagaccgtgaatcttgccgtgcactgttgtcggatggtagctttattgaagttttcttgaatatgtccttggaattatgtgaagcaagggacccaaagggcctctataagcttgctcgtgctgggaaaataaagggttttacaggaatagatgacccttatgaagcaccactgaattgtgagattgagatcaaggaaatagatggtgtatgcccttcgccttctgacatggcggggcaagtggttacttaccttgaggagaaaggcttcctgcacgagtaggctgacgctgaatcgaagctacatccggggaaggtttcaatcagacaagcgcagaataagtcaaaagcgctgccagttaccgtatggttacatagattgatctggatgcctagtatttttctttccgcgcttgctctaccacaagttccattcagtttcattcagatgagcctagatggttcctaatttctttgacctctggaatagattacctgtaatgcaattctgataacagcttggggcagtatcgatttgtcacgggaaggtacgcctaatgttgagagaaactgtattcttgtgctccactttctgcagtgccgacgtgtaccctttccgttttactaaattataattagcttcccttcatttataagtttatttattttttatacactattcttgttacatatctaagtatgtctggatatatagcaaaaaaaaaaaaaa

SEQ ID NO: 104947 - DNA, 1897 bp, Zea Mays
ccagcagcaacgaagccgcaccaggccccgcactgcccatggacgcacgcctcccggggctctcgtgtccctgtccgtctcccgtttgccgcctccaccgcaacgcggcgcgcggggtggcggtgctctcgcgatcctcgtgtcgattccagcggcgggggtgccattccctcccctggccgttgcccgcgcctcgcggtcgcgcaccggaaccggagccccgccgcgaatctagggttgcctccgcctcgccccctcctcccgagactcctagcggcaggaattaggacgagggtaacaggcgacagaggctgcgaaggacgccccctcgtcgaatgcgccggcgaccgatccgtggaggagcagccggagcacgcaggaggttagtctagccgctgatccaacgcgcgcagccattgatccatcgccgccagacgccatcgcgcccagccgcccagacgcctgtgctccagccgccgtcgtgcgcgcccaggagctgccagccgccatcgcgcgcgcccaggagccgccagagccagacgccgtcggccgtcctccaccgccctccaggtacgccgccggccccctcctccctcctccctccaccgccacccccaaagccgccaccgccgccagctactgcctctcccgtaccgccgccgccatcgtacgagcaggccgtaggggtgggtggtggccgaagggaggaggatgacgacgagggcgccggggcggtgatacgggcacacctgctctctgacttcaaggccgcggtgcgtgcaggaaaagtactggtgtccgacccgtcgtctggaaagttgaagggcaagctttgaaaatgtcatccactgtgccgaagtcatcaaatatcttctggcatgattgcctagttggcaagactgatcgccagaagctactcaaccagaaaggctgtgttgtctggatcacaggccttagtggctcaggtaaaagtaccttggcatgtacattaggccgggagctccacacaagagggaagcttgcatatgttcttgacggtgataacttaagacatggtctgaacaaggatcttggctttaaagctgaagatcgtgctgaaaatataaggagagttggtgaagtagcaaagttattttcagacgctggccttgtatgtattgcaagtttgatatctccatataggagagaccgtgaatcttgccgtgcactgttgtcggatggtagctttattgaagttttcttgaatatgtccttggaattatgtgaagcaagggacccaaagggcctctataagcttgctcgtgctgggaaaataaagggttttacaggaatagatgacccttatgaagcaccactgaattgtgagattgagatcaaggaaatagatggtgtatgcccttcgccttctgacatggcggggcaagtggttacttaccttgaggagaaaggcttcctgcacgagtaggctgacgctgaatcgaagctacatccggggaaggtttcaatcagacaagcgcagaataagtcaaaagcgctgccagttaccgtatggttacatagattgatctggatgcctagtatttttctttccgcgcttgctctaccacaagttccattcagtttcattcagatgagcctagatggttcctaatttctttgacctctggaatagattacctgtaatgcaattctgataacagcttggggcagtatcgatttgtcacgggaaggtacgcctaatgttgagagaaactgtattcttgtgctccactttctgcagtgccgacgtgtaccctttccgttttactaaattataattagcttcccttcatttataagtttatttattttttatacactattcttgttacatatctaagtatgtctggatatatag

SEQ ID NO: 104948 - DNA, 1887 bp, Zea Mays
ccagcagcaacgaagccgcaccaggccccgcactgcccatggacgcacgcctcccggggctctcgtgtccctgtccgtctcccgtttgccgcctccaccgcaacgcggcgcgcggggtggcggtgctctcgcgatcctcgtgtcgattccagcggcgggggtgccattccctcccctggccgttgcccgcgcctcgcggtcgcgcaccggaaccggagccccgccgcgaatctagggttgcctccgcctcgccccctcctcccgagactcctagcggcaggaattaggacgagggtaacaggcgacagaggctgcgaaggacgccccctcgtcgaatgcgccggcgaccgatccgtggaggagcagccggagcacgcaggagccgctgatccaacgcgcgcagccattgatccatcgccgccagacgccatcgcgcccagccgcccagacgcctgtgctccagccgccgtcgtgcgcgcccaggagctgccagccgccatcgcgcgcgcccaggagccgccagagccagacgccgtcggccgtcctccaccgccctccaggtacgccgccggccccctcctccctcctccctccaccgccacccccaaagccgccaccgccgccagctactgcctctcccgtaccgccgccgccatcgtacgagcaggccgtaggggtgggtggtggccgaagggaggaggatgacgacgagggcgccggggcggtgatacgggcacacctgctctctgacttcaaggccgcggtgcgtgcaggaaaagtactggtgtccgacccgtcgtctggaaagttgaagggcaagctttgaaaatgtcatccactgtgccgaagtcatcaaatatcttctggcatgattgcctagttggcaagactgatcgccagaagctactcaaccagaaaggctgtgttgtctggatcacaggccttagtggctcaggtaaaagtaccttggcatgtacattaggccgggagctccacacaagagggaagcttgcatatgttcttgacggtgataacttaagacatggtctgaacaaggatcttggctttaaagctgaagatcgtgctgaaaatataaggagagttggtgaagtagcaaagttattttcagacgctggccttgtatgtattgcaagtttgatatctccatataggagagaccgtgaatcttgccgtgcactgttgtcggatggtagctttattgaagttttcttgaatatgtccttggaattatgtgaagcaagggacccaaagggcctctataagcttgctcgtgctgggaaaataaagggttttacaggaatagatgacccttatgaagcaccactgaattgtgagattgagatcaaggaaatagatggtgtatgcccttcgccttctgacatggcggggcaagtggttacttaccttgaggagaaaggcttcctgcacgagtaggctgacgctgaatcgaagctacatccggggaaggtttcaatcagacaagcgcagaataagtcaaaagcgctgccagttaccgtatggttacatagattgatctggatgcctagtatttttctttccgcgcttgctctaccacaagttccattcagtttcattcagatgagcctagatggttcctaatttctttgacctctggaatagattacctgtaatgcaattctgataacagcttggggcagtatcgatttgtcacgggaaggtacgcctaatgttgagagaaactgtattcttgtgctccactttctgcagtgccgacgtgtaccctttccgttttactaaattataattagcttcccttcatttataagtttatttattttttatacactattcttgttacatatctaagtatgtctggatatatag

SEQ ID NO: 104949 - DNA, 1866 bp, Zea Mays
ccagcagcaacgaagccgcaccaggccccgcactgcccatggacgcacgcctcccggggctctcgtgtccctgtccgtctcccgtttgccgcctccaccgcaacgcggcgcgcggggtggcggtgctctcgcgatcctcgtgtcgattccagcggcgggggtgccattccctcccctggccgttgcccgcgcctcgcggtcgcgcaccggaaccggagccccgccgcgaatctagggttgcctccgcctcgccccctcctcccgagactcctagcggcaggaattaggacgagggtaacaggcgacagaggctgcgaaggacgccccctcgtcgaatgcgccggcgaccgatccgtggaggagcagccggagcacgcaggagccattgatccatcgccgccagacgccatcgcgcccagccgcccagacgcctgtgctccagccgccgtcgtgcgcgcccaggagctgccagccgccatcgcgcgcgcccaggagccgccagagccagacgccgtcggccgtcctccaccgccctccaggtacgccgccggccccctcctccctcctccctccaccgccacccccaaagccgccaccgccgccagctactgcctctcccgtaccgccgccgccatcgtacgagcaggccgtaggggtgggtggtggccgaagggaggaggatgacgacgagggcgccggggcggtgatacgggcacacctgctctctgacttcaaggccgcggtgcgtgcaggaaaagtactggtgtccgacccgtcgtctggaaagttgaagggcaagctttgaaaatgtcatccactgtgccgaagtcatcaaatatcttctggcatgattgcctagttggcaagactgatcgccagaagctactcaaccagaaaggctgtgttgtctggatcacaggccttagtggctcaggtaaaagtaccttggcatgtacattaggccgggagctccacacaagagggaagcttgcatatgttcttgacggtgataacttaagacatggtctgaacaaggatcttggctttaaagctgaagatcgtgctgaaaatataaggagagttggtgaagtagcaaagttattttcagacgctggccttgtatgtattgcaagtttgatatctccatataggagagaccgtgaatcttgccgtgcactgttgtcggatggtagctttattgaagttttcttgaatatgtccttggaattatgtgaagcaagggacccaaagggcctctataagcttgctcgtgctgggaaaataaagggttttacaggaatagatgacccttatgaagcaccactgaattgtgagattgagatcaaggaaatagatggtgtatgcccttcgccttctgacatggcggggcaagtggttacttaccttgaggagaaaggcttcctgcacgagtaggctgacgctgaatcgaagctacatccggggaaggtttcaatcagacaagcgcagaataagtcaaaagcgctgccagttaccgtatggttacatagattgatctggatgcctagtatttttctttccgcgcttgctctaccacaagttccattcagtttcattcagatgagcctagatggttcctaatttctttgacctctggaatagattacctgtaatgcaattctgataacagcttggggcagtatcgatttgtcacgggaaggtacgcctaatgttgagagaaactgtattcttgtgctccactttctgcagtgccgacgtgtaccctttccgttttactaaattataattagcttcccttcatttataagtttatttattttttatacactattcttgttacatatctaagtatgtctggatatatag

SEQ ID NO: 104950 - DNA, 1626 bp, Zea Mays
ccagcagcaacgaagccgcaccaggccccgcactgcccatggacgcacgcctcccggggctctcgtgtccctgtccgtctcccgtttgccgcctccaccgcaacgcggcgcgcggggtggcggtgctctcgcgatcctcgtgtcgattccagcggcgggggtgccattccctcccctggccgttgcccgcgcctcgcggtcgcgcaccggaaccggagccccgccgcgaatctagggttgcctccgcctcgccccctcctcccgagactcctagcggcaggaattaggacgagggtaacaggcgacagaggctgcgaaggacgccccctcgtcgaatgcgccggcgaccgatccgtggaggagcagccggagcacgcaggagattgttcattagtgttattgtttataaaatggtcaataaagagttgctattaattgagaagagaatctactaatggatgggccatgaaattgcatggtttttatttgcctgaaaagaatggagcctttcttgttgttttctgaatgatataactggacactgtagttgaagggcaagctttgaaaatgtcatccactgtgccgaagtcatcaaatatcttctggcatgattgcctagttggcaagactgatcgccagaagctactcaaccagaaaggctgtgttgtctggatcacaggccttagtggctcaggtaaaagtaccttggcatgtacattaggccgggagctccacacaagagggaagcttgcatatgttcttgacggtgataacttaagacatggtctgaacaaggatcttggctttaaagctgaagatcgtgctgaaaatataaggagagttggtgaagtagcaaagttattttcagacgctggccttgtatgtattgcaagtttgatatctccatataggagagaccgtgaatcttgccgtgcactgttgtcggatggtagctttattgaagttttcttgaatatgtccttggaattatgtgaagcaagggacccaaagggcctctataagcttgctcgtgctgggaaaataaagggttttacaggaatagatgacccttatgaagcaccactgaattgtgagattgagatcaaggaaatagatggtgtatgcccttcgccttctgacatggcggggcaagtggttacttaccttgaggagaaaggcttcctgcacgagtaggctgacgctgaatcgaagctacatccggggaaggtttcaatcagacaagcgcagaataagtcaaaagcgctgccagttaccgtatggttacatagattgatctggatgcctagtatttttctttccgcgcttgctctaccacaagttccattcagtttcattcagatgagcctagatggttcctaatttctttgacctctggaatagattacctgtaatgcaattctgataacagcttggggcagtatcgatttgtcacgggaaggtacgcctaatgttgagagaaactgtattcttgtgctccactttctgcagtgccgacgtgtaccctttccgttttactaaattataattagcttcccttcatttataagtttatttattttttatacactattcttgttacatatctaagtatgtctggatatatag

SEQ ID NO: 104951 - DNA, 1486 bp, Zea Mays
ccagcagcaacgaagccgcaccaggccccgcactgcccatggacgcacgcctcccggggctctcgtgtccctgtccgtctcccgtttgccgcctccaccgcaacgcggcgcgcggggtggcggtgctctcgcgatcctcgtgtcgattccagcggcgggggtgccattccctcccctggccgttgcccgcgcctcgcggtcgcgcaccggaaccggagccccgccgcgaatctagggttgcctccgcctcgccccctcctcccgagactcctagcggcaggaattaggacgagggtaacaggcgacagaggctgcgaaggacgccccctcgtcgaatgcgccggcgaccgatccgtggaggagcagccggagcacgcaggaggttagtctagattgttcattagtgttattgtttataaaatggtcaataaagagttgctattaattgagaagagaatctactaatggatgggccatgaaattgcatggtttttatttgcctgaaaagaatggagcctttcttgttgttttctgaatgatataactggacactgtagttgaagggcaagctttgaaaatgtcatccactgtgccgaagtcatcaaatatcttctggcatgattgcctagttggcaagactgatcgccagaagctactcaaccagaaaggctgtgttgtctggatcacaggccttagtggctcaggtgaagtagcaaagttattttcagacgctggccttgtatgtattgcaagtttgatatctccatataggagagaccgtgaatcttgccgtgcactgttgtcggatggtagctttattgaagttttcttgaatatgtccttggaattatgtgaagcaagggacccaaagggcctctataagcttgctcgtgctgggaaaataaagggttttacaggaatagatgacccttatgaagcaccactgaattgtgagattgagatcaaggaaatagatggtgtatgcccttcgccttctgacatggcggggcaagtggttacttaccttgaggagaaaggcttcctgcacgagtaggctgacgctgaatcgaagctacatccggggaaggtttcaatcagacaagcgcagaataagtcaaaagcgctgccagttaccgtatggttacatagattgatctggatgcctagtatttttctttccgcgcttgctctaccacaagttccattcagtttcattcagatgagcctagatggttcctaatttctttgacctctggaatagattacctgtaatgcaattctgataacagcttggggcagtatcgatttgtcacgggaaggtacgcctaatgttgagagaaactgtattcttgtgctccactttctgcagtgccgacgtgtaccctttccgttttactaaattataattagcttcccttcatttataagtttatttattttttatacactattcttgttacatatctaagtatgtctggatatatag

SEQ ID NO: 104952 - DNA, 759 bp, Zea Mays
gttaagtgttacattttcaatgcggtcatggaaatggaattagatgttgctgttgtgaagagagatgaccttggaaatgctcatggtcttaatcttgatgagttcgatgatgttgaagggcaagctttgaaaatgtcatccactgtgccgaagtcatcaaatatcttctggcatgattgcctagttggcaagactgatcgccagaagctactcaaccagaaaggctgtgttgtctggatcacaggccttagtggctcaggtaaaagtaccttggcatgtacattaggccgggagctccacacaagagggaagcttgcatatgttcttgacggtgataacttaagacatggtctgaacaaggatcttggctttaaagctgaagatcgtgctgaaaatataaggagagttggtgaagtagcaaagttattttcagacgctggccttgtatgtattgcaagtttgatatctccatataggagagaccgtgaatcttgccgtgcactgttgtcggatggtagctttattgaagttttcttgaatatgtccttggaattatgtgaagcaagggacccaaagggcctctataagcttgctcgtgctgggaaaataaagggttttacaggaatagatgacccttatgaagcaccactgaattgtgagattgagatcaaggaaatagatggtgtatgcccttcgccttctgacatggcggggcaagtggttacttaccttgaggagaaaggcttcctgcacgagtag

SEQ ID NO: 104953 - DNA, 788 bp, Zea Mays
cgcccacgtaaaactcctgcgcgctcgcttcggctctcccactccacgcaaccagaacccgcgcgcggcaacgcgacgcgacgcgacacaaaaccccacgagccacgaagccaaaccgagcaagcaaagcaagcatctgagtcctgtcctgaccaaccccgggcgcgcgaggaggcttggccaacgagaaatggtgttcagcgcctcgttcgtggcggcagcggcgcgcgtgccggcggagctgtgccagcggccgccgcgcccggggcggtggcggcggcggctgagcgcggacgacgtcctgcgcgccctgttcctgccaccggtgcgggagctcgggcgcctgggcgacttcctcttcgccttcttctgcctgccgctgccggagtactacctgccggggtccggccgcggcggaggctgggtggcgcgggtgcccgacgcggttctgtacacctaccggaggtcgctctcggtcagctcgtcgtcctcgtcctcgtccttctcctcctcctcgtcggaggaggacgagtcactgattgccgacgaggaataatgaagtgtacaccataggtccctctcggtcagctcgtcgtcgtcgttcttctcctcgccggaggaggacgactgattcccgacgaggaataaataaagtgtacaggttgctgaatgcaacagcctttgtgcaggagaatcgattaggtgtgtgtggtttgtacgccaattctttttgtgacctctgtatatatccaatcattgcattgcatatatccaatcatttgatataa

SEQ ID NO: 104954 - DNA, 1990 bp, Zea Mays
atggcgcccgagcccgagcccaaacccacgcgctgcggcggccgagatcctgccttcaacgacgcgaaccccatcccccacgcgccgcggcggccgagatcccgccttcaacgacgcgaacgccaacggagcccgagcccacctcgccttcaacgcccctgcctccctctttctcctcctcccccgcatgcttccactgcttctctccagcggcgccgccaccgtccctctcgctccagcgagatccagatccggcgcggctcagagtggcaacgcgccgcaaccgcggccgcgccccacacgtgccctatccaaccaccatggagctcttccccatccatccaccacgccgagcgggaggtcgaagtgcgagcgctggccgaccaggcggcccacatagaggccgaggcgcgggccgtcgcgtgcaagaaggtcttccgctcctaccaggcgcttggcggacaccgcgccagcaacgtgcgcggcggcagaggcggctgctgcgcgcctcccgtggctcctccggccccacccccgcagccccagccgccgctgtcgccattgccggagcaccgtgacggaggcgaggacgatgacatgaacgcaaagcagcagccgcgcgagtgtccccactgcggccgcgtgttcttggggcaggctctcggggagcacatcatgcagtcccatgtgtgcgcctcgtcgccgcttgccggcaccgccaccgcctccaccacctcagccgccactcctgcgtcaccgaccaacagtccctccatgatcgatctgaacgtggcgccgcagtccgaggaggtggagcactctgccgtgtcagatccccgcttcaatccaggtgcctgaagctgaagcaggcagatcagcgccctcattctggatagttccgttgctcggaggtgattctaggtgagcatcgtcagggggagataaaggttgagctttctcttgaagctgcaaatttagcacagggaaatgcaactctaggaataagtgactcttcagcagtatctgcaacaagagccagggcactggctgaggatgcatttttccatccatccattatgtcaatcagttatgcttcagtagagcactatttcgccatttacatgccatttttcgcaccagtttccttgcatgtgctgctggcggcaatcaaagagctgaaacgttacaaggcagagcgagcaaaatattcggcatttcttgcttcccaggcgacatcctcctgatctggtggtgattagggtttagggtttagggtttagggtttaggcaagtactacgagaagaaggggctcatcgctgaagcttgggaatccttcaatcgacccagaccatgccatgagtcatctttgttgaccttacccccacctcttagcgagagaattcttgtgattttcttgatttttgttgttcatgtttgatgtcactaattttatttgttgttgttgttgtgcagatttgagatcgagcgaagctaagcttttcatcaagatggcgcttgtaagtgtttattcaattagtagttgtttaagtagcctctatctcttacttttttatatgctagaggtgtgtttaagttgattgcattggtgagattattttattgtagtttcgacttgtggtgtggcatgtcatgatggcctcaaatcatcagtgttacaggtggccaccacaagcgaggggtctgcttcaacttcttgacagagacagatcggaggctttcttggcaatggaaagttttgttggtagtagtattagctttatagggggacatgtcattagggttgatcttgtgcttttgaggccttgcttacaggcacggtactactgaaatagttagcaaaagatggcaatactgatgtaatccagaatgtagcagtacatatcaactgccgtcttagtttcagttcatgaagtgaataatgcataccaaactatgtcccagttcaaagcatctagaacagtgaagtat

SEQ ID NO: 104955 - DNA, 2306 bp, Zea Mays
atggcgcccgagcccgagcccaaacccacgcgctgcggcggccgagatcctgccttcaacgacgcgaaccccatcccccacgcgccgcggcggccgagatcccgccttcaacgacgcgaacgccaacggagcccgagcccacctcgccttcaacgcccctgcctccctctttctcctcctcccccgcatgcttccactgcttctctccagcggcgccgccaccgtccctctcgctccagcgagatccagatccggcgcggctcagagtggcaacgcgccgcaaccgcggccgcgccccacacgtgccctatccaaccaccatggagctcttccccatccatccaccacgccgagcgggaggtcgaagtgcgagcgctggccgaccaggcggcccacatagaggccgaggcgcgggccgtcgcgtgcaagaaggtcttccgctcctaccaggcgcttggcggacaccgcgccagcaacgtgcgcggcggcagaggcggctgctgcgcgcctcccgtggctcctccggccccacccccgcagccccagccgccgctgtcgccattgccggagcaccgtgacggaggcgaggacgatgacatgaacgcaaagcagcagccgcgcgagtgtccccactgcggccgcgtgttcttggggcaggctctcggggagcacatcatgcagtcccatgtgtgcgcctcgtcgccgcttgccggcaccgccaccgcctccaccacctcagccgccactcctgcgtcaccgaccaacagtccctccatgatcgatctgaacgtggcgccgcagtccgaggaggtggagcactctgccgtgtcagatccccgcttcaatccaggtgcctgaagctgaagcaggcagatcagcgccctcattctggatagttccgttgctcggaggtgattctaggtgagcatcgtcagggggagataaaggttgagctttctcttgaagctgcaaatttagcacagggaaatgcaactctaggaataagtgactcttcagcagtatctgcaacaagagccagggcactggctgaggatgcatttttccatccatccattatgtcaatcagttatgcttcagtagagcactatttcgccatttacatgccatttttcgcaccagtttccttgcatgtgctgctggcggcaatcaaagagctgaaacgttacaaggcagagcgagcaaaatattcggcatttcttgcttcccaggcgacatcctcctgatctggtggtgattagggtttagggtttagggtttagggtttaggcaagtactacgagaagaaggggctcatcgctgaagcttgggaatccttcaatcgacccagaccatgccatgagtcatctttgttgaccttacccccacctcttagcgagagaattcttgtgattttcttgatttttgttgttcatgtttgatgtcactaattttatttgttgttgttgttgtgcagatttgagatcgagcgaagctaagcttttcatcaagatggcgcttgtaagtgtttattcaattagtagttgtttaagtagcctctatctcttacttttttatatgctagaggtgtgtttaagttgattgcattggtgagattattttattgtagtttcgacttgtggtgtggcatgtcatgatggcctcaaatcatcaggtaaattacttctctactgttgtaatggaaaacctgggccaagggagtaatttcgacttgcgtagtaatggaaaaaattaccttctctctttgagggttccaatccatttcgttctctatgattgtcacctacctttcctgagcctacttttgttgctactataagaataagtcaatgaaaaaaatcttcatctctatttgtttccgctatgtattgtgtagcttagagttgtctctcttagaggttaatttgtcatcatgctaatatttggtttgaaatctatgtatttctgcagtgttacaggtggccaccacaagcgaggggtctgcttcaacttcttgacagagacagatcggaggctttcttggcaatggaaagttttgttggtagtagtattagctttatagggggacatgtcattagggttgatcttgtgcttttgaggccttgcttacaggcacggtactactgaaatagttagcaaaagatggcaatactgatgtaatccagaatgtagcagtacatatcaactgccgtcttagtttcagttcatgaagtgaataatgcataccaaactatgtcccagttcaaagcatctagaacagtgaagtattatgtctgtcgcgttttctc

SEQ ID NO: 104956 - DNA, 218 bp, Zea Mays
atgttacgtttgcagatatggacctcagtggttttctccacattaggaaagctggaagagccttttgaactcagttttttgctaacagtggtgttatagtgaaactgagttttgtgtgtatataccaacagctaaaatgtaaacacgacattatcatagctgagtacaggaataattatcttttatatcttattgtaaaatctgaaacagttctcctg

SEQ ID NO: 104957 - DNA, 585 bp, Zea Mays
cacctccccactcgagccagccagccagccagccagccgcttgggcgccatctctctagagcttcgtaccctcgaagagagatccggcgcggcccaataaacacccggctcactacagactcgcagatggccggcctcaggatgaagttcgtcgccgtcgccgccatggccgccgcgctcgtggcgtccgccgcagccgccgaggcccccgccccggctcccgcgtccgacgccgcggccgccgtacccctcgccgcggcctccctcgccgccgccgccttcggctacctcttctgctagatccgcgctggatacgtggttcctgctccaaaatatgattcgtctggtctggcgcgcgtgagtccagctcgtgtgtcgtgtgtgtctctgtgtgaggtgtcggcgggcgtgtgtgtatgtatggagtcggccgcggcggcggcggcggaggaggtgtgcgcgtggtgggtggtacgtgcttcgacgcgccactgtttgtcgcggcgatcatgtactaccctgctgcgttttctggttatcaatgagatgatttatttgattcttttcaggcctgggcactaataa

SEQ ID NO: 104958 - DNA, 1984 bp, Zea Mays
ccacgaaacagcgctggctgttgcaaaagcaaccgtttccagtttcctcgccagtgcaccccccctcccctggctccctctctcctccgcccccttttttatcgcccgatctcacacattttggaaggagagagagagagagacagagggagagattggagggaggcccctgcccaaggcaagagaaaccgcggcgcgcggagagggaggaagggcagacgcagacgggcgaacaagatgagggagatcatcagcatccacatcggccaggccgggatccaggtcggcaacgcctgctgggagctctactgcctcgagcacggcatcgagcacgatggcaccatgcccagtgattcctcggttggcgtcgcacatgatgccttcaacacgttcttcagcgagactggttccggcaagcatgtgcccagggccatcttcgtcgaccttgagcccactgtcatcgacgaggttcgcactggctcgtaccgccagctcttccacccagagcagctcatctcggggaaggaggacgcagctaacaactttgcccgtggccactacacggttgggaaggagattgtcgatctatgcctggaccgtgtgcgcaagcttgcagacaactgcactgggctgcagggattcttggtgttcaatgctgttggtggtggtactggctctggacttggttcactgctgttggagcgcctttcagttgattatggcaagaagtctaagcttggtttcaccatttatccttccccacaggtgtcaacagctgttgtagagccatacaacagtgtcctctcgacccactccttgctcgagcacactgatgttgcagtcctcctggacaacgaggctatctatgacatatgcaggaggtcccttgacatcgaaaggccaacctataccaacttgaacaggctgatctcacagatcatatcatcacttaccacctccctgaggtttgatggggctatcaatgtggatgttactgagttccagaccaaccttgttccatacccacgtattcatttcatgctttcctcatatgcccctgtaatatctgctgagaaggcctaccatgagcagctctctgtgcctgaaatcaccaatgctgtatttgagccctcaagcatgatggccaagtgtgacccaaggcacggaaagtacatggcttgctgcttgatgtaccgcggtgatgttgttcctaaggatgtcaacgctgcagttgcaaccatcaagaccaagagaactgtccagtttgtggactggtgccccactggattcaagtgtggcatcaactatcagccaccctctgttgtccctggaggtgacctggcaaaggtccagcgtgccgtgtgcatgatcagcaacaacaccgccgttgccgaggtgttctcacgcatcgaccacaagtttgaccttatgtacgccaagcgtgcattcgttcactggtatgtcggtgagggtatggaagagggtgagttctcagaagcccgtgaggacttggctgctcttgagaaggactatgaggaagtcggtgcagagggtgccgatgatgagggtgacgagggagacgactattgagtagctggctaataagtagttctctggtggttaatggttgggttattttgagtatatactctatggttccactccattggatactgctgctgtgtgtttccattttgtactatgtagtaaattgttcgtagccccctattggccatgattgttcatatcatccttctttggtttgcaacgctattcgtccaatttcggtgtatatgctataatgctattatgttgcaagtgtgctgtgctcaaccattgggttttatttatatttagaaacagaaggcattattactctgcgctgcagcttgtttctggatcatgggaacattgagatttgagaagttttgatagcagtctatcactgtgagggcctaaggaggcccacggaggggctgcggta

SEQ ID NO: 104959 - DNA, 1299 bp, Zea Mays
gagagagagagagacagagggagagattggagggaggcccctgcccaaggcaagagaaaccgcggcgcgcggagagggaggaagggcagacgcagacgggcgaacaagatgagggagatcatcagcatccacatcggccaggccgggatccaggtcggcaacgcctgctgggagctctactgcctcgagcacggcatcgagcacgatggcaccatgcccagtgattcctcggttggcgtcgcacatgatgccttcaacacgttcttcagcgagactggttccggcaagcatgtgcccagggccatcttcgtcgaccttgagcccactgtcatcgacgaggctatctatgacatatgcaggaggtcccttgacatcgaaaggccaacctataccaacttgaacaggctgatctcacagatcatatcatcacttaccacctccctgaggtttgatggggctatcaatgtggatgttactgagttccagaccaaccttgttccatacccacgtattcatttcatgctttcctcatatgcccctgtaatatctgctgagaaggcctaccatgagcagctctctgtgcctgaaatcaccaatgctgtatttgagccctcaagcatgatggccaagtgtgacccaaggcacggaaagtacatggcttgctgcttgatgtaccgcggtgatgttgttcctaaggatgtcaacgctgcagttgcaaccatcaagaccaagagaactgtccagtttgtggactggtgccccactggattcaagtgtggcatcaactatcagccaccctctgttgtccctggaggtgacctggcaaaggtccagcgtgccgtgtgcatgatcagcaacaacaccgccgttgccgaggtgttctcacgcatcgaccacaagtttgaccttatgtacgccaagcgtgcattcgttcactggtatgtcggtgagggtatggaagagggtgagttctcagaagcccgtgaggacttggctgctcttgagaaggactatgaggaagtcggtgcagagggtgccgatgatgagggtgacgagggagacgactattgagtagctggctaataagtagttctctggtggttaatggttgggttattttgagtatatactctatggttccactccattggatactgctgctgtgtgtttccattttgtactatgtagtaaattgttcgtagccccctattggccatgattgttcatatcatccttctttggtttgcaacgctattcgtccaatttcggtgtatatgctataatgctattatgttgcaa

SEQ ID NO: 104960 - DNA, 1830 bp, Zea Mays
gcagccacaggataacacgcccacggctctcgtcagtcgtcacccgccttgtcttgtttcgctgtcttgtttcgcgctcccccacccccctcccaaccccactacggccttccccccatggctcccctggcctcccttcctctcccgcccagtactgccgtcaccgctcgcttcctcgccgcccccgccatccgcgtgatcagcccatcgcggcccgcgctgccgctcctctcatccgcctccgcaggcggcttccctcacgcctctcgcgctccctgcagtgccgcccgcgagcaccgccgcggcaccgtgcgggaatgctctcgagctgatgctgctggagcagctccattatcaaagacactgttagacctcaaggattcctgctggagatttttaaggccacatacaatccgaggaactgctttaggatccatagcattggttgcgagagccttgatagagaattcccatctgataaactggtggttgatattcaaagcattctatggacttggggcattgatatttggcaatggttacatagttgggattaatcagatctatgatgttgctattgacaaggtaaacaagccatatttacccattgctgctggtgatctctcaattcagtcagcatggttgttggtgatattatttgcagctgcaggtttttcaattgttatatcaaactttggacctttcattacctctctatactgccttggcctatttcttggcactatatattctgttcctccattcagactgaagagatatccggttgctgcttttcttatcattgcaacggttcgtggtttccttctcaactttggcgtgtactatgctactagggctgcactaggtcttacattccaatggagctcccctgttgctttcattacatgcttcgtgacactatttgctttggtcattgctataaccaaagatctccctgatgttgaaggagatcgcaagtatcaaatatcaactttggcaacaaagcttggtgtcagaaatattgcattccttggatctggtttattattagcaaactatattgctgctattgctgtagcttttaccatgcctcaggatttcaggtgcactgtaatggttcctgtgcatgctgtccttgctggtggtttaattttccagacatgggttctggagcaagcgaagtacagaaaggatgctatttcgcagtactatcggttcatctggaatctcttctatgctgaatatatcttcttcccgttaatatagagagatcctgtagttcatcttgatcttgggctacagcctaattcatggtgaaaagagggagaagttggcaaagtgaggtctgttgtgcatattttcaacggaaacaatggagtagcaatattgctatgctagggttctgaagttgtaggagcttttctaagcttttacgatgttgaaggcgttgttggagctgtggaagctgttttcctttttttccttttgtatcaacagtgtcgcgttctgtacggtcttacttggaagtgctttgacctttgagcacatgagttgaagcttgagatctggtcccgaacaggtggcggtggaacggccaagacaagcttgtttcatgccactcgaggtcgaggctaaaccactacggcgtgctcttccatgaaacgcagaaaactaaggaaatggctatatatatggtgcaatacgttgtatattttctgagtttcagctcgtatatatagtaggaacctcaacttttaccccatcgattggaagactgaaacttcttgcatgcgtatgtatgcctgtgggtatgtaaaaaccttggcccgc

SEQ ID NO: 104961 - DNA, 1877 bp, Zea Mays
ccacccccctcccaaccccactacggccttccccccatggctcccctggcctcccttcctctcccgcccagtactgccgtcaccgctcgcttcctcgccgcccccgccatccgcgtgatcagcccatcgcggcccgcgctgccgctcctctcatccgcctccgcaggcggcttccctcacgcctctcgcgctccctgcagtgccgcccgcgagcaccgccgcggcaccgtgcgggaatgctctcgagctgatgctgctggagcagctccattatcaaagacactgttagacctcaaggattcctgctggagatttttaaggccacatacaatccgaggaactgctttaggatccatagcattggttgcgagagccttgatagagaattcccatctgataaactggtggttgatattcaaagcattctatggacttggggcattgatatttggcaatggttacatagttgggattaatcagatctatgatgttgctattgacaaggtaaacaagccatatttacccattgctgctggtgatctctcaattcagtcagcatggttgttggtgatattatttgcagctgcaggtttttcaattgttatatcaaactttggacctttcattacctctctatactgccttggcctatttcttggcactatatattctgttcctccattcagactgaagagatatccggttgctgcttttcttatcattgcaacggttcgtggtttccttctcaactttggcgtgtactatgctactagggctgcactaggtcttacattccaatggagctcccctgttgctttcattacatgcttcgtgacactatttgctttggtcattgctataaccaaagatctccctgatgttgaaggagatcgcaagtatcaaatatcaactttggcaacaaagcttggtgtcagaaatattgcattccttggatctggtttattattagcaaactatattgctgctattgctgtagcttttaccatgcctcaggatttcaggtgcactgtaatggttcctgtgcatgctgtccttgctggtggtttaattttccagacatgggttctggagcaagcgaagtacagaaaggtgaagtttttcagcatacatcttgcacgactaaagtataggcatacaataacaaaaactcttctaaaaaagacttcactaattaaaatgccagcacaattattttgcatttgtgcatgcgtactcaggatgctatttcgcagtactatcggttcatctggaatctcttctatgctgaatatatcttcttcccgttaatatagagagatcctgtagttcatcttgatcttgggctacagcctaattcatggtgaaaagagggagaagttggcaaagtgaggtctgttgtgcatattttcaacggaaacaatggagtagcaatattgctatgctagggttctgaagttgtaggagcttttctaagcttttacgatgttgaaggcgttgttggagctgtggaagctgttttcctttttttccttttgtatcaacagtgtcgcgttctgtacggtcttacttggaagtgctttgacctttgagcacatgagttgaagcttgagatctggtcccgaacaggtggcggtggaacggccaagacaagcttgtttcatgccactcgaggtcgaggctaaaccactacggcgtgctcttccatgaaacgcagaaaactaaggaaatggctatatatatggtgcaatacgttgtatattttctgagtttcagctcgtatatatagtaggaacctcaacttttaccccatcgattggaagactgaaacttcttgcatgcgtatgtatgcctgtgggtatgtaaaaaccttggcccgc

SEQ ID NO: 104962 - DNA, 1694 bp, Zea Mays
ccacccccctcccaaccccactacggccttccccccatggctcccctggcctcccttcctctcccgcccagtactgccgtcaccgctcgcttcctcgccgcccccgccatccgcgtgatcagcccatcgcggcccgcgctgccgctcctctcatccgcctccgcaggcggcttccctcacgcctctcgcgctccctgcagtgccgcccgcgagcaccgccgcggcaccgtgcgggaatgctctcgagctgatgctgctggagcagctccattatcaaagacactgttagacctcaaggattcctgctggagatttttaaggccacatacaatccgaggaactgctttaggatccatagcattggttgcgagagccttgatagagaattcccatctgataaactggtggttgatattcaaagcattctatggacttggggcattgatatttggcaatggttacatagttgggattaatcagatctatgatgttgctattgacaagtttttcaattgttatatcaaactttggacctttcattacctctctatactgccttggcctatttcttggcactatatattctgttcctccattcagactgaagagatatccggttgctgcttttcttatcattgcaacggttcgtggtttccttctcaactttggcgtgtactatgctactagggctgcactaggtcttacattccaatggagctcccctgttgctttcattacatgcttcgtgacactatttgctttggtcattgctataaccaaagatctccctgatgttgaaggagatcgcaagtatcaaatatcaactttggcaacaaagcttggtgtcagaaatattgcattccttggatctggtttattattagcaaactatattgctgctattgctgtagcttttaccatgcctcaggatttcaggtgcactgtaatggttcctgtgcatgctgtccttgctggtggtttaattttccagacatgggttctggagcaagcgaagtacagaaaggatgctatttcgcagtactatcggttcatctggaatctcttctatgctgaatatatcttcttcccgttaatatagagagatcctgtagttcatcttgatcttgggctacagcctaattcatggtgaaaagagggagaagttggcaaagtgaggtctgttgtgcatattttcaacggaaacaatggagtagcaatattgctatgctagggttctgaagttgtaggagcttttctaagcttttacgatgttgaaggcgttgttggagctgtggaagctgttttcctttttttccttttgtatcaacagtgtcgcgttctgtacggtcttacttggaagtgctttgacctttgagcacatgagttgaagcttgagatctggtcccgaacaggtggcggtggaacggccaagacaagcttgtttcatgccactcgaggtcgaggctaaaccactacggcgtgctcttccatgaaacgcagaaaactaaggaaatggctatatatatggtgcaatacgttgtatattttctgagtttcagctcgtatatatagtaggaacctcaacttttaccccatcgattggaagactgaaacttcttgcatgcgtatgtatgcctgtgggtatgtaaaaaccttggcccgcacaaagctacatgttacagaactttcagctc

SEQ ID NO: 104963 - DNA, 2296 bp, Zea Mays
atcgccctaccgctacggcgctaccacgccgcctcagtccaaatccaaagatcaaaagctccacttttcccacctcttttccctgttaaattatactccctgtccgctccaggaatctattggatctcgctgtgttcccggtcaatcactcgcatttctctactaatcgtcacctcttggagaaattaatctttaaaggcgcttaatcatgaagtgttttgagttaaaccttcacggaacagagggaagctagagagcctcctcggattctctacgtgctgccgcgcgagaggggagagagtttccctttttccaatcaccctctcactggagtgcggcagcagtccagtctccattcccccagttcgtgctccctcccatagtcgtcggccgccgccgccgcttttcgtcctctcgctcctgctccgcggcgacctagcgaggagcagttcgtgcgcgtgtttggtaagggaggaggaagaaatggctcttctataaggacaaaaatcagcttttcttgagagcttctgagaagtgttcctggcttacagcttagtcagatccttgggcacaaggatatgtggtccaagaaactacatggcgtgtttacccttcttatgctcatggttttcaatgtttcaggggcatttgttggtatcactattggcaatgacatgtcgaacataccaccagcaacagatatagtgtctatcctcaaagcaaagaagattcagcatgttcgcctgcttgattcagaccatcagatgttgactgcccttgcaaatactggaatagaagtgatggttggggttccaaatgatcagctacttcgtgtgggccaatctcgttccacagctgctgattggattaataagaatgtcaatgcttacattccggccactaacatcacatatattgctgtgggtaatgaggtccttactaccattcccaatgcagcacttgttctcatacctgcactgcaattcctccagtcagcacttttggctgcaaacctcgatactcaagtgaaaatttcgagtcctcattcaatggatgtgatctcgaaggcgtttcctccctctgctgccactttcaattcgacatggagctcaataatgtctcagtatcttcagtttctcaagaataccgaatcttcgtttatgctgaatgcccaaccatactatggctatgtcggaggacaaggcgtattccccttggagtatgcactgttccgctcacttaatccgaacagtcaaatttcagatcctaacaccaatctcttttataccaatatgtttgatgctataattgatgctacctacaactcaattcaagcaataaatttcacggggattcctgttttagttacagcttctggctggccatggcgtggtgggccaagtgagaaggctgctactgttgataatgctttggcctacaatacaaacctcatacatcatgtactgaacaattctggtactcccagccaaccgaataatcagtcgagcacctacatctttgagctgttcaacgaggataatcggtcagggcctgtatcagagcaaaattgggggatcatgtttcccaatgcaaccactatatactctctatcatttgaggacgtggccacaactattcctgaatcaccagctttacgtggggtgttttgtgttgcaaatccaagtgcaccccatagtgcactgaagcatagtttggattgggcatgtggccctggttctgcaaactgcagtgcaattcaacctgggaaaccatgctatgcatcagatgatattgtagctgttgcttcttatgctttcaatgattattaccatagaacacagtctagtggcggtacatgcaacttcaacggcaccgcaatgataacatcaactgatccaagccatggttcatgcgttttcgctggaagcactggcgccaacggcggaacggcctctgggcctgtaagcccagacagttttgcttcaaaatccaaaacctgctggttgactcacctagtagccacattgttgctgcccattctatttgtagtgatgtaaaacattgtaaccatgtcacattttggatgagatgcccgcaatttatcgtggatcttgtcattagatactgtagtgactagtgacccatttgggtctgctgtattcaggtagatgccatgtaatcttatcccaagatttgttggcctaggaatcagtatttcgtcaaatcatcaattttgactgtcaactcggaaaattgagctgtgacaatccgagacctctctgaaatgttgaaactt

SEQ ID NO: 104964 - DNA, 981 bp, Zea Mays
agatcttctttcgacggtggatttcgacagtaaagtcccgcgggccgcggtgacttgccggtgggcatgtcctcgtcctcttccttccccacctcccgcttccccttcgccgccggcgccagggcccccggcagcagacgcggtgccggtggaggcgggagcagcgtgcggccgtgggggtcgaccggcgggacgtcggtgtcttcatctgggaaacggatacagaaggagctgctggacctcaacgcctccgactgctccgcggggcccaagggcgacaacctgtaccactggctctccaccatcttcgggccccaaggatcgccatatgaacgagggatatttttccttgacatcgtgtttcctcgtgattatcccttcaaacctcccatggtaactttcaaaacaaggatttaccattgcaatattgattccactggtaaagtgcatttggacattctgaaggatggttggagtccagctttcactatttcaaaggtgttattggccatcaaagacatcatcaacaatccagatccatacaccccgcttgtgatgagcatttcacgtcagtatctgactgatagagctaaacatgatgaaacagcagctgagtggacaatgagatttgcaagatagaggattctgtttgcatctaagcacgattgaccttgtaaaaaaatcttaatgtggcctgacgcctgaaatggtgaatgttggcaaaggagccatcagccatgtattatttgatgtgagttgtgacataaaggtgtactttatgcttgagtgttctttaatcgctgcttttaggtggagaataatctttttcgattttgcacttctgccaaagttgcaccctgaactcttcagaacttttcttccgagtttatttctaaaaatggtttctattgaaactggcctcgtgtgctgctgtcctggttgaggatgtcagtttcatatactgaaaggaaaaagaaacat

SEQ ID NO: 104965 - DNA, 92 bp, Zea Mays
cataaacctgtgcatgtactgtttattttgttgcgcgggactaacggaggcagaacaggcgttgacagaacgcgtcagaggcagaacacgtc

SEQ ID NO: 104966 - DNA, 1316 bp, Zea Mays
aagccgtggccagagccaaacgagcagattctccgcgccgcgtggcacgaggcggctgcgcccgctatcccctcgcggataagccggccccgctccggcgagatcccttaaactgccgtgcaccgcgcaccacagatcccccacgccacagcttgcgcccgcaatggcactcgtctccgcctcctcgtcctccaccaccgccgtcacggcgctccccaggaatgggcagcgggcgtcgtcctccttcctcggcggcaagacgctgctgagacaggccgaggcggcccggccgtcgttcgccgtgcgcgccgcggcggaccccaacaggccgatctggttccccggcagcacccctccgccgtggctcgacggcagccttcccggcgacttcggctttgatccctggggcctcggatctgacccggagagcctgcggtggaacgtgcaggcggagctggtgcactgccggtgggcgatgctcggcgcggcgggcatcttcatcccggagtttctgaccaagatcggcgtcctcaacacacccttctggtacaccgccggcgagcagcagtacttcaccgacaccaccaccctcttcatcatcgagctcatcctcatcggctgggccgagggccgccgctgggctgacatcatcaagcccggaagcgtcaacaccgaccccatcttccccagcaacaagctcaccggcaccgacgtcgggtaccctggtggcctctggtttgacccgctcggctggggcagcggctcgccggagaagatcaaggagctgcgcaccaaggagatcaagaacggacgcctcgccatgctcgccgtcatgggcgcctggttccaggccgagtacaccggcaccggccccatcgacaacctcttcgcccacctcgccgaccctggccacgccaccatcttccaggccttcacccccaaatgaggagttgaacttattattagcattttgaggagtgctaccacacatgcatcgtcaggttgatggccgatatatatgaaacttcacattttttttggtggggaaggactgctgagtagactgtcaatgatggaatgctcgtggtgcgagtgcgatgcatggtgtacttgtactatgttgtaaccagtgtaaaaaggggatactcgttagatgttatgccatgttctctgaatcaacggcttgatgatttgtgcaacgcttacaatcgttttgggtgataaagggcagtcctaggctcccagcctgaaaatcatttagcgcaaaatcatttaggggttgttcgtttatgccaatccatagaccttgttcagtt

SEQ ID NO: 104967 - DNA, 1043 bp, Zea Mays
tctccgcgccgcgtggcacgaggcggctgcgcccgctatcccctcgcggataagccggccccgctccggcgagatcccttaaactgccgtgcaccgcgcaccacagatcccccacgccacagcttgcgcccgcaatggcactcgtctccgcctcctcgtcctccaccaccgccgtcacggcgctccccaggaatgggcagcgggcgtcgtcctccttcctcggcggcaagacgctgctgagacaggccgaggcggcccggccgtcgttcgccgtgcgcgccgcggcggaccccaacaggccgatctggttccccggcagcacccctccgccgtggctcgacggcagccttcccggcgacttcggctttgatccctggggcctcggatctgacccggagagcctgcggtggaacgtgcaggcggagctggtgcactgccggtgggcgatgctcggcgcggcgggcatcttcatcccggagtttctgaccaagatcggcgtcctcaacacacccttctggtacaccgccggcgagcagcagtacttcaccgacaccaccaccctcttcatcatcgagctcatcctcatcggctgggccgagggccgccgctgggctgacatcatcaagcccggaagcgtcaacaccgaccccatcttccccagcaacaagctcaccggcaccgacgtcgggccttcacccccaaatgaggagttgaacttattattagcattttgaggagtgctaccacacatgcatcgtcaggttgatggccgatatatatgaaacttcacattttttttggtggggaaggactgctgagtagactgtcaatgatggaatgctcgtggtgcgagtgcgatgcatggtgtacttgtactatgttgtaaccagtgtaaaaaggggatactcgttagatgttatgccatgttctctgaatcaacggcttgatgatttgtgcaacgcttacaatcgttttgggtgataaagggcagtcctaggctcccagcctgaaaatcatttagcgcaaaatcatttaggggttgt

SEQ ID NO: 104968 - DNA, 1073 bp, Zea Mays
ccgtgcaccgcgcaccacagatcccccacgccacagcttgcgcccgcaatggcactcgtctccgcctcctcgtcctccaccaccgccgtcacggcgctccccaggaatgggcagcgggcgtcgtcctccttcctcggcggcaagacgctgctgagacaggccgaggcggcccggccgtcgttcgccgtgcgcgccgcggcggaccccaacaggccgatctggttccccggcagcacccctccgccgtggctcgacggcagccttcccggcgacttcggctttgatccctggggcctcggatctgacccggagagcctgcggtggaacgtgcaggcggagctggtgcactgccggtgggcgatgctcggcgcggcgggcatcttcatcccggagtttctgaccaagatcggcgtcctcaacacacccttctggtacaccgccggcgagcagcagtacttcaccgacaccaccaccctcttcatcatcgagctcatcctcatcggctgggccgagggccgccgctgggctgacatcatcaagcccggaagcgtcaacaccgaccccatcttccccagcaacaagctcaccggcaccgacgtcgggtacagctcattccttttgcatgacccatccatctagcagtagcagtagagtagtagttgttgacgccttttcggagcgccaaatactcaagaagaaccggcggcggtgctctctggtcaggcgcggacggtccgcggcctggggccggacggtccgcgacctggcgcaggggctaggttttcctgcctgacgtccggacggtccgcgccctggggccggacggtccgcgcgtgcgcaggggcggcggaagatcgccggcgacgcctggatctcgctcccgggagggaccccgttggggaggagagatcctaggagttgtctaggctcgggccggccgacctagactcctctaatcgacgtagagtcgaggagaggcggagaatttggggatcgagaggctaaactagaactagactagaactactcctaattgtactagaaataaatgcgaatagaagttgtattgattc

SEQ ID NO: 104969 - DNA, 1413 bp, Zea Mays
cgcaccacagatcccccacgccacagcttgcgcccgcaatggcactcgtctccgcctcctcgtcctccaccaccgccgtcacggcgctccccaggaatgggcagcgggcgtcgtcctccttcctcggcggcaagacgctgctgagacaggccgaggcggcccggccgtcgttcgccgtgcgcgccgcggcggaccccaacaggccgatctggttccccggcagcacccctccgccgtggctcgacggcagccttcccggcgacttcggctttgatccctggggcctcggatctgacccggagagcctgcggtggaacgtgcaggcggagctggtgcactgccggtgggcgatgctcggcgcggcgggcatcttcatcccggagtttctgaccaagatcggcgtcctcaacacacccttctggtacaccgccggcgagcagcagtacttcaccgacaccaccaccctcttcatcatcgagctcatcctcatcggctgggccgagggccgccgctgggctgacatcatcaagcccggaagcgtcaacaccgaccccatcttccccagcaacaagctcaccggcaccgacgtcgggtacagctcattccttttgcatgacccatccatctagcagtagcagtagagtagtagttgttgacgccttttcggagcgccaaatactcaagaagaaccggcggcggtgctctctggtcaggcgcggacggtccgcggcctggggccggacggtccgcgacctggcgcaggggctaggttttcctgcctgacgtccgtccggcccacaggcgcggaccgtccggcctcagggccggaccgtccgcatgctcaatttggtgttcaacatatgcccccctgccttttggtggagctgagcgaaccaaaagcaactaactcgatgttatcacatcggttttcttaggcatcttgccacttactaggatggtacgcagtcgtcttggtctcggacgtgacccatttagctttgatcgaactgtcagtcccaacaccatcgagcgtcatactgatcctgaccaatctgtcacctaacttttcctaattttccaagtgttctggcgtagcttcatagtcgactaggtcttccccttgcaggtcatcttcctccatgggtgtcggtacatcgttggaggtgtcttggtgtagtgcggatggttcggcctcaggggtcggacggtccgcgccctgtacggttggtccggtctttatagccggactgtctgccatacctgcaaaaagctgcacagttgttgttttattttctgtctttatggccgtttgattttcctcaacgacctttggtctccatctcttttgtggtggcggatactgtggatgcgtgtcattgaatattttttccgcctccttctcctgattctact

SEQ ID NO: 104970 - DNA, 2357 bp, Zea Mays
atggcgaaaagctgcggcgagtacactgtggaggttgcgtcctccagctcctctcctattcccgcttccgcgttggctacgaggtcgaaggcgaaacaccatatagagatcgaggggtaccctgtggatggcgtctccatcggcggagttcctcttcgtctctcacgggcacctcgaccacatcgggggccttcccatatatgtggccagcgggggctcttcaggttgtgtccgcccaccatcttcgtcccggcgtgcctccgggacctcgtggagcggctatttgaggtgcaccgcgccatggaccagtctgagctcaaccacaacctggtccccctggaggtcagggaggagtacgagctcaggagggacctcaaggtcagggctttcaagacctatcacgccatacccagccaggcaaatccaatggagtcgtgccccagtaaagaggtggagaacttgagggagaagctggttgaagaaaatttctacctaatcactgagctaggtgaacaaggacgagtacctgtacttctgctgaagcttgacgaccccgtccctagaagaaaaccagctatcgtgttcttgcacaactcttacaagtgcaaagagtggctgcacccactgcttaaggtcttcctgtctttgagatttgatgaagatattggaaaagatgagattgagaaaaagagggatgtatcagtttcagaatatattcaaagtgtgacaaagagtgaatctcatgtgattcggtctacagtgctctacaacatcaaaaccattactacaactatccacaagtggcaaatgattcttctgttcaatgaggagttgatcaaggtccagatgctgcttaccagcttacatcgtttctggattcaggatcttatgttggtcccacaagtaacacatattatactgttggtgctcataagaccatgccaggatatgcaacaagcaattactattatcatcaaaacaatgcctgagttcaggtggccttccaggtactacgagatcctgggggtctccaaggacgcgtcacaggatgacctcaagaaggcctaccgcaaggccgccatcaaggaccaccccaacaagggcggcgaccccgagaagttcaaggagctagctcaggcttatgaggtccccagcgaccctgaaaagcgagagatctatgatcagtatggggaggatgccctcaaggagggaatgggaggcggtggtgggatgcatgatcccttcgacttattccagtcattctttggtggtggaagcccttttggaggtggcagcagtaggggcagaacgcaacgatggggagatgatgtggttcatcctctgaaggtttctctagaggatttgtacaatggcacatcaaagaagctctctctgtcccacaatgtcctctcctccaagtgcaatggtaagggttccaagtctggagcttcgtcgaggtgtgctggttgtcaatgttctggcttcaaggtccaaatccggcagttgggacctggaatgattcagcaaatgcaacatccttgcaatgagtgcaagggttctagagagaccatcagcgataaagatagatgcccacaatgcaaaggtgataaagttgtgccggagaagaaagtttttgaagtggtagttgagaaaggtatgcagaacgggcataagatcacattccttggcgaagctgatgaagcacctgatactgccactagagatatcatctttgttctccagtagaaggagcatcccaagttcaagagaaagggcgatgacctcttctacgagcacacactgaccttgactgaatctctgtgtggcttccagtttgttctgactcacttggataacaggcaactgctgatcaaatcgaaccctggcgaagttgtgaagcctaattctttcaaggcaatcaacgatgaaggcatgcccatgtatcagaggcccttcatgaagggcaagctatacatccacttctcggtggagttctcggacttgttgagctcggagcagtgcaaggccctggaggttgttctcccgcccaagccagtatcacagtacactgacatggagctggacgagtgtgaggatacgatgccctacgacgtgaacatcgaagaggagatgcggaggcggcagcagcagcaccaggaggcctacgacgaggatgatgatgtgccaggtggtgggcagagggtgcagtgcgcccagcagtaggcagcttgcggcaaatttgttgtttcgctttgggcgactattgagtttactcgcttgtattggtcttatgatacttcggttacaagagtgcagtattactaaggattagttcctatataatggcacattggcac

SEQ ID NO: 104971 - DNA, 1685 bp, Zea Mays
aataaaatctttagttgacaattgttttaactaaataattttagttttttaacaattagcgactccaactagaatcaaaattttcaagaggggtcataagcaaactttcaagctcaactttccctgcaagaatggatcgcgagacccaagtagagtagaccaaagacaaaggaaagcgagggccaccatcccccaaacccgtgagaaatcgaatcgagaagggaagagcacgcgccgtcgccagcaccgcgtccgccatggccgcctcctccccccgcgcgttgcaatcgctggggtccgccgcctcccgcttcctccacgcgcggggcttcgccgcggcggccgccgcggcgccctcgccggcggtcttcgtcgacaagagcacccgcgtgatctgtcagggcatcacggggaagaacggcaccttccacaccgagcaggccatcgagtacggcaccaacatggttggtggagtgactcctaagaaaggtggaactgaacatttagggctcccagtgtttaactctgtagcagaagctaaggctgaaacaaaagccaatgcaactgttatatatgttccaccaccatttgccgccgctgctataatggaggcaatggaggctgagctcgaccttgccgtctgcattacagaaggaatacctcagcatgacatggtgaaagtgaaggctgcactaaacagccagtctaaaactcgattgattgggccaaattgccctggtatcattaagcctggtgagtgtaaaattggaatcatgccaggttacatccacaagcctgggcgtattgggatcgtatctcgttctggtactttgacatatgaagcggtgtttcaaacaacagctgtaggattgggtcagtcaacttgtgtaggcattggtggtgacccgttcaacggcacaaattttgttgattgccttgaaaagttcgtcaacgaccctcagacagaaggtattgttctcattggtgaaattggaggtacggctgaggaggatgctgcgacattcatccaggaaagcaaaacacaaaagcctgttgttgcattcattgctggacttacagcacccccgggccgtcgcatgggtcatgctggagctatcgtggcaggaggaaagggtactgcccaggacaaaatcaaggcactcagagaggcaggtgttaccgttgtcgagtcaccagcgaagattggctctaccatgtttgaaatcttcaagcagcgtggaatggtagaatagacgatggtacagtagagacattgagaaaccgcattttgatgctcatgggcaattgcgagcaattccttccatggcctcaaacaaaactaatgaggctaccttttcttacgtgccttctgtttggaagatggcctgacttcacctggatcaccttccaatgagctcatttccaataagacgtttcagagccatggacatgtttggagtcaatgtgaatgcctaatttcgaatttttattgtttacacatgtcaatctaggtttacctatctgtttccttgtattatattgtgcggtaaattgccccacaactgaggacgattgctttgctcggtgtcatgtttgagaaaatttcttatttggccctgattgaaacctgtctttctttcttggcccttgtcctgaaataaaatttcttacctattcgccctcac

SEQ ID NO: 104972 - DNA, 1024 bp, Zea Mays
acctgtttcgtccctcacctctgcccccaaatccgagccaccactgcctgccgctcttcgtcgtcctccggacgcccatgctgtcgccctctccccaacaccgtcgtcctaccccgctggagatcccagccgtggtccatggaggacgtgcggcgcgacgaggaggtcctgcagcgggccaatgttgtcgtgcgcggggacgaggtgacggcggcgttctacgcgcattggtgatggcttctccaccgtgttccgcacgcacttctactgcgccgtccgcggggagctccgcaccgatgccaaggtggccggcttcgacgggatcgtaatctccaggagctatgctgcctccacgccaccgtcaagcgcatcctcggcatctgcttcggccaccagcataagaaacacgactcttacgaagctcctatcaaatctaaggagcctttgattttcaatgttggattccggcaatttacggccattgttttcatccgacaacatcaactgcaataaacataagatggagagatttctgcaccatggctggttttccgttgcctctgtatatgcttcaatttccttccttccacttcctctaatagttttgaagaacagagatggcgagcaatctaccattgcagctgtaggttcgctaaaaagtgtggatccaaatcggatcattctaaagaaaattgttctgactaggtaagcttgggtgcatctatcttcacaaggaaattttagttatgcagaattgtgttgttcgttaagatgaaaaccaactcgagttggtttcatcaagatatttttgttatttgtgagcttcaatgtattcatttattgatttaggaaacaaccaaattatttgtgagcttcaatgtattggtgagcttcaatgtgttcatgtactttagggtacgcttgatgtgtgcagtaattacaatcagtctaaatacaaaaataacacctatttgttgttgatgttgtcatgtttattaatacatgcttgcctagattaatgatc

SEQ ID NO: 104973 - DNA, 2113 bp, Zea Mays
gtccccgcttccgttactccctccgcgccccgctcctcccgcctgtcctccacgcgacgttccttgtatccccgtcgccttccttgggcagttgggctgagtcctcccgtctctcgcccctgcagatatagttgcggcggggtttccttcttcgagaaagttccgaaccagagggagccgcgcggaaagccggaggcgtcccatgctgctggcagtcttgctaacttcagctgatggttaatatgagggacaatgactcatcaagcgacgcacaattggacgagccattaggacgggtatcgatactctcttacggttctgggcatatgctcaacgacatcacatcgtcttgttggtttacctatttgcttgtgttcttgacagatctgggacttagtccaggtgatgccgctattgtgatgctttctggacaattggcggatggcttcacaacaatctttgttggggaattgatggatcgctttggacatttcaaactgtggcatgcaggaggatctattttagtggcaatttccttctcgtctgtttttggtagctgtgttccttgcaaacttatgggaattaatacatctactttggagactgttggatacagcacatttgctgctatttttaatgttggttgggcagttactcaagtcgctcacatgtctatggtaaactgcattacatcaaatccaactagccgggtttcacttgtaagctgtcgtaatgccttcacgatggttgcgaatcttagcctgtatggcgttgctttggtgatatttactctattgcagtcagtgaatgtactagttcagtatcggtggattgcttaggtgtccatttccctcggatcttgctttgttgtcatcttcttgattggaaccaaagagccaggatcaattcggcactgtttggataagagtccttccagaatttcatgggactactggttcaagagagtattgtactaccaagttgctctagtctatactctgactagattggtgaccaatgtttcacaggcatttcttgctttctatgtaataaatgatttagaaatgaatcaatcctccaaagcattggtacctgctattatctacatctgcagtttgatagtatctgtaatattacaggagactagatggtcaagttggcgtcttaagctttacttttcagctggagcagtgctttggatattgtcaggtcttggaattgttcttctaccgagcagaatgcacaacctcatgtatgccatttcaatcgtaataggagctgcgaatgcacttatgacagtgacaagtattagcatggaaggtgttctagtaggagaagatctaaatggttgtgcttttgtgtatggctcattaagttttgttgacaaagtttcatgtggaatagctctctatgttctcgagtcctatcaaggaagtacaaagatcagatcaaatttaggaacaacatctggctattcagttacaagacttggcttgggcttagttccagctgcttgttcgctgctttcagctatagcagcttataccatggagctccctgatactcagaaaggacctttggtggaaccccttctagcataacttcactggtggcagtgttacagtttcaccgtgagatttcacagtaattgctcgatggaatgacactgctgctcgagcctgaagatgttagcgacctggtcaattcgttttgacttcgtatatatagtctgaataaattatgacggaggggatatactgagacacgtttgaatagggattagaagtgacataggggggctaggggcaagaagatctgtgttgatcatactgagctttacaagtcattctgcaatccaatgtaaatataacttagcttcatttcgaaagcatcaaaactgccaactaggcacatgtagcgacgatgggcaaggaaaagaatatctctggtccttgttctacgctataatttcattgtatatgtagcatcatgattgaaaagaaatatcttatatttatattgatgggtgaaatagtgtcgcctatgctcatgtaaattgtttctgacatttagaaattaaatatgcttgagaagagagcactaatctgtctaa

SEQ ID NO: 104974 - DNA, 419 bp, Zea Mays
aaatacaaagcccaaacgaattagagagccaacatacgctaatcgccctaaggaactagggagccaacatcacggcagcaacagagtaaaccaggacatagagagatcgagtcttgattcctaaataacacaatatattgtacccaataaaacattccaaaccatagtacaacgttacaaaaatgtgtagtcacagaaaaataactaacaacattttaggtggacatagtaacaacatatttagccttgttcatctaggactcctgcaaattaagctggtcgcccaagaccaaaattcatggcttctttctttccttcttggccgaaacaataacaatcaacactcatttgatctcgcaaaattttacagctccaaattgtctgttcctcaattccttgacacctaaactatagagaat

SEQ ID NO: 104975 - DNA, 1039 bp, Zea Mays
atgattaaaaataccgtggccacgctgatggtgcgcctccaccacctgcccctgccccgcgccgcgcccgctcccacctaccgttgcggccgccacctcgccctcgcgccccctctccctcggctgcgggcatcggccgccgtcatgtcaacggcggcggaacagacgatcgccgaccagaagcgcacgctgcgcgccgaggtgcgcagggcgctgaaggccctctctgccgaccagcgcgccagcgaagatctggctattcaaactacaatactggattcctcttggttcaaagcaagcaaacggttgtgcgcttatataagctgtcagcagttgcgagaagttgatacatcaaaaatactagcagagtgtctaccgtcgaatcctggacaagaggaactggcaaaggatctttatgttcctcgagtggaggataagaaccgtaacatgaggatgctcaaaatcaccaccatggatgatttagttaagaattcaatgaacattctggaaccatcgcctgtggatgctactgggaacaatcgtgaagatgtattgtcatcattgtctcctgttgatctttttttattgccgggacaagcttttgatagaactggtcgaagactggggcgtggtggagggtactatgacacattcttgctgaagtaccaagaacttgcaaaagagaaagggtggaaccagcctctcttagttgctctttcgtactcggtgcaaattatggacgagggcatcatcccagtcaattcaactgatgttcctattgatgctctggtctcatcgtccggtgttattccaataagtgctgcggcgttgcagaggatgcaatgaagttgattggcctctgtagccatgctttcacaacaagcaccttcttctgatccctggttgcactagcaaatacaccagcagatcaaggaaactgtctcttttttccccctcgtggctcctctcttgtatcatcttttacgttttaacagggtgaactggacgtctacatcttattccagccacttcagattta

SEQ ID NO: 104976 - DNA, 990 bp, Zea Mays
ttcagaaaatacaatacactataagaaatgtgatcacaaactgtatgaatcccaaattttgtttcggttcaataatattgaagttttaataccttgctctggtaccagaagagtcgtttgtgatcatagcgacacttaccacctaagacagtaatcatatctttcagatgcaaaactcgtggaaaggttgattcatactcacataaactctttgtgtggctaagaaatcaagcatttctcatgacatctggattctgaaccaacaaacttgcaactgagagcttgtaacctggtcctgtggattggatccaggattcgatgtatgaacatgaattctgtatagttacatcttagaactttgaaagagtaaatccatgctggtgcggcataagacaataagcctatcactgtctggtttctttcttgattctgtatattgtgtaaaacgcctgagtacatgaaccccaaagatatattgttctactctaatggatggttaagtttatgctaaagtacacagctatgatttttgatttcttgaaaggtttttatgctgctatatgattgtttctttttccaaaattaaaaggtactatgacacattcttgctgaagtaccaagaacttgcaaaagagaaagggtggaaccagcctctcttagttgctctttcgtactcggtgcaaattatggacgagggcatcatcccagtcaattcaactgatgttcctattgatgctctggtctcatcgtccggtgttattccaataagtgctgcggcgttgcagaggatgcaatgaagttgattggcctctgtagccatgctttcacaacaagcaccttcttctgatccctggttgcactagcaaatacaccagcagatcaaggaaactgtctcttttttccccctcgtggctcctctcttgtatcatcttttacgttttaacagggtgaactggacgtctacatcttattccagccacttcagattta

SEQ ID NO: 104977 - DNA, 1862 bp, Zea Mays
gttcgaaacattttggttgctttaattttattagatgtaggacgcactatccatagggatttgatgttccattcatcggtttttttttcttccttaaacgtgtagaacaaagcatgctaacatgacagaaccaaagccgctcggtcgccttctgctgggcgacacgggcggccgaaaccctagcgccgccgccccctccctccactccatcccacctcgccgtcaccagagggcgccgccggatgtccgcgcggccccaaggaaggtggcgacgcggcgatttttctctgctttggtcgcgtctgcccggatctagtcgggttctaggaggtggcaacggcgtgtgtggggcggcgacccttcgccggcgcggctcagcctcggcggcatcatggcggcagtgagcgcggcgttcgtttggcacatccgggcgttgcgggtcctggctgggtgtccgcgcagcaggggggcatgcggccggccgtgggtcgcacgcgcggagaaggtgttgtctggcgcccaagggtagggagcggcgccgcgcgtggaggtctggaatctggtgcgcgtggggttcgcgacctccgcgtgccagccttcggaggcgccagcaggctggtctcgggcatgtgtcggggtggtgttcggcgtggtgcgttggtgggctgcgcggtcggccggattggcggtggcgggacctccactcgtctgcgtctacgataaggtggtcggcgtcctgatccgcgttgggttggtcggattcgcgggctggctgcccggatctggggggctggtcgccttccgccgctcctccctgttgctggcttgggcgggtggccttgcggctgctgtggccgtggtggcagcggcggtgcccgcgcgctcgcgtggccgtagctggtctgcggcgtcggcacacacgcgtgcggctggcccgctgtggtggttgcgtggcttgcctgtacttgccttggtcggggcgttggccgtcgccggatctgcggcgccttctgcaggggcggctagctccgtgcgttggggcgtgtggtgggagggcctctagcgaaagccatgcccgcttgcgggcggacagcggtgacgcccgcgggcgccacccctactctattgagggtgctgtccttggacctctcaccacaatgcgggaaccctcgcctcggccttcttggggtctttcgctggtgctcgtccgacgttggggctctgaaggttggggctgctgggttggtgggtcggcggacgacaggaggtcttcggagcaaactttgcttggttggtaccaggcgggcggcgacgacttttcgatgtcgtttctccttcttgaaggcgcggcccagaagacctctagtttatgtgttcgtcggcgttgtggaggctctttgtcactccgcttggctcggtggtgtcggggccattgtcgcttttggcgtctgcttgctcccggagttcggcgttgtggatctttgctcgtggcgaagaatcggagctgcctcgtgtggggtgtgcgaggcttggcaacgatgacgcgccgtgatcttatttcttgcgtcggtgtctggatttaggcgtcgttgagttgctttggcagtgtgcggctcgtcttggggagtcggagctgctcgtcccttgtgtttgagcttggcaatgatgactatagatgtgtttgtgtgtgtgaggctgtcgttgtctaggtggtttgttaaggccttcgccggtttttctacggtgccccctgtgtaggttttgggtccggttttccttaaaactggatcaattctattcttcttaattgagaggcagagctcctgccattatgttcaaaaaaaaaaaagcatgctaacata

SEQ ID NO: 104978 - DNA, 156 bp, Zea Mays
atgcaggggaggtcgtcgtggacgagcgacatggtgtgcaccatctcgacggccgccgcggccggcatggcccagggctccggcccgcccaccacggcgcacgcggccaggcacagcgcggggcgcacgcgcttcccgcccgccagcagcgcgtaa

SEQ ID NO: 104979 - DNA, 1437 bp, Zea Mays
atggcggagctaaagcggctgtcagagagccgggacctgacgcggatcgagcgcatcggcgcgcactcccacatccgggggctagggctggactcctccatggaggcgcgcgacgcctcggagggcatggtcgggcagctgcccgcgcgccgcgccgcggggctcatactccagctcatccgccagggcaagatcgccggccgcgccgttctcctcgcgggccagcccggcaccggcaagaccgcgctcgccatgggcatcgccaagtcgctcggcgcggagacgcccttcgcctccgtcgccgcctcggagctcttctcgctcgacctctccaagacggaggcgctcacgcaggccttccgccgcgccatcggcgtgcgcatcaaggaggagacggaaatcatcgagggcgaggtcgtggagatcttgatcgaccgccctttgtcggcctctgccgctggcggcagctcggctgcccctacaggtgctactgcggctggtaagtcgggtcggctcacgctgaagaccacggacatggaaacggtgtacgagctcgggggaaagatgattgaggctcttgggaaggagaaggtgcagagcggggatgtgattgcgcttgacaaggcctccgggaaggtcaccaagcttggacgctccattgggaggtcgcgggattatgatgccgttggcccgcacaccaagtttgtcaagtgtcctgatggcgagctccagaagcgcaaggagatcgtgcactgtgttaccttacatgagattgatgtcattaatagcaggacacagggttttcttgcactgttcactggtgacaccggtgaaattcgtgcagaggttcgggagcagattgacacaaaagtcgcagagtggagagaggaaggaaaagctgatattgtccctggtgttctgttcatcgatgaagttcacatgctagacattgagtgcttctccttcctcaaccgagcattggaaaatgacatggctccgatcctagtaatcgcaacaaacagagggatcacatccattcgtgggacaaactaccgctcgccacacgggatcccgccagacttccttgaccggttactgatcatcacgacgcagccctacacggaggacgagatcaggaagatcctggacatccggtgcgatgaggaggatgtggagatgtccgcggacgccaaggtcctgctcaccaaaatcggcgtggagacctcgctgcggtacgccatcaaccttatcacatctgccgcactagcctgccagaggcgcaaggggaaggtggtcgacatggaggacattagccgggtgtaccagttgttcctggacgtgaagcggtcgacgcagtacctgatggagtaccagagccagtacatgttcaacgaagtgcccggggaagcagatggagaggacgcgatgcaatcctag

SEQ ID NO: 104980 - DNA, 2166 bp, Zea Mays
atggacccaagcgattccaactccgccgcaggaggaaagacacaaaatgtttcagtaccgcctgttgaaggtgtagctggaggaggaactagctatggatgggtggatggaggtttgcggggtacaaatattggtgctggtgtgattgatcctacaaaagtacactcagatgatcttttgcacgtctggtctatgcccagcacagcaaatgttagccagcaagaagcgcctcggcctctagagaaagtcaaccttttggcagcaagaaatgaaagggaaagttttcaaattgctttacgcccaaaggtttcatgggcaacttcaggtattgcagggtctgtgcagatacaatgcaccgatctctgctcctcctcaggagacagggaagaccagcattcgcacagttctattccgatggttataaatgttgtaccaggtgtaccagatgcacttgttcctattgatccactcagtcctcaaataagtattcaaccaggggagacagctgcagtttgggtatcagtaaatgttccatgtgggcaaccgcctggtttatatgagggtgaaatattcattactgcagttaagacagaattagaaatcttgagtaaccttgtgacattagctttgatttctgggttatacttttttgctgacctaatttctggtagcagttccagaacagaatctctaccaaaatctgaaaagtgtaggctatacagagaattaagaagttgtcttgacctcactggacccagagactactcgtcaccagaggaaatggtacaaagactaacatcagcttctactgtactaaggagggtgttggataatccagcactccaggactgtcaagagaataatggatttggagacatgatggatgaagatgttataaacaatatttcagttcgcttgaagttaagccttactgtttgggacttcactctcccagtgacaccttctttacctgctgtttttggtgtatcctggcaatattcctttttactgtgttctatttccatttctgtgctgtgcaactgttatgggactgggtgcaatgggctgcgcttaatgggcctgcttggcccagcagaactggcagcaacagaaggcagtgttgggattgctgctgccctagccaaaccagcagcagggacacccgatcatccgaaggctaatgaatattactctgacccaagattagcagcatatgctgtaccctatgcacctatcctatcgtgcttgttactttatttaatttggctccttgttaacagtacggatgctgcaaaaaattccctgaggagagaggttgaaatcttaaaatcgaagcctcattggtccaaagcttacttctatttgtgggatgagccattaaatgtggaacagtatgacatgatatgcaacatctctaatgagctacggtcatatgcacctgatgtgcgaattttgacaacttactattgtggcgccacctgtgctgatctggaacatcctgttggagttccaggttgtccactaagctctagagctgcaggtccaagtggctctgaactggctccctctacatttgaagcttttgcaaaagttccaaatgttctgcgtccgcacacgcaaatcttttgcacaagtgaatgggttcttggcacaagagaagacctagtgaaggatattgttgctgaattacggcctgatcttggtgaggagtggtggacatatgtttgtatgggtccttctgatcctcaaccaaactggcaccttgggatgcgtggaacccagcaccgggcagtgatgtggcgagtgtggaaggaaggtgggacaggatttctttattggggttccaactgctatgagaaggctatgatcccaagtgctgagatctgtttccgacgcggccttcctcctggcgacggtgtcctgttttaccctggtgaagtgttttcttcgtcacatgaaccagttgcttccacccggctagagcgcattctcagtggcatgcaggacatcgaatacctgaagctttattcttcacggtatgggagggaggaaggcctggcccttatagagaagactggcatgtaccttggaccggatcgatatacgctggatcatggaccggtagatgtgatgaggggtgaggtgtaccgcacctgcaggtcttag

SEQ ID NO: 104981 - DNA, 3042 bp, Zea Mays
ggagagacgcgacgcgaggggagtggaaaaaagcagagcacagatagagagagaaggggagggaaagagagagagagagagagagaaaaaagatccccgtccaccgcccacccgctgcgccggcgcccggctgtgcacgcacggacggacagacggacctccccccaagcggtgccggattcagtgcggtgggacaggggctgggacggagtgggcgacagatcgagcgctagcgatgccgcacccgacggacccggaggcggggtccgagcagaaggcggaggcgccggcggtgcctttggcggctgcggcgccggctccggtcaagaagaagcggaacctccccgggacgccagatccggacgccgaggtgatcgcgctctcgccggggacgctgctggccacgaaccgcttcgtgtgcgaggtgtgcggcaagggcttccagcgggaccagaacctgcagctgcaccgccgtggccacaacctgccctggcgcctgcggcagcgcggcccgggcgcgccgccgccgcgccgccgggtgtacgtgtgccccgagcccgcctgcgtgcaccactcccccgcgcgggcgctcggggacctcaccgggatcaagaagcacttctgccgcaagcacggggagaagcgctgggcgtgcccgcgctgcgccaagcgatacgccgtccaggccgacctcaaggcgcacgccaagacctgcggcacccgcgagtaccgctgcgactgcggcacgctcttcaccagacgggacagcttcgtgacgcatcgcgccttctgcggcgccctcggggaggagaccggcagggtgctggcgccaccagcgccgccatcgcctcggccgcctgatttggaggctgacgaaaatgttgctgatttggaggctgacgaaaatgttgacaaggacaacgacaaggagggggaggaggagaatgaggattctgccgtggccgaggtggaggagcctcggcgtgtggaggtggtgccagaggagccacagcgcattccatctccacctccattgccgaaggagccaccgtgccgtccgtccccacctccattgccgcaggagcaactgtccccacctccgtcgccaaaggagccaccgtgctgccatccgtctccacctccactgccaaaggagccacagcggcttccatttccaccggagcagcatgcagttgtggtggcattggtgccaaatgtggatgagccagaggtggttgctgtgccaagtgtgactgccgaattagaggatgaaaccgatcaagacgaagatgcctgtttccaggaagctgatcagtacaaggactcggagcttgaggtctccaatctgctggacaaggacaccccgatgcttccttgcttcctcgcgtcgccctcggaagccattggcaccgatggaagcggcacaacaacctgcggcgcaggtggcagcgtctccaattccatcgcgccgtctacaaccaccaacaccttcgccggcctcttcgcgtcggccacaacaagcaccacttcccacagcacatctctgcgcgatctcatcggcgtcgatcccaccttcctctgcctcgcgatcggagcgccgtctctgttcccgcagacgagcgcgagcaactcaggcaccttcgccctgctgccgccggcgccgcacatgtccgcgacagcgctcctgcagaaggcgacggaggctggagcgacgcagtcgagctcatcgttcttgaaggagtttgggctggcctcttcctcctcgtcgtcgtcgtcgcaaccttcatcgaagcaggtgccccaaggaagggtcggcgccgccgataccagcgcggaaccaccatggccgtaccggagtaaccagcaagtggatatggagcgtcgccagagtcatcaacggagggagatggagtcatgttcgcaacaatggcacccctctagtacccagcaaacggagatggagcgccgccaccggaatcatcatcaagagagggaaatggagtccagttcgcaacaatggcaccgccaccaccggaacgaccggcagatggggtcggagagctaccggagtaatcagcaaatgcagatggagtccagctcgcaccaatggctgcaacacagaagctctgagcaaatggtggggcggcggcaccacctggagagggtggaatccagggggatgctgctgtctggtggtggccttggtctgggcctcgcatacgaaagtggaaaatcaggcttgcctgatctgatgacgggaccatcgccatcgccatcgccactgttgggtcccaagccagccacgctggacttccttgggctcggcatcggcgggaccatggtcggctccacgggcctcccggcattggtggctggaggagagctggacatggggtcgtcggcgcaggtgcctgccccatgggacgacgcccagaggaaggccaacggccgcacgatcctgtgaggttttctccttttttttgggtgacctgaccttcttagaggagttcggtttgcccattctttttcagtcgcagctttgcttttggtggggctagaagctctgtgaggtgtagcagtgcagtgcaggcctgtacatagctcgacctcgacgctcctcccgatcctgcatctgtgttgtgtctgaaaaaacaccgagttgaggctgctattatagccacaattcgatcccggcaggatggatggaaatggaacctgactttgatttgatgccccgacgctttgggataatcggatgtgacggggcaacagggttattataaatcttgcggtgataattcattaattcgatactgctgttggaaagatccgagattagaacagcgatgctgacacttgaaatgtgccttttttttactgttatacctgctgctgctgctaagtcggcagtcggcacggttacttatacctaacctgccggtctgcaatcttcttccggagccttgctactttggagaagttttcgtgtacttttctgtctaaaataaacctgtttgtcggactacagttgaaaaaagaaaa

SEQ ID NO: 104982 - DNA, 435 bp, Zea Mays
gaaaaatcataacatataaaatctaactttattgaaatctacatgagtatactcctatatctttactactctataagacagtagtgtagacgtccacaatacatatggtgcacggttctgccaggagtcgaggggacgccagggcccacccgtcataaggcgaactcaaggccgcacctcaccacatttcccaagcgtgcaggggacaccaccgcccgtcatccgcgcgccgaggatctcctgccccgctatcaacgccctcctccatcaacggaaggtggctgaggatccgccccaccctcatccccacgccgtcgtcgatggaagatccgaggatccgccatcaacgccgcgcccaccctcctccccctctgctccgcgatgacggggatccgaggccgccatgaacgccctcctccccacgccgtcgatggc

SEQ ID NO: 104983 - DNA, 675 bp, Zea Mays
atggagcaatacgacggactctttccttccgcctacgcggactcctcctcatccctcctgatgcccaacggtgcgcactccaaggcgcagggggagaggccgagagcgcggcgcaggaggcgtcgagcagcgtggtgcggcggcggcgagctggacgggggaggggaccccaagaagcggcggctgagcgacgagcaggcagagatgctggagctgagcttccgggaggagcggaagctggagacgggccggaaggtgcacctggccgccgagctcgggctcgaccccaagcaggtcgccgtctggttccagaaccgccgcgcccgccacaagagcaagctgctcgaggaggagttcgccaagctcaagcaggcacacgacgccaccatcctccacaaatgccaccttgagaacgagttgatgagggtgaaggacagactggtgctcgccgaggaggagctggcgcgcttccgatccgtggggagccacgccatctccggcgatggcggagacgccatgatgggtcgtgccgtctgcagcgggagcccgagctcatcgttctcgacaggcacctgccagcagccgggggacgacgacctgctctactttcctgactatgcctacgctgacaacagcgtggtcgacgagtggtttcgcatgtatggactgatgtaa

SEQ ID NO: 104984 - DNA, 2179 bp, Zea Mays
ccttcagcacaacacttcagcaaatcactacacacaccttgtctctaatcagatatcaaagaagtagccattaagttaacgatggcttccgccgacctcgcagaggccatcgagcccagcaggaagaagaagagcaacgtcaagtatgcctccatctgcgccatcctcgcctccatggcctccgtcatccttggctacggtacacaacccatcctttcgttgctgtcgaaatgtttctcgttttactctttccaagagtttgtaggtgaagtttgtgtgtaccgtcaaccaaccaatcaatctctgtagacattggggtgatgagcggagcggccatgtacatcaagaaggacctgaagatcacggacgtgcagctggagatcctgatagggatcctcagcctctactcgctcatcgggtccttcgcgggcgcgcggacgtccgacaggatcggccgccgcctgaccgtcgtcttcgccgccgtcatcttcttcgcgggcgcgctgctcatgggtttcgccgtcaactactccatgctcatggtgggccgcttcgtggccggagttggcgtgggctacgggggcatgatcgcgcccgtgtacacggccgagatctcgccggcggcgtcccgcggcttcctcacgtccttcccggaagtgttcatcaacgtcggcatcctgctcggctacctgtcgaactttgcgtttgcgcgcctcccgctccgcctcggctggcgcgtcatgctcggcatcggcgcggcgccggccggcctgctcgcgctcatggtgctctggatgcccgagtcgcctcggtggcttgtcatgaagggccgcctcgccgacgccagggccgtgctggagaagacctcggcctcgccggaggaggccgccgagcggctggctgacattaaggttgccgcggggattccgaagggcctcgacggagacgtggtcgccgtacccaaggagcgaagcggcggcgagatgcaggtgtggagggagctcatcttatccccaacaccggcgatccgacgcatactgctgtcggccgtcggcctgcacttcttccagcaggcctctggcagcgattccgtcgtcctgtacagcccgaccgtgttcaagagcgcgggaatcaccgacgacaacaagctcctgggcgtcacctgcgcggtgggcgtcgccaagacgctcttcatcctggtggccacgttcctgctggaccgcgccgggcgtcggcctctgctgctgaccagcacgggtggaatgattgtctcgctcgtcggtctcgggacgggcctcaccgtcgtggggcaccacccggacgccaagatcccgtcggccgtcgcgctgtgcatcgcgtccaccctggcctacgtcgccttcttctccatcggcctcggccccgtcacgggtgtgtacaactcggagatattcccgctgcaggtgcgcgcgctgggattcgcggtcggcgtggcgtgcaaccgcgttaccagcgccgttatctccatgaccttcctgtccctgtccaagggtatcaccatcggcggcagcttcttcctctactcgggcatcgccgcggtcgggtgggttttcttcttcacgtgccttccggagacccgcggtcgtacgctggaggagatgggcaagctgttcggcatgccagacacggacatggctgaagcacacaacgccgctgccaaggagaaggcggtggaaatgccggcagtgctcggcaatgattgatgcagcgtcttaccagagcagcgtggcaagattggcctctgtcccttgactctgaggggtcgcggtactgcaggacagtgaccgcgtggtccaaccagagactcttctgccggacagctgtgccttattgctgtcggcgtggcgtgtgcttcgcaagttgtgaagctgtttggcttgttctacataccagatagtgaacccaaaatgcaaagaagtatccagtagcaactggcaagggacacgtggttccgtactattttaaacaaataggaaaaatatatcacactcttgattcatttttagatcccccaaatttacctcgaaagaaaatcgacacgtcttgtaccgtgatctcgtgggaggttctatgtcccaattgatatcataagattatactatgttacaaacaagcaatatacaatcttctttgttaactt

SEQ ID NO: 104985 - DNA, 2069 bp, Zea Mays
ccttcagcacaacacttcagcaaatcactacacacaccttgtctctaatcagatatcaaagaagtagccattaagttaacgatggcttccgccgacctcgcagaggccatcgagcccagcaggaagaagaagagcaacgtcaagtatgcctccatctgcgccatcctcgcctccatggcctccgtcatccttggctacgacattggggtgatgagcggagcggccatgtacatcaagaaggacctgaagatcacggacgtgcagctggagatcctgatagggatcctcagcctctactcgctcatcgggtccttcgcgggcgcgcggacgtccgacaggatcggccgccgcctgaccgtcgtcttcgccgccgtcatcttcttcgcgggcgcgctgctcatgggtttcgccgtcaactactccatgctcatggtgggccgcttcgtggccggagttggcgtgggctacgggggcatgatcgcgcccgtgtacacggccgagatctcgccggcggcgtcccgcggcttcctcacgtccttcccggaagtgttcatcaacgtcggcatcctgctcggctacctgtcgaactttgcgtttgcgcgcctcccgctccgcctcggctggcgcgtcatgctcggcatcggcgcggcgccggccggcctgctcgcgctcatggtgctctggatgcccgagtcgcctcggtggcttgtcatgaagggccgcctcgccgacgccagggccgtgctggagaagacctcggcctcgccggaggaggccgccgagcggctggctgacattaaggttgccgcggggattccgaagggcctcgacggagacgtggtcgccgtacccaaggagcgaagcggcggcgagatgcaggtgtggagggagctcatcttatccccaacaccggcgatccgacgcatactgctgtcggccgtcggcctgcacttcttccagcaggcctctggcagcgattccgtcgtcctgtacagcccgaccgtgttcaagagcgcgggaatcaccgacgacaacaagctcctgggcgtcacctgcgcggtgggcgtcgccaagacgctcttcatcctggtggccacgttcctgctggaccgcgccgggcgtcggcctctgctgctgaccagcacgggtggaatgattgtctcgctcgtcggtctcgggacgggcctcaccgtcgtggggcaccacccggacgccaagatcccgtcggccgtcgcgctgtgcatcgcgtccaccctggcctacgtcgccttcttctccatcggcctcggccccgtcacgggtgtgtacaactcggagatattcccgctgcaggtgcgcgcgctgggattcgcggtcggcgtggcgtgcaaccgcgttaccagcgccgttatctccatgaccttcctgtccctgtccaagggtatcaccatcggcggcagcttcttcctctactcgggcatcgccgcggtcgggtgggttttcttcttcacgtgccttccggagacccgcggtcgtacgctggaggagatgggcaagctgttcggcatgccagacacggacatggctgaagcacacaacgccgctgccaaggagaaggcggtggaaatgccggcagtgctcggcaatgattgatgcagcgtcttaccagagcagcgtggcaagattggcctctgtcccttgactctgaggggtcgcggtactgcaggacagtgaccgcgtggtccaaccagagactcttctgccggacagctgtgccttattgctgtcggcgtggcgtgtgcttcgcaagttgtgaagctgtttggcttgttctacataccagatagtgaacccaaaatgcaaagaagtatccagtagcaactggcaagggacacgtggttccgtactattttaaacaaataggaaaaatatatcacactcttgattcatttttagatcccccaaatttacctcgaaagaaaatcgacacgtcttgtaccgtgatctcgtgggaggttctatgtcccaattgatatcataagattatactatgttacaaacaagcaatatacaatcttctttgttaactt

SEQ ID NO: 104986 - DNA, 474 bp, Zea Mays
tgggttcacttagattctactgccccttgacggaatgctttgctctgttggttgatgatcctgagcatggtgaggcgttgataacaaatgtggagtgcccacactgctgtcagatgttttgtgtccagtgtaaggttccatggcacgctggtgtcacttgcgcagagttcaagttccaacgaccgaggaaggatgagcagggcagagaggacctactgccgaggaaggtcgaacaagagagcaagtggcagaggtgccccgagtgcaagatatatgtggagaggatcggggactgtgtatttatcgtttacaagtgcgggcactgcttctactacctttgtgcatccccaatgtctagggacaaccgttgttgcaaaacctgcaatcgaacctggggaatgccttgaaatcgccgagctctctacttgaaggaaagaaactcatattaactaatattatatgtgtgctgctgat

SEQ ID NO: 104987 - DNA, 1918 bp, Zea Mays
aaaaccccaaaaagaaatatccaaggccgcgccgtgcgcgcaatccccctcgctcgcaccatggcgctgcagctccagctgccgcggccgctcgccgccgcacggccctctatcctcctcccttccccagcccatggtgcctccgcttccgcgaccccccttcacgcccgcgcaggcggcgttgcgttttcgctccagaccaacgtgcgcctcctcaagcccaaccgccgcgtccgccgctctcgggacccctactacgatctcgacgaggacgacgaggaggaggcggagttcgacgaggacgatgaagacgacgaggagggctacgagagcgatgatgacttgtcgggtttggaatatcctggtgtactttattcaaacagccctcgtgcttcaagcaagaaaccagtggtaaaagaaaactgggaaggaagacaaaccaaaacccatgacaaatacggtagtccaggaagaagtaagtccatgcatcctaggagtaaagtgggacgatcatcaacagatcttaagaacatggacagagaagttgagttgaaaaatgcaagtatctctcgaagtctgttccagaaactacaagaagaatatgacttcgatgacaaatggttaccactgattgattacttgtgcacctttggactaaaagagtctcattttacttacatctatgagagacacatggcctgctttcaaatcagtcaggcttcagcagaagaaaggttggatttcctgctaaatgctggggttaaaagcaaagatatgaaaaggatactggtgaggcagccacagattctggaatacacccttggcaatctgaaatctcatgttgattttctcgtgagcattggagttccaaatagacgaatagggcaaattatttctgctgctccttcgatgttctcttacagtgtggagcagtctctgaagccaacagtaaggtatctgattgaggaagtaggtattgaggagagtgatgtggggaaagtagtgcagctaagcccacagattctggtgcagaaaattgatagtgcatggaaatctcgatcgcttttcctgtcaaaagaactggatgctcccaaacatagcattgttaagatggtcacaaaacaccctcagctgcttcactacagcattgaagatggaatcttacctcgactaaatttcctgagaagcattggtatgagaaactctgacattctcaaagtattgacaagtcttactcaggtattacttcactcatgtcatcattccccattgtttctgttcttgccttgcatttacaattaagttcattgttcaatgtgtatgtgtctcatggtgtacgtactgttgcacactccatgtcaggtgttatctttgtcattggaggacaatctcaagccaaagtatctttacttggtcaatgacctcaagaatgaggtccaatccttaacgaaatatcctatgtacctgagtttgtctcttgatcaaagaatccgtccccgccatcgttttctggtttccttgaagaaagctccaaagggcccatttcctctgagctcctttgtgcccacagatgagcgtttttgccagaggtgggctgggactagcttggaggcataccatacattcagacagaggttgctgctaacaagtttcgcagagaagtctggaaggaaaacactagtctcaagacggtagatgcctaggtggtgggagtttgtttctcttgagcccacgctcctaacagtaagatgatctctttctgattttagagtttgtttggtagcagtctgcatacgcatagtactgattagtgattagttcacagttctcaggaaatgggcttggttgctgacttggtacttgatgttcacagggtttatactgcatcattaactatagcatatacttatcgtccata

SEQ ID NO: 104988 - DNA, 2452 bp, Zea Mays
aaaaccccaaaaagaaatatccaaggccgcgccgtgcgcgcaatccccctcgctcgcaccatggcgctgcagctccagctgccgcggccgctcgccgccgcacggccctctatcctcctcccttccccagcccatggtgcctccgcttccgcgaccccccttcacgcccgcgcaggcggcgttgcgttttcgctccagaccaacgtgcgcctcctcaagcccaaccgccgcgtccgccgctctcgggacccctactacgatctcgacgaggacgacgaggaggaggcggagttcgacgaggacgatgaagacgacgaggagggctacgagagcgatgatgacttgtcgggtttggaatatcctggtgtactttattcaaacagccctcgtgcttcaagcaagaaaccaggactccaaactccagtggtaaaagaaaactgggaaggaagacaaaccaaaacccatgacaaatacggtagtccaggaagaagtaagtccatgcatcctaggagtaaagtgggacgatcatcaacagatcttaagaacatggacagagaagttgagttgaaaaatgcaagtatctctcgaagtctgttccagaaactacaagaagaatatgacttcgatgacaaatggttaccactgattgattacttgtgcacctttggactaaaagagtctcattttacttacatctatgagagacacatggcctgctttcaaatcagtcaggcttcagcagaagaaaggttggatttcctgctaaatgctggggttaaaagcaaagatatgaaaaggatactggtgaggcagccacagattctggaatacacccttggcaatctgaaatctcatgttgattttctcgtgagcattggagttccaaatagacgaatagggcaaattatttctgctgctccttcgatgttctcttacagtgtggagcagtctctgaagccaacagtaaggtatctgattgaggaagtaggtattgaggagagtgatgtggggaaagtagtgcagctaagcccacagattctggtgcagaaaattgatagtgcatggaaatctcgatcgcttttcctgtcaaaagaactggatgctcccaaacatagcattgttaagatggtcacaaaacaccctcagctgcttcactacagcattgaagatggaatcttacctcgactaaatttcctgagaagcattggtatgagaaactctgacattctcaaagtattgacaagtcttactcaggtgttatctttgtcattggaggacaatctcaagccaaagtatctttacttggtcaatgacctcaagaatgaggtccaatccttaacgaaatatcctatgtacctgagtttgtctcttgatcaaagaatccgtccccgccatcgttttctggtttccttgaagaaagctccaaagggcccatttcctctgagctcctttgtgcccacagatgagcgtttttgccagaggtgggctgggactagcttggaggcataccatacattcagacagaggttgctgctaacaagtttcgcagagaagtctggaaggaaaacactagtctcaagacggtagatgcctaggtggtgggagtttgtttctcttgagcccacgctcctaacagtaagatgatctctttctgattttagagtttgtttggtagcagtctgcatacgcatagtactgattagtgattagttcacagttctcaggaaatgggcttggttgctgacttggtacttgatgttcacagggtttatactgcatcattaactatagcatatacttatcgtccatatcacctccctaatggtgaaaagtcttcaccgaattccctcaatcagctgcaaatggatgacaatctaagagaaatgcattattgccagtcgccagaatggttggatggacacttggttacctagctctaggagtacctcgccttgacggctaaaactgttgtgcagtcaagctttcggtggaatcgccatgcaaccaaactaccaagtcataaaaagtttccaaaaaaaatatagaggtactttattatttattctatcaatatactagattttaagttctaattcatcatatgttaagagattaaaaaagagaaaatttatcattttttaatcctttatattggatataatttttctcttttttatttcccttgacgaggataagttagaatttaaattttgatatattggtagagcagataataaaatatctatatctatggtttttttagatttttcatgacttttggtagtttaattgcacaggaagcttgattgcacaacgaattttcccagcagttttttcccgtcttgattgctagttttactattaagtacagcttctgaacaaaatgctacgctagaaacatgtagcctaactgtaagagtgccatcacaggcagccttgtgtactgctgtaa

SEQ ID NO: 104989 - DNA, 2363 bp, Zea Mays
aataatgccctcctccctcggcggaaacatccaatccccgggccaccactacctgcctgcccgtgcccacgcttcttctcttctcctccccaagccccagccccagctaccgcgccccctcctgtctgttcctgttccaccagcgtcggcctagctacctggccgtcccctctccgagttacggtcggaagcctcagctgaaggatctgccctgggcgcccagccggacgacgggacaggttctgtttggtcttcataaagtagagcactagctagaagacatattcacacgcatcagctatcaaattgcaagcttagaattgacctcaaagttgggacatgcttgtcttaccacaagcaactgatagcttggagttgtagtccggactgtctgcgctggaccagtatggctgacactccaacgtcccgcatggtgcacccctttggcgacgccccaaggcagactcccaagcaattcctgtattctggtaacccgcagcacctctgccatccgtaccagtcagctccggacacccatgtcgtgctccagcgccgttacaccgtgaggtctcagtctcactcaccaaataatgctggttctgaagaccatgagactcacaagcagtacacgctggagtcctcagcggcttctggttgttcaaggcatggttctccctccagccaaagcgtccatgccgggagtggcagccctgtgtctcacgacgacagccactccggctccacgaatggccatggatcacctgtgagcgcgtcgtgtgtcaccggcgaggaccctactgatctcaagcagaaactgaaggatcttgaggctgtaatgctggggacgtctgagactgaccccgagatagtcaacagtctcgagatctccgcggcaaaccaactctcgttggagcccgaggagtgggagcacatggtgagcatgcccagagggaacctgaaggagctgctgattgcctgcgctagggcagtggaacgtaacaacagctacgccattgatctgatgatcacagagctgaggaagatggtttcggtgtccggcgagccgcttgagaggctgggagcctacatggtggaaggtcttgttgccaggctcgcggcctccggcagctcaatctacaaggctttgaagtgtaaggagcccaggagctctgatctcctctcctacatgcacttcctgtatgaggcctgcccctacttcaagttcggctacatgtcagccaacggcgcgatcgcggaggccatcaagggagaggacaggatccatatcatcgacttccacatcgcgcaaggggctcagtgggtctctctcctccaagcccttgcagccaggcctggcgggccaccgttcgtgagggtcaccggcattgatgattcagtctcagcttacgctcgaggcggcggtctggagttggttggcaggaggttgacacatattgctggcctctacaaggtgccctttcagttcgacgcagtcgctatctcaggcagtgaggtggaggaggagcatctgggcgtcgtcccaggcgaagccgtcgccgtcaacttcacccttgagctgcaccacatccccgacgagaccgtgagcacggcgaaccaccgggaccggatcctgaggctggtgaagggcctgtcgcccaaggtgctcacgctggtggagcaggagtccaacaccaacacggcccccttcgcgcagcggttcgcagagacgctggactactacacggccatcttcgagtccatcgacctggcgctgccgagggacgacagggagcggatcaacatcgagcagcactgcctggcccgggagatcgtgaacctggtggcctgcgagggcgaggagcgggtggagcggcacgaggtgttcggcaagtggaaggcgcggctgatgatggccgggttcagcccgtccccgctcagcgcgctggtgaacgccaccatcaagacgctgctgcagagctactcgccggactacaagctcgccgagagggacggcgtgctctacctcggctggaagaacaggcccctgatcgtctcatcggcatggcactagtgttgacttcagagaatgttgacctgatggagaatgtttcttgtaaccttcgaagtacctcttagtggtttagatatgtttggctggtcactggaactatctataggaagcctatggtgatagatactgagttgtagtagaacacatatagcctaaatgcctaatgctgtgatggcagtcactaccagcctagcctagaacaggttgatgatgtgtagtagtaagtttgggtatatgtttcagttaatcagttttgcttgggtgcattctgaagggtggcctcttcaaaaag

SEQ ID NO: 104990 - DNA, 3551 bp, Zea Mays
atgcggaaccctagccgacggccggcgccgccacttcctacatccacagggtcgccgatgggagggagcgggtcgccgtcggagagcatgtcgccggaggggcccttccagttgtggtcgtcactggtggggctgccgatgttgccggaggggggggcttccagcctcggtcgtcgccgggtagaggaagggctgctgggccggagggacgccttattgctcggcatcgtcttctccgccatgacgccggcgctgctcgcccctgccggcgctttggcggatgaggccaccgccggctggctggtcggcgtcggcgaggccagcggcatcaactccgtcacggcgttctaccccgagcaggccgccgccgactccaacggcctgtactacctggaatacacgctgcagaaccccggcgagcggcggcggcacatcgtctcggccatcgggatggccttcaacggctggtacaaccgcctccactgcgatgggccagcgacttttgaatataatgggagaactttcccatatgcctttggtgatgttctgaatggcgcccgtaagggcgccacttattctagtgtgattcatagcgagcacgacagaaagtttccaagccggggcgggagcggatgggcggagacaatagcgaacgaagcaagtgcgccaaatgtagcggacgaggatgaccctctatattatagcgatgccttttaccgtgcctttctgggggcatacaggagctcaaaaaattctaaatttaccctgacgagtgttgatggaggtacctgtgacctccacgtcttccgtcttccactgatcgcagcacacaaactccctgccgggtgggcgccgcacgcctgcacctcttccgctgcgcgaggatccgcgagccgcggcgacacgggggagcccaagcgcccaacctccttcccgcttcgtttgcttgtatgcgctgcctcgtcggttccaccacctcactcactcgcttctcccccttccagccgtcccttcgcagcgcacgcacgtaaaccacaatccagcagctggtacgcccccagcgtcgccgtcgtctccttcccccgcgcaccacacccgcagccagcagccatatcatccatcacctcgcctccagcgcggcgccgacctgcctctccattatttatacgcatttccgcgttccccaccctcctctttctcaatccagccaagcaccggaatcgcagggaaccaggagcgattaaaaaagacagcctccccgcaaaggtaaaaaacaaccaccgcatcgcggcaggcaaggcatcgctcgccagcccccgagcggagggggaagcaaaagatcgataaaaaggagaggaggagacgaggcgtgccatccgaacccaagcaacttcctcccaccaccaggtccctggctccctcccatgcccgcatcgagatcttagcgggacagcgagaggagaggcgacgcggacgcgggcgctccccgatccctcctcgctgcccgtcgccgccgccgccgaccgaccgaccgaccggggccagggggaggaggagggaaggggagtacggacacgatggaagccgactctgggaagctcttcgtcggcggcatctcgtgggagacggacgaggatcgcctccgcgagtacttcggtcgcttcggcgacgtcaccgaggccgttatcatgcgggaccgcaacaccggccgcgcccgtgggttcgggttcgtcgtcttcgccgactctgggatcgccgagcgcgtcaccatggagaagcatatgatcgacggccgcatggtggaagcaaagaaggccgttcccagggacgaccaaagtattgcgagcaagaacaatagcagcatagggtcacctggaccaggacgtactagaaagatctttgttgggggtctggcttcaaatgttaccgaggtcgaattcagaaggtactttgagcaattcggtgtgataaccgatgtggtggtgatgtatgaccacaatacgcagaggcccaggggctttggtttcatcacatatgactcagaagacgcagtggataaggcactgcacaagaacttccatgagctcaatggtaaaatggttgaggtcaagagggctgtaccaaaggagcagtctcctggacctattgcacgttcacctgcaggggggcagaactatgctatgagcagggttcataactttctaaatggttttaaccagggttacaacccgaacccccttggtggttatggcatgcgggtggatgcaaggtatggtctccttgcaggtgcacggaatgggttctcttcgtttggtccaggttatggaatgggcatgagcgttgaaggtggaatgcgtggatattttggtgcaagttctggtttcgtcaatagctccaatgggcggcaaataggttcttactttaatggtagttcaaaccgattaggtagtccaattgggtatgttggccttaacgatgattcaggatcaatactgagttcaatgtctagaaatgtctggggtaatggaaatctgaactacataggcaaccatacaaacatgaattcttttcctcaacctggaagtggtgggggtatttctggtgatgaaattagttggggaagccttacttctgctcatgggatgagcaacatttcaagccttggatcgggaaaccttggccgtggaaccggagataacaactttggcttgccttctggaaactatgttaggagcaactcaactggtacaattggtgagccattttctgcatcagccaatgcatatgaatcgaacaatccaggtgcatatggcagcagctctatttatggtgactcaacctggaggttcaactcatctgaggttgatatgcctccttttggtcatgatcttggaaatgatgatccagatatcaaatcagaaatatcagcaagctatatgggcaactatactgttaataacaatcagacaagcagaggtatcacttcctagggagagtactattatattcatatatgacttgggataggtgaaacacccactactatatcaggctttcaggtgcatgactgtgaattggtgatgtcagattaatatacaggttagttgcttgtttctaggtaaccagaggtgtggtttacaacaccaaaatgctagaggagccgatacaaacattttagtttaatttctacatctattaggccttttgttttttgaatgagatgtgcagtgttgattgcggcacatacttagaagtgttccaacataagctggaattctgtcatacggaaggataaacttgtataccaagggaatgctgtattattatctttgcccatttatggctacattagcttgcttgtttctattctctttaaccatttcatctgtatactagacagttgcttgacttactattcaaactatattcaaactattgggggtacagagccatattgagacctagtaataaagccaccgaaagtatatacatgtactatctgtcccttttgtgccatgcgaatgcttttgcggaattctgttataaacctt

SEQ ID NO: 104991 - DNA, 1159 bp, Zea Mays
gtaattccgtggccttgtgagcgggcgttggcgtgttgccccgtgtgggcgctctctctcgtagccctgatcgcggtgttgctttcggctcggatctatgtgatgtcccgcgtgcgtttctgtggtgaacgctgtggataagtcgggcttttgtcggcatttggcagtggctggctggtatgaaactgggcctgctgttgtggattgcaggggccagggggaggaggagggaaggggagtacggacacgatggaagccgactctgggaagctcttcgtcggcggcatctcgtgggagacggacgaggatcgcctccgcgagtacttcggtcgcttcggcgacgtcaccgaggccgttatcatgcgggaccgcaacaccggccgcgcccgtgggttcgggttcgtcgtcttcgccgactctgggatcgccgagcgcgtcaccatggagaagcatatgatcgacggccgcatggtacttgtgttatgctctcgtcttcttctccgctgttgcaatgacgtgcatttcgctgggaattctgttgtggagctgtttcttactataccacctgaattgcccgttcgtgatttaggtggaagcaaagaaggccgttcccagggacgaccaaagtattgcgagcaagaacaatagcagcatagggtcacctggaccaggacgtactagaaagatctttgttgggggtctggcttcaaatgttaccgaggtcgaattcagaaggtactttgagcaattcggtgtgataaccgatgtggtggtgatgtatgaccacaatacgcagaggcccaggggctttggtttcatcacatatgactcagaagacgcagtggataaggcactgcacaagaacttccatgagctcaatggtaaaatggttgaggtcaagagggctgtaccaaaggagcagtctcctggacctattgcacgttcacctgcaggggggcagaactatgctatgagcagggttcataactttctaaatggttttaaccagggttacaacccgaacccccttggtggttatggcatgcgggtggatgcaaggtatggtctccttgcaggtgcacggaatgggttctcttcgtttggtccaggttatggaatgggcatgagcgttgaaggtggaatgcgtggatattttggt

SEQ ID NO: 104992 - DNA, 1153 bp, Zea Mays
ggccaggatacgcctgctggcgaagcaccgggtcggacgtccgcgagctgatcggcgtgtcgggcgccatcccgggcgctcgtgccgctgctgcggagcaccgaccccgtggcgcaggagagcgcggccaccgcgctgctcaacctctcgctcgaggaccggaaccgctccgccatcacgacggcgggcgccatcaagccgctcgtctacgcgctgcgcaccggcacggctcccgccaagcagaacgccgcgtgcgcgctgctcagcctctcgggcatcgaggacaaccgcgccaccatcggggcctgcggcgccatcccgccgctcgtggcgctgctctccgcggcctccacgcgcggcaagaaggacgcgctcaccacgctctaccgcctctgctccgcgcgcaggaacaaggagcgcgcggtcagcgccggcgccgtcgtgccgctcgtgcatctcgtcggccgccgcggcagcgggacgtgcgagaaggcaatggtggtccttgggagcctcgcgggcatcgacgagggccgtcaagccgtggtacaggctggcgggatccctgcgctggttgaggccatcgaggacggccctgccagggagaaggagctcgccgtggtggcgcttctgcaggtgtgctccgactccccgcgtaaccgtgcgcttcttgtacgcgagggcgccatcccgcctctcgttgcgctatcgcagtccggctctgcccgtgccaagcacaaggctgagactttgcttggctacctgcgggagcagagacaagggtttggctgcagagctggagcagtggtagcaactagcttggccaggtaaagcaagaattatggtcgaaatctgatccattctctgtggaaattttgcgagcagatgtaaataacagcttattctggttagtttggctatgtgaatacacatgtggtttgcgagtgaggatgcttggttggttactaacgtagtgtcagttaagagtaaggcttaagatttgggtggtaatgacgataatgctggtttgtagctatgtacaggatgctagggtatgcttgctttgtcttgtcaagttatgggggaacgttggattgtcaatcagtgttttttttgctcgaggtcagagtccaaattcctctcttccttttta

SEQ ID NO: 104993 - DNA, 344 bp, Zea Mays
gctcgctcgctcgctctcctccgctcgattccagtggccctgctgccctcgtcgtccctctcccgagcgagagcagcaccggcagttcggacaggttgagaatctgcttctcaattgcctcttctgctctgagatctcgccttttcttccggggatttgagcccttttgattttatcgggatggaaacctacgcatcgtgaactcctttcttgtggaggtgcagtgaagtgggttctcgaggtacttcagcagctgcgtggttgcgttgaatcgagtatgagtaggaggaatcgccctcatcacgagtctgttcaataagcttgtggaggtggtgcgcacctcc

SEQ ID NO: 104994 - DNA, 1893 bp, Zea Mays
gctcgctcgctcgctctcctccgctcgattccagtggccctgctgccctcgtcgtccctctcccgagcgagagcagcaccggcagttcggacagagctgaagccttggaggagtaaaggtgtggtcttgccatggagcagccgcagcagcacaagggaggagcggttccggcgcctgcagcggcggccgcggagctgatcgggtacgtcgacgtgcacgtgcgtagcgcgcgggacatccagaacatctgcatctaccacaagcaggacgtgtacgcgcggctctcgctgccgggggacggcgcgccggcggcgtccacgcaggtggtcaacggcgggggccgcaacccggtgttcgaccagtcgctgcgcctcggcgtgcgcgcgggggacgtcgacgccgcgctccgctgcgaggtgtggatgctcagccgggtcaagaactacctgcaggaccagctgctgggcttcgcgctcgtgccgctcccggatgtcgtcgccgccgacggcggcacgctcgcccgcgacttcccgctcaccaccagcgacctcttccagaccccctcgggcttcctgcagctcgagctctcctacatcggggtcgtgccggaggtcgtgcccatctcgccgacgcccaagccggcgctggccgacccggaggaggaggaggagccggggaacaacgccgccgacggcgtcgggaacgggaaggagtacgagaagatcgagttcccggacctgaatctcgtggaggagaaccagatcatggtctccgagtacaccaggctgccgtgcgcggccgtggaaacgcagagctgcgacagcctcctgacctcggagcacgatgacggcgccacggccctgagccgggacgccgccgtgcgcctcgtagatagcttctcgacggacaacagcaccgccgactcggtgggcgccttccagagcgacacgccggtcagcagcgtgtctaccacggagttcccggccacccctcagtctaactccagctcggagccgtccgggaacgcccactcgtcggctgaccacaaggcgaaggcagcgtcggagaccgccgacgcggaggtcgactcgtcccgcaccgtccaggaggtcccgccggcgaactcgccctgcgccgcgtcggaggctgccgtgcacaagccggtgatcagcgtcaacatcgagcaggaggtgaaggtggacgggaaccaaatcatggacatgtacatgaagagtatgcagcaattcacggattccctggccaaaatgaagcttccagccttggacatagacaacggtagcagcgggaagagcagtcccgcagcagccacacccagcgcagactccactggtgccgactcgaccgcggtgaagaagccgaccgccgccgggcagcaggagaagccctctcccaaggtgttctacggcagccgggcgttcttctgatctccggttcgctgatcagcggtagcacaccgctccagccgccgagtaacgaagcaaagagacggcatttgcagtcgtctcagctgaatcttactagcgcagaggaataacaccttctcaggctcttgttctaggtttgtcagatcggggatgagttactgtctttaatgtatccgtcagtacttatgaaaaatggtttggtttctctgttttagtaatgatatttagatctttttttcctgttaaacgagctaaccatatccatgtcctcaaaattcgtcggtgatcactgtctttattttaccactggatctgatcgcgcctaaattcttaattgattttatataacacagttaataattaataaaaaataggaatagtgtagaaacaaaactaatttgagttactattttctttttcacccgctcgcttcagtttaaagctaagc

SEQ ID NO: 104995 - DNA, 719 bp, Zea Mays
gaagaaggacgtgctccttcgtattaccaggatgtctttcagccgcagattagcaggccgcctgcgctccttgcccctaagcctcgtttccggtgtacgactccaacgacgacgagatggcctccccgctccgtcggagcttcccctccctcggccgcgcgcttctcacgccggcgccggcgcggatgctctccgcggaggcctccgatgccctcgttgagatcaagcctggggagattgggatggtctccggcatccccgaggagcacctccgccgtaaggttgtaatttattcaccagctaggactgcatctcagcaaggttcaggcaaagttgggagatggaaaattaactttttgtcaacccaaaagtgggagaacccattgatgggatggacatctactggggatccatatgctaatgtcggtgaagcaggacttacattcaacagtgcggagtcagcaaaagcatttgctgaaaaacatggatggaattatgtggtgggtctcgttttttccttgtagatatcacacgaaaattagatgctctatttgcgactgctacttcaggcctatttggaatggttgaagcaacgcttgaatgtcactctttttaacttgtggctgtggtctgtggggtctttttactccttttatctttataaagctaaattttgaggaagcaattgtaggtattgatgcttagttgtctaacgtatg

SEQ ID NO: 104996 - DNA, 1002 bp, Zea Mays
gaagaaggacgtgctccttcgtattaccaggatgtctttcagccgcagattagcaggccgcctgcgctccttgcccctaagcctcgtttccggtgtacgactccaacgacgacgagatggcctccccgctccgtcggagcttcccctccctcggccgcgcgcttctcacgccggcgccggcgcggatgctctccgcggaggcctccgatgccctcgttgagatcaagcctggggagattgggatggtctccggcatccccgaggagcacctccgccgtaaggttgtaatttattcaccagctaggactgcatctcagcaaggttcaggcaaagttgggagatggaaaattaactttttgtcaacccaaaagtgggagaacccattgatgggatggacatctactggggatccatatgctaatgtcggtgaagcaggacttacattcaacagtgcggagtcagcaaaagcatttgctgaaaaacatggatggaattatgtggtacggaaacggcatacacctcttttgaagcctaaggcctacgctgagaacttcaagtggaaaggccccccgaaggcggagcaagcataagacctccagcagcatgtgaccctgacactggaatgatgttattttcctcctgagctctagagtctagacctcttgtccgtgagcctggcattgggacggtgttgttttcttcctggacagccttttctttcaacagtgtccgtggtgaaagtacgagctagaatatgcatctatcaaacttgtaataagcatggtctgcaatcaaacaaaattagtgtccttcgaaaacgtttgttccttgatgacattgtatctcaatactgtatgcttccttggccggtatctgaaaagtggcatttgagttgaatgatgatgcatacttgcttttggctgtatcacacatgagcttgccagtctgctaagcacggccactcgtgcatgaccgtgtgttcatggacaacctatagtcagg

SEQ ID NO: 104997 - DNA, 913 bp, Zea Mays
gaagaaggacgtgctccttcgtattaccaggatgtctttcagccgcagattagcaggccgcctgcgctccttgcccctaagcctcgtttccggtgtacgactccaacgacgacgagatggcctccccgctccgtcggagcttcccctccctcggccgcgcgcttctcacgccggcgccggcgcggatgctctccgcggaggcctccgatgccctcgttgagatcaagcctggggagattgggatggtctccggcatccccgaggagcacctccgccgtaaggtgggagaacccattgatgggatggacatctactggggatccatatgctaatgtcggtgaagcaggacttacattcaacagtgcggagtcagcaaaagcatttgctgaaaaacatggatggaattatgtggtacggaaacggcatacacctcttttgaagcctaaggcctacgctgagaacttcaagtggaaaggccccccgaaggcggagcaagcataagacctccagcagcatgtgaccctgacactggaatgatgttattttcctcctgagctctagagtctagacctcttgtccgtgagcctggcattgggacggtgttgttttcttcctggacagccttttctttcaacagtgtccgtggtgaaagtacgagctagaatatgcatctatcaaacttgtaataagcatggtctgcaatcaaacaaaattagtgtccttcgaaaacgtttgttccttgatgacattgtatctcaatactgtatgcttccttggccggtatctgaaaagtggcatttgagttgaatgatgatgcatacttgcttttggctgtatcacacatgagcttgccagtctgctaagcacggccactcgtgcatgaccgtgtgttcatggacaacctatagtcagg

SEQ ID NO: 104998 - DNA, 567 bp, Zea Mays
atgccgctcccgatccgctgcacgcgccatcccctacctcccgtccctgccccccgcgggtcccgcgccgccatcgcctacctccgcggatcccccgcgcgcccagccgccatccccaacctctcgtccctgccccccgcgggtcccgcggagccatcccctacctccgcggatcccacgcgcacccagccgccatgccgctcccgatcccttgcacccgcccctgccccccgtgggtcccacgcgcgcccggccgtgaagcagccgccgcgcctcccgtggaacctgcctccacccgcgaatccagcgccgcgcccggccgcgaatcagtcgccccgcctcccgcggaactcgcctccaccagcgaatcgcccgccgcgcctccacccgcaaatcacccgctgctcctccatctccgcgaagcgcccaagcggatctcgcgcgccatccgcgaaacgccatcgcgaaacacccgccagccatgccgcgaaccccacgccgcaaacgcccgcacggtcgtgcgcgcttcgccccaagttcaataccccgcgcgcggccccgagctag

SEQ ID NO: 104999 - DNA, 1414 bp, Zea Mays
gcagaaacagcagagcaggggagcgcgaaaccgagacagggacagcgagacgctgacaggcaggataagcgtcgcgaaacgcgaccggcctcgtgccctacccctcgtcccgtcccttccatcacgtattcacgggcacgagctcgagccctcgtaccctccttcccttcctcgcgcgcggtcctccgatcgaactgccggacccgagcggaggagagcagggccctcccgagggccctcccgcgcggcgaccccgtggcgttcctgcgaggctgctgctcgttcgggtcggcggggcggaagcggcccaaggcctcgcccttgccctccccaccgcgcctgtccgccgctgcagcggcagcggacgacggggccaagatgaagggcctcttcaagaccaagccgcggacgcccgtcgacatcgtgcggcagacgcgtgagtgcctcgtccacctcgacctccactcgggctcccggagcggcgacgccaagcgcgacgagaagatgacggagctaagcaaaaatatcagggatatgaagtctatcctttacggcaatggtgaatcagagcctgtaactgaagcatgtgtgcaactgacccaagaattcttcagggagaacactttacggctattaatcatacatcttccaaaactaaatttggagactaggaaagatgctactcaagttgttgcaaacttgcaaagacaacaagtatcctcaaagatagttgcatctgagtacctagagtcaaataaagatctcttggacattttaattttagggtatgagaatatggacattgctttacattatggtgctatgttgagggaatgtattcgccaccaaagcattgcaaggtatgttttagagtccgaacatatgaagaagttcttcgactatatacagcttccaaattttgacatagcttctgatgcttctgctacctttaaggaactattgacaagacataaagcaaccgttgctgaatttctctccaacaattatgattggttttttgaagaattcaactctaggttgctgtcatcaaccaactatataacaaaaaggcaagctatcaagttgttgggagatatgctgctggatagatcaaatgttgcagtgatgatgcgctatgttagttccaaagacaatcttatgattctgatgaatctcttaagggattcgagtaaaaatatccaaatcgaggcatttcacgtgttcaagctgtttgctgcgaataaaaacaaaccacctgaggtcgtgaacatactggtcaccaatagaaacaagctacttcgtttttttgctggattcaagattgacaaagaggatgaacagtttgaagcagacaaggagcatgtcataaaagattttttccctttgagtatgtctgaggttgtaattagtcatt

SEQ ID NO: 105000 - DNA, 1295 bp, Zea Mays
gcagaaacagcagagcaggggagcgcgaaaccgagacagggacagcgagacgctgacaggcaggataagcgtcgcgaaacgcgaccggcctcgtgccctacccctcgtcccgtcccttccatcacgtattcacgggcacgagctcgagccctcgtaccctccttcccttcctcgcgcgcggtcctccgatcgaactgccggacccgagcggaggagagcagggccctcccgagggccctcccgcgcggcgaccccgtggcgttcctgcgaggctgctgctcgttcgggtcggcggggcggaagcggcccaaggcctcgcccttgccctccccaccgcgcctgtccgccgctgcagcggcagcggacgacggggccaagatgaagggcctcttcaagaccaagccgcggacgcccgtcgacatcgtgcggcagacgcgtgagtgcctcgtccacctcgacctccactcgggctcccggagcggcgacgccaagcgcgacgagaagatgacggagctaagcaaaaatatcagggatatgaagtctatcctttacggcaatggtgaatcagagcctgtaactgaagcatgtgtgcaactgacccaagaattcttcagggagaacactttacggctattaatcatacatcttccaaaactaaatttggaggtatgagaatatggacattgctttacattatggtgctatgttgagggaatgtattcgccaccaaagcattgcaaggtatgttttagagtccgaacatatgaagaagttcttcgactatatacagcttccaaattttgacatagcttctgatgcttctgctacctttaaggaactattgacaagacataaagcaaccgttgctgaatttctctccaacaattatgattggttttttgaagaattcaactctaggttgctgtcatcaaccaactatataacaaaaaggcaagctatcaagttgttgggagatatgctgctggatagatcaaatgttgcagtgatgatgcgctatgttagttccaaagacaatcttatgattctgatgaatctcttaagggattcgagtaaaaatatccaaatcgaggcatttcacgtgttcaagctgtttgctgcgaataaaaacaaaccacctgaggtcgtgaacatactggtcaccaatagaaacaagctacttcgtttttttgctggattcaagattgacaaagaggatgaacagtttgaagcagacaaggagcatgtcataaaagattttttccctttgagtatgtctgaggttgtaattagtcatt

SEQ ID NO: 105001 - DNA, 737 bp, Zea Mays
gagaagttcagtgcttttattccatggactgtatttgctcccaggatattataggtcataagaaaatgataaattaaataactattactaagttggacatccataagtgcaaaaatattgtcgaaactagaggctcatgtggacttttggtgctattttcttatagaatgtcttcattgacaggtatgttttagagtccgaacatatgaagaagttcttcgactatatacagcttccaaattttgacatagcttctgatgcttctgctacctttaaggaactattgacaagacataaagcaaccgttgctgaatttctctccaacaattatgattggttttttgaagaattcaactctaggttgctgtcatcaaccaactatataacaaaaaggcaagctatcaagttgttgggagatatgctgctggatagatcaaatgttgcagtgatgatgcgctatgttagttccaaagacaatcttatgattctgatgaatctcttaagggattcgagtaaaaatatccaaatcgaggcatttcacgtgttcaagctgtttgctgcgaataaaaacaaaccacctgaggtcgtgaacatactggtcaccaatagaaacaagctacttcgtttttttgctggattcaagattgacaaagaggatgaacagtttgaagcagacaaggagcatgtcataaaagattttttccctttgagtatgtctgaggttgtaattagtcatt

SEQ ID NO: 105002 - DNA, 652 bp, Zea Mays
atccctagcatcaaccgctcctcaacccctctcggcctctcggcctcgtggccgtgtccatgatccagacgccgctttgcctctctgggccttggtgacaccgcgacagccaacactccaacaggggcacaaggatgtccatcgccgggcgtcggcgcggcggcgctccatcgcagcctcgcgggcgcgggaccggcgcgcgctcggcctcccccctctcatcaccagctcgccctcgccagctcctgcatttgctgctccgaccggccaccatggaggaaggaagcctgagcggataggcggctgggcactgctactgaacctgacgcctgcggccggcctgattccctgaacgattgaaccagtgaaggtgaagaaaaccgtgtgctagcactgcttctgctgctagtttgctatgtgcgtgtggctgctagtgctactgtgctagttaagaagtaagattatttggtattttggtttaatcaattatttccttggttagtaggttagttgataaaattaaattttatgtttatagagataagatcgatggattccttatcaagaatcagaacgatatgtattgattattgtatttgtagaattcgtatcaatactacatgttttttgagtatttaagttttatcttgct

SEQ ID NO: 105003 - DNA, 921 bp, Zea Mays
cccaccagcagggaccaggcatgccctgggccagcaccacgttgacgacgcggttcgccggaggaccagccggaaaacaccaggaaacatcaaacacacccgttcccttccataaaaccacctgacctgacagacccgtccaccgtccatccgtattcccgtcacgcccccaacacccccacaacccgaagcagcgaaagctcccctaaccctctccgcgcatccgatcgcaaggaagaagagggagatgagctactacgggcagcagccccccgtcggcgtcccgccgcagcaaggctacccgggcaaggacggctacccgccagcggggtacccgccggccggctaccccccgccggcgcagggctaccctccgcagggctacccgccgcagtacgcgcagccgccgcctccacagcagcagcagagcagcgggccttccttcatggagggatggtacgttcttggctcccccacttttgtgccgcgcagccgctcataagttgttcctagatcggagtgtcttcgaaaatttcctcgctaggttagatggtaggcaccttccttcggctcaccggcggcggcggcgactgccgtgctggtgcggcacgttggcccctgtgggtgggtggggtcttgacttgacgcgtgaaccacccttggaaaagggcgccgccgccacgccacgccacgccaccctcgtggcctttccgtggcgacgtgtcggttgctacacgcaaaggtagtaagtgtcttagaccgtctgatctgagactggcggtccggattgctagcctcggcgatcacattttcctgctgccgttccacatgcgaggagctaatccgacggtcgggttgctgtcagtgtgaggctttcagattccttcggtttggttgaatggataatatacttgcgtgacg

SEQ ID NO: 105004 - DNA, 1013 bp, Zea Mays
cgccggaggaccagccggaaaacaccaggaaacatcaaacacacccgttcccttccataaaaccacctgacctgacagacccgtccaccgtccatccgtattcccgtcacgcccccaacacccccacaacccgaagcagcgaaagctcccctaaccctctccgcgcatccgatcgcaaggaagaagagggagatgagctactacgggcagcagccccccgtcggcgtcccgccgcagcaaggtgcggcgccgtctcctcccgtcttcgatctatctgctagtttatcatcacccaaacatctggagaacctctgtgttccccgcttactttccgtgctatatgtaattaggctaattatcttccgcgtgcggatcttgatttcaccaggctacccgggcaaggacggctacccgccagcggggtacccgccggccggctaccccccgccggcgcagggctaccctccgcagggctacccgccgcagtacgcgcagccgccgcctccacagcagcagcagagcagcgggccttccttcatggagggatggtacgttcttggctcccccacttttgtgccgcgcagccgctcataagttgttcctagatcggagtgtcttcgaaaatttcctcgctaggttagatggtaggcaccttccttcggctcaccggcggcggcggcgactgccgtgctggtgcggcacgttggcccctgtgggtgggtggggtcttgacttgacgcgtgaaccacccttggaaaagggcgccgccgccacgccacgccacgccaccctcgtggcctttccgtggcgacgtgtcggttgctacacgcaaaggtagtaagtgtcttagaccgtctgatctgagactggcggtccggattgctagcctcggcgatcacattttcctgctgccgttccacatgcgaggagctaatccgacggtcgggttgctgtcagtgtgaggctttcagattccttcggtttggttgaatggataatatacttgcgtgacg

SEQ ID NO: 105005 - DNA, 83 bp, Zea Mays
actagtagtgctatcttgaattctcagctagcgtgcaacctcttgaattctcaacgagcacacaacatattttcatccttaga

SEQ ID NO: 105006 - DNA, 710 bp, Zea Mays
aggaaatagggagccttatttttgacaaggacgaccagttggctgttgagtttgttaccgctgcagcaaatatcagagcttcctcttttggaataccactgcatagtctttttgaagctaaaggtgttgctggaaatatagttcatgctgtggcaactaccaatgctataattgctggtctaatcgtcatcgaggcaattaaagtgctcaagggtgattatcaagattatagaatgacatattgccttgagcatccagcaaggaagatgctcttgatgcctgtcgagccttttgaacctagtaaatcatgttatgtctgctctgagaccccacttgttctggaggttaataccaagacaacaaagctccgggaagtcattgaaaaggttataaaaggtaagcttggaatgaacctacctttgataatggttggcgccacacttgtttttgaggatggtgaagatctggaggaggatgagattgcaaattatgctttaaaccttgaaaaggtgctgtgatactaaccatatacttgccaagttattttttctgttaagatgagtcatttgtatgcactgtggcatatattctaaaattcttgtttcttaataaattgcagccctttgttgtgttcttggccagcttagttgatttgtagttaagcttcttcacccttagttgtgtttatgctctgcttagttgatccatta

SEQ ID NO: 105007 - DNA, 1432 bp, Zea Mays
aggaaatagggagccttatttttgacaaggacgaccagttggctgttgagtttgttaccgctgcagcaaatatcagagcttcctcttttggaataccactgcatagtctttttgaagctaaaggtgttgctggaaatatagttcatgctgtggcaactaccaatgctataattgctggtctaatcgtcatcgaggcaattaaagtgctcaagggtgattatcaagattatagaatgacatattgccttgagcatccagcaaggaagatgctcttgatgcctgtcgagccttttgaacctagtaaatcatgttatgtctgctctgagaccccacttgttctggaggttaataccaagacaacaaagctccgggaagtcattgaaaaggttataaaaggtaagcttggaatgaacctacctttgataatggttggcgccacacttgtttttgaggatggtgaagatctggaggaggatgagattgcaaattatgctttaaaccttgaaaaggtcttggctgaacttccagctccagttctaaatggtacaatggttacagtcgaggatttgcatcaggaactaaaatgcagtatcaacatcaaacacagggatgagttcgatgaagaaaaggagcctgacagaatggttcttgttgggtggtctggcccagttgataagcaaaccactagtaatggtgagactaaatcagttccatcttcatccaatacagaagatgtggatggtactgccgaggacatatcagcaacttctggaatgaagcgtaagctgaacgaaatattagagacaaaggagaattttgatgctctcgaaaatctttcgggtgttgattccagcagcgctcaagttgttgaagatgacaatgacgatggccttcttatgtttgatgaggacccaaggcaaagtaagaagaagagattgcagtagcatcctgctgcggcgataacagctcttgactcccggcatcgtggctaacacattgttcgatcgtaacatctttgataacttatttatgcggttatgtaccaggttgatgttgaaacattagtaacaatgcccagggcaccttttggcctcagatagtcagataccctgtagggttgtaatttgtaggatttaggaacaagagcaactaatgctcagctgacagcctgctgcgagatagaatttgtatctcaagagccaaggtcctgttttggttatgttttttgttcagttgaggggtgaccgggtgaaccaagctctgtcttgttaggtgccaatcacagggtctggaaatatgtactcatcctgtattcttgctaaggttatggatcagatggtgtatatatctgtgcaaaacactaatttatagttttgcactaatctacactgtagattatattgtttaccgagtgaagtttgaagtaaacggc

SEQ ID NO: 105008 - DNA, 633 bp, Zea Mays
ctgcctcctcggcgcccctcggccagctaaagggacctcctcggcgcgctcctgtgccgccacaggcgccgccgcgcgcctccatgcctctgccccagcgcctgccgcggctggagcaggaggcgccgtgccgttctcgatccaggcgcccaacgagaagatcgagatgtactcgccggccttctatgccgcctgcaccgccggaggaatcgccagctgcggcctcacccacatggctgtcacgccgctcgacctcgacaaatgcaacatgcaggtgagcgggcagcggcctagatctgtgtcccccggtggtattaatggagaaagatcagaaatagctgaaattgaagcagcatcaacaagtgaagctgctcggcttagagctgctctccggcgtgctccacccggcgctgttcgggaacctcaccagtcttttgaacggcttacacagacctgttttgataagagccgagcagcgattcttcaatttcggaccacgacctagctaaaggctaatggttccaaatgtctgaagtaccgaagactgggctagctccttgtttttttgtcatgtcaaataaatcgtgtatgattgcaacaatattggcaaaatatcgttgtgctttatatttt

SEQ ID NO: 105009 - DNA, 1084 bp, Zea Mays
atccgatccttcacaacttcctggtgctctcgagcctggtgtagccgaggatgcagttggcgtaggccacgttccggagcgccttgccgcgccacttggcgacgccggagcggagcgccttgagcaggcagtccgccgtcctgagcacgcccctgacgcccatgggcagcgacaggtagggcgcgttgaagaggtggtactcgagggacgccgcggcggcctgctgctgctgctgctgctgctggcgcggcgaggaggccacgagcatccggacgacctggcgcgcgaagccggcgcccagggagtggccgcagacgcagacgttctcggagccgaagcggtcgacggtggcgctgagcgcctgcgcggcgcgcgcgagccgcgcggagccgcggaggctgtcccgggccagcaggcggagccggtcctcgacgtcgcggcggatggtgggggcgcgcagcagcgcgccgcggaacgcgacgacggcgctgggcgcgccgctcggggtcggggtcgggctggcttggtggtcgcgctcgaagacggcgccgaacacggagccgtcgcggtcgtccaccagctcgtgcgccaggcggaactggaacggctcccaccactgctgcgccaccgccgccgcgtcgcgccgctcctgccgctccagctccagcaggtacaccgcctcgatcaggtggcaaggaaaagaatcagtcatcttaacggaatgaaatggttggacggtgatgtttgtgacatgggatggcagtcaaggtagccatggaaatataatgcttatcccaccttctacgagattatgcctcgaggaaattaacagagacgcatagcagacaacatgcatggtagaaaaaagcagatctagctagaaactaactaaaaggtggtaggaagaaggaccaagtgctcgtttaagctaggccaaaggagctgagggatagaatcatctggtagacagctatggagcactgcaaggagagaggacgaacaattaaagatgagatctatgtcaagtagttgttcctgtcttatcatcatcagtgatattatttaatgtttttagcgaggaata

SEQ ID NO: 105010 - DNA, 564 bp, Zea Mays
gccttaggtctgagttcagtggagttttctccctgccctcgagtctgacccgtgttcatcgcttgagggacatagctcttgagttcaagtcggtgtaaacccactccacagccacccagcatgatgtattttgtgcatcgcgtgccaatggcgaccacagcagcagttctcaccctcaccgtggacatgattcctcggaggttgtctcggccgtgtggtgcttgttccttactcctcgcagagtaccaagaagaagatcctaaagagaagtctactcagtgctattgatccagtggtggattccatctaactgcttatcgtgttagaagatctcagatctcctcctgtaataaggagaagttttattcccttatcttttggttagttacttcatgtggaggccttgaagcttagaatgttatgtgtatctcttatggaaaggcttcacccttccaattattaaaataagttatgcactttgggtactatcaggacttgtaataattaccattcttcttatgttgtaaaacttgagctttggaaatgtaaaatatgttttgtaaa

SEQ ID NO: 105011 - DNA, 2093 bp, Zea Mays
ctgctacatttcccggttctcggttctcaccgcgctgccattaaaatcccccttccttgctaccacggcaaccttgagcaagcgcacacttcatgttgccgcctcgccgccgtagcagcttacatggatacgctgtttaggtcggttagccttcaagcctccgagcagcagcagcagcagcagtcggcgtcctacaactcgagaagcaccacgtcgagcggctccaggtcgtcgtcgcaccagaccgacgcatcctacaactactactaccacagcaacagcggcgtcggcggcgtcgggcagtactactacggtcagcagaaccagcagtactaccaggagccataccagcaagaagaatgcggcaacgcccaccgcctttacatggatgaagacttctcctcctcgtcttcgtcgaggcagcacttccactcgcacggcgcggcggtgcagccggcgacgtcgtccgcggtcacagcaacggcgccgacgcccccgctgtccacgtcgtccacggccgcaggagcggcacacgcactgttcgaggcggccgacctgtcgttcccccctgacctcaacctcgacttctcgtccccggcgtcttcgtccggcgggtgcgtggcctcctcggcggcggtcgggggaagatgggcgagccagctgctgctggagtgcgcgcgcgcggtggcggcccgcgacagccagcgcgtgcagcagctgatgtggatgctcaacgagctggcctcgccgtatggggacgtcgagcagaagctggcgtcctacttcctccaggggctcttcgcgcgcctcacggcgtccggcccgcagaccctgcgcacgctcgcggcggcgtccgaccggaacacgtccttcgactccacgcggcgcacggcgctgcggttccaggagctcagcccgtggtcgtcgttcgggcacgtggccgccaacggcgccatcctggagtcgttcctggaggccgccgcggcgtcgtcggagccgcagaggttccacatcctcgacctgagcaacacgttctgcacgcagtggcccacgctgctcgaggcgctggccacgcggtccaccgacgacacgccgcacttatcgatcaccacggtggtctcggccgcgccgtccgcgccgacggtcgccgtgcagcgccgccagcgcgtgatgcgggagatcggacagcggatagaaaagttcgcgcggctgatgggtgtgcccttcagcttccgcgccgtgcaccacgccggagacctcgcggagctcgacctcgacgcgcttgacctgcgcgatggcggcgccaccaccgcgctcgccatcaactgcctcaactcgcttcgcggtgtggtgccgggcggtgtccgaagaagggacgcgttcggcgcgtcgctccggcgtctcgatccaagggtagttactgtcgtcgaggaggaggctgatctcgtggcttttgaccctgacgcatccgaggaaagcggcgacacggaggcagcgttcttgaaggtgttcggcgagggcttgcggttcttctcggcttacatggactcgttggaagagagctttcccaagactagcaacgagaggctggcactggagaggggagccggacgtgccattgtggacttggtctcgtgcccgccgtcgaagtccatggaacggcgggagacggcggtttcatgggcacgccgcatgcggtctgccggcttctctccggtggcgttcagcgaggacgttgccgacgatgtgcggtcgttgctccgtcggtatcgggaaggctggtcgatgcgggacaccggtttagacgactcggcagccggagcaggcatcttcctggcgtggaaggaacagcctctcgtgtgggcaagcgcgtggaggccatgatagagatccatgagctcgtcgacgcgcaaatgcaagctcggtgagtgcactacatggaccgcaggcccgcagcccataggagaagccggcgtggatgcgtcgatccgtgcattggatcgcgcgcacgtgcatgtatgtatggcgagttctctcctcctctgctcgtcttgaaagctgaatggctcacgcgtgtagggttttggagcagc

SEQ ID NO: 105012 - DNA, 225 bp, Zea Mays
ggcccgggggcagcagtgggcgccacctcaccgactactcggagctgcccgacgacgcagccgcggcgagcgccggcgccgacaggccgtccggtacgctgcaccgcgcgcggtccgggtacgtggagacgacggtcgggcgtcgcgcggacgacgagcaggccaggccggcgcccgtggtcgtcgccgggtcggcttatcgacgcaaatgaggagcgacgtgca

SEQ ID NO: 105013 - DNA, 1734 bp, Zea Mays
aacgcgagagggttaaccccgcccgacccatccctatttcattcgctggtcgcgtcgccaccgctcgctcgcccgcctccccatccaattccaaacgcaaagaaccgaattccattccccactcgggctcctctgccgtcctcctcctcgcctcgccttccggcatttgctccagctcttagaccagccgcgcaatacgaggctgccgaaggggatggagtcggacgcgtccacctcgccgcggcggcgcagcacgagctgctacagcgacagcggggactcctcctgctccgagcccttcagcgagtgcggcagcgacgacctctccttcacgcccgccgcgggcatccaccgcctactgctctcctgcgcgtccgaggcgtcggaggacgccatctcctcgctcgtggcggagctggagcgcccgtcgccgtcgctggactcgctccgccgcgcggcgatggagctccggctgctggccaagcacaacccggacaaccgggtccgcatcgcggcggcgggcggcgtccggccgctcgtcaggctgctggcgcacgcggacccgctgctgcaggagcacggcgtcacggcgctgctcaacctctccctctgcgacgagaacaaggcggccatcatcgaggcgggggcgatacggccgctggtgcgcgcgctcaagtccgccgcgtcgcccgccgcgcgggagaacgcggcgtgcgcgctgctccggctgtcccagctcgacggcgcctccgcggcggccatcggccgcgcgggcgccctcccgctgctggtctccctcctcgagaccggcggcgcgcgggggaagaaggacgccgccacggcgctgtacgcgctctgcagcggcgcgcgcgagaaccggcagcgcgccgtggaggccggggccgtgcggcccctgctggacctcatggccgacccggagtccggcatggtggacaaggccgcgtacgtcctccactccctcctgggctccggggacggccgagccgccgccgtggaggaaggcggcatccccgtcctggtcgagatggtggaggtcggcacctcgcggcagaaggagatcgccacgctctgcctcctgcagatctgcgaggacaacgccgtctaccgcaccatggtcgctcgcgagggcgccatcccgcccctcgtcgccctctcccagtcctcctccgcccgcaccaagctcaaaaccaaggcggagtcgctggtcgagatgctgcggcagccgcggagcccgagcctccgcgcgcgaccagcggcggtggttgcggcggagtgacggcctccttcccaatcatcccccccacttgtcttcttcggcgagacgagccggcgccggtcgtccggccggccggcgtgcgcgtgtaaataccaagcacagcgtgtttgcgtccgccagcgagtgtacagtttcctcaagcgagatgtcgtccggacgatcgaagaagtatctagtctccttgtaatttcttccacccaaaccttccgtttgctccccttccgcctccactttccacccactttgggtgtgtgtgtgtctgcagcgaaacttcgaaaaaaaagcttcgaattcgcgtgtgcccgcgtgggctgggctctgtgcttctgctagtcgcaggctcgcagcagtgtgtacgtgcgcgcgctacgtcaggaaatcaacttggttttccgatcttgtggtggagaccagcaagaaaaaggctacgtattctc

SEQ ID NO: 105014 - DNA, 1021 bp, Zea Mays
cagatagtttcctgctgtatcacgaggaaaagccgtgaagaaatcaaacgagaaagagaaaggcacaaaaaaataaagaacgaaaacaatgggcagtgaaataaataaaaatggcaaccgcgccgccctcatctcccttcatctcctcaagcaaagcaaaggcgagcgcgagagaaacctgaaccaacttcccagacccgctactccctcgccgcgatttcctcacatggcagcgctgcgcctccgcgaatcactcgagaggaacggcccccgcttctatttatccggcccttgtccctgcgccgacccgcgttgccccagtcccgatctcgccgcccccttctcctccctccgcgtccatcgcacccgctcctgatcccgcttgcttgctctggttctgcttccgccgtttgtctcgcgggtcctgggagctcctgagccctggttctgtctctagcctgtcttgccatggggaagagtgagtttctcttgacgccgattgattagtggtgtcttgttaccgtttcacgggtggtgtagtagttggttctgattggtggtttgttcaggcaagaagagcaaggcccgcggcggcagggacgacctgctcgacagcagcgacgccgacagcgtcagctcctcgtccaccgcactgtcggatctctccatctcgtacgctaccgagcacgtcaactcgcaggagttcgtcctggacaagtacatcgacgcgctctacgagaagaggtcaggagggtcactctttacgcgctctacgagaacagcttcatgtttgctgttctggcgccgatggtgaaataggcatttctgttcgtgtgttttttacttcgatttcgttgagcttacttaacttatgtgtattgtaggcatagatagtttactatgtcgcatcacattgtagctggctgtctggctgacccaattgtagttggccgggcaatacggttttcttgtttgtttgcatgacgttcactatataatgcacgggttcgtcttggactat

SEQ ID NO: 105015 - DNA, 2041 bp, Zea Mays
aaaaatggcaaccgcgccgccctcatctcccttcatctcctcaagcaaagcaaaggcgagcgcgagagaaacctgaaccaacttcccagacccgctactccctcgccgcgatttcctcacatggcagcgctgcgcctccgcgaatcactcgagaggaacggcccccgcttctatttatccggcccttgtccctgcgccgacccgcgttgccccagtcccgatctcgccgcccccttctcctccctccgcgtccatcgcacccgctcctgatcccgcttgcttgctctggttctgcttccgccgtttgtctcgcgggtcctgggagctcctgagccctggttctgtctctagcctgtcttgccatggggaagagcaagaagagcaaggcccgcggcggcagggacgacctgctcgacagcagcgacgccgacagcgtcagctcctcgtccaccgcactgtcggatctctccatctcgtacgctaccgagcacgtcaactcgcaggagttcgtcctggacaagtacatcgacgcgctctacgagaagagggggtctacaagagaggcagcattgggtaaactggttgatgcctttgaaagttttatgctccatggccttgtggaggacaagtatgccactctgatgagtcaattaaataattccgtgaaaaggggatctactaaggaggtttttctggcatctcattccattgggttattggctattacactcggtgttgggagcagttcacatgaaataatggaggagtcacatccccaactttgtagggtacttcaagcttggtccgatgcatcaaagatgatatctgcacttgattgtttggctgtcatcacatttgttggagcatctgatctggctgaaacagagttatctttgaaagccatgtgggatgtgattcatccaaagtctggttcaaatgtgggaactgttcggaaacctaggcctcctgtgttagcagctgctgtatctgcatggacttttctcctgactactattggttcatggaggataaataccaatatctggaaagagcccattgcatttctgtctactcttttggaagcagatgatcgtgctgttcggatggctgctggtgaagcattggttttgtgctttgagttaaatctgcttgatgtttcttctcgtgaggacgatggtgttaacacaggaggaacagctggttctaagaacaagcttttcttggatatgcaagcattaaaagcaaaaatatcaggtctggccactaatctctctgctgaggctggggggcaaggtgcagacaagaaaaaacttactgaccaaagagacttatttcaaaggatcttagattttgtcaagtatggtgactgccctgaagaatcaatcaagattgctggaaaacgtgatgttttaagggtgtcgtcatggtctgaattaatccagttgaatttcttaaaggggtttctggggaaaggctttctgaagcatgttcaggagaatggacttcttcaggatatatttgacattaaggttgacaaaaccgaaaccctgtcgtccactaacaagaaaatctttaggtctgaagaggaaaaaggaagagctctgaaattgaacaaggaacgtcgtctagcccaggtaaggaagaatgctgtcatgttggacgactaacaaggtcacaagggtgggaaggcaacagccattccgcgtctctgtttaaactactatttactgggctgtcatgttgggccgttgtctgtgtaaactactatttactggcacattccattggaggttgtgccgtcatagtactgagacacttgagttatactgatatagtgcacgtaagcgatttactattcgtacatatggaacgtcagatagcatgacttatgttggaataataaagttaattagaagttcagctagattcatgtgggaatagcaagaagttacttcgaattttagggtttgtttggttcagcttcctaaactagattcgttgccaaaaaatttggaatctcaaacaaataagtacaatagaa

SEQ ID NO: 105016 - DNA, 2026 bp, Zea Mays
aaaaatggcaaccgcgccgccctcatctcccttcatctcctcaagcaaagcaaaggcgagcgcgagagaaacctgaaccaacttcccagacccgctactccctcgccgcgatttcctcacatggcagcgctgcgcctccgcgaatcactcgagaggaacggcccccgcttctatttatccggcccttgtccctgcgccgacccgcgttgccccagtcccgatctcgccgcccccttctcctccctccgcgtccatcgcacccgctcctgatcccgcttgcttgctctggttctgcttccgccgtttgtctcgcgggtcctgggagctcctgagccctggttctgtctctagcctgtcttgccatggggaagagcaagaagagcaaggcccgcggcggcagggacgacctgctcgacagcagcgacgccgacagcgtcagctcctcgtccaccgcactgtcggatctctccatctcgtacgctaccgagcacgtcaactcgcaggagttcgtcctggacaagtacatcgacgcgctctacgagaagagggggtctacaagagaggcagcattgggtaaactggttgatgcctttgaaagttttatgctccatggccttgtggaggacaagtatgccactctgatgagtcaattaaataattccgtgaaaaggggatctactaaggaggtttttctggcatctcattccattgggttattggctattacactcggtgttgggagcagttcacatgaaataatggaggagtcacatccccaactttgtagggtacttcaagcttggtccgatgcatcaaagatgatatctgcacttgattgtttggctgtcatcacatttgttggagcatctgatctggctgaaacagagttatctttgaaagccatgtgggatgtgattcatccaaagtctggttcaaatgtgggaactgttcggaaacctaggcctcctgtgttagcagctgctgtatctgcatggacttttctcctgactactattggttcatggaggataaataccaatatctggaaagagcccattgcatttctgtctactcttttggaagcagatgatcgtgctgttcggatggctgctggtgaagcattggttttgtgctttgagttaaatctgcttgatgtttcttctcgtgaggacgatggtgttaacacaggaggaacagctggttctaagaacaagcttttcttggatatgcaagcattaaaagcaaaaatatcaggtctggccactaatctctctgctgaggctggggggcaaggtgcagacaagaaaaaacttactgaccaaagagacttatttcaaaggatcttagattttgtcaagtatggtgactgccctgaagaatcaatcaagattgctggaaaacgtgatgttttaagggtgtcgtcatggtctgaattaatccaggggtttctggggaaaggctttctgaagcatgttcaggagaatggacttcttcaggatatatttgacattaaggttgacaaaaccgaaaccctgtcgtccactaacaagaaaatctttaggtctgaagaggaaaaaggaagagctctgaaattgaacaaggaacgtcgtctagcccaggtaaggaagaatgctgtcatgttggacgactaacaaggtcacaagggtgggaaggcaacagccattccgcgtctctgtttaaactactatttactgggctgtcatgttgggccgttgtctgtgtaaactactatttactggcacattccattggaggttgtgccgtcatagtactgagacacttgagttatactgatatagtgcacgtaagcgatttactattcgtacatatggaacgtcagatagcatgacttatgttggaataataaagttaattagaagttcagctagattcatgtgggaatagcaagaagttacttcgaattttagggtttgtttggttcagcttcctaaactagattcgttgccaaaaaatttggaatctcaaacaaataagtacaatagaa

SEQ ID NO: 105017 - DNA, 2222 bp, Zea Mays
cacgaatggcgcctccgcccacgctgacgtcgtctcggtcgtctccctcgctgccctcgtcgccgcacaggcccgcgctccggccgggcagcctgcagcggctgctccgcccgccagacccgtccgacgacgacgactccgccccgacgccgcgctcgcagtcgcgctccagctcccgtgagcgcgccctgctccaggtcaccaacatcacgccggcgctctccggcgccgaccccttctcaggccaccacggcttctacctccgcctctccgactcggcccgctcctgctacgtgtccctccacgccgaccacgacgacctcatcctcgccaacggcctccacatcggccagatcatcgaggtcgaccaccttgtgccgtccgtcccggcgcccgtgctccgcggcttccgcgtcctccccgggcgttacccctgcgtccagcaggaatccggcgatgacgacgtcgtcaaggaggtcgtctccgaacggccgcgccggccgtcgccgacgcccccgcttccggagaggagagcgcgacaggcgagctcccctgcctccgtcgcccacttccacaggtcacggtcaataacgaatctatctgaggcgggatcgccggcgaggaggagggagagcatgctgaggagcttggactccccgaagaacctgaggaagatcagtgtcccgtccgtagacggcaacagcagcgacgacgacgacgcgtcgtcgtcctactcgtcgttgtccacggcgaggaggaactgggatttcagcgggaacatcaaggacgtgagacccgtcgctccccggagacgtagcaacagtgtttctccaggtaaatccggctcaaaaaccattgcacagcagaacgacgtggtgaatgatccactggaatccgtgaggagaaaggcagagaaggcgttcaaggtgctctccaggaggaacagccacgcgtctatcaaggcacccagagacagctccggtgccgccacaccgatgtcgcatagtgcttcatcaagtggcatcaagtggtgcgagaacaatgtgatatggagctcactctcctcaagcttggtgcgtcatggaaaggaagcaatgaagcagagagacatggagctgcaagctgtgcttgatggactgctagaagcatctgcctctgagaagttgataaaatgcctgagcaaatactccgaactacattctgacaaggacgacgacccaaaggaggtcatcagcaggttcttgaaattctctcaagaactggatcatgccatcttcattgctcagtcacaggccagactcaggcacccaaaagcatgctgttccaactcaacaccctcagcttcgcctagagctgctacgaaggcagcgttggacaggaagcaatctgccatatcatgggtcagagcggccatcgaagcggatctgtcacccttctccagccacacgacgagaggcgcatctgaatccgcgagggcgtcatcagcggccgaactgaaacccgtgagcccactgttctgttccaagccaaagtgcagctgcagcagcaggctctcgaagaaacccgctgatgcttccaccgaaggcggcagcctaaacgcagcaatggacctggctatcgcgatgcgctccgacggcaaccggtggttcctcaactacatcgacaagttcctggacgacatcgagggcgactacgcgacgtgtgactcccaggtcgcgtcctttctgcagcagctgaagaaggtggatgattggctcaacggcgtggtgcgacatgagaggatgctttccattgatagaagcggcaaagactgtgtgttgtcagaagaagaagagagtgacgcgtgcgagagagttcggaggaagatatatggggcgctcctcagacatgtgcagtatgctgcaatggcgctcgagggtatcaacagtgtaaccgatgaagagaaagagctgtagactgtagccaggcacacagataaaaagaacatacaggaggttattgtgcagcatatggtctgtcgaatgctttggtgttgaatacttgaataatattgttgaaaaaatagttgcgctgataaatgtcgatcactctggaaacgtagaactagatgactgaaacttctgcacttctttttttttcgcgaatacgtgggaggcctacgcatctttgtattaagaagatgaaaacatgattacaactaaacagaaatataaacaagattg

SEQ ID NO: 105018 - DNA, 1782 bp, Zea Mays
cgaaaatgagctctctctggactgaactagtgagaatacttgagaaagagcgtataccagtctagcaccgaactaccaaaaccgaccgagccgcgaacttcacccctgccttctctcccttctccgtccaggccctggtgcccgagcgttctcgtgcggcaagtgggcgccgccgccggactacgccaggtgcccagttcctcgtcgggtccttcgtcgacgacgagcacccaccagttatgccctttctcttcccttcttgctgtgcgaaacccagcaccatccgaaccctaacttgagctatctggctatttgcatccggatctgatctaattaccaagcgtgtacatacatactactaacttcgattttttttttgggaaaaatattggaacatccgtgtcctttaccgggttcccccctatagaaaattcgagtattagactctacatgtcaagaaagtatggcgccaggaagcaaggcggagcggaaagcagcactagatgctggcgcatggatgttcaatgtcgtcacatctgttggtatcatcatggtcaacaaaggcttaatggcgactcatggctttagttttgctacaacactgactggacttcattttgcaatgacaaccttgatgacgttagtaatgaaatggctgggatatattcagccatcttatttaccattaccagaactagtaaagtttgccttttttgcaaacctgtcgatcgtcggaatgaacgttagtttgatgtggaactctgttggattctatcagatcgcgaagttgtgtatcattccagtcttatgcattctggaaatcatattcgacaaagttcgttactcaagagatacaaagctcagtatagtgcttgtcctcataggtgttgctgtgtgtactgtgactgatgttagcgtgaactctcaagggctattagctgcagtaatagctgtttggagcacagcactacaacaacattatgttcaccatcttcaatggaagtactcgcttggctcattcaatctcttaggccatactgctccagcgcaggcagcatcattgttaatagtggggccttttgtggacttctggctgactaacaaaagagttgatgcttttaactacacatcaatagttacgttctttatcgtgttgtcgtgcataattgccgttgggacgaatctaagccaattcatatgcatcggaagattcacagccgtctcgttccaagtcctaggccacatgaagacagttctggtgttgaccttggggttccttttctttgggaaagaggggctcaacttccatgtcgcccttggcatgcttctggctgtgatcggcatgatctggtacgggaacgcgtcgtcgaaatctggaggcaaagagcggcaggtctaccccacaccgagcgagaagagtcagaagcatggggcgctgtcatcgcagtccgagctcgatcaaaaggtctaaacgagacacacaaaggcatccgatgcttgttgagcaccggtcgacctggctttatttttagtacttatttttgagggatgagatgtttctataggattgtaggtggggccatagcagaaagagggtgcctgggtaaaatgcccatgagtttacttttgcagtgagtatgtcaatctaagctggcagatacttgatttgtaatagtctttgtgtgtgtttcgctcttcatgtggcatgttcagtttgatctatagttgtatctttcactttcacactgaaattgaaaagtaaagcgcaaatttccttgtata

SEQ ID NO: 105019 - DNA, 1591 bp, Zea Mays
cgaaaatgagctctctctggactgaactagtgagaatacttgagaaagagcgtataccagtctagcaccgaactaccaaaaccgaccgagccgcgaacttcacccctgccttctctcccttctccgtccaggccctggtgcccgagcgttctcgtgcggcaagtgggcgccgccgccggactacgccaggtgcccagttcctcgtcgggtccttcgtcgacgacgagcacccaccaaaaattcgagtattagactctacatgtcaagaaagtatggcgccaggaagcaaggcggagcggaaagcagcactagatgctggcgcatggatgttcaatgtcgtcacatctgttggtatcatcatggtcaacaaaggcttaatggcgactcatggctttagttttgctacaacactgactggacttcattttgcaatgacaaccttgatgacgttagtaatgaaatggctgggatatattcagccatcttatttaccattaccagaactagtaaagtttgccttttttgcaaacctgtcgatcgtcggaatgaacgttagtttgatgtggaactctgttggattctatcagatcgcgaagttgtgtatcattccagtcttatgcattctggaaatcatattcgacaaagttcgttactcaagagatacaaagctcagtatagtgcttgtcctcataggtgttgctgtgtgtactgtgactgatgttagcgtgaactctcaagggctattagctgcagtaatagctgtttggagcacagcactacaacaacattatgttcaccatcttcaatggaagtactcgcttggctcattcaatctcttaggccatactgctccagcgcaggcagcatcattgttaatagtggggccttttgtggacttctggctgactaacaaaagagttgatgcttttaactacacatcaatagttacgttctttatcgtgttgtcgtgcataattgccgttgggacgaatctaagccaattcatatgcatcggaagattcacagccgtctcgttccaagtcctaggccacatgaagacagttctggtgttgaccttggggttccttttctttgggaaagaggggctcaacttccatgtcgcccttggcatgcttctggctgtgatcggcatgatctggtacgggaacgcgtcgtcgaaatctggaggcaaagagcggcaggtctaccccacaccgagcgagaagagtcagaagcatggggcgctgtcatcgcagtccgagctcgatcaaaaggtctaaacgagacacacaaaggcatccgatgcttgttgagcaccggtcgacctggctttatttttagtacttatttttgagggatgagatgtttctataggattgtaggtggggccatagcagaaagagggtgcctgggtaaaatgcccatgagtttacttttgcagtgagtatgtcaatctaagctggcagatacttgatttgtaatagtctttgtgtgtgtttcgctcttcatgtggcatgttcagtttgatctatagttgtatctttcactttcacactgaaattgaaaagtaaagcgcaaatttccttgtata

SEQ ID NO: 105020 - DNA, 2535 bp, Zea Mays
cgaaaatgagctctctctggactgaactagtgagaatacttgagaaagagcgtataccagtctagcaccgaactaccaaaaccgaccgagccgcgaacttcacccctgccttctctcccttctccgtccaggccctggtgcccgagcgttctcgtgcggcaagtgggcgccgccgccggactacgccaggtgcccagttcctcgtcgggtccttcgtcgacgacgagcacccaccagttatgccctttctcttcccttcttgctgtgcgaaacccagcaccatccgaaccctaacttgagctatctggctatttgcatccggatctgatctaattaccaagcgtgtacatacatactactaacttcgattttttttttgggaaaaatattggaacatccgtgtcctttaccgggttcccccctatagaaaattcgagtattagactctacatgtcaagaaagtatggcgccaggaagcaaggcggagcggaaagcagcactagatgctggcgcatggatgttcaatgtcgtcacatctgttggtatcatcatggtcaacaaaggcttaatggcgactcatggctttagttttgctacaacactgactggacttcattttgcaatgacaaccttgatgacgttagtaatgaaatggctgggatatattcagccatcttatttaccattaccagaactagtaaagtttgccttttttgcaaacctgtcgatcgtcggaatgaacgttagtttgatgtggaactctgttggattctatcagatcgcgaagttgtgtatcattccagtcttatgcattctggaaatcatattcgacaaagttcgttactcaagagatacaaagctcagtatagtgcttgtcctcataggtgttgctgtgtgtactgtgactgatgttagcgtgaactctcaagggctattagctgcagtaatagctgtttggagcacagcactacaacaacatgctttctagaaattgccttccccagaccacaccttgtgtgggagctctcaacattagccaccaatgttttcagacggcctaatcgtttctgatcgccagaggatcaatcagcccgttcagatcgattaatcggacgatcagcccgattaatcacttctgagtccatgctaacaattctcagtttctcatcgccaagtggtcaagcccatcatgtagcaaacaacaaggtacaagaaatcgcgaagccacattcatgcttgcaggcttgcagcagcagcactcagtggacaggccctggaccgtacctgcaggctggcaccgccgcgccggggatggaggaggggccgagggggacgatgcgtcattttccgccgtcgccggtagcgcgccggcgttgcctgcatagtgctccgctaggttcctcgacagccagttcgtgtcgtgtctcgcgtgtgctccagcctgggcgttgttcactgttggctacttggttgtgttcatgtgggaggaaaaaggaagcctgggctgggctgctgggccgaattcgttgacgaaaaacaattgaagtggtccaaaatttcaaagcatacagccgtctgattgtccctgcgctaatcggacgatcagaaacctgatcgccctgatcggctccgaagctgcgatcagtcgattaatcgctgatttatggcgactaatctgacgttctgaaaatgctgttggccacccaaccatttttttcctttccgaaatacatatgttcaccatcttcaatggaagtactcgcttggctcattcaatctcttaggccatactgctccagcgcaggcagcatcattgttaatagtggggccttttgtggacttctggctgactaacaaaagagttgatgcttttaactacacatcaatagttacgttctttatcgtgttgtcgtgcataattgccgttgggacgaatctaagccaattcatatgcatcggaagattcacagccgtctcgttccaagtcctaggccacatgaagacagttctggtgttgaccttggggttccttttctttgggaaagaggggctcaacttccatgtcgcccttggcatgcttctggctgtgatcggcatgatctggtacgggaacgcgtcgtcgaaatctggaggcaaagagcggcaggtctaccccacaccgagcgagaagagtcagaagcatggggcgctgtcatcgcagtccgagctcgatcaaaaggtctaaacgagacacacaaaggcatccgatgcttgttgagcaccggtcgacctggctttatttttagtacttatttttgagggatgagatgtttctataggattgtaggtggggccatagcagaaagagggtgcctgggtaaaatgcccatgagtttacttttgcagtgagtatgtcaatctaagctggcagatacttgatttgtaatagtctttgtgtgtgtttcgctcttcatgtggcatgttcagtttgatctatagttgtatctttcactttcacactgaaattgaaaagtaaagcgcaaatttccttgtata

SEQ ID NO: 105021 - DNA, 103 bp, Zea Mays
cgaacaggtgttgcacatatcaccattgtttcttcatatcgtgaaggctcaacaagtttcagattgtcagttgttccttcaggtgattagaggaacaaatttc

SEQ ID NO: 105022 - DNA, 764 bp, Zea Mays
gttatgttgtcttaatatctaaaatgattaaaccaagtaattaatattgatgagtacctatacccatcatcaagcgattatattcatatagttaaagtgcctaacaacagttgattaactgatttagtgagctctagttaggtaaagattggctcaccttttttgtttctggaattgatggcattgggtcagcacatcccattaggaaatggactttagccatctcattatagtaagtctagaaatcagttggcaggccgaatgagccaaaaaaaagaaaaaattgtgcccgatgttcctgctacttactggacactttggtcatacaaaattgatagccactcattaatcagatctgccatattatttactaattgtcatacttttttaatttttttcttgttcttcttgctacttactggccattttgctcatacaaaattaatagccactcattaattagacctgcaatactaattactacttgccatactttttaaaaaattgtatatacacacgcatttgatttgatgtagttgagtgctcatttgttctactcgcattaatgcacatgatgttgttcggtttgttatgctaacaataaataattttgcacttatcctaattattttctggtattcaacatggcactgtcatcattgtttaagagaataaatgtgaaatatttgacctccaaggtttcagtctataccagtgctacaaagttatctggtgaactaaacatgatatttaggcgctgggcc

SEQ ID NO: 105023 - DNA, 1547 bp, Zea Mays
aaccctctgttcttttcaaaacaaaaaaccaaaacccttctgtggaaaaacgtaaaaccaggcgcgccccgcaggaattgcggtcaggagaacctcatccctctcgccttcaggttctactcgccctctccccacccgcagcgcctcctcccattcccccaacggacattgcctaggaggctaggacagaaccacccagagcgcacaaccttacccgaatcgccgttgcatggaggccgtgcgcgcgtcggcggcgtgggtcgccagtcgctcctcccatgtcacggtcgaccttcaagaaattgagaaggtagtggaccaaatccaaggagatgttccaaaagttgagtgggattacgaaggaattcactactttgacaatgggccactcacagtccagtacctgttcgtcttggatgcactaaacttctgcttctggccagataaggacttgagctatgaccatttggcttctggactgaagtcagccttggagaaagacaaaaatgcccttgattcagatcgtctccagaattacactgggccccagctccgccaacttctgaactggccacgaccactgccaattgaggaggaaagagtacgccttctccacgaggttgggcaggaacttaaaagaagctttggaggtcaggctgctaatctagtgaagtctgctggaaactctgctgcgactcttattgaactgattactcgacattttcctggtttccgggaccattcactctacaaggggcaccaggttttcctgtacaagagagcccagatctttgttgctgatttgtggggcgccttcaagggacaaaactatggcgagttccacgatatcaattccatcaccatatttgctgactacattgttccagcggtcctgagggagcttggagtacttaaatatggctcgaatctatcttgctccatcgactcgaacagtgagatagtgcctggaagcgaggaggaagtggagatacgcgcgtgctccatctatgcagtggagaagatgagggacctgatcagtaagaagtttggaaagcagcttctgagcatcgacattgatctctggctctggtcctgcggcgtgcagaacatggcgctgtcacatcaccgcaccctgtcgatttactactagacagggcagtggcggaggacggataaaaattttggtatggcttgagctatacctagccacaatggaccctccgcccctgagacaggcagtcagtcaggaagctgaccctgctggtgcgctcgttcagctggccgggcgttgtcgtcgcttgttcgtcctaaccataacggtgcatgtaggtgtcgagagttttgtctccttgggaatgcacacaggtgcaaggtattgtaggcccgtcccatgaggatgcatggggttggtagtacaacatttttttttgtgatttagagacttgaactgctgcagttttcacatgaatgttatccctaaggacaaggcgggagagcgagtgtttctctatctccagaactgatcgcggcgtttattttctgtttcc

SEQ ID NO: 105024 - DNA, 1538 bp, Zea Mays
aaccctctgttcttttcaaaacaaaaaaccaaaacccttctgtggaaaaacgtaaaaccaggcgcgccccgcaggaattgcggtcaggagaacctcatccctctcgccttcaggttctactcgccctctccccacccgcagcgcctcctcccattcccccaacggacattgcctaggaggctaggacagaaccacccagagcgcacaaccttacccgaatcgccgttgcatggaggccgtgcgcgcgtcggcggcgtgggtcgccagtcgctcctcccatgtcacggtcgaccttcaagaaattgagaaggtagtggaccaaatccaaggagatgttccaaaagttgagtgggattacgaaggaattcactactttgacaatgggccactcacagtccagtacctgttcgtcttggatgcactaaacttctgcttctggccagataaggacttgagctatgaccatttggcttctggactgaagtcagccttggagaaagacaaaaatgcccttgattcagatcgtctccagaattacactgggccccagctccgccaacttctgaactggccacgaccactgccaattgaggaggaaagagtacgccttctccacgaggaacttaaaagaagctttggaggtcaggctgctaatctagtgaagtctgctggaaactctgctgcgactcttattgaactgattactcgacattttcctggtttccgggaccattcactctacaaggggcaccaggttttcctgtacaagagagcccagatctttgttgctgatttgtggggcgccttcaagggacaaaactatggcgagttccacgatatcaattccatcaccatatttgctgactacattgttccagcggtcctgagggagcttggagtacttaaatatggctcgaatctatcttgctccatcgactcgaacagtgagatagtgcctggaagcgaggaggaagtggagatacgcgcgtgctccatctatgcagtggagaagatgagggacctgatcagtaagaagtttggaaagcagcttctgagcatcgacattgatctctggctctggtcctgcggcgtgcagaacatggcgctgtcacatcaccgcaccctgtcgatttactactagacagggcagtggcggaggacggataaaaattttggtatggcttgagctatacctagccacaatggaccctccgcccctgagacaggcagtcagtcaggaagctgaccctgctggtgcgctcgttcagctggccgggcgttgtcgtcgcttgttcgtcctaaccataacggtgcatgtaggtgtcgagagttttgtctccttgggaatgcacacaggtgcaaggtattgtaggcccgtcccatgaggatgcatggggttggtagtacaacatttttttttgtgatttagagacttgaactgctgcagttttcacatgaatgttatccctaaggacaaggcgggagagcgagtgtttctctatctccagaactgatcgcggcgtttattttctgtttcc

SEQ ID NO: 105025 - DNA, 952 bp, Zea Mays
gcgctgcgcagtgctttatatatacccggggctccactactccagtgctggctggcgttgtatgagcgtgggtggtggcgccgccggccggggatgagctgcaacgggtgccgcatgctgcgcaaggggtgtagcgacgcgtgcgtgctgcggccgagcctgcagtggatcgacggcggcgccgaggcccagggccacgccaccgccttcgtcgccaagttcttcggccgcgccggcctcatgtccttgctcaccgccgtccccgagccgcagcgcccagcggtgttccagtcgctgctgtacgaggcggccgggaggacgatcgacccggtgagcggcgccgtggggctgctcggcgcggggagctggcacctgtgccaggcggcggtggagacggtgctgcggggcggcgccatcgccccgctgcccgagtccgactccgacggggcccgccgcggcgcgtccgctgtggcggcgaggcgggccgtggggtgctcgacgttctcgacggcgaagcgcgcgccggcgagcgtgggggcgccgccggagccgtcgtgcgacctcgggctgtggctcagccccgggtcacccccggcgaccggggagcggcgccggcggcggcggcccggcacgccgtccatgacctccgaggagtccgtgacgacgatgagcggcggcggcggaggcggaggcggagggagggagcccgagctgctgaacctttttgtctgagaatggccgacggtttggctaaaagccagcggccgatcgtgccgtgcgcccctcggcgcgcggtgtggtgtgcttgatcccggcgagaaaaaaacgtttgtttgtctaggtagccgtcgtcttgtccttcttcctttttgggccgcgcgtagaaaccatgagcgtgccggcggcagcagcgctctcccagccgccgtccgttagctagctgtttatttca

SEQ ID NO: 105026 - DNA, 1994 bp, Zea Mays
cttgtaggtgcttgtacttattacatggaactcatggattccagtaggggttacttattactcgtatcggtgtgtccttcgatcgtcctctagttacatgtaatagcatttttagatctcgattatcttcttgcattgaggtgtgtggtataggcatatagaacaagctacttacattatttcttgccatctcttcaagctccagatcatttctagctacatacaaaagatcggctacagttcgttacatagatctctgctcctaataatcctcccactgaaaatattccttgtacttgatggtcttctgtcttctccattctctccctttggttcccgaagttctaatggcatagggaaccacgtgtagggcgttcagcgcacatccctctatatatgctttagtacaagcaccaaatccgcacctcaaactgcgcaacgtcgtgtacgagagctctgccttctcgtgcttttcctaatccccgccgccgctagctggtctgttgccttctactacctcgccacgcgcctgcctcgggcccccctacatgatgcagttcacgcatactgcgcccccgccgccgcctctgcaccctaacggccatgccgctggagtgctagggctagggctgtttctcgacgtcggcgcgccgacggcggcccgcccgtgcccggggagcttcccgacgccggcgtccaagatctccctcggcaacgacctcaacagcaccagctgcatggagcagctgctggtgcactgcgcgaacgccatcgaggccaacgacgccacgctcacgcagcagatcctgtgggtgctcaacaacatcgcgccgcccgatggggactccaaccagcgcctcacggcggcgttcctctgcgcgctcgtcgcgcgcgcgtccaggaccggcgcgtgcaaggcggtcaccgccgccgtcgccgccgagtcggccgcgctccacgtgcaccgcttcacggccgtcgagctcgccggcttcgtcgacctcacgccctggcaccgcttcggctacacggccgccaacgccgccatcctcgaggccgccgagggcttccccgtcgtgcatgtcgtcgagctcggcaccacgcactgcatgcagatccccacgctcatcgacatgctcgccacccgcgccgaaggccccccgatcctccgcctcacggtcgccgacgtcgcgcccagcgcgccgccgccagccctcgacatgtcctacgaggagctcggcgcgaagctggtcaacttcgcgcggtcgcgaaacgtgtccatggacttccgggtggtgcccaccgcgccggccgacgcgttcacgtccctggtgaaccagctcagggtgcagcagctggtcctggacgggagcgaggcgctcgtcgtgaactgccacatgctgctgcacaccgtgccggacgagacggcgggatctgtcggcctcacgcagccggtatcgctccggaccatgctgctcaagtctttccggacactcgatcccaacctggtcgtggtggtggaggaggacgcagacttcacggcgggtgacgtggtggggaggctgcgcgcggcgttcaacttcctctggatcccgtacgacgccgtggacacgttcctgcccaaggggagcgagcagcggcggtggtacgaggcggagatcgggtggaaggtggagaacgtgctggcgcaggagggcgtcgagcgggtggagcggcaggaggacagggggaggtggggccagagaatgcgcagcgcggggttccgtgcgttggcgttcggcgaggaggccgccggagaggtgaaggccatgctgaacgagcacgcggcggggtgggggatgaagcgggaagacgacgacctggtgctcacgtggaaggggcacaacgtcgtgttcgcgtcggcgtgggctccgtcgtgatgagtttatcatatgcagtgcagttcagaatcagaaggtgagtaggcatgtatgtgatcttccatgaccgacatg

SEQ ID NO: 105027 - DNA, 736 bp, Zea Mays
atggtgactcacactcacaccgaaagcgcctcaactctgaaggcgctacagcaacgtcgccacttcactcacgattggagtttcacctcggcagcccagccagccagtggttcctcggctcggaggaacaggcgaacagcaagagcttctgaagatgaaggcgatccccgtggctctcctgctcctcgtcctggttgctgccgcctcctcgttcaagcatctcgccgaggcagcagacggcggcgcggtgccggacggcgtgtgcgacggcaagtgccgcagccggtgctcgctgaagaaggccgggcggtgcatgggcctgtgcatgatgtgctgcggcaagtgccagggctgcgtgccgtcggggccgtacgccagcaaggacgagtgcccctgctacagggacatgaagtcccccaagaaccagcgccccaagtgcccctaggccctaccgctctaagggagggaggatgacccaggatttcgctcgcgatcctgcacagcttctagtcttgtactgctagtttagcgcgccgagcgtcggaatgtcgcgacggttccttccgtgcttgtgtgctgtgtttctcctcggacgtgctataacctagaataataaccaatgcactgtatctgtgtgcttgtcttttgggatgtgatggctcttcaacactagccgccgaagagaacagggatgagcaagaacgtccttaataataataaaaatagtaggcaagag

SEQ ID NO: 105028 - DNA, 216 bp, Zea Mays
atggcggccgagactcggatcgccgccggtgtcttctgcctgcctgtgcttgtccactcactcactcagtggaccggccggaagaatatgggtgggggtggtggccccttgagagctaggcttttagtgttgaataatgccaagcgtccgtgcctgagcctcaagagacaaaaagagagcatgggtgagagttgcgataagttcaaagatgactag

SEQ ID NO: 105029 - DNA, 612 bp, Zea Mays
caaacttcagagaccaccccccccccctcttctgctacttccaaagagagagcaatggatagagtacctgatggtgtggaagagcacaagtcagcagcagaccaagctaacgaagctggtctagctgatgatagtaccgcggtaccatggctgaagctgggtcttgatgcgccgaaaagtgaagaagccaagccccctcgagaggtgaaaccagtggccactccacataggactttctcctgtaactactgcatgagaaagttcttcagttcgcaggccctcggtgggcaccagaatgcgcacaagagggagaggtgtgcagcaagaaagccatacaggtttcagatgatgacgggccttaatcctccatctgattcctttctccaacctttgagagtgaactcccactccacgatcctcaaggatcatggtgaaagtgctgctgctgctgttgtagcaagattcgacggaggcccaatgagcagctggatgccttttgcaattgaagaacctggagggttagtatggacagggagcttcacagcaagttcagaggagtccaagaagcaaatagagcaaaaaaatattgacttgaccctgcgcttgtagatt

SEQ ID NO: 105030 - DNA, 1411 bp, Zea Mays
agtccctaacctggttcttgagtaagcgccacccatcttcaggctgcagcttctccacgcggtggatgtgcacggccttcatctgcctggcaaccgtctctttcctcgtcgtgacgagcaccctgctgccaccacgagcgccggccctgaacgcgttctgtagcacctccttccaggccacgtcgctccacacgtcgtccagcaccagcaggaccttctttcccgagacggcccgctggagcgcgggctccagcgacgacctgtccggcgtggcgtcgtgctgctgctggagctggtggccgcctccggcgccaacgaggacggaccacagcaggtcagcctcgttcacgtcctgcgacacgcacacccacaccctgaggtcgaactcgtcgcgcacgcgctggtcagcgaagaccctcttggcgagggtggtcttcccgatcccgccggcgcctgtgatgcccacggcgaggacgttctcgcgcaggtcgtcggcgatcagcgcctccaccagcctgttcccgtcctcctcgatcttctccccgatgagatcggcgtggacgatcaccgagctcgtcttaccgttgccgctggatgccggtggtagttgctgccggagggggacggacgacgaggcgctgacgaagcgaaacatggagctccgacggcacacgctctccagcctccggttcagctccttgatctgcgccgccatggcgtgagcgagcgccgggtcccggaagcacgtgaggaggggcgcgcagcagccagcgccagggaacgagcgcttgggcgcgtcgctgctgctgcgggcctgggcctccatctgccaccggtcgaggacgtcgtcggcgtcgtacatgacgtccttaagctcccgaacccaggcgtcgacggccgtgtccgtgatgcgcttcatctcggcgtcgccgaggacattcacgaggtcctccagtgtgctctccagcctttccatctccccgggcacgccgaggagcgtgtcgagcctctccttcacggcaccagcgaccattcgccccagcatgggcacgaaggcgtctaggatcatagccatgagttaatcacttgatcaagagagctcagcagggccaacaagattgaaattatgtgtgttttgagaggtcaacggcggcactggcacaagatgggtcacacttgctctattctggttgctcttgctcctgcaattataattgggaagggagttgataaacaggagattcgaccgaacagatggcacctcgaagaaaatgtgcatagtttatttgtgtccttttctggttatattcatatccttgactactcttctttgaatcttctcgagcgccttctccgtcgaaggatcgaagaagctcggatgacaaattctacacgctggaacattgagcgc

SEQ ID NO: 105031 - DNA, 269 bp, Zea Mays
gacggtgtcttcacggtaaaatcagcctataatgcacaattcatcggatcgtacagccacattaattctgattttgtttggcgggtacgggcagagcaaaagtgcaagatttttgcttggattcctctacaggacaagctccttactgctaacaatcttgccactcggggttggccacaccaaccaaactgctccctctgcaatggtcccttggagaccggccccacctctgtttgcattgcccttttgcccgtgcggtgtggcatcag

SEQ ID NO: 105032 - DNA, 998 bp, Zea Mays
actggagccgaaccaaacaaaaccccacctgcaagtctcgctgcagccccacacgcactgacccacaccccccgcaccgctctctccccacccaggcacccagcctccacgccacagatctctctccctttcccccctctctctctctccgaactctaccccgcagtctcggccgcggccatggcggaggacgcccccaacgccgtcgccgagggcagccagcccgcggcctccgagggatccgccgacgccgccctgccggctgccgcgggcgccaaggccgcggaggcgctgctcccgtcgctcagtatctggccgccgtcgcagcgcacgcgcgacgccgtggtgcgccgcctcgtgcagacgctcgcggcgcccagcgtcctctcccagcgctacggtgccgtcccggagcccgaggccgagcgcgccgccgtggccgtcgaggccgaggccttcgccgccgcctccaagtccgccgccgccgccgccgagtgcccggcctccgtcgaggaggggatagaggtgctccaggcctactccaaggaggtcagccgccgcctcctcgagctcgccaagacccggtccgccgctgctgcggcggcgcccgcgcccgccgaggggagcgcgcaggcgcaggagtccgcggaggcctcgtcggcgactgctccacctaccgaggaggctgccgtaaacgaggagtaaggcgtcggaccgcgctttgatccaccgacaattgctgttattttggcatttcgtcggaatgttatttatcgtcccccctgcctatgtttactagtacatcattatctatctatctattagagatgagatgcttgtgacaagagggactgatgtttgtttcatggatatgatattctcgaatatttatcgctagtttatttttaactaaaccgtgacaataaaaaaacggagggagtaatattgaattattatatatcaaccgtgcatcctttcgacgagctaattgttcttgt

SEQ ID NO: 105033 - DNA, 128 bp, Zea Mays
tttttgtgtttttctatttattccctggactactcaacgcgttccgattacacagctccaaaacttcccacgatcgccatacccacgaccctggatgctcggagcactctcccacgatgacacgcact

SEQ ID NO: 105034 - DNA, 351 bp, Zea Mays
ggaggaggaggtggaggtggagcacttgcacctggagggggtggaggaggtggaggtccacagcgagcacctggaggaggcggaggtggtggaggtcctgcacgtgaaacaggaggaggtgggggcgggggaggaggtgggggtgggggtgctcctcggccaggtggtggtggtgggggtgggggtggaggtgctcctcgaccaaggggaaggggtgggggtgctcctcggctaggaggaggtggcgggggagatggtgctgctgaacgtgccatagaaggtagtggtggtggcggcggaggaggtggaggtggaggcggtggcggtggagaaacctggcttcttgatgca

SEQ ID NO: 105035 - DNA, 1420 bp, Zea Mays
ggttctgcccctggccccctcgcggcgcacgcacccgtctggtggccggcctatctggtgcggtgcggcgcggctcgatccggcccgacgattccgatcccctcccgtcccgtccatcccgtctcgtctcgcctcgccctccacgccggcgaccggagaaggggccgtgcagcgcaggcgacgcccacaacgaatccgtccccccgcgccggcttcgcccagccccgcggcgacgcaccaggattgaaggaggcatgagaaggtggacatcattgctatagcgatttgattactggagatggtgttggtggtaaagcagcaccgctgcacacactctgcgagctgcgtttgcatcaagggccacctcagtgaggatgctctgttcctcgtcttccgccacatgaactggaacccgaggctgattgctatcttgtcgtgtgtgtgcaagtggtttgacgaggttgccaagcaggtgctgtggaaggagttctgtcatgcaagggctccaaagatgatgctggatttgcattcaggtggcagccacattgttgatgggaactggaaggcactggggaagctgctcatctattgcaatggctgcacaaaaggggggctgtttaataacattcacgttccaggccattttgtgttcaggacacgcttttctaggactgcgggcaggagtttcctgcctctgccatgtaagtcggatgtcctgtatgtgtcagatccatgcgagcatcttgatcagggggaagaaggcgacataggtttcttccgaggcatctttatgtcatttgccacttcaagggtaaagaagatgttgattgagaagcgggcgaggtttcatccaagggagttgtgcccttattgtaaggccaagctatggaacatgtttcaggaaaatatgatcccaaggagtgcttccgcaaggctgggtgcctatgatgactctgtggagtattttgtatgcctgaatggacatgttattggactcggtaccctactaccactctcagactcagaggaggcagcagatgagtgatcatcaagaacatgaatcaggtttagaagattgaagcccagggcttgtgaaatggtactgaatcttggttgtgactagcagataatgacattggttctgcaaactgttgcacgacaggaacctgtgatgggatctgcatcgaactgcagctgtgttcttcagggggtgccttgcatcagattgaaaaaaagagctactttatagtgcctctcctttatttattgatatgtcattacttgtttttgtaactgcaatcaagatactgggacgctacccgcttgcctgtttagacatgttcacatcatgtgtagtgaggtgttttatttaacgagatgttaaatttgtgctcatgatattcatgtgctgttatcttta

SEQ ID NO: 105036 - DNA, 668 bp, Zea Mays
acacgcagacgcagacgccgccttcttcctgaccagcggtacaggcggtccagccttcagacgccgccagagcgccagcgccgccacccgccagcagcaggatccagctccacgtccagccgcactgccacagccaggcagccagcagccagggctccacgtccaaccgcagcagccagcaccagcaggctccacgtccagccacagccagagctcgccggggatcctggacgccgagtcgcccaccacgccggtcggccacgccatccaggaccaggttgccactgcctcacgccctcaccagtaacccaccctaatcgaatcgagcaggctcgcagtgccgccagcctggtgtgaccccgggatcaggttctgattccgaaggagcaaaaggggatgtcaagtggaatccggctacatggctttgcattatatcactagtgtaaattgtaatgccgtaatggtgctgattatagagtggtgatcaaatgtctttttgtgacacgctgctcaacaaagcctagaaaaatcttgcgagagttcaagtcggactggttttgtttctggttattttggtctcaaatggcaccagcaggatctcaaccttcgttaaaattttattgccgagtgctctggtgagtgttctgctctgaatagcaactgttttt

SEQ ID NO: 105037 - DNA, 851 bp, Zea Mays
gcctcgcccgctcaggtgctctctgctcagcaactcgcgccccgtcgctcaggtgctcagcttgtcgcgcgcccacgcctcactggtcacccgcccgtcgtgggctcgtcaccaactcaccatggaggcccaagatccggtgtcgcagactcgcaggcacacgaaggacgtctgccaggactgccacctcgacgaagttcttgttctggatcagtgagcaagcgcacaaagaccctagcttccaagaagatgacgatgatggcaagtagtacatgtgcatcgtcggcatcgcaagtatccatagaaaagcaactcgatgttgtgatggagatggaggggcaaggggaggagcacgcatgggagattttgttgacggaatcagagaacagtaactttgatcttgacgatgagagtctaccttcagccgatggagatgagttgtcaaagactgagaagacaaagaggtcgacagtaggtactcgggtatccccctccaaatgcaagagacatttggtgacaaggacacaaaggagaatagagatggaggagagctgggagagaagacatgaacataggacatatgagattaatttggtctagttggttgtatgcctgtagcttttgtaatattttggctataacgtgtggcatattttattgtatgttaagggtgtaactttgtcaagatactcctaactcctgctactccacttttcactagttgctgctagcttgctataacatatgtgggttgtggctagttggtgcaatggtgctactgctacttgttgttagtctgctacgcagcagaggcacacttatgtctatcagtttgtgaattgtgattggaa

SEQ ID NO: 105038 - DNA, 561 bp, Zea Mays
atgcatgactgtgactatggctacttggcttattacgctactaggtacgtgctcgtgcgatgccacggaacacaaattgacgagcctccaataactcaggacggtggcgacgggcaacgtgagtacaatgatgatgatgaggcaccagtttccatcggtgaagatgacactgaatctagtttgctacttaacttcctttctcaattgaaagaagaaaaggcgatgcagtctgccaagttatcggtagagcttggaagcttacaaacagatatcacagaggttgataaaagacactcagcaagaatgaggttgagcttagatgatacagatgtactaccaagttctagtgctttgtcaggagcttctgtgagtgcccttcaaggtgcattgttgtcaggtttgttaccagcgtcatacaagtcgagcatttatgaggagagggtaatgaggaatttggtgcagcttgaaaatgcatactactccatgaggtcctctctggacacctatgaaactaatgtaatcaaacggccagatatctcatgtagaagtggcagttcttga

SEQ ID NO: 105039 - DNA, 1149 bp, Zea Mays
atggatgtcgtggagctcgatgcggcgaggcatggatgcaaggtctgcggaaaaagcttcctgtccggccggtcgctcggaggacatatgagatcgcacatctcgctcggcgaggcagcgctggaggttcacgccgccgacgagctgacgcctgtttcgtcgaatggtggccggggctgtgacggactggtcgcgtacgggctgagggagaatcccaggaagactcggcgcctatccgactttgctgacgagaaggatgtcggccatggcgttgagtgcgggaagtcgtggaagtctttgttcggccacatacgcaatcatgcgtccggcgacaggtatcacgacgtcgacgacgacgaggacgtggaagaggatgaattctctgtagaggagggggaagcagaggaagcagaaatggtgaagccgacggaggcgcctgtggcggctctgacggtgctgtcggcgtcccctaggcggaggcgccgatcgatgcgcgtggcggctccgccgccgcgggtgctgagtgggctcgagaaagagactgaagacgtcgcgctctgtctactgatgctctcgcgcgacaccggtatgtgtagctcgccggccaagaacgagactttggagagcgcaaagaagatcaagatcaagatcaagggcggcgtcgccaagaacaggaagcgagcttcccggaagaatcaacacgatcccgtgcccgtggcgccgaagcggacccggtacgagtgtccgggatgccgcaaactgttcagctcgtatcaggcgctcggcggccatcgcgcgagccacaagcgcatgaacgccagctgcagctcccctaagaataagatcactcccgccgcgtcctccgcgccgccggagccaagcaccgagacgtacacgtcgttcaacacgatgtccccctccgcgtcaccggactcggtggccatcggcttcggcaagcccaaggacgacgaggcggtgcccgacgcggagttggagcacaagcggtcgcatctgatgtcctgcgagtccaacggcgtcgatctctactatgtcgccggcgccggcgcagaccatcaggagcagcattcagcagtcgccgacgggttacttgatctcaacttcccaccggctgcagcggaggagacctga

SEQ ID NO: 105040 - DNA, 636 bp, Zea Mays
atggcggctgttgcggcggccacctcgcacctcctacgccaccaccgcaacccccaccttctcctcctccgcgcagcgatctcatcctcccgtgctttgccccagcagccggagctgtcccccgacccgaccgccggcacccccgacctcgccggcgcggccccactccctccaaaccccagcacggggagccccttctacacccagaactggcgcaacccagccgccgccaacccgccctcctcgcttctgcccaccgtcgtcgccggcagccccttcggggcgcagcacttcatggccgccttctacgatgcacccgacgtcacggggctcaaggagacgttcgccaagtatatggcggagcagcggtgggaagacatgaagcatctgttcgaccactgggtgcgctccctcgacgccgccacggggaagcccaaccaccccgacgtcgacctcttcaatcactacctccgcgccaacctcatgaccagggccctgccgcacgagatgctcgatctcgctgaccacatgctcgagttcgagctccaacccaacgctgcatcgtacaacctcgtgctcaagagcatggtcgccagccaggagaccgagggcgccgagaagctcattgaacggtga

SEQ ID NO: 105041 - DNA, 1387 bp, Zea Mays
atggctggggaaggaacatttccagacgatgaatcctacaatttggttgtaggcctgcttatcagacagaacctcgtcgattcatctctgaagtatttggatctgatgcttaaatcgggctacacgttatcactaactgttttcacagattatatccgagcatgtatgagatctgggaggttggacacgttgacatcaattatagagaaatgcaagacaactgataagaacaaagtcttgtgtccggaatggacttggtgcattgacatagcagatgctgcatttgaagctaacaacagcaaattagctctttttgctttggaatatcttgcaagatggattgctcgtggtgagaatgttaaacctcctgttcagctgtcagttaatgaaggtcttgtaatatcagctctgagtgctgctggcagaacttataatactgacctcttgaatgctgcttggtcgctattacggaaatccctgcgccagaaaagggcacccaccccagagacatatcttgccaagatctatgctcattcatcaattggccagcttcaaagggcttttggtacattgcgtgaatttgaaaatgcctatgggaactctgaggacattgatttagagctcttctcaccatttacttctttgcatcctcttgttgttgcttgctgcaaagatggctttagcacattggattcggtgtatggtcagttggagaatctgatacatgctgatccaccgtacaaatctcttgctgctctcaactgtgttgtattggggtgtgcaaacatttgggatattaatcgagcttatgaaacttttgtggctattaaggaaaaatttgacctcactccagacattcattcatacaatgctcttctgtgtgcatttgggaagttgaaacagacaggagaagcatgtaatgtgttccagcatgtattaactcttggtgttaagccaaatgcaacgacatactccttgcttgtcgatgcccatcttgcaaacaaagatccaaaagctgctcttgccataattgatgagatggttgatgctggcttcactccttccaaggataccctcaggaaggttcgaagacggtgctctcgtgaatcagacttcgacagtgacgagaaagtccagtccctggcaaagcagttcaactaccgaatgggtggtgagaaccgtagagagatgctttatagcatagaatacaatcctgtgtactgaaacattgctactgagtttgctagccattgggagagcacagacattgcagcttgtaaattacttggatgtaccaggattcttaagcaaattttcagtttctcgatcatcatttgtgctcgcagggttcgttttaggacttgctaataagatgacactttgagtc

SEQ ID NO: 105042 - DNA, 1633 bp, Zea Mays
atggctggggaaggaacatttccagacgatgaatcctacaatttggttgtaggcctgcttatcagacagaacctcgtcgattcatctctgaagtatttggatctgatgcttaaatcgggctacacgttatcactaactgttttcacagattatatccgagcatgtatgagatctgggaggttggacacgttgacatcaattatagagaaatgcaagacaactgataagaacaaagtcttgtgtccggaatggacttggtgcattgacatagcagatgctgcatttgaagctaacaacagcaaattagctctttttgctttggaatatcttgcaagatggattgctcgtggtgagaatgttaaacctcctgttcagctgtcagttaatgaaggtcttgtaatatcagctctgagtgctgctggcagaacttataatactgacctcttgaatgctgcttggtcgctattacggaaatccctgcgccagaaaagggcacccaccccagagacatatcttgccaagatctatgctcattcatcaattggccagcttcaaagggcttttggtacattgcgtgaatttgaaaatgcctatgggaactctgaggacattgatttagagctcttctcaccatttacttctttgcatcctcttgttgttgcttgctgcaaagatggctttagcacattggattcggtgtatggtcagttggagaatctgatacatgctgatccaccgtacaaatctcttgctgctctcaactgtgttgtattggggtgtgcaaacatttgggatattaatcgagcttatgaaacttttgtggctattaaggaaaaatttgacctcactccagacattcattcatacaatgctcttctgtgtgcatttgggaagttgaaacagacaggagaagcatgtaatgtgttccagcatgtattaactcttggtgttaagccaaatgcaacgacatactccttgcttgtcgatgcccatcttgcaaacaaagatccaaaagctgctcttgccataattgatgagatggttgatgctggcttcactccttccaaggataccctcaggaaggttcgaagacggtgctctcgtgaatcagacttcgacagtgacgagaaagtccagtccctggcaaagcagttcaactaccgaatgggtggtgagaaccgtagagagatgctttatagcatagaatacaatcctgtgtactgaaacagtaagtacttgttcatctgttggattttgcccatgtagtggttggttatgttttcaccctgacaattagtgttgcatcttgctagttatgctttcctggctgtttctcctgactggtgttgtcttcattttgataagcagttgctactgagtttgctagccattgggagagcacagacattgcagcttgtaaattacttggatgtaccaggattcttaagcaaattttcagtttctcgatcatcatttgtgctcgcagggttcgttttaggacttgctaataagatgacactttgagtctgtttggttgtcaggaccagcatatcctggtcaaagcccagatgcaggctgggcatagcctgcatgcattcgtgcaaatcaaaacaactctacttgtttggttgtt

SEQ ID NO: 105043 - DNA, 1512 bp, Zea Mays
catcaattcatcacggcatcacccccaatttcttctactccaccgaaacataaatctgtagccagcagaaagatcttgcggaaggtggcagacgcatagatgagggtgagagcatttggcggtagcgcttgacgagcgacgagtaaaccctaatgctttgatcgcggcggcgtcgtttgggacactcccgaatcgatccgcctacatgcctatgaatcctcctcccccgccgcctcctgggtcggcgtcttcggcgccggcggggcccagctacttccctctccctttccacctgcagcagcaccagccgcagccgcagatgccgccgcctatggcggcgagcagctaccaacagtaccagcaacagctgcatcaggcgcatcagctcttccagcgggacgcgcagaccataacccccgaggcgctgcagagcgtcaaggctgctctcgccaccagcgacgtcctcgaccccgccgccgccgcgaacgccaggccctccgatccctctaccagcaagaagcccatcccccgccgcgctgccggacaatcctgggaggatcctaccctcactgactggcctgaaaacgactaccggctgttctgtggagatctaggcaacgaagttaatgatgatgttctatccaaagcattctcacggtttccatccttcaacatggcaagggttgttagagataagaggactggcaagactaaaggttatggatttgtgagcttttcaaaccctactgacttggctgcagcaataaaagagatgaatggaaagtatgttgggaatcgccctattaaattgcgtaagagtaactggaaggagaggacagatgttgaggctctgcaaagacaaaagaatcatgtccaaaggaagcctaaaattcccaagaagagtgttcttcacaagtagagatatataggccctaccgagggtgaagggcagctcatggatgcgctgctgccttgggatgatgctacttctggaatgtcttcactctctgcactactggggggcggaaatcacgcaagggctgttgtttcatgcaaattgcaacgagctactgctgccatctgatgcaatttgtgctccgttttactgtttcccatagtttgcgttcatccatttgcggtgttggagtactgtcatggctactgactaaccaggccgagctgaacaagaaccaaatggaattttcagttttggtttcagcaagtaatagcatgacgtgttgtactatctatctcggttccagctcaaggttatgttcttgtccacggcatccacggccgccagcgtctaggaggccaggagggcctgcacgtacttgagctccagtcacttctccaccccttccccccatcacttccttaaggctctgcagctccagattaatttgatttgtattagcaatttatcctcctttttcaaaagaaagttgcaactgtactgtttctgtttcatgacaacactgcaacttaatgagttaatgacagaataaatta

SEQ ID NO: 105044 - DNA, 1605 bp, Zea Mays
catcaattcatcacggcatcacccccaatttcttctactccaccgaaacataaatctgtagccagcagaaagatcttgcggaaggtggcagacgcatagatgagggtgagagcatttggcggtagcgcttgacgagcgacgagtaaaccctaatgctttgatcgcggcggcgtcgtttgggacactcccgaatcgatccgcctacatgcctatgaatcctcctcccccgccgcctcctgggtcggcgtcttcggcgccggcggggcccagctacttccctctccctttccacctgcagcagcaccagccgcagccgcagatgccgccgcctatggcggcgagcagctaccaacagtaccagcaacagctgcatcaggcgcatcagctcttccagcgggacgcgcagaccataacccccgaggcgctgcagagcgtcaaggctgctctcgccaccagcgacgtcctcgaccccgccgccgccgcgaacgccaggccctccgatccctctaccagcaagaagcccatcccccgccgcgctgccggacaatcctgggaggatcctaccctcactgactggcctgaaagtagctaacataacttattaattcagtttcctttgtgtttaatggatcacccttatttggtttgcttgtgtctcaactcctaacaatttgcagacgactaccggctgttctgtggagatctaggcaacgaagttaatgatgatgttctatccaaagcattctcacggtttccatccttcaacatggcaagggttgttagagataagaggactggcaagactaaaggttatggatttgtgagcttttcaaaccctactgacttggctgcagcaataaaagagatgaatggaaagtatgttgggaatcgccctattaaattgcgtaagagtaactggaaggagaggacagatgttgaggctctgcaaagacaaaagaatcatgtccaaaggaagcctaaaattcccaagaagagtgttcttcacaagtagagatatataggccctaccgagggtgaagggcagctcatggatgcgctgctgccttgggatgatgctacttctggaatgtcttcactctctgcactactggggggcggaaatcacgcaagggctgttgtttcatgcaaattgcaacgagctactgctgccatctgatgcaatttgtgctccgttttactgtttcccatagtttgcgttcatccatttgcggtgttggagtactgtcatggctactgactaaccaggccgagctgaacaagaaccaaatggaattttcagttttggtttcagcaagtaatagcatgacgtgttgtactatctatctcggttccagctcaaggttatgttcttgtccacggcatccacggccgccagcgtctaggaggccaggagggcctgcacgtacttgagctccagtcacttctccaccccttccccccatcacttccttaaggctctgcagctccagattaatttgatttgtattagcaatttatcctcctttttcaaaagaaagttgcaactgtactgtttctgtttcatgacaacactgcaacttaatgagttaatgacagaataaatta

SEQ ID NO: 105045 - DNA, 101 bp, Zea Mays
gtcttattacttggacaacgccgctgaatgttacacagaactcaagcaaactacataagtcttattacttcgacaacaccgctgaatgtcacacacaactg

SEQ ID NO: 105046 - DNA, 117 bp, Zea Mays
gtgagttgtaactttgtatcccaccggggttggcctcaggcgagctgtaactgtgtatcccacccggggggttggcgttgggcgagtcgtgactgtctgtcccgcccgcggatgacc

SEQ ID NO: 105047 - DNA, 219 bp, Zea Mays
atggcctccgcgctcgcgagagcggaggaggattccgtggcgggagcggcacccgcgaggagcgacggctcggtcgacgacgcggcggcggttgcacagaaagatcaaggagcggataagccttcttccgccgtggccgagagttcaaagaggagaaaggagccagagcaacagcaacccgcagcgccacgggcaaagctgctctcgcagtgctcatag

SEQ ID NO: 105048 - DNA, 1657 bp, Zea Mays
gcctccgaatctctctgcctcattctctctccaccggcgacggcgagtccgaccgcactgctcctctccgtgcggagatctctcgcgtgctggcaggcgcgtcctggtgactgggacacgggagaagagaccttggtgggtggcagcggcaggccatggaggcgctgctggtgacggtgcttcttctcctcctctcctctaccctcgccgcagcacaatggtgcgtgtgcaggcaggacgcgtcgcaggccgcgctgcagaagaccatcgactacgcgtgcggctccggggcggactgcaactccatccatgagaccggggcgtgctacaaccccaacaccgtcccggcgcactgctcctgggccgccaacagctactaccagaacaacaaggccaagggcgccacctgcgacttcgccggcaccgccaccctcaccaccagcgacccgagtaagtggaaccaacgaacgatcatgcatgccgtgtagcattgttaagcttcaaggaatcgggttctgtacagggtaattaattttggctatcggtgtagcactgtagcctcgcctaataactaataataggaagaagaagaaaaaaaacaccaactttctgagcgaataactgtaaaataagatttgcaaagtgcaaagctgtttgcggtatatatgctttattattctcgaccctaaaagtaaaaccctatcatagtgtctactgggcagacattggcatcaaagtgcgtccaattttccccccgatttttccaaaagggaaagtaaactgtaacgcggtcttttgttttgttttatgactccaaactccaaagccagattccaatgtcttctatggtgtgtggtgtctgtgttctgctgcttccatgctcttcagtcttgtgacactgtccatttttaccacccattcagagtcctacctgtagtaccttatatgacctttgtgttccaaactttcaggctcttcgggctgctcttaccccaccaccagtgcaaggtacgtggcgagcttaaattaactgtgcaccatgatccatgtagttcatgtttcaaacctgcgcgctttgggaactggtacacccccaaggaagttgagcatcatgttgcgccaccagatctttgggccgggatgcagtttgttcggcggattttttgtacttaagaatcgcggaacattcagcatgtgtgtcgtgtatcagtattaccagccacaacactaacagcactgccttgtttacacagcgccgcgggaaccgtgaccccgaccaccggcggcacaatgggaggagcgggaggcccagggaccttgacgcccgccgggacaggcgcaggcacagccggcactaccggcatggggactgcaggcactacgggtaccgggttcggcggcctaggaccagcaggcatggacacagcggcggcggcggcggggggcttgctcctcctcccagaggctgggctgtgcgctgccctcgtcgcgctcctcctctccgccatcgtgctcgcgtgacgccttcacatgacctcggaaacaacaacctactgcctgcatgctagtagtagtagaaagcgctgcccttttgggaggtgtatgtagttcaggagtactctgattatctatggagaaagggtgggaattattgggg

SEQ ID NO: 105049 - DNA, 895 bp, Zea Mays
gcctccgaatctctctgcctcattctctctccaccggcgacggcgagtccgaccgcactgctcctctccgtgcggagatctctcgcgtgctggcaggcgcgtcctggtgactgggacacgggagaagagaccttggtgggtggcagcggcaggccatggaggcgctgctggtgacggtgcttcttctcctcctctcctctaccctcgccgcagcacaatggtgcgtgtgcaggcaggacgcgtcgcaggccgcgctgcagaagaccatcgactacgcgtgcggctccggggcggactgcaactccatccatgagaccggggcgtgctacaaccccaacaccgtcccggcgcactgctcctgggccgccaacagctactaccagaacaacaaggccaagggcgccacctgcgacttcgccggcaccgccaccctcaccaccagcgacccgagctcttcgggctgctcttaccccaccaccagtgcaagcgccgcgggaaccgtgaccccgaccaccggcggcacaatgggaggagcgggaggcccagggaccttgacgcccgccgggacaggcgcaggcacagccggcactaccggcatggggactgcaggcactacgggtaccgggttcggcggcctaggaccagcaggcatggacacagcggcggcggcggcggggggcttgctcctcctcccagaggctgggctgtgcgctgccctcgtcgcgctcctcctctccgccatcgtgctcgcgtgacgccttcacatgacctcggaaacaacaacctactgcctgcatgctagtagtagtagaaagcgctgcccttttgggaggtgtatgtagttcaggagtactctgattatctatggagaaagggtgggaattattggggaaaa

SEQ ID NO: 105050 - DNA, 902 bp, Zea Mays
gcctccgaatctctctgcctcattctctctccaccggcgacggcgagtccgaccgcactgctcctctccgtgcggagatctctcgcgtgctggcaggcgcgtcctggtgactgggacacgggagaagagaccttggtgggtggcagcggcaggccatggaggcgctgctggtgacggtgcttcttctcctcctctcctctaccctcgccgcagcacaatggtgcgtgtgcaggcaggacgcgtcgcaggccgcgctgcagaagaccatcgactacgcgtgcggctccggggcggactgcaactccatccatgagaccggggcgtgctacaaccccaacaccgtcccggcgcactgctcctgggccgccaacagctactaccagaacaacaaggccaagggcgccacctgcgacttcgccggcaccgccaccctcaccaccagcgacccgagctcttcgggctgctcttaccccaccaccagtgcaagcgccgcgggaaccgtgaccccgaccaccggcggcacaatgggaggagcgggaggcccagggaccttgacgcccgccgggacaggcgcaggcacagccggcactaccggcatggggactgcaggcactacgggtaccgggttcggcggcctaggaccagcaggcatggacacagcggcggcggcggcggggggcttgctcctcctcccagaggctgggctgtgcgctgccctcgtcgcgctcctcctctccgccatcgtgctcgcgtgacgccttcacatgacctcggaaacaacaacctactgcctgcatgctagtagtagtagaaagcgctgcccttttgggaggtgtatgtagttcaggagtactctgattatctatggagaaagggtgggaattattggggaaaaaaactaa

SEQ ID NO: 105051 - DNA, 1592 bp, Zea Mays
ctgctctctgtgtttctgcgcccgtttttttttttacctgctgtgcttcaaagctcgtttctggaacgtaaaaagggtttccatcaacctctcctgtagcgacccttgtaaataagctctgatgaccagatctctctctctctcggtgcagaatggtgcgtgtgcaggcaggacgcgtcgcaggccgcgctgcagaagaccatcgactacgcgtgcggctccggggcggactgcaactccatccatgagaccggggcgtgctacaaccccaacaccgtcccggcgcactgctcctgggccgccaacagctactaccagaacaacaaggccaagggcgccacctgcgacttcgccggcaccgccaccctcaccaccagcgacccgagtaagtggaaccaacgaacgatcatgcatgccgtgtagcattgttaagcttcaaggaatcgggttctgtacagggtaattaattttggctatcggtgtagcactgtagcctcgcctaataactaataataggaagaagaagaaaaaaaacaccaactttctgagcgaataactgtaaaataagatttgcaaagtgcaaagctgtttgcggtatatatgctttattattctcgaccctaaaagtaaaaccctatcatagtgtctactgggcagacattggcatcaaagtgcgtccaattttccccccgatttttccaaaagggaaagtaaactgtaacgcggtcttttgttttgttttatgactccaaactccaaagccagattccaatgtcttctatggtgtgtggtgtctgtgttctgctgcttccatgctcttcagtcttgtgacactgtccatttttaccacccattcagagtcctacctgtagtaccttatatgacctttgtgttccaaactttcaggctcttcgggctgctcttaccccaccaccagtgcaaggtacgtggcgagcttaaattaactgtgcaccatgatccatgtagttcatgtttcaaacctgcgcgctttgggaactggtacacccccaaggaagttgagcatcatgttgcgccaccagatctttgggccgggatgcagtttgttcggcggattttttgtacttaagaatcgcggaacattcagcatgtgtgtcgtgtatcagtattaccagccacaacactaacagcactgccttgtttacacagcgccgcgggaaccgtgaccccgaccaccggcggcacaatgggaggagcgggaggcccagggaccttgacgcccgccgggacaggcgcaggcacagccggcactaccggcatggggactgcaggcactacgggtaccgggttcggcggcctaggaccagcaggcatggacacagcggcggcggcggcggggggcttgctcctcctcccagaggctgggctgtgcgctgccctcgtcgcgctcctcctctccgccatcgtgctcgcgtgacgccttcacatgacctcggaaacaacaacctactgcctgcatgctagtagtagtagaaagcgctgcccttttgggaggtgtatgtagttcaggagtactctgattatctatggagaaagggtgggaattattgggg

SEQ ID NO: 105052 - DNA, 2609 bp, Zea Mays
caagccctccaactgagtcgtcggagcggacgtcgagtcgtcgatacgcctgaaccccagctttccactcgcctcgctcgcccctttcgcgtccaccgaccccgaccccgaccccgatccccgccggtgcttcgccaccccgatccccaccgcgcgatggcggagccggctccggctcccccggtgaccgcgccgctggtggggctgctgtacgacgagcggatgtgcgcgcacgcgacgcccaacggggaggaacacccggagaaccccgagcggctgcgctccatctggcgcaagctcaacgccgcgggcgtcgcgtccaggtgtgtggcccttaaggcaaaggaagctgaggacaagtatatagcttctgttcacagcaagaggcatataaagctgatgaaggaaattagctcaacaatatatgatgccagcaggaacaagattgctaggaaattcaattccatttacttgaataagggttcctcggaatctgctgttcttgcagctggttctgtcatagaggtagctgagaaagttgctgcaggtgagttaagttctgctattgctctagtcagacctccaggccaccatgcagaacatgatgaggctatgggattttgcctcttcaacaatgtggcagttgcagctaattatctcttaaacgagaggcctgatttaggtatcaagaagatattgattgtcgattgggatgttcaccatggaaatggcacacagaaaatgttttacgatgatcctcgtgtattgttcttctcagttcacagatttgattatggaagcttctatccttctgaaggggatgcttctcattgtttcatcggggaagaagctggtaaagggtataacatcaatgttccctgggagcatggcaagtgtggtgatgctgattatattgctgcatgggaccatgtactgcttcctgtcactaaagtttttgatcctgatataattctggtatcagcggggtttgatgcagcattgggtgatcctctcggtgggtgctgcattacaccaaatggatatgcactgctactaacaaagttgttaggatttgctcaaggaaggatagtgatggcccttgaaggaggttataaccttaggtccatagcgaactcagtttgtgcttgtgcaaaagttctcttgggagacaaattcacattcaacactccagagatgcaaccatttgaatctacatggagagtaatacaagcggtacgcaatgaattgaagacatgctggcctgttctgagtagcaagttgccagaaaatgtatcattgaggattaagcctgcaccaagcgagctctacgcttctgattctgaatctgatagtgaagatgttgatgagctccttggcactgttgcatctgtcagtgttattgaagctactggtgttgctataagtgaacacctctcaaagatgaaacttgatgatgacagccttgcagtgaagactaactcaagttgctcagcagcagaacagcatccagttgattcagtaaaagtacataacaatgcatctgttgtgctgaccaaaaaaatatctgatttatctcttgagtggcgatcagatttatcgaaaactgatgtctggtatgccagttttggatcaaacatgtggagaccaagatttctatgttatattcaaggagggaaggctgagggtatgaatataccatgctgcggatcacgtgacacaagctcaccaaaaggaaccgtgtggaagactgtacctcacaggttgcttttcggtagatcgtctaccccttgttggggaactggtggtgtggcttttctcaaccctgagataaactacaatgagaagtcgtatgtctgcatgtacaaaataacgttggagcagttcaatgacatcttgtttcaggagaatcgtttagtgctggaggatggcaaagacggaaacactgtgtatcctgactctcctttgattggttcatctgaaatcaagtttatatctacaaacagagctgttcatcttgaacctattaaggatagctggtactccaatgtactttatcttgggaatgaggatgaagttccaattctaactatgacgtgccccgcatcagatattgagaggtataaatctggtgagctgcgtttagcacctccatcagagacgtatgcggccactctgataaagggactagtggaaggcaagcaaatggatgcggacggagctgccagctacatcaacgctgctgctgcaagagccttgtgaaggcggcttcagcgtgtgcttttgtacagccagtaaggagtagcaaggatacactatctgttagcgtggcgacaccaggaaaccttcattgtccgcaaatggagaacttggatccaatttgaattgggaagcatgattcgagcttgccctagcttgattactggtgaacggtgatctcccctggctggttgattctgggagaaacactagctgtgtcggggtggagcaacactagttggcggttgcaacaggtgctctcactgcactggtatcgtgcttgtctgacataccgtagtatttgcatggcatgctggtgatggtatttgtgcaattactgcattatgttctgt

SEQ ID NO: 105053 - DNA, 1631 bp, Zea Mays
cacaggtgacacgtcatccgcgagggatagctggagaagactaaacccccaaccaccgccgccgtggccgccggcggcgatcgcctccggttttcctcgaggctgatcaacccctgcccgttcggctgtctgcctgtctcggtacgcccctactctcggccccattctcggaggaaagcgcgcccttctatagttccatttctcggctccttcattcctgtgccctcattcgattacttcatttcgtcgcgtcccaaatcggtcgatggaaaacggaatctctatggcctttgttaaatctggatccctatgcatgtctagggatgcacttggatttctgaccgtgtgctgctgaagcgtccagattggtacccggagatggatctgcttcttccgtacaagattggggatctcgcggagtccaagtcctttttgaatggttacaggggcgcgtggtttcgttgcaaggccattcttggtgggagtttcacgtcagtgcgatacatcaacaagtttggtgacatggtctacgaagagatagagttttacgggaggtacataatatgcgtgtcaatgattctggatacctggagtgttacttggaatatattgactatgatggggaggatctggattgggttgccgtcttccaagagaacccagcaagctcaagtcaaaattctaaaggaagtactgaagttatgataaggccttctttccctcaatggtattatgggcatgaacctgatcagctcccagttagtgatgtcacagcagttgttgatgaggcctggaaaataggcgatatggttgattggctcaaggacggttgctattggtctgggacaattactaagttactcaaaaaagatatggttaagctacaacttccggcacctcccataggtgaaggcagatgttatattgctaaccataaggatctgagacctacacttgagtggtccttagaaaaaggttggacagtacctcttgcgcaggcaaaccaaaaaagttggtataccgctcgtcttcttcgacaatataaatctgattcagacaagagcacctcaggtgatgaaaatggcgatgatgagaaggggggaatgcagcaataggtgtccagaacttgaaacatgcctcaggaagccccccaggtcccgtggttcctacgaaaacgctcagaaggacgccactgtcactccagtccaaggagagtgtggagatcagctcaacttccaagccaccagacccttgagagcagaactcgttcctgactgatggtgtgaggctgatgatgtcacggacgagtttctggatatgctgaacacggtcgagaccaggctacaaacacctcctggagtgtacgcgggaacttagcgacgacctgctggcttttccatccgctaggcggatgaagtggttctgattacccaaggcgattggaaatacctgttgttgctgtactgctgtttgtagtcgcaggaaacactagtcttgcgcatagagatgaaactggtaagtgcaaaagaggatcatcggttaaaggcagcgtctccgaactggtaagtgcaattcccgtcagccttaaccaaggaattgaagtggggaaacacgagtgtcttcttcttgga

SEQ ID NO: 105054 - DNA, 1462 bp, Zea Mays
cacaggtgacacgtcatccgcgagggatagctggagaagactaaacccccaaccaccgccgccgtggccgccggcggcgatcgcctccggttttcctcgaggctgatcaacccctgcccgttcggctgtctgcctgtctcggtacgcccctactctcggccccattctcggaggaaagcgcgcccttctatagttccatttctcggctccttcattcctgtgccctcattcgattacttcatttcgtcgcgtcccaaatcggtcgatggaaaacggaatctctatggcctttgttaaatctggatccctatgcatgtctagggatgcacttggatttctgaccgtgtgctgctgaagcgtccagattggtacccggagatggatctgcttcttccgtacaagattggggatctcgcggagtccaagtcctttttgaatggttacaggggcgcgtggtttcgttgcaaggccattcttggtgggagtttcacgtcagtgcgatacatcaacaagtttggtgacatggtctacgaagagatagagttttacgggaggtacataatatgcgtgtcaatgattctggatacctggagtgttacttggaatatattgactatgatggggaggatctggattgggttgccgtcttccaagagaacccagcaagctcaagtcaaaattctaaaggaagtactgaagttatgataaggccttctttccctcaatggtattatgggcatgaacctgatcagctcccagttagtgatgtcacagcagttgttgatgaggcctggaaaataggcgatatggttgattggctcaaggacggttgctattggtctgggacaattactaagttactcaaaaaagatatggttaagattcagacaagagcacctcaggtgatgaaaatggcgatgatgagaaggggggaatgcagcaataggtgtccagaacttgaaacatgcctcaggaagccccccaggtcccgtggttcctacgaaaacgctcagaaggacgccactgtcactccagtccaaggagagtgtggagatcagctcaacttccaagccaccagacccttgagagcagaactcgttcctgactgatggtgtgaggctgatgatgtcacggacgagtttctggatatgctgaacacggtcgagaccaggctacaaacacctcctggagtgtacgcgggaacttagcgacgacctgctggcttttccatccgctaggcggatgaagtggttctgattacccaaggcgattggaaatacctgttgttgctgtactgctgtttgtagtcgcaggaaacactagtcttgcgcatagagatgaaactggtaagtgcaaaagaggatcatcggttaaaggcagcgtctccgaactggtaagtgcaattcccgtcagccttaaccaaggaattgaagtggggaaacacgagtgtcttcttcttgga

SEQ ID NO: 105055 - DNA, 1365 bp, Zea Mays
cacaggtgacacgtcatccgcgagggatagctggagaagactaaacccccaaccaccgccgccgtggccgccggcggcgatcgcctccggttttcctcgaggctgatcaacccctgcccgttcggctgtctgcctgtctcgggatgcacttggatttctgaccgtgtgctgctgaagcgtccagattggtacccggagatggatctgcttcttccgtacaagattggggatctcgcggagtccaagtcctttttgaatggttacaggggcgcgtggtttcgttgcaaggtacataatatgcgtgtcaatgattctggatacctggagtgttacttggaatatattgactatgatggggaggatctggattgggttgccgtcttccaagagaacccagcaagctcaagtcaaaattctaaaggaagtactgaagttatgataaggccttctttccctcaatggtattatgggcatgaacctgatcagctcccagttagtgatgtcacagcagttgttgatgaggcctggaaaataggcgatatggttgattggctcaaggacggttgctattggtctgggacaattactaagttactcaaaaaagatatggttaagctacaacttccggcacctcccataggtgaaggcagatgttatattgctaaccataaggatctgagacctacacttgagtggtccttagaaaaaggttggacagtacctcttgcgcaggcaaaccaaaaaagttggtataccgctcgtcttcttcgacaatataaatctgattcagacaagagcacctcaggtgatgaaaatggcgatgatgagaaggggggaatgcagcaataggtgtccagaacttgaaacatgcctcaggaagccccccaggtcccgtggttcctacgaaaacgctcagaaggacgccactgtcactccagtccaaggagagtgtggagatcagctcaacttccaagccaccagacccttgagagcagaactcgttcctgactgatggtgtgaggctgatgatgtcacggacgagtttctggatatgctgaacacggtcgagaccaggctacaaacacctcctggagtgtacgcgggaacttagcgacgacctgctggcttttccatccgctaggcggatgaagtggttctgattacccaaggcgattggaaatacctgttgttgctgtactgctgtttgtagtcgcaggaaacactagtcttgcgcatagagatgaaactggtaagtgcaaaagaggatcatcggttaaaggcagcgtctccgaactggtaagtgcaattcccgtcagccttaaccaaggaattgaagtggggaaacacgagtgtcttcttcttgga

SEQ ID NO: 105056 - DNA, 990 bp, Zea Mays
gaaagacggccagtttcccgcggtttgcccgcgaaggtgccccaacttcccgccagacaccgctcccgctcttccacgctgagtagggagagccgaggcccaacctagacggatagacgcggagatgtcttcctgggacgctgacgactcggcggcggcgtccgcggccgaggcggccaccacggacgtcgagctgctcaagcgggcgtggcgcaacgagaaggccgcgccggagatcctccgcttcgactcgcccctcgtctctcgcgtccgcgagcagacccagctcctcgaggagacgctggacgacttcgccgacagtggcgtcgacgacctggtggtctcgctctaccagatggacctcgaccgcacgctcttcctcctccgctcctacctccgcctccgcctgcagaagatcgagaagtacacgatgcacatctcccgctccgaagacctcctcagccggctgtcccagcaggagcgccggtttgccaagagttgcgcggagatcatggagaagcatctggagcagtcggtgctgtcgaagctcccgtacgggtatgactcggtttccaggcagtcgctgtcgagcactgaggatgacatggtgccggagcctcagcttgacaccttcgtcttctgtaagaccaagggcgacgtaggtgcattccagctagatgacattggagaggaggttgtggacctggttgctgatgacttgtatgttcttcggtacaagtccgtcaagggactcatagagggtggccggatcgaccttatctgacaacaatcaccacaagtcagaacctggaactctgcaagagagcgagcatgaattcatggaaaggaattgcaaagataacctcaattgaaagatgctgtcttatgtgccatggcgtgtggcctagaattcctatgcatttttgtacatggttgtgatggtacctccatttattaatgagatcagggttatgtgatccccagtcaata

SEQ ID NO: 105057 - DNA, 1438 bp, Zea Mays
gaaagacggccagtttcccgcggtttgcccgcgaaggtgccccaacttcccgccagacaccgctcccgctcttccacgctgagtagggagagccgaggcccaacctagacggatagacgcggagatgtcttcctgggacgctgacgactcggcggcggcgtccgcggccgaggcggccaccacggacgtcgagctgctcaagcgggcgtggcgcaacgagaaggccgcgccggagatcctccgcttcgactcgcccctcgtctctcgcgtccgcgagcagacccagctcctcgaggagacgctggacgacttcgccgacagtggcgtcgacgacctggtggtctcgctctaccagatggacctcgaccgcacgctcttcctcctccgctcctacctccgcctccgcctgcagaagatcgagaagtacacgatgcacatctcccgctccgaagacctcctcagccggctgtcccagcaggagcgccggtttgccaagagttgcgcggagatcatggagaagcatctggagcagtcggtgctgtcgaagctcccgtacgggtatgactcggtttccaggcagtcgctgtcgagcactgaggatgacatgggtacctgatctttaccaattaccgcgttccttgttttgatgctatacagctatgctattcttgttgtttgctgattcagccgcgagctgtcgtttcgtgattacatacattgcatgggcttctaaatctgattacgcgagctgtcattcctgattggactgttccacaccaaatcagcatgaaatctgcataaaggtcatgcttttatgggcggcctatttatgcaacatcatttacatgcttcttattactgaaaacagtagtataatttaatataataatgatatgcagcaagcgtgctttcagagatgttcatgtaatcggctactagcagccatctgattctgttttcaaataccatgttcagtgccggagcctcagcttgacaccttcgtcttctgtaagaccaagggcgacgtaggtgcattccagctagatgacattggagaggaggttgtggacctggttgctgatgacttgtatgttcttcggtacaagtccgtcaagggactcatagagggtggccggatcgaccttatctgacaacaatcaccacaagtcagaacctggaactctgcaagagagcgagcatgaattcatggaaaggaattgcaaagataacctcaattgaaagatgctgtcttatgtgccatggcgtgtggcctagaattcctatgcatttttgtacatggttgtgatggtacctccatttattaatgagatcagggttatgtgatccccagtcaatagtcgatggctcatataacttaaggcatttgatttgttgcaaaagtatcttcagagtaacctcacaaaaaataaaaggaaaa

SEQ ID NO: 105058 - DNA, 464 bp, Zea Mays
tcgtgcctaccttggctaaagtttctcgcttggttggctcgtgttgacggctgagaggatgcagcacgaccagaagaagaaggcaccttcagaaatggattttttcacagagtacggcgaggggagcaggtacaagatagaagaggtcatagggaaaggcagttacggtgtggtttgctctgccttggacactcatactggtgaaaaggtcgccataaagaagataaatgacatctttgagcatgtgtctgatgcgacaaggatacttcgggaaatcaagttgcttagactcctgcggcatccggatatcgtggaaataaagcatattctacttcctccatcaaggagggaattcaggatatttacgttgtgtttgacttatggagtctgatttgcaccaagttataaaggctaatgatgacttgaccccagagcattatcagttcttcttgtatcagttgctt

SEQ ID NO: 105059 - DNA, 1817 bp, Zea Mays
tatcagttcttcttgtatcagttgcttcgaggtttgaaatacatacacacagcaaatgtattccatcgagatctcaaaccaaaaaatattctggcaaatgctgattgtaagctcaaaatatgtgattttggcctagcaagagtagctttcagtgatactccaaccgcgatcttttggacagattatgttgcaactaggtggtaccgagcaccggagctgtgtggatcatttttctcaaagtatacaccagcgatagatatatggagtattggttgtatatttgcggaactattaactggaaaaccgcttttcccggggaaaaatgtggtacatcaacttgatataattacagatctcatgggaacaccttctccagaagcaatatcgaggattcgtaatgagaaggccaggcgctacttgagtaatatgaggcggaaaaagcccataccttttacacagaagttcccaaatgcagatccacttgcattaggtttgttagagcgaatgctagcttttgagccaaaagacaggccaagtgctgaagaggctcttgctcatccttattttaagaatatagccaatgtggatagagagccttctgcacaagctgtcacaaagctcgaatttgagttcgagagacggagagtcactaaagatgacataagggaacttatatatagagaaattcttgagtatcatccaaagatgttgaaagaatttattgagggaactgagtcaagtggtttcatgtacccaagtgcagtagataattttaaaaagcagtttgcataccttgaggaacattatgccaagggatctacgggaactccacctgagaggcaacataactcattgccacggccttctgttgtctattcagacaaccaatcacaaagcacggccaatataacagaggatctttccaagtgtataatcagagaaaatgcacagaagtcacagcaatataatgcttcagttgcaaataaatttccatcccatgttcctcaaggtgctgctgcaaggcctggtaaagcagttggttcggtgctgcagtacaacctctctcaagcatctgctgctgagcaatatgagcagcgaagggttgctaggcacccagcagttgccccaaacaacatcccttctggaagctcataccccagaagaaatcagacctgcaagagcgagacaggcgacactgagaggatggacgtgaaccaagctgggcagccgaagtcctatgcagcaaacaaactacctgcaactgttgatggtcgcggcggccattggtagatctccgcgttgtgtaacacgttatcagcatctgttacttgtgctaagcgctacattattctgacaaattcagaaatgtagttctgtacagatccgtattctttccccggattcctaagtactgtagaacggtgctcgaaatcgctgggtttccacctcctgtcgctattcattcactgaaagatctgctggctggtggagatttgtcagactgaagtatactggaagctcactggcagcagcgggaactcaagcaagcagagttcttgactgacgttgtcatttgttcttcagcctggtaggtctaacgagctgaatactgttagttcctgtgaatcatctacacgtcaggtgcagaattctgttgagctagctaggaggtgcaagcatgttgtacgctgaatatcaaagtcattgatcctttactcatgttatcttggttaaacgtgagatatatgctagcgtgtagtatccctgtttcccaacaatatacttactcaccacattgttcacgtatagctgatact

SEQ ID NO: 105060 - DNA, 2335 bp, Zea Mays
aacacccccttagatgcaacgctgatactgataccactaccacaggccgcagcgagggacgtcgccggcggcccccaccctgccggtcaattcgaactaatactccaatgcgttgctactttgctagtcaaaggacacgccccgccccccgcgacgcacacggcaccaggcacgccctccgtcaccgctcaggtgctcaccactgacgagccgccgcggcgtcatggccacagcagcgcccggtcccggctcccggtcgcggctcctcccccttgccctctcctccttcctcctcctcctcctcctcctcctcatcgcgccgggggccgccgcgcagccgtggcaatcctgcgggaacacggacaactactcagccaatagcacttaccagtccaacctcgcgagcctcgccaaggcgctccccgcgaacgcatcccggtcggcgacgctattcgcggagggcagcgccggcgccctccccgacgccgtctacgcgctcgcgctctgccgcggggacatcaacgccacggcctgcggcgcctgcgtcaccacggcgttccaggacgcgcagcagctgtgcgcctacaacaaggacgccgccgtgttctacgacgcctgctacctccgcttctccaacaaggacttcatcgccagcgccaccaacaacggcgatgccatagtcctcatgaactcgcagaacgtgagcccgcccgtgcgggccttcgacgccgccgtcgccgtgctcctcaacgccaccgccgactacgccgcggccaactcgtcacggcggttcgccacgggggaggagggcttcgacgcgaccgatcccaccatctacgggctcacgcagtgcacgccgaacatgtcgcccgccgagtgccggacctgcctccggagcataatttccgatatgccgcagtacctcagcggcaggcggggcgggaggattatcggcatgcgctgtaatttcaggtatgatctctattctttcttctccggggggccgtcgctgcggctgccagcgccgtccgcgccggcgccggcaccgtctcctgcgcaggttaacgtgacgccgacggtaaccccaacagggagaagcagaaacagaacgggaattgttatagcaattgtattgcctatagttgctggcgtgctagctataactatggtttgtctctgtttcctgtggaggagaaggccagcaagagatcagacatcatcttattcagttaatcaatcagagattgaaagtattgattcacttcttctcgatatatcaatgctacgtgctgcaactgataactttgctgagagcaataggcttggtgaaggaggttttggtacagtctataagggtgtccttcctgacaaccaagaaattgcagtgaagaggctctcacagagctcagggcaaggaatacaagagctgaaaaatgagcttgttttggttgccaagcttcagcacaagaatcttgtcaggcttgttggtgtttgcttgcaagaatatgagaaactgcttgtgtatgaatacatgcccaacaaaagcatcgacaccattctttttgattctgagaaaagcaaggagctagattggggaaagagagttaagataatagatggaattgctcgagggttacagtatctccatgaagattctcagttgaagattattcaccgggaccttaaggcgagcaatgtccttttaaactctgattatactcctaagatatctgattttggcctagcaaggctatttggtggggatcaatcacgggaggtcacaaatcgagtcgtcggaacatatggatatatgtctccagagtatgccatgcgtggccactattctataaagtcagatgtcttcagcttcggcgtcttgatcctggaaatattaaccggaagaagcagcagtggttcctttaatatcgagcaatctgttgatctcttaagtcttgtctgggagcactggacaatgggaacaattgtggagatcatggatccatctctgagaggcaaagctcctgcagaacagatgctgaaaaatgtccatatcgggctactgtgtgttcaagataaccctgttgatagaccgaagatgtcaacagtaaacatcatgctcagcagtggcactatgcctctccagtctccattaaagccagcattcttcattcccaagagcggctactactcaactgttcattcagaatcatatcctatagcttcccgatccgtcgataatggcaagccaggggcgatatcaccaaacgaagtgtcaattacagagctggaaccaagatgaggccatagtagttggacatggttgtttgttgtagca

SEQ ID NO: 105061 - DNA, 84 bp, Zea Mays
agaataccaccgcgcctcgcaccaggccgcggaccgtccggccccgcgcgtggaccgtccgcccctgtgcagagggcatcgcca

SEQ ID NO: 105062 - DNA, 827 bp, Zea Mays
acgagcacgatgacaggtgggtcccgctgcctcgcgggcacggtgcaccgttggattcgttccatggtctacatgccagtgagaaagtgcacggggactctagagtaaaccccggtgccaccgacggcggcggcgacgaatcgagcaggcgcggcggccatggcggcggcggttgagagcgtggtggtggtccataacgtggcgaagcggcacaacgtggggacgctggcgcggagcgcgacggcgttcggcgtcgcggaggtggtcgtcgtcggccgccgcgatgtcagcgcctttggcagccatggcgccacctcgcaccttcgcttccgtcacttcgtctctctcgcgctcgcccgcgcctacctcaaggatgagagaggatgtgacatttgcggcgtggaaatcaccgacgacgcgcagccggtgaccgcccacccgttccgtcggagcactgcgttcctcttcggcaatgagggtactggactttcacaaaaagagtgcgagatctgtgacttctttgtctacatccctcagtatggtggtggaactgcatctctcaacgttactgttgcagcttcaattgttctccaccactttgggggtaaaaatccactctactccagtcaccacagcactcttttttctgtaatatattgaagtgttaaatgttggaatgtgcaaagtagcaaaagtcaaatcatgttcttgcttttgaacctaactgttttatggagctttagggtgccaaatttccatgttcttactctaaatagtcatgttctccctgccagacatggttaaggaattatttgcatacatactaa

SEQ ID NO: 105063 - DNA, 981 bp, Zea Mays
tacatgccagtgagaaagtgcacggggactctagagtaaaccccggtgccaccgacggcggcggcgacgaatcgagcaggcgcggcggccatggcggcggcggttgagagcgtggtggtggtccataacgtggcgaagcggcacaacgtggggacgctggcgcggagcgcgacggcgttcggcgtcgcggaggtggtcgtcgtcggccgccgcgatgtcagcgcctttggcagccatggcgccacctcgcaccttcgcttccgtcacttcgtctctctcgcgctcgcccgcgcctacctcaaggatgagagaggatgtgacatttgcggcgtggaaatcaccgacgacgcgcagccggtgaccgcccacccgttccgtcggagcactgcgttcctcttcggcaatgagggtactggactttcacaaaaagagtgcgagatctgtgacttctttgtctacatccctcagtatggtggtggaactgcatctctcaacgttactgttgcagcttcaattgttctccaccactttggggtctgggctggctttactgaacgaggccgagagggcaacaaattcgtggtcgctgaaagaccacaggggcactcgaggggactttactgtacagactcggttgaagcagtggttgaagagcggaaaatgcgaaaagaaaatgcctgcgatgtactcgaggaaaatgggtgcagccaccttcaggaatcaaacggtctagacttgatgtttgcagactagagtatgacaacatgttatcccatctctgatgttaaatctactccctgcatcctcattgatggcacaaagttgcaatacagaacatgacagggcttatgagagagagagagagagagaaatttatcctgacacacatgtatggttcacatttggttgtcttcttaaaacaagacgcgacaagatattttttttacataatctacaactcacagttatttcaaccaaata

SEQ ID NO: 105064 - DNA, 1789 bp, Zea Mays
gatctcggcatctctgaaatttccaaacgctgtcacttcagcctgttcgtttttttctagtcaaaaacacttgccgccggcaaattccgaccatgcgacaaattaagcataatttcagaaatagaggcctaccaaccaagcatctcggtttggttatttatccaaactccaaaactacgagaccctctcgcatctcggtatctctgaattttacacgcactagtggcaaatttccaaacgcagtcgcttgagcctgttacatttttcggccaagtccaaagacttcgtggccagccagagacttcgatcgatctacggcgattgcacctcacgtcggaagcagcaccggagctcgcgcgtccaggcgccggccaccatgacgttgacgacggtcgcattcaccgtgcgccggggggagccggcgctcgtcggccccgccgcgccgacgccgcgcgagacgaagcgcctgtccgacatcgacgaccaggagacgctgcgcgggcagatgccgttcctcttcttgtaccgcggcggggtgcacgtgcgtgccgacgacgacgacccggcgtgtgtgatccgccgcgcgctcggcgaggcgctggtgccgttctacccgctcgcggggcggctgcgggaggtggagggccggaagctggtcgtcgactgcaccggcgagggggtgctgtttgtggaggccgacgctgacgtgcggttggacgaactggaggcgaccgggctgaggccgccgttcccgtgcatggaccagctgctgttcgacgtggacggctccagcggcgtgctccactgccccctgctgctcatccaggtgacccggctgctctgcggcggcttcgtcctcgcgctccgcctcaaccacaccatctgcgacgccatcggcctcgcccagttcatgtccgccgtggccgagctcgcccgcggcctccccgcgccgaccgtggcgcccgcatggtcccgcgagctcctcgaagcgcgcaacccaccgaagccggcgttccctcaccgcgagttcgacgtggcgccacctccgccacccccaccgccgggcgacatggtgacgcggaccttcaccttcagcccagccgacgtcgccgcgatcaagcgcgccctcccgctggctctccgcgaggcggccacgaccttcgaggcgctgacggcggccctctggcgcgcgcgcacggcggcgctggcgccccctcacgacgcggaggcgcggctggtgtccattgtcagctttcgtggccttcccgagctggcgctccccgcgggttactacggcaacgcgtgcgtgcccgtggccgcgctcaccaccgcgggggcactgctggcggggtcgctgggcgacgcggtggcgctggtgcgggggaccaaggcggcggtcaccgccgagtacgtgcggtccacgctggacctgctggtgctgcgggggcggccgtgcgtggcgctcgcgaacctgttcctcgtgtccgacaaccggcgcgcggagttccaccggctggacttggggtggggcgtgccggcgtacgggggtcctgccgtggcgctcttcgggttgagcttcttcgtccaggcagggaacggtgacgacgtcgccgtgttgatggcgctgccgcggccggctatggaccacttcgcgtcggaagtggagacgttgttgaaggcttagttgggtgttcttgaatcttgacgagcgagcgagagagcggcagagcgccgcctgttcttgctaatgctaactgtcttcgctcaaatttgtcgtctattcgtcgcc

SEQ ID NO: 105065 - DNA, 1884 bp, Zea Mays
gcaggtgtacgtacgtaaagcgagagtcgacgcgtgggcgcggcagacgcgagcctcccgccacgttggcctcgttcccgcgccacgcggccacgcctgcctgcctcctcaccttgtttatatgcctcgcgcctccctcaccgtgccaatgccatgcgcgcgctactgcatctgcggctcatcaatccgtgcagtcccagagcaccccgtcttcccgctactcccgcaagggcgctcgtcgcttccttctccggggcgtggcaggcaccttctggtagagcgagagcgagagcagcgccgccggcagttcgcgctatggcgtcccagcaggtgttccgggctcagcagcagcagcagcagcagttcccggctcagcagcaggagtcccagccggggaaggagcacgcgatggacccccggcccgaggccatcgtccaggactacaaggccgccaacaagctcaaggacaaggtggcgctcgtgaccggcggcgactccggcatcgggcgcgccgtgtgcctgtgcttcgcgaaggagggcgcgacggtggccttcaccttcgtgagggggcaggaggagaaggacgcggaggagacgctgcgtgcgctgcgcgacatcgggtccgagacgggcgcgcgcgagccgatggccctgcccgccgacctcgggtacgaggccaactgccgggaggtggtggagcgggtggcgtcggcgtacggcgggcgcatcgacgtggtggtgaacaacgcggcggagcagtacgagcgggagagcatcggggacgtgacggaggcggacctggagcgcgtgttccgcaccaacatcttctcctacttcctggtgtccaagcacgcggtgccgcgcatggagcccggcgcctgcatcatcaacacctcctccgtcaacgcgtacaagggcaacaagacgctgctggactacacggccaccaagggcgccatcgtggccttcacgcgcgcgctctcgctgcagctggccgacaggggcatccgcgtcaacggcgtcgcgccgggccccgtctggacgccgctcatcccggcgtccttcggcaaggagaaggtggagcagttcgggtcccaggtgcccatgaagcgcgccgcgcagccggccgagatcgcgcccagcttcgtcttcctcgccagcaaccaggattcgtcctacatgtccggccagatcctccacgtcaacggaggcgtcatcgtcaatagctagatacggaagctgttttgctgtcgtgtccaagtctaagggaacaaagcgagtgtccgtgtgtaccaggtagcagtgtcagtacgtgcacgcaggaaggcaaggcagggttcagttgtagcggtgtgtaatgctgtcagcacagcacttgtaaagaaggaaggtgtctgaataaatatgcgtccaagcatgaagacttcctccgtacgtggtttgcacaaaataatcgtacgtcccggtgcagtggtacttgctagtgcaccattctccccctcttttggacgagctttatcccggccgggacacgttcagtagaacactaaattcgaaaccaaggttcaaagttggtttagcaacacattaaattcgcatatgcatttgagccagatgaatcacgtcgatcatggttacaaccggacgtatagcagtgtgcaacttcaacattcaccacgctaatgagtcagcctttacctttatatattctaaaagcaaaatcacatgtcaacgcttatagcgctgatgttctctcgacactgtttagaaaacaaaaacaaaatatgcaaacaaaaaagacgaagctatcatcttcagccacggcgaagccatctgcttgcttgcgagtcaaaactggagacatcatcttaaagctccctcaac

SEQ ID NO: 105066 - DNA, 1394 bp, Zea Mays
cctgcctcctcaccttgtttatatgcctcgcgcctccctcaccgtgccaatgccatgcgcgcgctactgcatctgcggctcatcaatccgtgcagtcccagagcaccccgtcttcccgctactcccgcaagggcgctcgtcgcttccttctccggggcgtggcaggcaccttctggtagagcgagagcgagagcagcgccgccggcagttcgcgctatggcgtcccagcaggtgttccgggctcagcagcagcagcagcagcagttcccggctcagcagcaggagtcccagccggggaaggagcacgcgatggacccccggcccgaggccatcgtccaggactacaaggccgccaacaagctcaaggacaaggtggcgctcgtgaccggcggcgactccggcatcgggcgcgccgtgtgcctgtgcttcgcgaaggagggcgcgacggtggccttcaccttcgtgagggggcaggaggagaaggacgcggaggagacgctgcgtgcgctgcgcgacatcgggtccgagacgggcgcgcgcgagccgatggccctgcccgccgacctcgggtacgaggccaactgccgggaggtggtggagcgggtggcgtcggcgtacggcgggcgcatcgacgtggtggtgaacaacgcggcggagcagtacgagcgggagagcatcggggacgtgacggaggcggacctggagcgcgtgttccgcaccaacatcttctcctacttcctggtgtccaagcacgcggtgccgcgcatggagcccggcgcctgcatcatcaacacctcctccgtcaacgcgtacaagggcaacaagacgctgctggactacacggccaccaagggcgccatcgtggccttcacgcgcgcgctctcgctgcagctggccgacaggggcatccgcgtcaacggcgtcgcgccgggccccgtctggacgccgctcatcccggcgtccttcggcaaggagaaggtggagcagttcgggtcccaggtgcccatgaagcgcgccgcgcagccggccgagatcgcgcccagcttcgtcttcctcgccagcaaccaggattcgtcctacatgtccggccagatcctccacgtcaacggtgcgtagtgcggcacttactagttactacgtacctgatgagtgatgactgatactatgcctgaactgttttttttttttaatctgcaggaggcgtcatcgtcaatagctagatacggaagctgttttgctgtcgtgtccaagtctaagggaacaaagcgagtgtccgtgtgtaccaggtagcagtgtcagtacgtgcacgcaggaaggcaaggcagggttcagttgtagcggtgtgtaatgctgtcagcacagcacttgtaaagaaggaaggtgtctgaataaat

SEQ ID NO: 105067 - DNA, 7345 bp, Zea Mays
aagatatttgtgcaaatgaataatttttctggggtacctctaactgcaagatcgctacatcaaaaacaggttagtatgtgtaactactaggacatttccatataatgccactattcaactgctacatgaagcacagttgaaattcctctccaaaactcggcctcacagtttcttaagtcaccttgtgacatttgaggtaacttaaacaaagaagagtacaaaaggtattcatgatgattagtggtatattacaattatctatatctagattgaaatcaaagtctctttcatatttccttattttgaaagaaattccagactaaactgctgccgagttatagacaggcctattccttacaaactcaaaaagtctatataacccccaaatgtttcgatggttgactacataaccccctcaactatgaaaccaggtattgtaaacttaaagtatcccataccattcaaacaaccccaccatggtggttttgaaggcggttatgctgatgtggcatattaaaaggatggtggcataactttgagtcaacaaataatatctttctcatctccatctcttacgttaagaccccatatatcatttatgccttatcaactttgctcaactgctgtttcctgcacaacccagatctccgatggccactgtgcctgttgcccttccgctggccacagtggatgacaaaatctacaagctcatgccctgcatccacaactacaagaaccacgaggaagatactccggctccaggttcatcgttgtctccatggatgctgccacctgcattgtcggacatgtggacattcaggacctcgtcgttcatgccacacttgaggaatcaagggtccttgagctcgggaatcgctcctgctggttcttggctggctcaagatgctgcaatgttcaatgtgaagaaggtctggctagtatcctatctgccaccagggctcaagattctgccatacccacacttcgtcctcgacaacctcctcccaggacataatagccttaaggctttggacattgctggcgtcttccatgtggcgtgtagaccactcatccgttgtggagagaccgaagcaggagagatcacgggaggtgggaagggtgaagaggaagagtagaaataaaaaaaaaagaatataaaccttacaggggggctgtgtactagtgtggcatgctgtcatgtggggccgcacctatacgcgggaccgcgacgccaggagagctgaggctcgggcgttcaaattggacgccaacagcagctcacctaaggaaggttcgtccaaggaaagtggcagcagctcaaccaaggaaggtccgtccaaggaaagtggctagattagtggccaaattgataggccttaatcgtaggggagttggtttccaaacaagtcatttcctaaattagaagttatctagttggtcaggccagtggcctatttatatggaaccgtgaggcaatgaagggaataagaaatatatcaccttaatctcccatctccctgtactctctaagcctacggcggaggaatacctcgccggagaagacggacggcggatacgagctacgtagccacggtccagctactcgagggcttaacgcccttgacaacctggtatcacgatcccggcgatcctcttcccactccaccactacaccagccgccaccacctcaccaccacccccagccgccgcaccaacttcaccgacgtcctctgtggtgtcctgcgttccagccatgggcgattccaacgacttcaaggcctttgccgaggctctcaagtcactgcaagcgtcagtcacggccaacgcccaggccatcgccagcctcacagccgaccgcacgtccgcctcaggccacaagatcggctacggcgagcaccatggggaccggccaccgaggttccaaaagctggactttccccggtacgatggtaaaaccgaccctctcatcttcatcaaccgctgcgaatcctacttccatcagcagcgcatcatggaggaggagaaggtctggatggcatcctacaacttggagcacggggcgcagatgtggtatatccaggtccagacggacgagggtactccatcgtggcgccggttcaaggagttgctcaatctgcgctatggccctcctctccgcgccgcgcctctcttcgagctggccgattgccgccgcacggggtccgtcgcggactatcaggaccgcttctaggcgatccttccacgtgcaggacccctcgacgaggcacaacgggtccaactattcacggggtgtctctgtcccccgctcagccttgacgtccaggtacacaacccgcagtccctagcggctgccatgagcctggcgtgccacctggagcttcgggagcaatatacaccgacgcctcccaagggtgcgccccgtggcctgctgccgacccctgcaccgcgactagctctgcctgccccgccggctgagcagacagccacgcccacagtcatggcagatgggcacaaacgcctatccatgcaggagcaagaggagcgccgtcggcagggcctctgcttcaactgcaacgagcgctacacacgggggcacaaccacgtctgtacgcggatcttctacatcaacggcgtcgagttggacaccgctgacgagtccgccacgggggatgacccacgacacgaagacaccggtgttctcccttcacgccgtcgccggggtattcgtcggcaatacggtacaactgcaggtggtcgtcggcgccgctactttcgtcgcgctcatcgacacgggctcaacacacagcttcatcggggaagcggctgcgcgacgctcggggctaaccatcgagtcgcggcctcgactcacggcaacggtggccaatggggaacgcgtggcctgcccgggcgttcttcgccaagctccggtcgacgtgggcggcatggtattcggcgtcgatctcttcgtaatgccttagccgggtacgacgtcgtcctcggcacgcactggatggccacgctcgggcccattgtatgggacttcaccgcccgaaccatggcattccagtgggaggggtgcgatgtctgctggcgcggcgtggcacctccatctgcgtcgactcttctcgccgccacagccgacgacaccctcatcgacgggctgttacacgccttcgccgatgtattcaccgagccgatcggactacctccagcacggggccgcgagcaccacatagtcctcaagctgggctcctccccggtggcggtgcgaccgtacaggtaccctgcggcgcacaaggacgaacttgagcggcagtgcgccgccatgatcgaccagggcatcgtccgccgcagcgactcagcgttctcgtccccggtcatcctcgtcaagaagccagacgggtcgtggcgcttctgcgtcgactaccgcgcgttgaacgcgctcactgtcaaggacgcgttctcgatcccggtcgtcgacgagctccatggcgcacgcctcttcaccaagctggacctgtggtcggggtatcaccaagtacggatgcggcaggaggacgtccataaaacggcgttccgcacccacgacggcctctacgagttcctggtgatgccgttcgggctgtgcaacgccccagccacattccaggccttgatgaacgacgtcctgcgaacctacctccgccggtttgtgcttgtcttctttgacaacatcttatatacaacacctcatgggtggaccacctccggcacctccacgtcatcctcaacaccctgccagcaccgactctttgtcaagaggtccaagtgctcatttggtgttgactccatcgcctacctcggccacgtcatttcagcggttggcgtcgctatggaccccgcaaaggtccaagccatccacgactggccccaacctcgttcggcgtgagccgtgcgtggcttcctcggtttggcaggctactaccgcaagttcgtccacaactatggcgccattgtagcacccctcacggcactcctgaagaaagaggggttcgtgtggtccgacgaggcaaccgccgctttcagtgccctcaaaggggcagtgacgacagcaccggtgttgacattcccggacttcaccaagcccttcgtcgtggagtgcgacgcgtccacctatggcttcggggcggtgctcatacaggaggctcatctgatctccttcttcagccgaccggtggcgccccgccatcgctccctagcggcctatgagcgcaaactcatcgggcttgtgcttgtcgtacgacattggaggctgtacctgtgggggcgacgcttcgtcgtcaagacagaccactacagcctcaagtacctcctcgatcagcgcctggcgaccattctgcagcatcattgggtgggcaagatcctcgggttcgacttctccgttgagtacaagtcaggagcaacgaacacggtggctgacgcgctctcgcgccgcgacaccgacgaggacggcacggggactctccaggcaatctcagctccccgcttcgacttcatcagccgcctccgacacgcccaggctactgagcccgctctggctgccatccacgacgaagtcagggcaggcacacgcactgctccatgggcggtggctgacgacatggttctctacgacaggcgcctgtacatcccaccggcctcgccacttctgcaggagattgtggcggctgtccataatgatggacatgagggcgtccagcgcacgctacaccgcctccgtcgtgacttccattttcccaacatgtgtcgtgttgtgcaggacttcgtacgggcatgtcccacttgtcagcggtacaagtcggagcatcttcacccggcaggtctcctcatgccactaccgattcccaccgtcgtttgggcggacatcggcctcgacttcattgaagcactgccccgtgtcaacgagaagtcggtgatcctctccgtcgtcgaccgcttcagcaagtactgccacttcatcgccctcggccacccgtacaccgccgagtcggtggcgcaggccttcttcgccgacattgtacgcctccatggcgtgccgcaatccatggtgtccgaccgcggcccggtgttcacctcgacgttctggcgtgagctcatgcggctcatgggcactaagctgcacatgtcgtccgtcttccacccacagtcagacggccagacgaaggcggccaaccgcgtcatcattatgtacctccgttgtttcacaggcgaccgtcctcgacaatggcttcgctggctgccatgggccgaatacgtgtacaacacggcataccagtcctcgctccgggagacgccattccgggtggtgtatggtcgtgacccgccctccatccgctcttatgagcctggtgaaacaagggtggatgcggtcgcacgcgacatggaggaacgcgaggcattcctcgccgatgtgcgccatcgcctcgagcaggcacaggcggtgcagaaacgccactacgacaagcaacaccggccagtgacatacgcagtcggcgactgggcgctccttcgacttcgccagcgagctccgtcctcactgccacaacaaacaacgggcaaattgaagccccgcttcctagggccataccgcgtcatcgagctcatcaacaatgtcgtcgttcgcctggagctaccaccacaggcccgcattcatgacgtcttccacgtgggcaccctgaagaagtttgtaggggcacctccatccgccccaccacccctacccgacatccatcatggggcgattgttccagagccatctcgggtagaacgcactcgcctggcacagggtgttcaacaggtgctggtcccgtggcggggcgaaccagcaacttcggcgacctaggaggacctcgacaagtttcgcgccacctacccagattttcagctcgaggacgagctggacctcgagggggggagagatgtcatgtggggccgcacctatacgcgggcccgcgacgccaggagagctgaggctcggccgttcaaattgggcgccaacagcagctcacctaaggaaggttcgtccaaggaaagtggcagcagctcaaccaaggaaggttcgtccaaagaggaaagtggcagcaactcaaccaaggaaggtccatccaaggaaagtggctagattagtggccaaattgataggccttaattgtaggggagttggtttccaaataagtcatttcctaaattagaagttatctagttggtcaggccagtggcctatttatatggaaccgtgaggcaatgaagggaataagaaatatttcaccttaatctcccatctccctgtactctctaagcctacgacggaggaatacctcgccggagaagacggacgacggatacgagctacgtagccgcggtccagctgctcgagggcttaacgcccttgacacatgccaaggtggcaaaactgccatgcaaaaccagctaaggggttatttgaatagattaattttttttatcgaacacgcatgatagttgtgcatctttatatatttaactttagagagaagaaaaggtcttacaagaaaggtaacttgctaggcaagttccccaaaaccacccacatacaaagggtagtattaaatactttaagggttacaatacctagtttaacagttggaggggttagtcaaccatcaatacattgaggggttagtgcagctccaaaaggacacaaattttcttccccaaggcgtcttattagcgctgttgttaaaaatgagattcctaaaaaaagttaaacccacagtagactcctaataaataagccctaatattttaatgtgggccacaccatgtgctaattgggctggttgctagacttgcatccgtacttgtgtccttaccatcagatggatacgcgtacctggcggctggcattgcaccggagtcagttagctgcgcgtgagatgggcgattggggaaggctccgcgacgcgcaaatttgcggggcagcaagcagcggatgcgggacgcgaagaatatggagacaagagagagctattggaggacttaaaatatgttttctttcctaaaaacacttttggggttggtttacaggatttcttggagatgctctgatataggctctttccttacaaactccttttttgaaggtgcgcataagaaataagaatagataaactgactggtaacacaacgcgccagctccctaagggaccctagcagtttgcctgctggtggtcatttttggtcgggttgttgctctgtgtgcgtggtgcgttgtgttaatttcaggggggtctcggcctaagggcctttgtattaggggttgacaag

SEQ ID NO: 105068 - DNA, 486 bp, Zea Mays
atggccactgtgcctgttgcccttccgctggccacagtggatgacaaaatctacaagctcatgccctgcatccacaactacaagaaccacgaggaagatactccggctccaggttcatcgttgtctccatggatgctgccacctgcattgtcggacatgtggacattcaggacctcgtcgttcatgccacacttgaggaatcaagggtccttgagctcgggaatcgctcctgctggttcttggctggctcaagatgctgcaatgttcaatgtgaagaaggtctggctagtatcctatctgccaccagggctcaagattctgccatacccacacttcgtcctcgacaacctcctcccaggacataatagccttaaggctttggacattgctggcgtcttccatgtggcgtgtagaccactcatccgttgtggagagaccgaagcaggagagatcacgggaggtgggaagggtgaagaggaagagtag

SEQ ID NO: 105069 - DNA, 132 bp, Zea Mays
attatgactgtatgagatattgtctcttattagtactggacgaggagatgtgtattattatgactatggatgagactttcgtgatgtaattgatgagactaaggatttaaatattgttatgtgattgtgtgt

SEQ ID NO: 105070 - DNA, 88 bp, Zea Mays
cttcactgtaagcacaccatgtctgctaaatcttcttatggaactggacacttgatccgtcacctagaactttgccccgctaagaaag

SEQ ID NO: 105071 - DNA, 871 bp, Zea Mays
gcttttcgaatcctaagacttgggcccactgtcagcctcggtagatatcacactcactagtccactcccctcttcactcccgtcggtggattccatgtccaaccgcgtcgccggaggccggaaccatgaagcctgtcagtgtcgccgaacacaacaaccaccagcctcgcctgcactcccccacgccggcgtcggcgaccaagatctcgatccccatctcttcgagcgaggcggcgctgttcgggaagggtaggtacaaggtgtgggccctcgcggccatcgcgctcctagcgctctggtccatgttcgccgcctccgtcacgctgcgcttgtcctccgtcgatctcgccaccacgttcggggacgcgagcgatccgctcatcgacgaacttgatcccctggagatggagcaaagagaaaagctagtgcgccggatgtgggatgtgtacacacgcacagataatcatgtacggctaccacggttctggcaagaagcatttgaggctgcatatgaggagcttgctggtgatgatacgcttactactgatgcagctatatctgagattgctcgcatgtcaatccataggcctgaggttgagcaatcgtcgaataaggattaggtatgaactaactgacctatttgtgaacttagtggctgaatgctgtctccttttcttaggatgtgccatcaaatcttaatgcagcatcttttttaaaacatatatgtagtgcaaacctatatgtttgcaccttaggaatatgtagtataaacctatgcagcaaaatattttgtctatttatgcttggtttgccttgtgagcatctcgttctgataattgattatcagcaataaagtcgcatcatattgtaa

SEQ ID NO: 105072 - DNA, 234 bp, Zea Mays
atggagggctctggggtggaccctacaagtgctaggttaaccaagcccccacgcaacccgagtgcgacgcggcagacgaactgttttgcgtcctatcagtccacccacgccgggcaacgtcatgatggctgcccgttactagttctattgagtcagctcaaggaatggtttagggatgtcttcagtacaccttcatctttcgtcacccctagcgtcatctttcatcatgcgtag

SEQ ID NO: 105073 - DNA, 1122 bp, Zea Mays
cacgtctacaccttggctctccttcggtcctgcacactcccgcgtcagctgccatcccggagctcggagccgtcggcggcagcggcaccactccactcgcatggccgacaagcaggtaagaaagagcacgaccgccgaggcttcttctttactcgttccctcgctgccgctttctttgcctgcgctgcgctctcgggttattaccggggaggaactggaactgcaattgcgtggccctcgtggttcagttcagtgccgtcgatcgatctgctgtgcgtgtccattcgcctggttgagttcagattttccccaaccgcctccatgccaagatggtacggtgaaaaggcttactgcacgtctggtttgtccattcgcctggttctcggttgtccacagtcttttttttttataaaaaaaaacttcagtttttttcccccaacctccgctactgtcgttttcgcatatgtatcgctctctttttaaatataggattcacgagtcaccgtctcttttttttttcgtccagctcatgtccatgcacgttttttaggttttccacgagttagcatgtctatactacttgttaagattacagtgtaaacgtctacggtgcacggttctacctccctctctgctccacgatcctccccaagcgcgtagatcctgtctccttcacacaacaccgcccctgactcaccgtcatcaacggaaattaagtaaccgaggatctcctccccctctgctccacgatccccgtcatccgccctgccatcaacgcccccatcgcaatctacttctccgttctacgactttccaaggccagatccgatgacagcgtcgcgagccgccccttctcaagatcgaactggagccaccctgcttctcaagaaggccaatacatggacggctgcggcaccgtgtcacagggcgagggaggccgaacgctctggtgaacgaggtccggacaccaaagaagccaacaaaggagccgacgtcggccgtgaagcaatgcaaatcccggcgccagaggcgacgctgagagtgcgcgcccgcaacgtggcattctccatcatggagatccgccaggccgtcctcgggctgtggcggcggctggcggcgtag

SEQ ID NO: 105074 - DNA, 1701 bp, Zea Mays
atggatctcaaaaaggttgagcaacgcggctatacaatacctattggggtgctgctctcggacgaagtggacgccaccattgcagaggttgcaggcgcctgcaagcacagagcacttcacccccacaggctgctgggcgcggacgagttgccgggttacgtcctgattctcagcagcgagataccccgtagcgcccccaagttcctcttcttcttcccaggctgcgggtcgcggacgccgtacctggttcagcgcttgccgatatgctgcgcaattcttcagatcgacgatctgggtggcgatgttgcggcgggggtaccacgtccggatctcgtggagaatcttgcggacgaccgtcacccagccgctgcccctagggtctggacggaggctgtgggcgaagtcgtcgatgcagtcttcgatgtcctcgtcggtgatgaattggatgtcgccccggacgccacggatcagggcatactcctctgcgaggagggcgtggatttcatggagcgctcagctaggctagggcacacgcggatcgcggagagggggaggcgggggcatcctgtgcgctggatctgggtgcggatgttggcgtggatctggtgcgcggagctctccacgatcgtcctcaaggttgaccttgaatgcgagacatgctacaaaaagatcagaaaagtcctccgcacaatccaagacaagatgaacatcgagacgatctcgtttgatgagaagagcaatgccgtgacgatctccgggccgttcgactccgacatggtctgcaacaggctctgctgcaaggccggcagggtcatcaaggagatggacgtcaaaggcaacgagaaggacgccaaggccaaaggaggaggcggcggcgataagcccaaagacgccgccaaaccggcggccgaggaggagggcggcaattcggagatgaaggcggagaaggccgagaagaaggagggcaagggcgacaaggaggataccaagtcagacagggcagagaaaggaaacaaagacgggaaggcggaggccgagacggtggagttcgacctcgacgtggacggcgtggcctccgcggcggacgcgaagcccggcaaggccatggcgatgccgcccggcatgaccaaggccgacctcggcccgctcctggagaagatgatggcgccgggagccacgcagagcgtggtcgtgccgtccatctggcccgcgtccgccgggttcgtgtccggctactacggctgcaacccgggctacgaggcgccgccgtcctactacggcgctggcgctggcgctgtctacggcggctactacggcgtgccggtgtacgatagccaggggtggtactacggcggcggcgcccggcagcagccgtactacccgcaccagcagcagcactgctgcgaggaccccaatgccgggtgcagcgtcatgtgatggcgatgcccgtaaacaaatggagagccacataaatcagtgtgtggtcagtggtcgtcacacaccatggtcactgactcactggtcagtgccaccgtgccggtggggggtagaaccttttttccccgcgtgtcatcttgttgtccgtgttttctagatagaaacacttttaaacggtaacagtaaaaaattgaagtgttccctaaaatatgttcgcttgcctctctccgggtcactagaggcaatgaaaatacaaataagagt

SEQ ID NO: 105075 - DNA, 1356 bp, Zea Mays
gggaccaccccgtggatcacgcacccgatcacgcacgccctggcccacgcggacggccctggctccgccactgtggcggaaacggacggcatcggctaatggacaaacaaacggccggtagcgcgacacgtctcccctcgatgcgttttatccccacgatgcatccgtcgcgacgagcgctgcgccggtgcccccattctccactcggactccgctctcctgccccgctctccctcggtccctcccaggcccagcttccagctcgctctccgccgccgctgctatcccgctctctctcctctacctcctatcctcccagtcccagccagagctgtcctgctggttctctgcgtctgctgcgctcccgccgctgctgctcgtgaagttattccttcggagaggcagtgtgtttggatcgttttggtcagcctcctcggagttgtttgacttgaccggatcggacactgtttggtggctcaatcggccgcgatgccggactccgacaacgacgagtccggcgggccgagcaacgcggacttctcgtcgccgcgggagcaggaccggttcctgccgatcgcgaacgtgagccggatcatgaagaaggcgctcccggccaacgccaagatatccaaggacggcaaggagacggtgcaggagtgcgtgtccgagttcatctccttcatcaccggtgaggcctccgacaagtgccagcgcgagaagcgcaagaccatcaacggcgacgacctcctctgggccatgaccacgctcggcttcgaggactacgtcgagccgctcaagctctacctccacaagttccgcgagctcgagggcgacaaggcggccgcgggctcgcagccgccgccgccgccgtcgtcaacgcacaatggcgcgggagtgcccgtcggctacggcatgtacggcgccggcggaggcagcggcatgatcatgatgatgggacagcccatgtacccgccggccgcgtcgtcggggtactcgcagcagccgccgcaccaccagatgtccatgggcgggaaaggtggcgcgtatggccactgcgacggctcgtcgtcatcgccgtcagggctccgcaggcacgacgggttgtgaccgtcgccggccgtccatgctttttgcatggctcaagagtgaaggggcccgccggcgccggcttcttgcttgttgtcggcaaatagcgccggcctactggccaagttgaccttcgtttttttccttttctttttgtggtaagtaatgttgtgctgaatggagccagtgaaccaatatacgttccttaacctcttggtaatcccatgattcgtacctgctgctaaactgagctatggcgacattgccagt

SEQ ID NO: 105076 - DNA, 1295 bp, Zea Mays
acagttagttgtttcacacggacgcgcgtttgtcgtgatcgacgatcgagaaaatcctagggttttcctctctcgccgccgccgacttaaagtggacagaggagtaggcgaactagcgccgggagagtaacatgggcacgccggagacgtcgcgggagccgtgcccggaccggatcctggacgacgtcggcggcgcgttcgggatgggcgccgttggcggctccgcttatcacttcatcaagggcatctacaactcccccaacgggatgcgcctgtccggaggcgcgcagaccgtgcgcatgaacgcgccgcgcgtggggggcagcttcgccgtctggggcggcctcttctccaccttcgactgcgccatggtgtacgcgcgccagaaggaggacccttggaactccatcgttgcgggcgcagccacgggcgggttcctctctatgcgccagggcatgggggccgcgggccggtccgcgctcatgggcggcatcctgctggccctcatcgagggcgccggactcatgctcaaccgcgtcctcgccaacccgccgctgcccgccgacgatcccaaccttacagcggccatgggcggcaaccctttcccgggcctaccgcaggcgccgccggtcgtggcacctccggaagcgacgacctccagcggcgtgggtggcttgttcgggggactgtttggcaggaaggaggaggagaagaaacccagcgcaggcgggggcaagtcggagatcttagagagcttcgatacgcccagcagtccgataccatcgttcgagtacaagtgaggaaaaggttggctgacgccactgttgcttgcttggtattgcaatgtggtggtggtggtggtctggaattagtgaattgcatgtcagcgatacaataacacagacaggacaggagatggattgtttgataaatttattcctgcgccggtctgcctcgacggctcatatctatacgcccgcttgtgtatgtataagccctttttcaaaacgtggcagattggctactttttgatgagatgtagtagtattatctgtaggagcaacagctgtagtattatatgcattcgtgtttgtgcaatgcaatgcacatcaaaacccttgtgcggttgtgcctggccatctgaagggacgacttatttgttcatgtcgctggtcttcgttttgctggcccagtgcccagtggcctacgaggctgtgctgtgttaaggattggacatctgaagggttcttttgctcacggcttgctgtgctgttaaggtctggacatctgagatg

SEQ ID NO: 105077 - DNA, 1088 bp, Zea Mays
cagttagttgtttcacacggacgcgcgtttgtcgtgatcgacgatcgagaaaatcctagggttttcctctctcgccgccgccgacttaaagtggacagaggagtaggcgaactagcgccgggagagtaacatgggcacgccggagacgtcgcgggagccgtgcccggaccggatcctggacgacgtcggcggcgcgttcgggatgggcgccgttggcggctccgcttatcacttcatcaagggcatctacaactcccccaacgggatgcgcctgtccggaggcgcgcagaccgtgcgcatgaacgcgccgcgcgtggggggcagcttcgccgtctggggcggcctcttctccaccttcgactgcgccatggtgtacgcgcgccagaaggaggacccttggaactccatcgttgcgggcgcagccacgggcgggttcctctctatgcgccagggcatgggggccgcgggccggtccgcgctcatgggcggcatcctgctggccctcatcgagggcgccggactcatgctcaaccgcgtcctcgccaacccgccgctgcccgccgacgatcccaaccttacagcggccatgggcggcaaccctttcccgggcctaccgcaggcgccgccggtcgtggcacctccggaagcgacgacctccagcggcgtgggtggcttgttcgggggactgtttggcaggaaggaggaggagaagaaacccagcgcaggcgggggcaagtcggagatcttagagagcttcgatacgcccagcagtccgataccatcgttcgagtacaagtgaggaaaaggtgcgatgtgtagttaattgcagttttgtttggatttagaaaaggtgtgatatatattcgattattaagttcgtgattgtttttcccttttttgtttgtcctgtaagcgtgagtaggcaacgtccatctgtgtgcaccagataggttgcatagggattatgattgtgttctgccgtggaagttagaaattgcttgggttcagcaactgtttagtttcttgcgctaggtgttgtgattgtttgttacaaaaaaaatgtgatgtatccaattagagattgttat

SEQ ID NO: 105078 - DNA, 1318 bp, Zea Mays
tagggttttcctctctcgccgccgccgacttaaagtggacagaggagtaggcgaactagcgccgggagagtaacatgggcacgccggagacgtcgcgggagccgtgcccggaccggatcctggacgacgtcggcggcgcgttcgggatgggcgccgttggcggctccgcttatcacttcatcaagggcatctacaactcccccaacgggatgcgcctgtccggaggcgcgcagaccgtgcgcatgaacgcgccgcgcgtggggggcagcttcgccgtctggggcggcctcttctccaccttcgactgcgccatggtgtacgcgcgccagaaggaggacccttggaactccatcgttgcgggcgcagccacgggcgggttcctctctatgcgccagggcatgggggccgcgggccggtccgcgctcatgggcggcatcctgctggccctcatcgagggcgccggactcatgctcaaccgcgtcctcgccaacccgccgctgcccgccgacgatcccaaccttacagcggccatgggcggcaaccctttcccgggcctaccgcaggcgccgccggtcgtggcacctccggaagcgacgacctccagcggcgtgggtggcttgttcgggggactgtttggcaggaaggaggaggagaagaaacccagcgcaggcgggggcaagtcggagatcttagagagcttcgatacgcccagcagtccgataccatcgttcgagtacaactacaatggtgtctcgtctcttacagatagggactgaccttgtcgagaatgcatcctcactgattcaggttctgtgtttgccattggtgctgttggggattctctcttccactttgtcaagggtctcctcaatgcacctactggtgcatgatttactggaggctgtgcgcatgaatgtgccacacattggtagcagctttgctgtttgcggaggcatgtactcagtatttgattgtatcctcatgtatgtgcgtcaggaggaggatccctggaacttgatttgttctggtgtggccactggtggcatcctttctttgcgtcagggatttctctcagtcattcgttcatgcatgcctggcacaattttctttgctctcttaagtggggcaattatcgtgttgcatcgctctcaacctgatcctctatctgtgccagttgatgttccaaatgtcaccctttttgagatgtctttatctatgccagttggtgctgaagcaatcacacgtgtagagacatctcctggtggtcgtagtttagttgcttatccttgaaaaggaaagtggaagaggggaatcaaaa

SEQ ID NO: 105079 - DNA, 552 bp, Zea Mays
cacagttggattgtggcaacacgatccagagctcctcatgagctaaggtgtttctaattcgcaggttggctgacgccactgttgcttgcttggtattgcaatgtggtggtggtggtggtctggaattagtgaattgcatgtcagcgatacaataacacagacaggacaggagatggattgtttgataaatttattcctgcgccggtctgcctcgacggctcatatctatacgcccgcttgtgtatgtataagccctttttcaaaacgtggcagattggctactttttgatgagatgtagtagtattatctgtaggagcaacagctgtagtattatatgcattcgtgtttgtgcaatgcaatgcacatcaaaacccttgtgcggttgtgcctggccatctgaagggacgacttatttgttcatgtcgctggtcttcgttttgctggcccagtgcccagtggcctacgaggctgtgctgtgttaaggattggacatctgaagggttcttttgctcacggcttgctgtgctgttaaggtctggacatctgagatg

SEQ ID NO: 105080 - DNA, 1420 bp, Zea Mays
gtgctgcgcagatagcgtggcgccaaaccagcgccgtccaactgaaccagtggacagggctcgaggaggcagccccgcactacactactcgagggaagcagggaaccgtcgaaccgaggccccgtccgtcccaactcacgtgtacgtactcctcctgtcctgctgactgatccgcatgctgccggtcgtccaccgccgatcgtgaaacgcaaccgtcgccgtacgttcgtcgctagcttgccgccgatcgccgacctcgcgcgcggacactcacacacatggtcatggcgcctcagccttcgcgcgctctgagtccgaggctgagccgcgcccccggcgccggccacgcgtcgtgcaggtgctcggcagcgctcgcgccgctcttcgggaagcgcccggcgcccctcgtggtgtcgttcccgcgcgccggcagcggcggcgccgtcgcctcctgctcggccgtgccggtgcaggagtcgtccacctccaccgctgttagcaagaagaaggacggtgccaataaggaggccacagcggccaagccgaagaaggccgcggcgctgccgctgccggagatgatgcaggaggagatcatcccgccgctgaaggccgccttggaggcggaggaggacgtgtcccaggtccagctcgccttcgaaaacaacacgctagagggatccttcataaaggacgacgtcccttattgtttctgggccttctttccaaaaggagacctcacaggacccaagggcttcgcgctatcgtcctacagcaacgaggtgagcaccatcgagccgttcctgatcgacgagaagagggtaacggccaagtacgtggtgttctgggtttacaagaggctggctgggcaaggcatccttccggtctggaaggaagaggagggggaggatcatcaggacgccaagtagaacacacgcaggaggcaggagggtgctgctgtgaacctacacacagtcatcatgtctgaaactgttaaagttcgtctgctaatatatatacagatgctaagagctgctgagacacatgcatttcagcatttggcttctgctgcataggcgcatagccattcgcagtcgcaatcccttcgtaatcttgtgctgcagaagccagtcaaatttgttgaacaatcgaaaccttcgtgggccgggatcgacgacgagtcccgtctgaaagctatggtatctgaatattattatttgttatcgccagtcctgcgtgccgtactctatccgtccagcccttcgccatctgtttagaatagaataccttcatgtaaatcaagagatttcagagattattaatttaagcgaaaactgttatcttattgttcggttgcatggtattctgctccctcacaattttaaatggtaaaaaaaagtaaaaaaatatacataaataaaga

SEQ ID NO: 105081 - DNA, 981 bp, Zea Mays
gaggccccgtccgtcccaactcacgtgtacgtactcctcctgtcctgctgactgatccgcatgctgccggtcgtccaccgccgatcgtgaaacgcaaccgtcgccgaagaaggccgcggcgctgccgctgccggagatgatgcaggaggagatcatcccgccgctgaaggccgccttggaggcggaggaggacgtgtcccaggtccagctcgccttcgaaaacaacacgctagagggatccttcataaaggacgacgtcccttattgtttctgggccttctttccaaaaggagacctcacaggacccaagggcttcgcgctatcgtcctacagcaacgaggtgagcaccatcgagccgttcctgatcgacgagaagagggtaacggccaagtacgtggtgttctgggtttacaagaggctggctgggcaaggcatccttccggtctggaaggaagaggagggggaggatcatcaggacgccaagtagaacacacgcaggaggcaggagggtgctgctgtgaacctacacacagtcatcatgtctgaaactgttaaagttcgtctgctaatatatatacagatgctaagagctgctgagacacatgcatttcagcatttggcttctgctgcataggcgcatagccattcgcagtcgcaatcccttcgtaatcttgtgctgcagaagccagtcaaatttgttgaacaatcgaaaccttcgtgggccgggatcgacgacgagtcccgtctgaaagctatggtatctgaatattattatttgttatcgccagtcctgcgtgccgtactctatccgtccagcccttcgccatctgtttagaatagaataccttcatgtaaatcaagagatttcagagattattaatttaagcgaaaactgttatcttattgttcggttgcatggtattctgctccctcacaattttaaatggtaaaaaaaagtaaaaaaatatacataaataaaga

SEQ ID NO: 105082 - DNA, 1155 bp, Zea Mays
atggatccgaggcaagcccctaaggttcgcaggtcctcgctcaaggctgcaattggtgtgattccaggaggccgacctagtttttgccaaacatcacgtggaaacaccgtagatggcagcaccatgtcacaacctgtgcccgttacagcacctgcatctacaaatcattcgacccccggcattgttgatcctgactggatgttacctgattatagtaccatgtcctccacaggcaactacttcacaaatttgcttaaccaagatggattacattctttagggtcgggggacaatgtggagtatgattctgaattctcagagtcaccgcttgcagctgacatgaattctcagacaaagtcaaagggtcgatcaaaaagtttcagtgaagaggaggacatgttgcttgtgtcggcttatctaaatgttagcaaagacgctattgcaggacgagatcaaaaagatggtcgtttttgggaaagaattcacaagtactattatgacaacttatcttttgactcacatcgtaattgtgcatcattgcgacatcggtgggggataatccaaaaagaagtgagtctttttcaaagttactacgaagccatagaaaggaagaatgaaagtggaaagaccatcaatgacaagattgctgaagcaaaagctacgttccatcagttaagaaaaaaggcctttacgctgttccatgtgtggaatgttcttaggcacgagccaaagtggacatcaataaaaagtcccattatggtctcaaatttggatgctgaaaatggtactgacggtggcaccattaacaattctagacctcctggaaggaaggctgagaaggaaaatttgcgggccagaaagagggaagacaatgattatgatccattcattgaagaaatgaaaaaaattagagaatcaagagtgcagacagacaacaatcggaaggcacgtgatgacatgttcttggagctggagaagcataagcttgaacttgaaaaagagatggagaagcaaaagctagaccttgaaagagatcagcatgacaaaaaggtgatggaaactgacacaagtgggatggatgatgaggccaaacagtatttcaagttactgaaacaggagattttagctcgacgttttgggagtccacaaccatag

SEQ ID NO: 105083 - DNA, 1176 bp, Zea Mays
acaccactgtcgtctgtcgacaactcgacatggtgagttggcgacgctgaaaaccgaagcaccgaacacacgcgcacaggggacactcgcgcacactgcagtctgcagctagcccgtatcgccaatcgccatgctcgcctacctcctccacgccccagccaccgccgtcgccgtcgccgcggcgccctgtgcctcctatctccgctcactcccgccggcgaagaccccgttcctcccctcgctcccgcgcccggtctcgccgaggcgcgccgccgccgctttcgccttctcccccgccgccgcggcggcccccatcgcggcgtcgctgctccagggccccgtgctggtctgggccggccggctctgcatctactacgcgctcctccacgtcgggcttgccggctctccgcgcaatcccttcctgtcccacgagatcggcggcgaggacggcgccggggacagcgacctagggttctccaaatgggccgagaagctccgtggcggcgcctcaggtgaaaaagatgctcagcataagggaaagctaactagcaaatggaagccgaccaccaaaggcacactgaaaagaacttacagagtacgatcaacggatgaaggaaggcgggtcctcaaggagatcgcttcagttctgtcccaagatgaccattttgtggatgcctcgtctcacaagggttgccaagttaggagggaaagtgctcatggcgaaagtgtttgctgctacaacgtgagagcgttgttcgatgagcttccaactcctcacctgcttctggagattacacctttccctgctggacaacttaccgacaacgactaccgaaaggcggagaggcttgagatggtgctgaggctcagcgcttctatttaaaaaactggggactggtttttcaatttcccctagtactttctttgcccaagttgtaaattgtcttcctgtgggcctgtaaattgacgcagttggctaagaactacttgcaaaacacaagttctggttgattaatttgagcttaagaacctgatatgatatacacttgggcgtttccctgaactgtatcaaatgcttctcactgtttccttttccttgagtaaggaaaatagggatgggcatggattgatccattgatctacttcgcttaagtaacagatttttccatttgtcaa

SEQ ID NO: 105084 - DNA, 1656 bp, Zea Mays
atccctaatttttactccacaccagtgaaacacgacccgctggccgctggccgctgccacgctcccacgcccgagcccgagcccgggaccacgaggcagccagaagacgcgcgcgcccctctcgggtctcggccgcgccgtcgcgctcaccaggtctccaccatcaccagagtggcggcgctctctcctatcgcggcgagcgacggcggcgatgggaggaggggagatggcggggtggctgaaggcactggcgtacagcgccgggggcgtagcggtggccggcctagcggcgttggttgcgctgcaggagcgcctcgtctacgtgcccgtgctcccgggtctggcgcgctcgtaccccatcacgcccgcccgcctcggcctcatctacgaggatgtctggctccgtgccgcggacggcgtgcggctccactcctggttcatccgtcactcccccagctaccgaggtccaaccattctgttcttccaagaaaatgctggcaacatcgctcaccgtttggaatttgttcgactaatgatgcagcgactacagtgcaatgtttttatgctttcttatagagggtatggtgagagtgatggttatccttctcagaaagggatcacatatgatgcacaggctgcacttgaccatctagctcagaggaatgacatcgacacaaccaggatagttatctttggaagatctttaggaggtgctgttggagcagttcttgccaaaaacaatcctgacaaggtggccactctaatactggaaaatacatttacatccatactggatatggctggtattatgcttcccttcttaagatggttcataggcgggagctcttctaaaggtccaaaacttttaaactgtgttgttcgctctccatggaatacacttgatattgttggagaggtcaaacaacccattctcttcctttctggattgcaagatgaactagtcccccctccacacatgaagatgttatatgacaaagcttctgatcataacagaaattgcagatttgttgattttcctagtggtatgcatatggatacctggatgtctggaggggaccgctactggaggacaatccaattgttcttggatcaatacgctcctggagtgcagaatcatgatgccagcttcaaaagtgaaattaccgaggatgatgaagctgctgattgactggaaaatctggatcggactttttccaaatttctgtttcctgatgttgctgcaatttgtcaccaatgaactgaaactcaccgcaaacaattaattcaggcaattattctgctccattgtacctgaagcaaccgaagttgtgaatatttttcgaggatattctccaccatgctctgccgctacatttgcccctggaacttaagttatttgcccatgaaccgaatatatatcctcttgattgaatgtatgaatgatattttttttctcctttgctagtatttggaacattcctaaaaatgtggctgtatgacagcccgatagataggctgtaagctcattggctgaactatttggttttgtgattttgattgtttcctttttcgatgttaaagcatctagacctttaatatgtttggatgacacaagattattgtgattaatgtatgttttgcagaagtgttgaagtt

SEQ ID NO: 105085 - DNA, 1378 bp, Zea Mays
cccgggcccggcccagcccagcgcaggcgtgcgaacacgaagctcccctggacggagctctatcgcgtagtacggagtccacagggcgaggaaagatgctagcaggcgcccccaccggcgatgcgggccccagctccggcgctgggagcaacccacccactcggccacggaggttccccggggcggcgcagccggagatcatgcgggcggcggagaaggacgatagctacgcagcccacgtcacggaggcatgccgcgacgcatttcggcacctcttcggtaccagggttgctgttgcttaccagaatgagataaaattgcttggtcagtccctttactacttgctaacaactggttcaggccagcaaacacttggtgaagaatattgtgatatatctcaggttgcaaccttgcatggacttccacctactcctgctaggcggattctattcattttgtaccaaactactgtgccctaccttgctgaacggatcagggttcagaggccgagttcatgccttgtggcaatgggttcttcagaaatggccttcaatgctgccatatgctcaagattttatacagttggctatccggacaaatctaatgttcttctattttgaaggtctgtattatcatttgccaaagcgagcagctggtattcgctatgtattcattggcaagccaatgaatcagagacctaggtatcagatcttgggtatttttctgttgattcagttgtgtattcttggagctgaaagactccgaagaagtaatatatcgtcaatagctagttccattaatcaaatatcatctggaggctatccatcgactacaggtcggggcatccctgttctaaatgaagatggaaatatcatcagtgacatccgcagtggtaaagctgcagatatagcttctcattcagagacctccaatggcaagagcaaatgcaccctttgtctcagcatccggcaaaatcctactgccacaacctgtggacatgttttctgctggtaaaagttgttttttacaatgatcatgtactgagtcttgacagataaaaactgaatgtattcatccctgaacgctttgtcaactgatcacataccatgcaggaattgcataatggagtggtgcaatgagaagcctgagtgccccctatgcagaactccgattacccattcgagtttgatttgtatatatcattcagatttctagcaaatcatttcgcacagtaggagtccatatcatacttcactggcgtcaaaatttccagaccatatttcggcaagaaaactgcatgccaaaatggtttcgtatacttaagtgggagaagagtacgagaccatttcaagaggttaaagatcagagagttgcatac

SEQ ID NO: 105086 - DNA, 1706 bp, Zea Mays
cccgggcccggcccagcccagcgcaggcgtgcgaacacgaagctcccctggacggagctctatcgcgtagtacggagtccacagggcgaggaaagatgctagcaggcgcccccaccggcgatgcgggccccagctccggcgctgggagcaacccacccactcggccacggaggttccccggggcggcgcagccggagatcatgcgggcggcggagaaggacgatagctacgcagcccacgtcacggaggcatgccgcgacgcatttcggcacctcttcggtaccagggttgctgttgcttaccagaatgagataaaattgcttggtcagtccctttactacttgctaacaactggttcaggccagcaaacacttggtgaagaatattgtgatatatctcaggttgcaaccttgcatggacttccacctactcctgctaggcggattctattcattttgtaccaaactactgtgccctaccttgctgaacggatcagctccagaattgttgcccgtagtattgtactcaacgaatctcagtttgatgaccatcctgaaagtgataattctagtagtgacattgcacaatccaccacaaatagtgacattccttcaagaagcttaagtgtttctgctctgtcagggttcagaggccgagttcatgccttgtggcaatgggttcttcagaaatggccttcaatgctgccatatgctcaagattttatacagttggctatccggacaaatctaatgttcttctattttgaaggtctgtattatcatttgccaaagcgagcagctggtattcgctatgtattcattggcaagccaatgaatcagagacctaggtatcagatcttgggtatttttctgttgattcagttgtgtattcttggagctgaaagactccgaagaagtaatatatcgtcaatagctagttccattaatcaaatatcatctggaggctatccatcgactacaggtcggggcatccctgttctaaatgaagatggaaatatcatcagtgacatccgcagtggtaaagctgcagatatagcttctcattcagagacctccaatggcaagagcaaatgcaccctttgtctcagcatccggcaaaatcctactgccacaacctgtggacatgttttctgctggaattgcataatggagtggtgcaatgagaagcctgagtgccccctatgcagaactccgattacccattcgagtttgatttgtatatatcattcagatttctagcaaatcatttcgcacagtaggagtccatatcatacttcactggcgtcaaaatttccagaccatatttcggcaagaaaactgcatgccaaaatggtttcgtatacttaagtgggagaagagtacgagaccatttcaagaggttaaagatcagagagttgcatacgataatttgttgtaggttgaaagtttagattgaattagggaccacaggtagtagaaattatttattggcagttcggatagtagataacttgtattggacaccgatgtgaattttattggttagaacaatgtccgactcgaatcatcgagctatttagcaatatgttgtgtccattttcgtcgcacttataccagcttgtatgttttgactaagttaggtgcaggtatgttactataattttcatttatgtttgagtatagaatataaaatagctgggtggacat

SEQ ID NO: 105087 - DNA, 1622 bp, Zea Mays
cccgggcccggcccagcccagcgcaggcgtgcgaacacgaagctcccctggacggagctctatcgcgtagtacggagtccacagggcgaggaaagatgctagcaggcgcccccaccggcgatgcgggccccagctccggcgctgggagcaacccacccactcggccacggaggttccccggggcggcgcagccggagatcatgcgggcggcggagaaggacgatagctacgcagcccacgtcacggaggcatgccgcgacgcatttcggcacctcttcggtaccagggttgctgttgcttaccagaatgagataaaattgcttggtcagtccctttactacttgctaacaactggttcaggccagcaaacacttggtgaagaatattgtgatatatctcaggttgcaaccttgcatggacttccacctactcctgctaggcggattctattcattttgtaccaaactactgtgccctaccttgctgaacggatcagctccagaattgttgcccgtagtattgtactcaacgaatctcagtttgatgaccatcctgaaaggttcagaggccgagttcatgccttgtggcaatgggttcttcagaaatggccttcaatgctgccatatgctcaagattttatacagttggctatccggacaaatctaatgttcttctattttgaaggtctgtattatcatttgccaaagcgagcagctggtattcgctatgtattcattggcaagccaatgaatcagagacctaggtatcagatcttgggtatttttctgttgattcagttgtgtattcttggagctgaaagactccgaagaagtaatatatcgtcaatagctagttccattaatcaaatatcatctggaggctatccatcgactacaggtcggggcatccctgttctaaatgaagatggaaatatcatcagtgacatccgcagtggtaaagctgcagatatagcttctcattcagagacctccaatggcaagagcaaatgcaccctttgtctcagcatccggcaaaatcctactgccacaacctgtggacatgttttctgctggaattgcataatggagtggtgcaatgagaagcctgagtgccccctatgcagaactccgattacccattcgagtttgatttgtatatatcattcagatttctagcaaatcatttcgcacagtaggagtccatatcatacttcactggcgtcaaaatttccagaccatatttcggcaagaaaactgcatgccaaaatggtttcgtatacttaagtgggagaagagtacgagaccatttcaagaggttaaagatcagagagttgcatacgataatttgttgtaggttgaaagtttagattgaattagggaccacaggtagtagaaattatttattggcagttcggatagtagataacttgtattggacaccgatgtgaattttattggttagaacaatgtccgactcgaatcatcgagctatttagcaatatgttgtgtccattttcgtcgcacttataccagcttgtatgttttgactaagttaggtgcaggtatgttactataattttcatttatgtttgagtatagaatataaaatagctgggtggacat

SEQ ID NO: 105088 - DNA, 1599 bp, Zea Mays
atggagcaaaggaagctccggaacagcctggcgcgcagaggaagaaaaccacgacgcacgcagcaaggcgacggcgcgcaggaacgcggcaagcaggggtcggaggcgagctccacggcgagcagagcaggggctgggtgcggcatgggagagcgagctgagggacgcggccacgaattgcgaagaactgaagggagctccatggaggtcgcgcggtcaggcgattttgagggaaggacgagcggggaaagcagacgaactcccgggctgaggcaattgacgggcagagggagctcgggcgccggcgaaccagcaggggaagacgccatggggatgagagaggccagtcaaaatggaaggtgttatgagggtgatcacttcgggcaacgattgcttcgtaaatgttgtggggttgcatccaaggttattcaattggatcagttaaggtactatgaattgcttctcgtgtacgagttcatggccaaagggagcttggaaaaccatctattcagtgtgcatgcgaagaagagcgttgcaacattgcagttcgtggcctggccactcgtcagagatattcgccagcatgataacaacaaacaggaatggagtgatgaggaactcaagaaactttatgaaacccatgagaggcttcttgattttgtttccttattctgttttgttccaagggctaaatacttgccccttggtcctaccagttcaccagtcacaaatggttgtgatgtgcttcactgtccacaagctctggtccatgctgttggaagtatgcctcgtttatcccaagctaatatgtttctgatagaaatgaggcaggctgcattggaggagaggacaaaaaggtactttatgcaaaggctgacttgggaaaacaagtacagggagcgtgtacaatctgcaatacagaagtgtaatgctggtgagaagagacgattggggctgcttgaatctgagaaaagacgggtacagagtaggctcttgcagattcaacttgctgtgaagactgcctctaaccagagaaaatctgagaggagcaagttaaatgagcaattagaagaaaagcttcagaagctctttaacttgtctcaaacaaaaatttcagcatttggcgaggctatgcttcacaccattggttatatttatgtccagcaagcagcaagagaactcggaaaaagtagagtttacataggtgtaccatttatagctgaatgggttagagacaaaggacaccacattaaatcacaggttaatgctgcttcagtattggctttccaagttttaaacttgtctcaaacaaaaatttcagcatttggcaaggctatgcttcacaccattggttatatttatgtttggcaagcagcaagagaactcgggaaaagtagagtttacatctgggggttccaacaacttgataaaggagccaaggtggtagctggtagtggtcttattcaagctggtggccttgctgcagaactggacggtgatggtgttagagatcttcctgcagtaagctgtaccaatgatctttggtctaaaaagggaaactggaaggggccactggagaagaaaattataaacaattaa

SEQ ID NO: 105089 - DNA, 387 bp, Zea Mays
atggttgctgtagtttctttcagggaaaaaaatggttcctacagattacagaacatgctccaagtatacatagataagcaagctagcactacacaatcatactatggtaaatcacctttgtatcccagccatcaacaacaaatacatccaaacaaaagccatcagtcgttgagaagacatgagcttcacggatgttcagtccaacttcagacaacaaagcagatagctacaaacaatagcgcggacaaacattcaaacctaagcgaggagctttggtttgtcaatggtagaaaaaataatttcatgaacatggaggatttctacatctcccgttcaggaagcccacatggaagatggggcgattttcagggtcagtgcactcgttga

SEQ ID NO: 105090 - DNA, 3084 bp, Zea Mays
gcttccgtcgccagattcctccgcaccgccatggatgaccttgagcatgtcatccttcttgcctccgactcacctgctgccgcagcggcgtccccatctatccgcgcggaggctctcgccttctgcgcccgcgcccgcgacgagtccccgccgtcgtcgctcctccgcctctgcctgtccggcatcgcctcctccccgcacgctcaagtccacttttggtgcctccagtccctccacgacgcgctcctccgccgccggctcgtgctccccgacgacctcgcgttgctccgctcctccctcctctcgctggcggtttcctctcacgccggatcgccaccgttcctccgcaacaagctcgcgcagcttgttgcgctcctcatccgcctcgagtacccccatgtttacccctcttacttcattgatctcctcccgcccgcaccgccgcagcctggccccacggacatgttcgcgcgggttctaatctctctcgacgacgacctgctctcccaggagtacccccgcaattctggcgaagccgccgacgctatgcgggtgaaggattccatgcgcgcacagtgcgtgtcccagatcgccagccactggcacgccgccgccgtgactctccgtacagccgaccctgcggctgcggcggtggcccttgacgcggcgcgcaggtgcatctcgtggattgatgtcggactggtcgccaatgatgtcttcgttcctctattctttgacattgcgatgtcccctggaagcgcgtctccactcgctgctgcagcggtggggtgcctttctggtgtggcgtcgaagaggatggactcaagggcgaaggtgggattgctgaggtcactcctggctgcacagcaggggcttggtagcccagacaatgggttgaaaatggcacctttggtgatagcatatgctgcagaggctctcgaatgtcatagcaggcttggccctagtgatgctgatggagctgcagcattggagatgctggaagaggtgctaccagctgtatttgcagctgcagagagcggtaacgatgaagatgtggattctggttccgtgcttgagttcttatctggctatgtgagcacaatgaaggcaccatctgagaagcagttggggcacttgggacggatcttggaggtggtgcgggtacagatgtcatttgatccagtatatagggggcatcttgatgtgcttgacaagatagggaaggaggaggaggacctcatggcagagcaacggaaagatttgatcgtattattccggagcatttgtcgtgttgcaccagctgcagctcagctattcataagtgggctgattgtgacagctctctcatctgcagaagctagtgtggaggatgttgaggttgctcttaccctgttcttccggcttggagaagctgtgggtgaggaggagattcggactggggcagggctgataggccagcttgtgcccatgctcctaactgcgaggttctcgtgtcacacacaccgcttagttgcattggtgtacctggagacagtaacccgctacatgaagttcatgcaggagcatgtgcagtatgtaccacacctgcttggcgtgttcttggataaccgtggaatacaccatcagaatgcccacgtgagccgtcgtgcaggatacttattcatgagggcagtcaagtcattgaaggcaaagctagtgccttacctggataccatactgcaggctgttggattactgataggcattgaagaggtatcaccagagaagcaggctcagttcttgaccgctcttctaaatcctctctgtcatcaggttgagtcacttgttatggatgccaaagcacgagggcttgaggaatcatcaccaatggctattagccttcaacaaattattgttgcattgaatatggtcagcaagggcttcaatgagcgtcttgtgatggtaaataggccagctattgggatcatgtttaagaaaacccttgatgtagttttgcaagtccttgtttcatttcctagcgtgagacctctgcgatctaaggtcatatcgtttctgcatcgtatgatcgagatattaggtctctcagtgcttccctgtattccaattgcactgagactattgcttcttgacaacgaggctaaagatatggtggaatttctcgtattggtaaaccaaataatctgcaaatttaaatcgtcagctagcgccatattggaggaaatatttcctactattgcaagtcgtttgtctgcgatattatcacaagatgcattttcagctggtcctgcaagcaatactgaggaaatgcgagaactgcaagagctgcagaggacattatacacattcttgcatgctatggcaacacatgatctttctgcagttctccttactcctagctctagggagtatctggagaccataatgcagttgcttttatttacctcatacaaacatagagatatactactgcgcaaggcatgtgtacaaatttttgtgaatcttgtaaaagactggtgctctaactctgaagataaggttccaggcttccgagtatttatgattgagaagtttgctactaattgctgtttatacagcgtccttgataaatcatttgatttacgcgatgcaaactcgcttgtcctttttggtgaaattgtgctggcccagaagattatgtatgaaagatttgggggggatttcattgtgaactttatagcaaaaggtctttctggagttcactgcccaccggacctagctgaacagtactaccagaagttaaagggaaatgatatcaaggcattcaggctagttgtgccgtcaatgtacatagagctaccatttctgcgatcggaagacgtattactgcggcattatctttaccaagtctggcaaccatggttgtgcccttattcattgtattctatctgaggtgcaggggaattcatcctgcaatagtttgtactaggaaggaatcacagggttccattttcttattttgcctatatccccaaatcataggctgttctgctgtctgggcctgaaattttgcaaggtacttccagtgaactactgcctccgttctcg

SEQ ID NO: 105091 - DNA, 1293 bp, Zea Mays
atggatccctctttgagccgtgagctgttgtgtaagcaagcagctgccttgacagtaggctttggcactgatgaagtagtgtctgatgaggagggtttcactggcacacaacaagatccactagatgacaatggtagccagagccaagaatccagtgccatggctgtaaagagggatgccatttgcaatgttattggtaagatgccttcagtcccagctggtgatcaacgtgggtttgtcccagctactgatgtgatgactgagatgataagggttggtgctagtgcagcagctaacgctgatgatgctactgtatctagtgtcggtgctgctccagcaacagctggtcttgttgctgctgttcccaggggtcctagggcaatggggtggaacaacaacacctctagatttattcttaggaggatggctcaacttcttagtgatggtagcaggcctgacaaggtcttcaaggacaaggatgtcaactttgtggccaaagcccttaaggagtacagtggggaggcagtgagcccaactcaggtgtataaccacttgaggaaatggaggcagaaatggtctagggtgtctaagctcaaagacattagtggggctttatgggatagtgacaccaatgctatcttgcttgatcatgagcactaccttggccactgcaagatagcactatgatttgtttcctatgtctccttgcttttttacttgtctaaaacactatgttttcaattacttgatcaggaccatccaaaagatgtagagttcctaaactaccctattaggttctacactgagatggaggctatttttggccatgctatggccactgacaaatttgcacttggttctggtgaagccttaggacagaaccaggttgatagtgttgctgccaaggttgagggccctgccttcacctatatctctgaagagagagcacaaactgatgttggagagggtagcaaggccaccgagatcccctccatagttgtgggtaggaagaggaagagagggaacttcagtgaggatgagatgcttatgttgaccaatatgtctgatgcagtgaacaatgtggctaatgctcttagagagactggactagcccatgtggatgctaacctctacctatctgtgatggagatgcttggctattctgaggaggcactgattgttgcctacaccttcctcctggacaacaaggcccaaggcaggggctttgttcacatgactgaggcacatagaaacatttggcttaggaccttcctagccaagaactactacatg

SEQ ID NO: 105092 - DNA, 111 bp, Zea Mays
gtaagttgtttttcctacaagtccacaatataccatggtctgcaacctaacaggctaatagtgatacatgaaaagttaaagaatacaacaccagtgtatttctacatcgtt

SEQ ID NO: 105093 - DNA, 623 bp, Zea Mays
ctctctttggagtggacaagtcctctttgcgtgcgaatccggcgcaaacggtgaatttcagccactctctagtttcgttctctctgtcttccgaaagtgaagtgcaggaccggaaaacacagcgatttggcagggtaaaaagctccaacagccacagccgtgatcattatatcctatctatctacgctccaggctttgaggtgggtattcgaccgccaagcgccaactgcttagctcactcgtacatcgccacatcggtgaagtggtgtcgtggtgaccatggcgcctggcctcctcgctgccgccgccgtgctggccgcggtggcggcgtccctcgcggcccacgtcgcgctcaactgccccgtgcagccggtgccgtcgcatcgcccgccgcccactccgccgcccaacaacctactacaggttaacgaaccgtcccgcgaaaacctttgatcgttcttgccattacgtttccgttcgcgcgcgcgtgcgtgagtgacgctgggggcgtgcggaaacaaattaaaattgttacgcgcgcgccgccgtgcagaggctggagaagctcggggaaggggcgctggacgcgccggaggacgtgtacgtggacgcggcggcgggcg

SEQ ID NO: 105094 - DNA, 1615 bp, Zea Mays
ctctctttggagtggacaagtcctctttgcgtgcgaatccggcgcaaacggtgaatttcagccactctctagtttcgttctctctgtcttccgaaagtgaagtgcaggaccggaaaacacagcgatttggcagggtaaaaagctccaacagccacagccgtgatcattatatcctatctatctacgctccaggctttgaggtgggtattcgaccgccaagcgccaactgcttagctcactcgtacatcgccacatcggtgaagtggtgtcgtggtgaccatggcgcctggcctcctcgctgccgccgccgtgctggccgcggtggcggcgtccctcgcggcccacgtcgcgctcaactgccccgtgcagccggtgccgtcgcatcgcccgccgcccactccgccgcccaacaacctactacagaggctggagaagctcggggaaggggcgctggacgcgccggaggacgtgtacgtggacgcggcggcgggcggggcgctgtacacggccacgagggacggctggctgcagcggatgatgcaccccaacaacggctcctgggagcggtggcgcttcgtcggcggcacgggcctgctcggggtcgcgccgtccgccgacggcaccatgctcgtctgcgacgccgacaaggggcttttgagggtcggtgacgagggagtgacccttcttgcttcggaggtcgagggctccccgatcaggttcgcggacgcggcgatcgaggcatccgacggcacggtctacttcagtgacgccagcaccaggttcggcttcgaccggtggttccacgacttcctagagttcagctccaccggccgcctgctccggtacgacccgcgcagcggcgagacgtccgtcgtgctcgaccgactcggcttcgccaacggcgttgcgctgccgagggacgaggccttcgtcgtcgtctgcgagaccatgaggttcaggtgcatcaaagtgtggctgaaaggggataaggccggcgaggcagagacgttcgtcgaccttccggggtggccggacaacatccgcctcgggtcagacggtcacttctggattgccgtcctccagctgaggtcgccatggctggacttcatcacccgctggaccttcacgaagagagtggtggcctcgttccccgcgctcagcgagtggagcaagggggcggcgaagggagccatggtcgctcaggtgtccgaggacggcaccatcctccgcgtgctcgacgactcccaggggaaggtgatcaacttcgtcacgtcggtgacggagttcaacggggacatcttcctcggcagcctcgcgaccaacttcgtcggcaaactatctctggcgcgggtggcacagaagcagggagcagtatcttcgtagacgtttgggttcttcatgtcagtttagccctgtttgtttatcctttatattatataatccagtttaaataagttaatagacaaacaaacaaaacaggttattagatgtattgtataatctagatacctagattatgataatacataaacagataattatgtgcttattatataatccataagctagattatataattctgaaaggaaaaaaaaaccttaatcaagggaacat

SEQ ID NO: 105095 - DNA, 765 bp, Zea Mays
ttctattgttattttattcaccttgccggatttgacgtcatcacgatgtcacccctgacatcacatatacgtgatccttgctagccgatcctatctcctttagttctggggcgtataaatatacgcgggttgtgactccctcggccatcgtcgagactcgtgaggcctccgagcaagcagcggagagatcaaactgagagatggagagagaaagccagatgccgctgctgtgttggccaccaccaccgactggggcaagagagaaggagagaaggaagatgccgtggtgaccggcggtacggatcttcttcacgcgcgaggtattgggatggatgcactcggttcgttggtcgacggcgagcttcgatgcttgcgttgtcgtcggggggacggagaaggacctcgtggccaccagaatttctcacccatgccgctgctccgccgcggaaccactagcgccgtggtcggagaatatcagcatcctcaccattggtacgtgaacctatatctgttgttgggatctcgtctccgtgtagcgctccccggattgggatctagagcacaggaccgccatccagtaggctcaccggcgatgcctcgtcgtggcctcaggcagcgccaccgttaccaggcttgggcgatgggggtggaatatgggccgtcaatcccagatgaagggctgggatttgatcccggattctggtttggcctgaactcttctcggtcgtccgatgtggatccggcgcgtgataatcgacctaagga

SEQ ID NO: 105096 - DNA, 3888 bp, Zea Mays
atggaggacttcgcgcgcgcggtggaggacgggctcaagctctcgaagcggctcgtgctcccgggaggggtgccgccgccgcgcccgccggcggggatggagcgcaccatgtcgtccgcctcggcgtcgggtcccgacccgcggctgctccccacggcgccgatggcctacgcggtggtcaccgacccggccgccatcgacacccccgacgtgcccagctaccaaccctacgtctacggccacctcgacccgcccgcgctcatcccgctgcagatgaaggaggtcgacttggccgtcgactgcgcgctcgacgccgcgcacgtcaccctgcgcgcgcgctggtggctgcactgcatcacgcgaagccgcgactgcgacgtgcgcctcgtcgtgcccttgggcgagcaggagcagggttcaattctaggcgctgaggttactgtcggaagaagatcatataatacccaagtaatcgaagtagaagaaactttggagaatcatgcaaaaattgagagtggtggccttctgaagccacatctgtttttcttgacaatatctcaggttgagggaggagcagatatctgtgctacatttcgatggtctcagaagttactatatgatagtgggtgtttctctgttgacatacctttccattttccatactttgtcaacccattaccaaaagtgttcatgaagagggaaaaagttcagttgactgcgaacactggtttcagtaaagaggtttttctgcaaggaacaagccacccgttgaaggaaaagagtaggcaaggagataaattgtttttcctgcatgaagccattgttgagaattggtcgagcaaagtttttaatttttcgtacagtgtttactcaggtgatttgtctggtggtgtgtttgtgcaaccctcaatattatgtgactatgatgatagagatagcttctgcatttttcttttacctggaagtggcaacagaaaggtattcagaaaagcagttgtgtttgttgttgacacaagtggaagcatgcaaggaaagcctcttgagaatgtcaagcatgcagtttctaccgctctttcagagcttgtgcaaggggattacttcaatattataacatttaatgatgagcttcactcattctcttcctgtttggagcaagtaaatgacaaagcaatagcaagtgcaactgattggatgaatgcaaacttagttgctgagggtggcacagatattatgcatcctttgagtgaggcaatggcattactatcaagtgttcatgacacacttccgcaaatatatcttattactgatggttctgttgatgatgagcataacatctgccaaactacaaaaaccgaagtcaccaacagagggtctaaatctccccgaatttctactttcggactaggatcatattgtaaccactatttcctgcgcatgctagcatcagttggcaaaggacattacaatgctgcacttgagacagcatcaatcgagaatcagattgttaagtggttcaggagagcatcaagtacaattgtggaaaatatctccattgatgctatgacacatcttgatgaatttgaagtggattctgagtacattccggacctttcagcaaattctcctttgtgtgtgtctggaaaataccgaggaaaattcccagacacagtgaaagctaaaggttacttagctgacatgaaggaagtcctgattgaactgaaggtccaacaactaaaggaagtaactcttgacaaagtattggtgacacaacatattgatcttatgacagcaaaggcatggctttctgcggccaaacaactggagagaaaggtggggtatttggtgattaaattaagcatacaaaatggtgttccatcggagtacacagatatggtattacttcaaacaaatttggacaatactggaacacaaaaggacgctacaagggaaaatctcgtcacaggattttgggacgtgaactcagcagagaaaattgtgatgctccaaaagggacctggctgttgcagccgcgtcgctgactgcctttgctgcatgtgctgcatcagggcgtgcaacaggatgaacgaccagtgtgctattctgatggcacaggatatgtttgtagatattcaagatgaaaagattttgaaacattttcgaggcttaagaactcggaagataaatttacctcgcaacatcaactcatgctataacctctttttctctcaggtggtccttttcatcggcttgcaagcattcttgccacggagaatcagagaggtacggtgcttgattcggagcattgttgattactgtggaaatgctgggtcagagttgtttgagttggctcctatgttggtcagcaatttgggtcagtcaatgaccctgttacaagtttatgctgcagtcatccgtatttttgtagagtcttcgatgtttgaggacgctcttctcacttatattcaggccaagaacattggtgttgacagacgtttgtgcaatttcttgttgaagtgtttagttgaggggaatcaaatcatgtacgctaggagcttatttgatgacatgaaaagttgtggtccttcacccaatgtctgctcttattcaattttgatgagtatgtacacacatggagagagatcatgcttggaggaagcttttgagcttctttgtgaaatggaatcaaatggtgtgagaccaaacgctacaacatatggaacttatctctatgggctttgccgttccagacaggtaacatctgcatgggactttcttcaaactctttctcagagtggaggcccttgcagcaattattgtttcaatgctgtgattcatggtttctgttgtgaaggtcaggttgacaaagccatagaggtatttcatggaatgaagaaatgtgggtatgtaccagatgtccatagctacagcatattagttgatgggttatgcaaacaaggggatttattgaaaggttatgatatgcttgaagaaatggcaagaaatggaatatgtcctaatcaagtgagttacagttcacttctgcatggcctttgcaaaactggacaggttgcattggcattgaagattttcaagaatctccaagaccatggttttgagcatgaccagataaattacagcatcattcttcatggctgttgccaacacttagatctcaaggccatctctgacctttggtttgacatgattcatcataatatcgctccagatgtttacaactataccagtctgatctacgcattatgtagacatagaaacctccaagatgcattgggagtgtttgagctcatgcttgaaaatgggttgtctcccaacatcgtgacatgcacaatcctagttgacagctttagcaaacaagggctagttggtgaagctttcctattcctggatagaatgcatcagtcattgggaatcgtcccaaacctttgcatgtacagagttatgatcaatggcctttgcaagaccaacaaatatagtggtgtgtggaatgtttttgcggacatgataaagaggggctatgttcctgatgttgtcctgtacagtattattattgagggcttcgtgaaagctctgaagttgcaggaggcgttaaggttgtaccataagatgttggatgaaggtgtaaaacctaacatatttacgtattctagcctcataaatgggctgtgtaatgatgatagacttcctgaagctatgggattgattagggatatgattggggaagacctgttacttgacaatgttttgtacacatctatcattgcttgttattgtagacgtttaaatatgaaggctgctatggaaatggctcaaagagatggaaagaagcggtgtgttgccagatgcttttgtatatacttgtatgattga

SEQ ID NO: 105097 - DNA, 4330 bp, Zea Mays
atggaggacttcgcgcgcgcggtggaggacgggctcaagctctcgaagcggctcgtgctcccgggaggggtgccgccgccgcgcccgccggcggggatggagcgcaccatgtcgtccgcctcggcgtcgggtcccgacccgcggctgctccccacggcgccgatggcctacgcggtggtcaccgacccggccgccatcgacacccccgacgtgcccagctaccaaccctacgtctacggccacctcgacccgcccgcgctcatcccgctgcagatgaaggaggtcgacttggccgtcgactgcgcgctcgacgccgcgcacgtcaccctgcgcgcgcgctggtggctgcactgcatcacgcgaagccgcgactgcgacgtgcgcctcgtcgtgcccttgggcgagcaggagcagggttcaattctaggcgctgaggttactgtcggaagaagatcatataatacccaagtaatcgaagtagaagaaactttggagaatcatgcaaaaattgagagtggtggccttctgaagccacatctgtttttcttgacaatatctcaggttgagggaggagcagatatctgtgctacatttcgatggtctcagaagttactatatgatagtgggtgtttctctgttgacatacctttccattttccatactttgtcaacccattaccaaaagtgttcatgaagagggaaaaagttcagttgactgcgaacactggtttcagtaaagaggtttttctgcaaggaacaagccacccgttgaaggaaaagagtaggcaaggagataaattgtttttcctgcatgaagccattgttgagaattggtcgagcaaagtttttaatttttcgtacagtgtttactcaggtgatttgtctggtggtgtgtttgtgcaaccctcaatattatgtgactatgatgatagagatagcttctgcatttttcttttacctggaagtggcaacagaaaggtattcagaaaagcagttgtgtttgttgttgacacaagtggaagcatgcaaggaaagcctcttgagaatgtcaagcatgcagtttctaccgctctttcagagcttgtgcaaggggattacttcaatattataacatttaatgatgagcttcactcattctcttcctgtttggagcaagtaaatgacaaagcaatagcaagtgcaactgattggatgaatgcaaacttagttgctgagggtggcacagatattatgcatcctttgagtgaggcaatggcattactatcaagtgttcatgacacacttccgcaaatatatcttattactgatggttctgttgatgatgagcataacatctgccaaactacaaaaaccgaagtcaccaacagagggtctaaatctccccgaatttctactttcggactaggatcatattgtaaccactatttcctgcgcatgctagcatcagttggcaaaggacattacaatgctgcacttgagacagcatcaatcgagaatcagattgttaagtggttcaggagagcatcaagtacaattgtggaaaatatctccattgatgctatgacacatcttgatgaatttgaagtggattctgagtacattccggacctttcagcaaattctcctttgtgtgtgtctggaaaataccgaggaaaattcccagacacagtgaaagctaaaggttacttagctgacatgaaggaagtcctgattgaactgaaggtccaacaactaaaggaagtaactcttgacaaagtattggtgacacaacatattgatcttatgacagcaaaggcatggctttctgcggccaaacaactggagagaaaggtggggtatttggtgattaaattaagcatacaaaatggtgttccatcggagtacacagatatggtattacttcaaacaaatttggacaatactggaacacaaaaggacgctacaagggaaaatctcgtcacaggattttgggacgtgaactcagcagagaaaattgtgatgctccaaaagggacctggctgttgcagccgcgtcgctgactgcctttgctgcatgtgctgcatcagggcgtgcaacaggatgaacgaccagtgtgctattctgatggcacaggatatgtttgtagatattcaagatgaaaagattttgaaacattttcgaggcttaagaactcggaagataaatttacctcgcaacatcaactcatgctataacctctttttctctcaggtggtccttttcatcggcttgcaagtaagattggtccatgaagtgtagtttatgcacagctcatccctgcttctggtggtactgtcaatgtaaggaggggatcagcatcccttgtctatgcgccgggcggccccattgtttctgcaccaagcccgtgtaatcaggagctattgcccagtgacgcacctttcctctcaggcttgttggttgaacagctctgataatgaagagcccagtcagagtttcgcttacggtgattatagaagtcgtcgtctgcttcccttgatcacacaagcattgcgggcttcgaactgggacgctgccagaaatataagcttcagggagtgtgtgaggttatacgggtcatctcaatcagttggtttgtttgctttgatcatgcaggcattcttgccacggagaatcagagaggtacggtgcttgattcggagcattgttgattactgtggaaatgctgggtcagagttgtttgagttggctcctatgttggtcagcaatttgggtcagtcaatgaccctgttacaagtttatgctgcagtcatccgtatttttgtagagtcttcgatgtttgaggacgctcttctcacttatattcaggccaagaacattggtgttgacagacgtttgtgcaatttcttgttgaagtgtttagttgaggggaatcaaatcatgtacgctaggagcttatttgatgacatgaaaagttgtggtccttcacccaatgtctgctcttattcaattttgatgagtatgtacacacatggagagagatcatgcttggaggaagcttttgagcttctttgtgaaatggaatcaaatggtgtgagaccaaacgctacaacatatggaacttatctctatgggctttgccgttccagacaggtaacatctgcatgggactttcttcaaactctttctcagagtggaggcccttgcagcaattattgtttcaatgctgtgattcatggtttctgttgtgaaggtcaggttgacaaagccatagaggtatttcatggaatgaagaaatgtgggtatgtaccagatgtccatagctacagcatattagttgatgggttatgcaaacaaggggatttattgaaaggttatgatatgcttgaagaaatggcaagaaatggaatatgtcctaatcaagtgagttacagttcacttctgcatggcctttgcaaaactggacaggttgcattggcattgaagattttcaagaatctccaagaccatggttttgagcatgaccagataaattacagcatcattcttcatggctgttgccaacacttagatctcaaggccatctctgacctttggtttgacatgattcatcataatatcgctccagatgtttacaactataccagtctgatctacgcattatgtagacatagaaacctccaagatgcattgggagtgtttgagctcatgcttgaaaatgggttgtctcccaacatcgtgacatgcacaatcctagttgacagctttagcaaacaagggctagttggtgaagctttcctattcctggatagaatgcatcagtcattgggaatcgtcccaaacctttgcatgtacagagttatgatcaatggcctttgcaagaccaacaaatatagtggtgtgtggaatgtttttgcggacatgataaagaggggctatgttcctgatgttgtcctgtacagtattattattgagggcttcgtgaaagctctgaagttgcaggaggcgttaaggttgtaccataagatgttggatgaaggtgtaaaacctaacatatttacgtattctagcctcataaatgggctgtgtaatgatgatagacttcctgaagctatgggattgattagggatatgattggggaagacctgttacttgacaatgttttgtacacatctatcattgcttgttattgtagacgtttaaatatgaaggctgctatggaaatggctcaaagagatggaaagaagcggtgtgttgccagatgcttttgtatatacttgtatgattgatggctatagtaaacttcctgcaatggatgctgcacgcttgatgatggaagaaatggaaaaaaga

SEQ ID NO: 105098 - DNA, 3380 bp, Zea Mays
tttcgagcgatcggtttttttagtcgcgggatttgggtggaagtggaaaccgcgccgcgggggtcttttaagcgcgtgggggcgcggcgtgctcacacgaggcccgcgctcacgagccagagaagaagggagaggagaggctaaccaccgcggcagctgcgacctgcgaccgcgaggagtggcgcacgacgaccagcgcggaggaggtggagccggcggcggggagatttgctcgcccggctggggttgcggtgggaggagggtaggaggcagagacaaccagcgatggcggcgtccgcgaggcccggggagagggcgaccagcttcgccgtcgcgtgcagcctcctcagccgcttcgtccgccagaacggcgccgcgcccgcccagctaggcctcgggatcaaaggcgaggtcgagcagcaaaggacgccggcgacaattaacttgctccccggagcggacggcgaggagaccgagaggaggaaggagaccatggagcttttcccgcagagcgccgggttcggtgtcaaggatgccgctgctgcccctagagagcaagaaaataaagagaagcctaaacagctcacaatcttctatggcgggaaggtgctggtgtttgacgatttccctgccgacaaggcaaaggacctgatgcagctggccagcaagggcggccctgtggtacagaacgttgttttgcctcaaccctctgcacctgctgctgctgtcaccgacaaggccgtgccggtccccgtcatcagcttgcctgctgctcaggctgatgctaagaagcctactcgcacaaatgcctctgatatgccaattatgaggaaggcttctcttcaccgcttccttgagaagagaaaggaccgtctcaatgcaaatgcaccataccaaacttctccttcagacgctgcaccagtcaagaaggagcccgagagccaggcatggctcggattaggaccgaatgccgtcaagtccaacctgaacctgagctagcacacaacgacacagccaaataagacggcacagcaaacctcaccaaagcctttgcaggacgatctgaaaatatgctttgccactagagtaccgaaaccataaatatcctctcgttatcgtgttttagtgttctgtttaggccgtggtcctacgccctcttgtcacatagttctggatgtaaagataagtagccagccatgaccgagagaaggttttttttggggggtgttaacacacggccactctgaattggccatgctaaggaaaatgatagtagtgcaaagagaagtatatgtctttttctttttctgaaagcccagatcgtttggctctagccttgatgtatgcagaacaagtgattgtaatggattctgagtatcctcatcgtcttattgttgcttcaccaacccaagtttgtttgggttcttgccattcctgctgcagcaaatatctctgatagtttatggtagcaactcgagcaatataagagagagagagagagagagagagagagagagagagagagagagagagagagagagagagagagcattacccgcacaatggatatttgagtctgtaaaaaaagttaacttgaaatggcttacgaggtagttttagcctaataatcatgcagatagatacagccatagcaggaagcagcacacgaatcagagaggcggtaggttgagtggcgttgtccggttgaagtgaaggtagctgaggaggaagatgcacacacggacacgggcatgacacttgtcgctcatgctcggattcttttctttgataaaaaaagggcaggagcacatgtgagaaatagggaggatggagtctttcttcttcctgacacctaacgcaacgcgtcaaatatataatactactccaatagaccaatactctactctatggattctttttttttctctccagcctttgattgtttctcgtggaaagtttctgcgcctttgatcattggttccttgactgaatttcgtccaaaaaaaagggttccgcgagtgcgccgaggtctacatagaaatgaatctaaaaccactgcatataaataacaagtgcagtagccatatgatttgcttctgctggtgtactaaacaactgctgctgctgctgctcacaatccaacccccacaacacaatgcatgcacgcaaaaccataatattaatacaagtgcagtagacatattatttctttgcgtgaggcgcatgaacaaccaaaactaaaccatgcatgcaatgcaatgtcgtccaaaaaaggggatagccatgtgcggatttgctgcccttagagcaaaacctgtctatttctctgtggaaaagagaaggaaaactgcgtaccgcccgctggtcgtcactccaggcaacagtggtagtatatcatgtcatgtccttcaattgtagtgtctggtgtccgaattttttgttttttagctcattttgtgacacaaatttacgtttggacccccagaaattttatttgcacgtttggacccgatgctcagcgccataggctgtggcgccgaggtaacacagctcggcgccgagctgtgacgtggcagcaacggctacttgcgcctagggctgacctggcaccgacgtggggcgacgcggcctcgtagctcggcgccacagatcttggcgccgagctacgaatgcctataaaaacgcccgcgcggctggccgagagcagcgcatttcctctcatttccaaacttcgtcaaaatttgctggattcaaagatttgagttggttcacttcgtagaccaagatatgatgcccaacttgattcgttttgtatattgggttgttagtttcatagttgctcatagtttcatattttaatagtttgtataaacctattatattatcatttcgattattagtttgtgtaaacttattataaagcatattaggtacaagtgataattataatcgtttattagatgaaagacatgtaccgagagacgttgtggcagaagagaggtcgtcctcgggagttatatccggacgtatctagtaaggatgctcctgttcctcctgaactccccgtgcctaactgtgactgtggcagactggcttgggtacatcaatcacaacatccagacacggttgttcgctgttactacctttgtggcggtttagacgtacgtagcttatgacttgtcacttaattttgttcacattcattattttgtagatgtgtaatagtgcttctttccattattttagggacatcagaggtgtttctttttccaatggatcgacggtcctgataaatttgaccctcgatatcttcttttcgttaattggttgagtggaaggactagtcatgagcgttttaagcgttgggtacctcctccccc

SEQ ID NO: 105099 - DNA, 1412 bp, Zea Mays
tttagtcgcgggatttgggtggaagtggaaaccgcgccgcgggggtcttttaagcgcgtgggggcgcggcgtgctcacacgaggcccgcgctcacgagccagagaagaagggagaggagaggctaaccaccgcggcagctgcgacctgcgaccgcgaggagtggcgcacgacgaccagcgcggaggaggtggagccggcggcggggagatttgctcgcccggctggggttgcggtgggaggagggtaggaggcagagacaaccagcgatggcggcgtccgcgaggcccggggagagggcgaccagcttcgccgtcgcgtgcagcctcctcagccgcttcgtccgccagaacggcgccgcgcccgcccagctaggcctcgggatcaaaggcgaggtcgagcagcaaaggacgccggcgacaattaacttgctccccggagcggacggcgaggagaccgagaggaggaaggagaccatggagcttttcccgcagagcgccgggttcggtgtcaaggatgccgctgctgcccctagagagcaagaaaataaagagaagcctaaacagctcacaatcttctatggcgggaaggtgctggtgtttgacgatttccctgccgacaaggcaaaggacctgatgcagctggccagcaagggcggccctgtggtacagaacgttgttttgcctcaaccctctgcacctgctgctgctgtcaccgacaaggccgtgccggtccccgtcatcagcttgcctgctgctcaggctgatgctaagaagcctactcgcacaaatgcctctgatatgccaattatgaggaaggcttctcttcaccgcttccttgagaagagaaaggaccgtctcaatgcaaatgcaccataccaaacttctccttcagacgctgcaccagtcaagaaggagcccgagagccaggcatggctcggattaggaccgaatgccgtcaagtccaacctgaacctgagctagcacacaacgacacagccaaataagacggcacagcaaacctcaccaaagcctttgcaggacgatctgaaaatatgctttgccactagagtaccgaaaccataaatatcctctcgttatcgtgttttagtgttctgtttaggccgtggtcctacgccctcttgtcacatagttctggatgtaaagataagtagccagccatgaccgagagaaggttttttttggggggtgttaacacacggccactctgaattggccatgctaaggaaaatgatagtagtgcaaagagaagtatatgtctttttctttttctgaaagcccagatcgtttggctctagccttgatgtatgcagaacaagtgattgtaatggattctgagtatcctcatcgtcttattgttgcttcaccaacccaagtttgtttgggttcttgcc

SEQ ID NO: 105100 - DNA, 557 bp, Zea Mays
cattacccgcacaatggatatttgagtctgtaaaaaaagttaacttgaaatggcttacgaggtagttttagcctaataatcatgcagatagatacagccatagcaggaagcagcacacgaatcagagaggcggtaggttgagtggcgttgtccggttgaagtgaaggtagctgaggaggaagatgcacacacggacacgggcatgacacttgtcgctcatgctcggattcttttctttgataaaaaaagggcaggagcacatgtgagaaatagggaggatggagtctttcttcttcctgacacctaacgcaacgcgtcaaatatataatactactccaatagaccaatactctactctatggattctttttttttctctccagcctttgattgtttctcgtggaaagtttctgcgcctttgatcattggttccttgactgaatttcgtccaaaaaaaagggttccgcgagtgcgccgaggtctacatagaaatgaatctaaaaccactgcatataaataacaagtgcagtagccatatgatttgcttctgctggtgt

SEQ ID NO: 105101 - DNA, 4849 bp, Zea Mays
acgcgtggtcatcggattcggccgcgtgccggcgagatccgggccgtcgcagcacggtccggcagacgccgcaatccgcgatcctgtcgccgcgggagctgcattggcgccccacgcggccgttccggcgtttcttgggaggttgcggcggggggaggagctcgtgtccgggatccgccagatccgagaacgtcggcggtagtagcagtggcgggggtcgccatggaggcccacgcgccgctcgacttcgcgctcttccagctctcccctcggcgtcagcggtgcgagctggtggtgtgcggcaatgggcggacggagaagatcgcgtcagggtcggtgaagccgttcgtggcgcacctgcgggctgtggaggaacaggcgtcggctcagccaccgccgccggccatccggctgcagctggaccggcccgccccgtggtttagtaagggcacccttgagaggttcgtgcgcttcgtgagcacgccagaggtgctggagttgacgagcacctatgatttagagatgtcgcagctggaaggggctaggaagatatatgcgcagggaggtactggagacgctacctcaggtggaactgtgtggtctttcatatctgctgtgtctgaatctaatttatgtaatatctggccatgcttattggcagctgaaaatgttacaggctcagcagcggcggtggcagcagatattacaaagaaagaacttcttagggcaatcgatgtgcgtctaagcacccttaaacaagatctggctgcagcttgttctcgagcatcctctgctgggttcaatccgaacagtgtatctgagcttcttcttttcgctaaccattttggtgccagtcggctgagcgaagcatgcacgaaattcatgtcactttgccagcggcgtcatgacatcagtcctcaaaccgcacagccagcagtttcatcacactggaaggtctttgatgatgggaatgttcgtggttcttccagttcagacatgtctatagatgagccacaagttgatctcggtgaatccaacaacaaatctacagtcggtggaagtggctctcaggtccacagactaagcaacagccaaggcttagaagtcgctgcagaacagcaacccaagccaaccatcccacaggccatagataaacaagaagcagaaacagacgcgtctcccgcacctgctgcaggagggctttcaaggcgtctgagtgtgaaggacaggataaacatgtttgagagccagaaaaaggagcagactccaagttctggtaacagcaactcagcaggtactggtagggtggttccagggagaggtgagcaccgcagggttccttctggggcctccatggagaagttagttagaaggtggagcagtgttagcgacatgagtattgatctcagcaacaatgagagcgttaacataaatgacaaaaaggacaatggaactcctgttgtgactccaacatctactgatttggaggccaactctaaagcaaaagctgatgtggactctaatggacagaaggatttagtcacatcacactcctggccttatcaaaaggataatgtaccaatggatccgactaccacagatttgtgcccaccctcaactttaagtaatacacttgctcctcatagtgatggtgcaggaaacgacatggttataaactctagcattgagagtgagtcatcctttgggaaagaagcgggggttattcaaggactcacaaggatgtcaaatcatgctacttcaaatgtttccactcgaaaccatctaaaatcttctgcaaagccagttgaggaaggcttgctgaaaaataaggatattttaaccagcacatcgttagaggagcatgttcgcatgatagataaggaaataacagctgttcctcatgaagtattagttgcaagtgaacagattccccagaatgatattagaggtctccatacaaaagatattcacactgaatctgaagtgactggaaggaaggatcagccttcacgatcatttggaaaggtatctggtggtgttaatcctaaaccaaaaacatcatccaattcccgagctaatgttaaaggctcatctggtagggctaatgtcaaaggctcatctggtagggatgagattacctttacagaaactgagttccgtgatgttagtttgcagcggaatcgtctaccacggaaggcagaggatgtagggagaaaggttacaggtggttctgattcagattcttctggtcgccagggaacaaatttgagcaggcaatcatccattaccatccaggaactaaacttccaggctagagtgatgggaccaggaaaagggaaccaagatcggcatggcgaattgcaaatgaaggctaatgagttggagaaattatttgctgaacacaagttaatatcatcccgacgaggcaaacctacagatgtgcaggttgatagcacacgtacggtgagtgaggtaaagccgataacagttcttcatgagacaattcatacaaaacaagttgtaaaggagagtataacaaccaatgattttgatgccagtgagcttctgaagatggtgagtaatcaaggatttaacattagcacaccacaaaaacttggcattctaagcttagaagagtcgagagggaagttttatgagcattatatgcagaagagggatgcaaaactgaaggaagactggaaactgcagaggggggagaaggaagcaatgttaaaggctatgcatgagagcctagaacggagcaaggctgagatgcgagctaaattctctcagtctggagatgtttctgactcaacttatgtttatcattgttctcagaagattcctccttcgcgatcagcaagaagaaataatgatcagggggttgactcattcttggttgaagaggaattgaatagtgactacctatctggtgacggttcttccaggagtgctgattctaggaagcattttccaaataaagttgcttccacccaaaaggcatctgttggtcctatccataagcgttcttcaaggactgcaagctccggttatggcaatcgcaggaatctaccagaaaatcctatcgcacagcctgtccccagtttctctgacttaagaaaagaaaatacaaagccttcacctggactcagtagagcggctgcaagagttcagcaaaagtcttttgcccgtagcaagagcattattgaagagtcaaagagtatattgaaagaagatcaatcgaggaggtcacaatctatgaggaagagccaaattccggatgagttgaaggacatttcatcagggaatgaggatatttacaattgggctccatcaagaatttccaagaatcaatcagagggagcttttgcttacagtgcccgtagaacgggtccaccaaagccatttcttaggaaaggcaatgggactcaccccgttataggtatagctggatttcaggctgcagcggctatgatggcgaatgccctccagaatggtgacagtggtgattttgaagatcaccaagatgattctcctgatgatgccaaagaagaagaagaatatgaaagtattgaagaaaattttagagaaagtgactttcctgctgattctgacagtgagaacccaagagttagtcatgaatttggaaattcagatgacccagggtcagaaaatggcgatgctaacttttcaagtgaagcacccgcaattggtggtactaagttcactgcttttacaggaaacgttcatgatccagctagtgatgttccagcaccctggagttctcgtcttccacagctgtccccttacatgaatgataatacagatggtgacacattcgctgattcaccgtgtggaagtccaccatggaattctcattcacttgatgaaataacagatgctgatgtatctcggatgcggaaaaagtggggcagtgcacagatgccttttgctggtgtcagtgcatctcaacagccacgcaaagatgtttccaaaggattgaagaaactgtggaaatttggtaggaagactagagggggtgatggtttagtaaatgattgggtatctgcttccactgcctcagaatacgatgaagacatggaagatgggcgggatctggtagtaggatcttctgatgatttcaaaaagtctcgaatgggttatcttgcttcatatgatgattttgttgaggatgaggtttttgctgaacaagaacaatcactacgcagctcaattccaaacccacctgcaaatttcagaccgagagaagatcaactgactggaagagcgccacgttctttcttctccctgtcaacattccgaagcaagggaggtgatgccaggctcaggtgatcctcagaaagtcagaagacaccagaggtggagtgtataaaatatcttccgaggttaggtatgagtatcaaattttcagggcggtacgcggctagcttgtgattataaatatatatctatatgttgtgtatctatggcaattcatataagctaccagttgagccccccattgttactgtttgattattctttttccgtaatattctttgacctcctgtgtagagttggacttagagatctttttgcagtctgttcttccaactggcccaaaactactgtatttttcgttgtttttgtgatatatatgtatctccctcttgtttcttcattcacatatatcacaaattcaagatatatggtaattttggcaattgtagcatggaaactgggcttattcaaggcacccgcaaagtcacttgttttagtgtgatgagtgtatctgtctttgatctatgtatatatattttttagaaaacttcatcgagttttttttgaa

SEQ ID NO: 105102 - DNA, 1585 bp, Zea Mays
ctcagctcctcctcctcctcatccacagcaagatctaccccaagaccatcaccgatcaacaccatgaccagcaataccataccacacgatcatcatcatcatcgtcaggagatggatcagctgcaagccctggctgtgaagccacaggtgaagaggcaggttaggaggaggaggacgcacacgagcaggccgtaccaagagaatctgctcaacatggcggaggcgcggcgggagatcgtcaccgccctcaagatccaccgggccagcagcaggaggcagcagcaacccaagtaccagcgtcatcaggagccgccgctgcgtcaaccaccgtttgcgcagctccagcaacagcaagaagagccgaagcacgtgcaagaggcgtttctggatccaagtcgaagccaaccggcggttgacgaagaagcatctctggcgcatacgacgatgagttacgcctccttcactaacaacccgttgcgcagctctccacctgcgcactggattgctgcccgtagctactgctcaccaccacccatccttcgtcttccttgtgatatcacgccacctgaactgccgcccactgccgccatggggggattggggttggacttggaccaataccaataccaataccaaggcggcttggagcgtttggttcgtagcctacctgcacagccgctaggactgaaccttagcttccaaggttttggtgtctctgtggacgatggtgccaaggaagatctccttgctcttccattgacccaaccgtcaccggctgcctcgtactcgtgctcacctccggcagtggagacggcgaccacccatgcctgtgccccgtcaccagcgctcagtgcaacggacgcagagaaccaggtgatcgatgcaccaccagcagcggcgttggtcccggccctggacggggagatggcgcagcaggcatcggtcggcggcgagatgcagggcgtggagtggagcgaggcggcggccgcggacgtggccgcgtgctggagcaagatcttcgagagcgtggagaacggccagggccagcacgcgccccgcccaaacgcggaggacgtggcggcggcggcggccggtttgccgatggagtggtggtggctgtgtggcgacgatgccggtgtcggcgagcaagcggggtcggtcacgggaggcaagccctcgccggatgttctggggaggagggtgcatgtcgacgacggcgacggcgactacagctgctgctacgactacgagggcggtcgcagaagcaacgacgacggcgacgaagtcaccttgccgtgcatggacgacatcggcgacgacactcaagggtgggatggggaatggttctcatgcccttgaatcttgattaactgctcgatcaagatgttcatgtatgtgattcgatataaaaacgtggtacttaaattaatcaggttgctagtaattgccaatgaactggttttcaccatgcaaggtaacagatacaacaatttagaccaatttattatttattattaagcttcaagttcttcaccaaggtcataactatcagagttcctctagtagtttagaagatgatcaaacc

SEQ ID NO: 105103 - DNA, 1042 bp, Zea Mays
gaagcattgctgtcaatttgactctaggtgcaaatatcaggctgcggccggcactggctttgtcctctaccttagtttctgacatcatcacatcgcaccgagggcgaggaggcaaaggaataacctgtgaagctgctgccatccactcatctttctgccttgattgcagtcattcctcccccaagtccatagagtgatagagaatggaggataatctaccagttaatgtccgggaatatcaagaacttgctaagaaagcactaccaaagatgcactatgattatatcaacggaggagcagaagatgaatatacactgagggagaatattgcagcatatggaagaattctgttacggccacgagtccttatagatgtgagcaaagatagacatgtcaacaagcttattaggatataatatgccatcgccaataattgtcgcacctacaggggcacacaaattagccaatcccgaaggggaggtggccacagcaagagctgccgcagcatgtaacaccataatggtaactttctgatttttatgtgtgtgttgagggggtgtcttctggtgagtggtgatgtactcaactttaggccctctgtagattgttacacgtgttcatatatgtcatgcagatgctttccttctcatcaagctgcaggatcgaggaggttgcctccagttgcgacgctattcgcttttatcagttatatgtatgatgccttgccattgattttttttagtaaattccactttctggtgttacctgatttctggaagttttcatcgtgtaccttaggtgtacaagagaagggatgtttcggcaacattggtacggcgggctgaaagtttaggattcagggcaattgttttgacagttgacacgcctgtgcttggcaggcgtgaagctgatatcagaaataagtacagcgcttgtatcgttaatgaaatctcctaaaattgagggaaattatgttcatttacaaaattcataattccagtttcctaacccgttgctactgaaggttaaaattttaagctac

SEQ ID NO: 105104 - DNA, 1389 bp, Zea Mays
gaagcattgctgtcaatttgactctaggtgcaaatatcaggctgcggccggcactggctttgtcctctaccttagtttctgacatcatcacatcgcaccgagggcgaggaggcaaaggaataacctgtgaagctgctgccatccactcatctttctgccttgattgcagtcattcctcccccaagtccatagagtgatagagaatggaggataatctaccagttaatgtccgggaatatcaagaacttgctaagaaagcactaccaaagatgcactatgattatatcaacggaggagcagaagatgaatatacactgagggagaatattgcagcatatggaagaattctgttacggccacgagtccttatagatgtgagcaaagatagacatgtcaacaagcttattaggatataatatgccatcgccaataattgtcgcacctacaggggcacacaaattagccaatcccgaaggggaggtggccacagcaagagctgccgcagcatgtaacaccataatgatgctttccttctcatcaagctgcaggatcgaggaggttgcctccagttgcgacgctattcgcttttatcagttatatgtgtacaagagaagggatgtttcggcaacattggtacggcgggctgaaagtttaggattcagggcaattgttttgacagttgacacgcctgtgcttggcaggcgtgaagctgatatcagaaataagatgattgctccacctctgtcaaaccttgaaggtttaatgtcattagacgactttgacgatgctgaaggcggctccaagctggaacgattctcacgggagacgctggatccatcattgtcatggaaggacgtggagtggctcaagtccatcaccagcctgccgattctgctcaagggcatcgtcaccgcggaagacgcgaggaaggccgtggaggcgggggcggccggcttgatcgtgtccaaccacggcgcccggcagctggactatgcgccggccaccatctcggcgctcgaagaggtggttaaggcggtggcgggggctgtgccggtgctggtggacggcggcgtccggcgcggcaccgacgtgttgaaggcgctggcgctcggcgccaaggcagtcatggtgggcaggccggtgttctttgggctggcggcgcgcggggaagccggcgcgaggcacgtgatcgagatgttgaacaaggagctggagttggccatggcgctctgcggctgccgtagcgtcgcggaggtcaccagggcgcacgtccagaccgagggcgaccggatcagggccctgctgtgacttataaataagcgaccatatccgaggccgaccaccgtgctgtctgggttgcgatatgatttatatgatacgtgagggcat

SEQ ID NO: 105105 - DNA, 1607 bp, Zea Mays
gacatcatcacatcgcaccgagggcgaggaggcaaaggaataacctgtgaagctgctgccatccactcatctttctgccttgattgcagtcattcctcccccaagtccatagagtgatagagaatggaggataatctaccagttaatgtccgggaatatcaagaacttgctaagaaagcactaccaaagatgcactatgattatatcaacggaggagcagaagatgaatatacactgagggagaatattgcagcatatggaagaattctgttacggccacgagtccttatagatgtgagcaaagatagacatgtcaacaagcttattaggatataatatgccatcgccaataattgtcgcacctacaggggcacacaaattagccaatcccgaaggggaggtggccacagcaagagctgccgcagcatgtaacaccataatgatgctttccttctcatcaagctgcaggatcgaggaggttgcctccagttgcgacgctattcgcttttatcagttatatgtgtacaagagaagggatgtttcggcaacattggtacggcgggctgaaagtttaggattcagggcaattgttttgacagttgacacgcctgtgcttggcaggcgtgaagctgatatcagaaataagatgattgctccacctctgtcaaaccttgaaggtttaatgtcattagacgactttgacgatgctgaaggcggctccaagctggaacgattctcacgggagacgctggatccatcattgtcatggaaggacgtggagtggctcaagtccatcaccagcctgccgattctgctcaagggcatcgtcaccgcggaagacgcgaggaaggccgtggaggcgggggcggccggcttgatcgtgtccaaccacggcgcccggcagctggactatgcgccggccaccatctcggcgctcgaagaggtggttaaggcggtggcgggggctgtgccggtgctggtggacggcggcgtccggcgcggcaccgacgtgttgaaggcgctggcgctcggcgccaaggcagtcatggtgggcaggccggtgttctttgggctggcggcgcgcggggaagccggcgcgaggcacgtgatcgagatgttgaacaaggagctggagttggccatggcgctctgcggctgccgtagcgtcgcggaggtcaccagggcgcacgtccagaccgagggcgaccggatcagggccctgctgtgacttataaataagcgaccatatccgaggccgaccaccgtgctgtctgggttgcgatatgatttatatgatacgtgagggcatgtgatcgattgttgcctccacacagataagcttactattgccagagcctgggctggactatgctttcagtgattatctaaatcaaatagactgaatgctaaagggaacatccaatggtgtccatctatatagcatttgttggagtcacatgtagccatttgactgcccatcattaaggcctgaagtcaagagctcaatcaccctgaatccccttcaacgaagaagcccgtaacgtacaagatcgtccggcactccgagagaagctggacgccgtccgcatgtcgtttggtgccgcccc

SEQ ID NO: 105106 - DNA, 866 bp, Zea Mays
catcatcacatcgcaccgagggcgaggaggcaaaggaataacctgtgaagctgctgccatccactcatctttctgccttgattgcagtcattcctcccccaagtccatagagtgatagagaatggaggataatctaccagttaatgtccgggaatatcaagaacttgctaagaaagcactaccaaagatgcactatgattatatcaacggaggagcagaagatgaatatacactgagggagaatattgcagcatatggaagaattctgttacggccacgagtccttatagatgtgagcaaagatagacatgtcaacaagcttattaggatataatatgccatcgccaataattgtcgcacctacaggggcacacaaattagccaatcccgaaggggaggtggccacagcaagagctgccgcagcatgtaacaccataatgatgctttccttctcatcaagctgcaggatcgaggaggttgcctccagttgcgacgctattcgcttttatcagttatatgtgtacaagagaagggatgtttcggcaacattggtacggcgggctgaaagtttaggattcagggcaattgttttgacagttgacacgcctgtgcttggcaggcgtgaagctgatatcagaaataagtacagcgcttgtatcgttaatgaaatctcctaaaattgagggaaattatgttcatttacaaaattcataattccagtttcctaacccgttgctactgaaggttaaaattttaagctactatcttataccatattgtagatcgttgatacatttatgcggagcattgcagtagcttcaacatcagaatgttgcaaaaaaacaatcccattttcttttatcttg

SEQ ID NO: 105107 - DNA, 1746 bp, Zea Mays
catcatcacatcgcaccgagggcgaggaggcaaaggaataacctgtgaagctgctgccatccactcatctttctgccttgattgcagtcattcctcccccaagtccatagagtgatagagaatggaggataatctaccagttaatgtccgggaatatcaagaacttgctaagaaagcactaccaaagatgcactatgattatatcaacggaggagcagaagatgaatatacactgagggagaatattgcagcatatggaagaattctgttacggccacgagtccttatagatgtgagcaaagatagacatgtcaacaagcttattaggatataatatgccatcgccaataattgtcgcacctacaggggcacacaaattagccaatcccgaaggggaggtggccacagcaagagctgccgcagcatgtaacaccataatgatgctttccttctcatcaagctgcaggatcgaggaggttgcctccagttgcgacgctattcgcttttatcagttatatgtgtacaagagaagggatgtttcggcaacattggtacggcgggctgaaagtttaggattcagggcaattgttttgacagttgacacgcctgtgcttggcaggcgtgaagctgatatcagaaataagatgattgctccacctctgtcaaaccttgaaggtttaatgtcattagacgactttgacgatgctgaaggcggctccaagctggaacgattctcacgggagacgctggatccatcattgtcatggaaggacgtggagtggctcaagtccatcaccagcctgccgattctgctcaagggcatcgtcaccgcggaagacggtaatgaataactagcacaaaatgtactctaccagcggttggatcactggcatgcttggtgctgaaccggagaactggttacctgtatggtcactgtcttgtctcactgaactgtgacgactctgtggcggcgtcgagcagcgaggaaggccgtggaggcgggggcggccggcttgatcgtgtccaaccacggcgcccggcagctggactatgcgccggccaccatctcggcgctcgaagaggtggttaaggcggtggcgggggctgtgccggtgctggtggacggcggcgtccggcgcggcaccgacgtgttgaaggcgctggcgctcggcgccaaggcagtcatggtgggcaggccggtgttctttgggctggcggcgcgcggggaagccggcgcgaggcacgtgatcgagatgttgaacaaggagctggagttggccatggcgctctgcggctgccgtagcgtcgcggaggtcaccagggcgcacgtccagaccgagggcgaccggatcagggccctgctgtgacttataaataagcgaccatatccgaggccgaccaccgtgctgtctgggttgcgatatgatttatatgatacgtgagggcatgtgatcgattgttgcctccacacagataagcttactattgccagagcctgggctggactatgctttcagtgattatctaaatcaaatagactgaatgctaaagggaacatccaatggtgtccatctatatagcatttgttggagtcacatgtagccatttgactgcccatcattaaggcctgaagtcaagagctcaatcaccctgaatccccttcaacgaagaagcccgtaacgtacaagatcgtccggcactccgagagaagctggacgccgtccgcatgtcgtttggtgccgcccc

SEQ ID NO: 105108 - DNA, 1458 bp, Zea Mays
ggtgtctagaagcctcagtaacaacatgggtttcagctatagcagtcttctcgcctttaagacagagaagagattaattcagagttcagaaagaataaaatggaggataatctaccagttaatgtccgggaatatcaagaacttgctaagaaagcactaccaaagatgcactatgattatatcaacggaggagcagaagatgaatatacactgagggagaatattgcagcatatggaagaattctgttacggccacgagtccttatagatgtgagcaaagatagacatgtcaacaagcttattaggatataatatgccatcgccaataattgtcgcacctacaggggcacacaaattagccaatcccgaaggggaggtggccacagcaagagctgccgcagcatgtaacaccataatgatgctttccttctcatcaagctgcaggatcgaggaggttgcctccagttgcgacgctattcgcttttatcagttatatgatgattgctccacctctgtcaaaccttgaaggtttaatgtcattagacgactttgacgatgctgaaggcggctccaagctggaacgattctcacgggagacgctggatccatcattgtcatggaaggacgtggagtggctcaagtccatcaccagcctgccgattctgctcaagggcatcgtcaccgcggaagacgcgaggaaggccgtggaggcgggggcggccggcttgatcgtgtccaaccacggcgcccggcagctggactatgcgccggccaccatctcggcgctcgaagaggtggttaaggcggtggcgggggctgtgccggtgctggtggacggcggcgtccggcgcggcaccgacgtgttgaaggcgctggcgctcggcgccaaggcagtcatggtgggcaggccggtgttctttgggctggcggcgcgcggggaagccggcgcgaggcacgtgatcgagatgttgaacaaggagctggagttggccatggcgctctgcggctgccgtagcgtcgcggaggtcaccagggcgcacgtccagaccgagggcgaccggatcagggccctgctgtgacttataaataagcgaccatatccgaggccgaccaccgtgctgtctgggttgcgatatgatttatatgatacgtgagggcatgtgatcgattgttgcctccacacagataagcttactattgccagagcctgggctggactatgctttcagtgattatctaaatcaaatagactgaatgctaaagggaacatccaatggtgtccatctatatagcatttgttggagtcacatgtagccatttgactgcccatcattaaggcctgaagtcaagagctcaatcaccctgaatccccttcaacgaagaagcccgtaacgtacaagatcgtccggcactccgagagaagctggacgccgtccgcatgtcgtttggtgccgcccc

SEQ ID NO: 105109 - DNA, 408 bp, Zea Mays
atggctctggcgagccccgggcgacggcggtgggcaaagccgggcgcgggcggctcgaggcgcggcggcggcggcgcgctgtgcggggtcggggcaggtccgaattataatttaaatggggacgagggttcccgtcggggatttatccctgcagggaacgaggatgaggaagaaatttccaacgcaaacgttcgtggggattcctgcaaggaaatgttttcgacgcgggaacggaacgtggaatggctgcccatcctgctcaagggcatcctcatcggcaccgaggacggtggcgatatcacttcactgccactgccactgccagaagaatcagagtgcgcaaaaccgtctgccaggcgagacacttgccgaaacgaacagctattacaattcacaaaacaagcgtag

SEQ ID NO: 105110 - DNA, 1377 bp, Zea Mays
cgtcgactccggacgcatcgctcgccatacgatcagccctccgttcgctgtacgggctcgcgggttgcgaccctaatagctgactgattctaggcgccatgtcactgcccgtcgacgccgccatcatccagttcacccagatcctattctcccatgcgccagccggccccgtgggccgtgagtccgtgatccagcgtcccaggacccaggctcccagtaccagcctcttctatccggcatccagcgagcagcaaatccagagacctcgactcctcctaaccctagccgccaggctccagtgctccaccgctccagcagatcccggacccggaagcagcgaggaaacacagggcgaccaaggcccgtctggactctggatccgccggtccgccactccgcccctcatctccgacctgagcgcgccgccctgccccgccccgcctctccctcgagcgctgtccgcgcctccgcgcctccgcggtccgcgtccggccgtccgcccagggcccaggcagttgctgcctgctggcttgctgccgtccgccaggccgcctaggcacacagcacactacttctacagttctacggccagcgcccagcggtccagtccagcttccaaatggctagtgaggactcgaaagatatgctgaagaacgtggactggaagaccgtgggcggtgctgtgactactgaatctagccagccagttgtcaagaaacgccttccgaagaagatcagacaagtccctgagtgctattttctgcctcggcgatctttgccttctgcactggcaatctatggtgccgtgtgtgctgctggagttggtgcaggaatgctgatcgaggtgtggataaacaaaaagatcaaagaggatagtgctattatctgggagatggataaatgatgtgcagttctgcaccacactttgatatggtggaagcagtttcggcactgcgatatttgctagctctcaagttaagaattttgtttataggattccttcgtccgtttgttttattttgattgaggtattgccaagatggattcaagaacgttcatccgcagttcatttaccagaacacgagtaaaaactctggctgctgaaaatatagctccaccacaactctaaaataacttataatttgaaatcgaggaagtatttctgttatcatgctaaataaaatgttgtatattctagttttttttcacatgactccctcggttccttggaagtgcaacacagcacttgcttgtttcaggtttttctctctcttttgcctctattctccacaaatgagaaccgatgctaagggcatgtacaatccacactgtatcttaagggatatatgagggtgtaaatgaaaaaaagaatgatat

SEQ ID NO: 105111 - DNA, 554 bp, Zea Mays
tctcatccatagtcctcccaacttggggcaggattgagtgctgcagcagggcccattggcaggaccagtgaaaagggatctgggatatgctacacttacagctgcagcaaaggtgccttcgttggtgtttcactggaagggaatgtggtgacaactagaatggaaaccaatctccgcttctacggtgatgcataccagacggcaacccatatcctgtttgggagggtggagcggccccgagctgctcagcccttgtttgctagccgatttagggcttcttaagggtggattgaagatgattagagaggattaaatcgattgatagtcaaattaaatagaaagagagttaatccccctcaatccttttctatccgcatgcaaccgatccatgctttagatcattggatggtttcactactgacaccagtccacacattaaatattagcagagtatttagtgttagattattgtagaaattacgatttagacttgtttctaaatgaataattttatatataattagaagatcatgatcggttgagagatccaacgc

SEQ ID NO: 105112 - DNA, 567 bp, Zea Mays
atggcctcctcgccggcgctaccgctggtgctcctggccctgctgctggctcccaccggcctcgccgcgtccggctccggcggcggcggcggaggagagaagcgcacgcgcatccgggtgtacgtgcacgagcggttcaccggccgcaacgcgacggtggggtccgtggcgccgtccctgcgcggcggcaactcgacgttcggcgaggtgggcgtggtcgacgacgtgctgcgcgccgggccccgcgcgtcctcccaggaggtggggcggtaccagggcctgttcgccggcgcggacctcgcggacgacagcggcggcggcggcggctacttctcggccatcacgctcgtgttcgccgccggcgagcaccgcggcagcacgctgtccctgcagggccggtacagcttccccgccgacggcgccctcgagcgcgccgtcgtgggcggcaccggcggcttcaggatggcgcgcgggttctcgctgctccaggtcgccagcgccccgccggaggccgccgtcttccagcttgacctcgtcgtcttcacgccccgcggccaccgatactag

SEQ ID NO: 105113 - DNA, 1991 bp, Zea Mays
caaccggcaaggtggtgcgtgcctaccacgctcgctcgtgacgcgacgatcccacggccaccacctcacgcccaaagccgcggcggcgcctttctctttctcccctccgatccgtgctccgcatgtcaacgcgacgcgaacaaaaaggactccctccatccaccaccggcaccgctgctctgcctgccacacaacgaaggttcgtcgctcccgctcgtataaagccagcgcccctcgcaaagtcgcaccactaagaccaactccagcaacactccgtatcccactccgcatccgcattttgcacggtctgaggcactattgcgcgctccagcaggctccgcatccctctccgcaaaatggacgccgtgtccctgcgctccccatttccacactttctctctcctctccgcagctctctgcgtgcgcgcgcgcctgctggcgggccccaggtgtcatagactgcatgcggagtgggatggggagtgttgctggaaacggagacggatacgaagaggagagagaatgtgttggccgcgcgttttagggatacggagagggagtctgctggagttggtctaactactctactccacatccatccactattttgtcctgcttggattccctccgctccggcctccgtctctctgctgcctagcaagctctgcccgtcgggcatggggcccacgttggacggagctgctggcggaggcaagaagcgcaagcgcgtcccgccgggcctcgccgacctccacgacgacatgctagagcgcgtgctggcgcgcctcccgccggccagctacttgcgcctccggggcgtctcccgccggtggcgcgccgcggcggagtccagcaccttccgcgccgcctgcgcgcgcgtcacggcgcgggacccatggttcctcatgctcgacgaccccgaccaccaggacgagcaacggccacgctacaccgccgccgccgtcgtcttcgacgccgccgagcgcgcctgggcgcggtggcgcggcgcgccggggccccagcggccggtggccgccgcgggagggctcttgctgtaccgcgacccgggcacgggtgacctcaccgtggtcaacccgctcacgggcgcggcccacgcgctcccgccgccgccgccgccggcactgacgcgcgcgctccaggctatcgccatgtacggcgcgccgtaccgcgtggtcctcatcctgggcgagctcccggacctgtccacggtggcgtacgactcgtccacggacgcgtggggcgaggaggcggcgctgtcccggaagccggaggaggagggcggcggcggcggcggcgacggcacggtctacttcctgagcaagtccggcgacgtggtggccaccaccacgcagcggagcgcggcgcggcagtactcgtccgccgtggcgtgcggcgccggcgccgacgccgtggcgtacttcctgagccggtcgggcacggtggtggcctgcgacctggcgcgccgcgcgttcgcggagctgccccggatcctgcccgcgcaccacgagcactccgtcgacgtggcggcctgcggcggcgccgcctacgccgtggtgctctcggagttcctcgacgcggcgagcctccgcgtgtgggagttcgcgcgcggcgcgtggcggcaggtggccgcgatgccgcccgccatggcgcacgccttccgcggcgccaaggcggacgtcaactgcgtcggccacggcggccgcgtcatggtctgcgtcagctccagctccagctccgccagcggctgcttcatgtgcgacgtcaggaccaaccggtgggaggagctcccgcggcgccaaggcggggacggggacggctccacgggattcgtggccgcgctctcgttcgagccgagaatggaggccgccgtctgagtctcaactcttgggcattggctatttctttcgtgcttggcggcattcctggttggtgcccttggagtagtaagcaaagcgtgtagtgtgattcca

SEQ ID NO: 105114 - DNA, 837 bp, Zea Mays
atgtctccaccgtccctcaacgcagttgccgccgcccgggatgcgctccacccccgcccgctaatcgtcaccttgcaactgccgccgcggccgccaatcggcccccaagaaccaaaggatacacaaggccgctgcctgggcttgccgcccttgggtttcttgtcggtgctgctgctctttgggctcctctggccgaagagcttgggcatgaagcatgtgggctgggcgcaaatcgacagcgtccggccgctggtgcccggcgccaagctccacgccgtcgtcgccgcgtgccacagtgattccgtcctcgacctccccttcctctacaacatgtccaggatcgggaactggaagtgggaggatcaccgtccaccgtcgggcgtctgcaagggcacgagcagcggccaggcggtgcttatcagcggctacagcgacggcaaaagcaagttcagcatgagacatgccagtgaggagcagtttagtcggttcttgctttatgaagtggatgcaattagaaaggcgtgtgccagcttggaagagggctaccttcctccagttacattcattgtggtgcaaaagcgccatcacacacgattttgtcctgaagatcattgttcacacaaacagacagatcgacgtggaaatattttgccagatgcaaaacctgaagaactggaaggagaagagttggaatctcagcttctagagcttgttgcagctctttcaatgcatccagtgcatgtcccaggcaacaagcaaccagctcgccctgcttcacagaaagctacagctaaagacgataaattggctgcactgcaagctgaaatggcattatga

SEQ ID NO: 105115 - DNA, 2295 bp, Zea Mays
gataaaccccactctattcttctctcttctctcacttattcctctcctcctcaggttcaaaaaagacagcatctcctcacctctcctctctgctccaaagaaatcacttcctcgttctagatcccgcggagttcagtttgaggggcaagggttgttggatttggatctctctcatcacgtgcccctccctcccctttctcaagtttcaaatcttcatttgcacgggaacttctcttctcaagaagatggtccgcagaagaaatccgtccattattgagggaagcgaaggtgaaatggacaatcaaatcgaaagtgaagaagaaattcatgagaaacgtcctcgcctctttcaaaccggtccagtcaacaggcaggctcaaggtgacagtgagagcagcgctcggccccaaactgttcacgcaacaagaggtgagagatttccctctcttcggcgaaaattcgcagggcaatgccctcgccgtgtggcagatccaaatgcggatgaaccagctagtgatgatgatggtaaaaaagatgatgttgtagcacttcctccggatgatgctcctctcattagggatcttgtgctacacagggccaaagcccgtcgtaatccaaatgaacctcaaatggattacagtgcgggcagcaacagtttgcttcaatacataaggtatgaaaatccaatgaagtgggcaagagataatcgaattgacggtcacagattttggaatctctttcatgtggacttctacaactcagtaatcatgactaagaagcaccaacctatcatcaaacaaagatctataaattgggctgaatgtgagcagatgagagataaggaaatgactagagctctgcgagcatgtgaggctaaaggaatgaagaacatcatgcttttctcttatgattggaacgacgaagtgatagcccaattttactcaactctatgggtgaagctgagcagtgatgatttgggtgcctatgcctatccatacatgaatttcaacattgaaggacagtggtataaggtgagctaccggcgctttgctcatattcttgggttcactgattctgagatccatcctgatcgtagatgcatccacaactattctcttccacctcgtgccgaagtaattgacatgcatgtggtgcctactgacgacatgtggaaaactacaaatctgcaaggttattacaggtatctcaactccatgttccgtgccactctcattcctaagggaggaaatcaagtgaatgtgcatggtgaaagtcacgttctcctttacttcatgaagccaaataagaattttagaattaatgtgtttgacatgatctggaaagaaattatccatgcctcttggaacacatctaaagggtgtgtgcatgctcctttcataatgaaaatgattgaagtggtgtctcaaacttattttcaaaaggacagcaagcatgtcaagtacacaccttattggattgatccaaacaacccagccggcagatcaaaaagggcacccacctcagctgagcctggagcttcttcttcatcctccgaagaacctgctccagctccacctcttcatccctcttcttctcgggctgccgctgcctctcgccccatgagccgtggtgaccgaggtaagcaaggaggtcttaaagctttactcaagaaggggttcaatgccatgtttgccatatatcgagagaactcaattcacacagctgagcttgtacgaagaacaatggagttggatcagaattttagacgtcatgtcgctggtcaaccgttgcttccagttcgtccgtataatcctccacctcctatggccgacactcttgatcagtggcatcaacaaacttatggagttcccttcagtgcgtccgaccaagaaatctctgaggatgaaccagttactcctcctgctgcttctgcttcagttcctcctactcctgctgcttctgcttcagttcctcctcctcctgcttccgctccagacttgggcacctacttctttggtgatcctagtggtggtcatggtccctatggtgggtggtgatcttatttttttcttcattttggttgcttgatgccaaaaatggggagaagtttgtgatatctttgctcttttatctatctacccactcttgttgtgagttgtgagagagaacttcaactcttgggatgtaaaataactttgtgattgtgtgctgatctcaaaaacatctagcttgtaatagtaaattaggtgaacttatttcattatgatgaatttctgttatcctaagttttgtgtc

SEQ ID NO: 105116 - DNA, 634 bp, Zea Mays
agcactagcagcacacgcagtcattgcttgctctccgaactttttgcaggtcccgaccgcgggccgagcagtcacttgtccgatgggctactccgcagccgcacgacatcgacgcgctggagcagatggtcgaccccgcgctgcgagggctgtacccgtccaaatccctctccggcccacccgcttcgccgatgccatcgctctatgcgttcaggtgaagaagtatctccagtccatccagctcgatctcattgcccctattctatacggcagtggcatttctggcgctgcggctgaattgctggcgccggctggttcctgcaacctgcagcccgagccggagtttcggccgccgatgtgggaggtcttgcagtcgctggtgcgccagcgcctggtgcaaagggcgaacatggcgaggacgcagtcgcactcgcggcgccacggcgaacccgttactgcttcaagagtaagacgcaacttgccgcgctactgcttcatgatggctttttgagaaaaaatgagagaaaatagtttagtttggatttgagtgtggcttaatttcgaatttcacataataattttcagcatgttcgtttggcttccatttatatcagattctactatttctacaata

SEQ ID NO: 105117 - DNA, 104 bp, Zea Mays
cttatatctatcactcggacatacgacagttacgcgtcaaacttattgacaaataaaacgtcgcccgctactatacattatgcgtcgtatgtatcgtgtcagcc

SEQ ID NO: 105118 - DNA, 1258 bp, Zea Mays
acgccccaccccgctcggcctccagtccagctccaccgctttcacccgctccgctccgtttccgtcgctcccgtcccaaggagccgcgccacgcgagagggggccacggacggtggcagttttctgtttcggtgggcggggacgtcgtcgaccgaccgaccggagcggaaggccggagatgatggaggagggggcgcccgatctgcgagagctcgtgcgcctgccggatgttctcgtggtatgctcatctactggatggacagatgaaaagcacatgctttatcttcgattattggaagaaacatttgtgcaccaattacatggaagtggttgcatttttaagggactgtttaattgctctccaagatattgtaggcaaatgaaatcatctaagcaaattgttaaatacactacgcctggtcagcaggggtgtgccatagttgagggtggcaaagtcaagtcctgcataaaggctgagcatgttgagtcaccttcctgttgtggaaatcagcaagatgaaaaagttcgttccctggaagataatgcatcaaccactaagcccatggaaaaagccacttcccatgcaagggcagcaagcccaggacaagcttccacgtgctatgttggcaaacacagacattctccttccagaagtgcagaggggtcggatcagaactttgatgaggaaacccaagggactggagaatcaaaacatgaatacaacccgaagcgactgaaatctgctgatggcacaagggatcatcaggtgaattgatcataagcgtagcgtagctttcgttgtgttctgccgctgttctacgttttatgaaaacattcttacttcacatcacattgtcaataggttgtgaatgcagaagctcatcaggtgggctgccttgatgtgagtgacaaaaatagcgagaacttcagtgcatcgtcaaaagtgcttgctgcatcacttgatgttgaagctgggtctccctccggcgactgcaaggatcatggaccaaaaggataatgcaatgtccaccgagtgttttctggagttgactaacacacccacctggcgcgccgcaactgaatcagagataggaagtcaatcagtgcaagtttgtaagataagctagcttgcccgttattctggtttggaagtcaaaatagttcgttcaacttagcctaggcagttgacggttttgttgtgtttctgagggactctgatacgaaaatcaaattccctttgttctgtgtttggcgctgc

SEQ ID NO: 105119 - DNA, 1273 bp, Zea Mays
acgccccaccccgctcggcctccagtccagctccaccgctttcacccgctccgctccgtttccgtcgctcccgtcccaaggagccgcgccacgcgagagggggccacggacggtggcagttttctgtttcggtgggcggggacgtcgtcgaccgaccgaccggagcggaaggccggagatgatggaggagggggcgcccgatctgcgagagctcgtgcgcctgccggatgttctcgtggtatgctcatctactggatggacagatgaaaagcacatgctttatcttcgattattggaagaaacatttgtgcaccaattacatggaagtggttgcatttttaagggactgtttaattgctctccaagatattgtaggcaaatgaaatcatctaagcaaattgttaaatacactacgcctggtcagcaggggtgtgccatagttgagggtggcaaagtcaagtcctgcataaaggctgagcatgttgagtcaccttcctgttgtggaaatcagcaagatgaaaaagttcgttccctggaagataatgcatcaaccactaagcccatggaaaaagccacttcccatgcaagggcagcaagcccaggacaagcttccacgtgctatgttggcaaacacagacattctccttccagaagtgcagaggggtcggatcagaactttgatgaggaaacccaagggactggagaatcaaaacatgaatacaacccgaagcgactgaaatctgctgatggcacaagggatcatcaggttgtgaatgcagaagctcatcaggtgggctgccttgatgtgagtgacaaaaatagcgagaacttcagtgcatcgtcaaaagtgcttgctgcatcacttgatgttgaagctgggtctccctccggcgactgcaaggatcatggaccaaaaggataatgcaatgtccaccgagtgttttctggagttgactaacacacccacctggcgcgccgcaactgaatcagagataggaagtcaatcagtgcaagtttgtaagataagctagcttgcccgttattctggtttggaagtcaaaatagttcgttcaacttagcctaggcagttgacggttttgttgtgtttctgagggactctgatacgaaaatcaaattccctttgttctgtgtttggcgctgcaacctgtaaatggagtgctttttttttgcgtaccgtgatatctgcgttttggaatactataatatcagaatttggagcgtgtttcgccatgctcgcctcacttgattgggc

SEQ ID NO: 105120 - DNA, 1270 bp, Zea Mays
acgccccaccccgctcggcctccagtccagctccaccgctttcacccgctccgctccgtttccgtcgctcccgtcccaaggagccgcgccacgcgagagggggccacggacggtggcagttttctgtttcggtgggcggggacgtcgtcgaccgaccgaccggagcggaaggccggagatgatggaggagggggcgcccgatctgcgagagctcgtgcgcctgccggatgttctcgtggtatgctcatctactggatggacagatgaaaagcacatgctttatcttcgattattggaagaaacatttgtgcaccaattacatggaagtggttgcatttttaagggactgtttaattgctctccaagatattgtaggcaaatgaaatcatctaagcaaattgttaaatacactacgcctggtcaggggtgtgccatagttgagggtggcaaagtcaagtcctgcataaaggctgagcatgttgagtcaccttcctgttgtggaaatcagcaagatgaaaaagttcgttccctggaagataatgcatcaaccactaagcccatggaaaaagccacttcccatgcaagggcagcaagcccaggacaagcttccacgtgctatgttggcaaacacagacattctccttccagaagtgcagaggggtcggatcagaactttgatgaggaaacccaagggactggagaatcaaaacatgaatacaacccgaagcgactgaaatctgctgatggcacaagggatcatcaggttgtgaatgcagaagctcatcaggtgggctgccttgatgtgagtgacaaaaatagcgagaacttcagtgcatcgtcaaaagtgcttgctgcatcacttgatgttgaagctgggtctccctccggcgactgcaaggatcatggaccaaaaggataatgcaatgtccaccgagtgttttctggagttgactaacacacccacctggcgcgccgcaactgaatcagagataggaagtcaatcagtgcaagtttgtaagataagctagcttgcccgttattctggtttggaagtcaaaatagttcgttcaacttagcctaggcagttgacggttttgttgtgtttctgagggactctgatacgaaaatcaaattccctttgttctgtgtttggcgctgcaacctgtaaatggagtgctttttttttgcgtaccgtgatatctgcgttttggaatactataatatcagaatttggagcgtgtttcgccatgctcgcctcacttgattgggc

SEQ ID NO: 105121 - DNA, 898 bp, Zea Mays
ccccaccccgctcggcctccagtccagctccaccgctttcacccgctccgctccgtttccgtcgctcccgtcccaaggagccgcgccacgcgagagggggccacggacggtggcagttttctgtttcggtgggcggggacgtcgtcgaccgaccgaccggagcggaaggccggagatgatggaggagggggcgcccgatctgcgagagctcgtgcgcctgccggatgttctcgtggtatgctcatctactggatggacagatgaaaagcacatgctttatcttcgattattggaagaaacatttgtgcaccaattacatggaagtggttgcatttttaagggactgtttaattgctctccaagatattgtaggcaaatgaaatcatctaagcaaattgttaaatacactacgcctggtcagcaggggtgtgccatagttgagggtggcaaagtcaagtcctgcataaaggctgagcatgttgagtcaccttcctgttgtggaaatcagcaagatgaaaaagttcgttccctggaagataatgcatcaaccactaagcccatggaaaaagccacttcccatgcaagggcagcaagcccaggacaagcttccacgtgctatgttggcaaacacagacattctccttccagaagtgcaggtagggggtatccattggatgtccttttgcaaatgctgttgcatatcgatctgtagttactccaaaaaggaagaaaaactatttccaaattttgattgtcttctattagattattgcaaaacaaagcaacaaatgatttccccaaatctgctttttattaaggaaaaaaaacattttccctggctgtctgccttgttttgtttaaagtataagctgttaatattgtttgtgggctggaaaaa

SEQ ID NO: 105122 - DNA, 1414 bp, Zea Mays
ccccaccccgctcggcctccagtccagctccaccgctttcacccgctccgctccgtttccgtcgctcccgtcccaaggagccgcgccacgcgagagggggccacggacggtaggggctcccgacccaatcctccgcctcctcctcggctcctccttgccctccacaagaccacagctcagcctctccgtgctggtgttgttatgcttgcggccgtggaggcgctggtgtgatgcggtggtggtgcatttgcaggtggcagttttctgtttcggtgggcggggacgtcgtcgaccgaccgaccggagcggaaggccggagatgatggaggagggggcgcccgatctgcgagagctcgtgcgcctgccggatgttctcgtggtatgctcatctactggatggacagatgaaaagcacatgctttatcttcgattattggaagaaacatttgtgcaccaattacatggaagtggttgcatttttaagggactgtttaattgctctccaagatattgtaggcaaatgaaatcatctaagcaaattgttaaatacactacgcctggtcagcaggggtgtgccatagttgagggtggcaaagtcaagtcctgcataaaggctgagcatgttgagtcaccttcctgttgtggaaatcagcaagatgaaaaagttcgttccctggaagataatgcatcaaccactaagcccatggaaaaagccacttcccatgcaagggcagcaagcccaggacaagcttccacgtgctatgttggcaaacacagacattctccttccagaagtgcagaggggtcggatcagaactttgatgaggaaacccaagggactggagaatcaaaacatgaatacaacccgaagcgactgaaatctgctgatggcacaagggatcatcaggttgtgaatgcagaagctcatcaggtgggctgccttgatgtgagtgacaaaaatagcgagaacttcagtgcatcgtcaaaagtgcttgctgcatcacttgatgttgaagctgggtctccctccggcgactgcaaggatcatggaccaaaaggataatgcaatgtccaccgagtgttttctggagttgactaacacacccacctggcgcgccgcaactgaatcagagataggaagtcaatcagtgcaagtttgtaagataagctagcttgcccgttattctggtttggaagtcaaaatagttcgttcaacttagcctaggcagttgacggttttgttgtgtttctgagggactctgatacgaaaatcaaattccctttgttctgtgtttggcgctgcaacctgtaaatggagtgctttttttttgcgtaccgtgatatctgcgttttggaatactataatatcagaatttggagcgtgtttcgccatgctcgcctcacttgattgggc

SEQ ID NO: 105123 - DNA, 1411 bp, Zea Mays
ccccaccccgctcggcctccagtccagctccaccgctttcacccgctccgctccgtttccgtcgctcccgtcccaaggagccgcgccacgcgagagggggccacggacggtaggggctcccgacccaatcctccgcctcctcctcggctcctccttgccctccacaagaccacagctcagcctctccgtgctggtgttgttatgcttgcggccgtggaggcgctggtgtgatgcggtggtggtgcatttgcaggtggcagttttctgtttcggtgggcggggacgtcgtcgaccgaccgaccggagcggaaggccggagatgatggaggagggggcgcccgatctgcgagagctcgtgcgcctgccggatgttctcgtggtatgctcatctactggatggacagatgaaaagcacatgctttatcttcgattattggaagaaacatttgtgcaccaattacatggaagtggttgcatttttaagggactgtttaattgctctccaagatattgtaggcaaatgaaatcatctaagcaaattgttaaatacactacgcctggtcaggggtgtgccatagttgagggtggcaaagtcaagtcctgcataaaggctgagcatgttgagtcaccttcctgttgtggaaatcagcaagatgaaaaagttcgttccctggaagataatgcatcaaccactaagcccatggaaaaagccacttcccatgcaagggcagcaagcccaggacaagcttccacgtgctatgttggcaaacacagacattctccttccagaagtgcagaggggtcggatcagaactttgatgaggaaacccaagggactggagaatcaaaacatgaatacaacccgaagcgactgaaatctgctgatggcacaagggatcatcaggttgtgaatgcagaagctcatcaggtgggctgccttgatgtgagtgacaaaaatagcgagaacttcagtgcatcgtcaaaagtgcttgctgcatcacttgatgttgaagctgggtctccctccggcgactgcaaggatcatggaccaaaaggataatgcaatgtccaccgagtgttttctggagttgactaacacacccacctggcgcgccgcaactgaatcagagataggaagtcaatcagtgcaagtttgtaagataagctagcttgcccgttattctggtttggaagtcaaaatagttcgttcaacttagcctaggcagttgacggttttgttgtgtttctgagggactctgatacgaaaatcaaattccctttgttctgtgtttggcgctgcaacctgtaaatggagtgctttttttttgcgtaccgtgatatctgcgttttggaatactataatatcagaatttggagcgtgtttcgccatgctcgcctcacttgattgggc

SEQ ID NO: 105124 - DNA, 1452 bp, Zea Mays
tccaccgctttcacccgctccgctccgtttccgtcgctcccgtcccaaggagccgcgccacgcgagagggggccacggacggtaggggctcccgacccaatcctccgcctcctcctcggctcctccttgccctccacaagaccacagctcagcctctccgtgctggtgttgttatgcttgcggccgtggaggcgctggtgtgatgcggtggtggtgcatttgcaggtggcagttttctgtttcggtgggcggggacgtcgtcgaccgaccgaccggagcggaaggccggagatgatggaggagggggcgcccgatctgcgagagctcgtgcgcctgccggatgttctcgtggtatgctcatctactggatggacagatgaaaagcacatgctttatcttcgattattggaagaaacatttgtgcaccaattacatggaagtggttgcatttttaagggactgtttaattgctctccaagatattgtaggcaaatgaaatcatctaagcaaattgttaaatacactacgcctggtcaggggtgtgccatagttgagggtggcaaagtcaagtcctgcataaaggctgagcatgttgagtcaccttcctgttgtggaaatcagcaagatgaaaaagttcgttccctggaagataatgcatcaaccactaagcccatggaaaaagccacttcccatgcaagggcagcaagcccaggacaagcttccacgtgctatgttggcaaacacagacattctccttccagaagtgcaggtattaagttcatttacttgagtgacgtggccagatttttaaaagagaactactcgtgcatttactcagaggggtcggatcagaactttgatgaggaaacccaagggactggagaatcaaaacatgaatacaacccgaagcgactgaaatctgctgatggcacaagggatcatcaggttgtgaatgcagaagctcatcaggtgggctgccttgatgtgagtgacaaaaatagcgagaacttcagtgcatcgtcaaaagtgcttgctgcatcacttgatgttgaagctgggtctccctccggcgactgcaaggatcatggaccaaaaggataatgcaatgtccaccgagtgttttctggagttgactaacacacccacctggcgcgccgcaactgaatcagagataggaagtcaatcagtgcaagtttgtaagataagctagcttgcccgttattctggtttggaagtcaaaatagttcgttcaacttagcctaggcagttgacggttttgttgtgtttctgagggactctgatacgaaaatcaaattccctttgttctgtgtttggcgctgcaacctgtaaatggagtgctttttttttgcgtaccgtgatatctgcgttttggaatactataatatcagaatttggagcgtgtttcgccatgctcgcctcacttgattgggc

SEQ ID NO: 105125 - DNA, 1166 bp, Zea Mays
atggcgatccgtggcgtggcctccacccgcgaggaggacatgacgctggaggagttcaaggagtggctgaagcagttcgacgccgacggcgacggcaggatcagccggaacgagctccgggaggcgctccgccgccgcggccgcggccgcggctggctcaccgcctggaggagcgaccgcgcccttcgccacgcggacaaggacagcagcggcttcctggacgactccgagattgagaacctcgtcgccttcgcccagaaggatctcggcatgaagatatccacctggggttatgcacttatatttgatattgtttgcctccaggcttcgtatgggcaggagatggttcaacgccatggggaggagtacgattggaggagccagccaatcgaccctcaggcagcatatgctagcgcaggaggacaagcccatggacggttggatattttttattctacgattgattccagaaagctgagacgccgtggacgacaatccacatcgtcgtcttcacagtcgtcccgttcacgatcagcagcccatgagatagagcttgcagtgttgcgtcaacaggcagagtaccatcaatcagtcttgagggaacaattagagtaccagaggaaacaatctgaataccagagacaacaagccgagtaccagaagaagagggacgagtattatgcaagcctccaggcccaaaatcaagctcttctctcgcaactagcccaacaagcgggcgtcccgatgccgacatatgggatgccgcctccggactttgcactgccaatgccaatgttggcgcctccacctccgcctccgcctccgtcacaattccctatgggatttcagacaccacccgcttcagttgccgcacctggagatgggtctggtcaagacgacacaacacattcgtgggtgaacaatcttttcaacacgcatagtctagccggaggaggtggcgatggatatgagtgataatgatgtaaaacacttgttgcaacctttcatgtgaaagcctatccgtcgaataatgttcattttggattttggacaactatgttgatgtaaacacttgttgcaaccatttggaactatgtcgttatgttaaatttgtgaatgtgaatgcttatgtgattatatttgtgaatgtgtatacttatgtgagt

SEQ ID NO: 105126 - DNA, 1337 bp, Zea Mays
gagagagccagaagcgaacgaggaggattcgagatggaggtggtggtgcctgtcatggcgccaagtgcgccgtgcagcccaagaaccgcggccatcgccggcgaccacctcccggcctactgctacttctactccagcgcgccgacgagcccgtccagggcgagctgcgcggggggcgccgccaccgccacgaccacgacgccgggctcgggcgacgaggccacgttcgacttcacgctcggcttcagcgggcagctgcaggaggccacgccgaccctcgcggccgccgacgagctcttcgagggcggcaggatccggccgctgaacacgccgcacccgagcatcccgctggccgacgacgcctcgagctcctcctattccggtggccctcggtggtccccgagaagagccggcggcgcggatcgtcgggcggaggcaccgttggagagaggcaggtcgggctacagacccgccgcctcgacggcggcggcggcggcggcggcctcgtcgaggagtaggagggccacgaggtctctgtccccgttcagggtcaggggcggcggcggcggaggaggaggcgtggacgacgacgaggagtcccctccgtctccccgaacctccatgatgcggggctgcggcagcggcagcaagaagtggcggctcaaggacctgttcctgttccgcagcgcgtcggagggccgcgccaccaccggcggcggcagcaaggacccgctgttcaagtacaccatgctgtcgtcgtcgtcccagcagacgctgcggaccggcggcgacggcagcgcgtccatgcgcaaggggagaggctccgcggcgtcggccagcgacatgccgatgccgtacgccgtgccccggggggcggcggcggccgaggacgcgcggcgccggacgacggccaccacgccgctgccgttccaccgcaacagcctcttcggctacctgcgctccaacccggcgatccacagcatcagccggaagctcgggggcggcggcggcggcagcagcagcagccatcccgtaccacccgccgcctccaactccagtagtcgtggcaggccgacatgatccgtccgcataccgcaagcagtcccgaaaccttgacggcgatgcagctcgacgcagaagtggccgccggcggccgtttttatctccccaccccactcctttttgttcccttgtaatttaatttgatgcgtattctttcgtttcatgtgaaccaacaaggtactagtagttagtgtagatatgtacgtacgtacgtacacggcggtatgtatgtatccccaaggatttctttgaagaaagaaaagataattagcgta

SEQ ID NO: 105127 - DNA, 1937 bp, Zea Mays
cctatgcgtcagtaactaggattaggttgggctcgagagaaggaacgggaagaacgaggccgacgagaactgggaaggcatggcgatggggttagaggacggcgagtacggtgccttcatggagaaattcaagatgctgccttcgcaatctcagcatcagcagcagctcccgcttcacggcctcaccttcgctatcaaagacatcttcgacatcggcggccgtgtcactgggttcggcaacccggactgggcgaggacgcatgcccccgccggcgccacctcccccgtcgtcctggcggcgctggccgccggcgccatcagcatcggcaagaccgtcatggatgagatggcctacagcataaatggggagaacgcgcactatggcacgccgactaatccgtgcgctcctgatagagtccctggaggatcctccagtggatcagctgttgcagttgctgcaaaactcgtcgacttcgctctgggcactgacactggaggtagtgtgagggtacctgctgcctattgtggcatatttggactcaggccttcccatggattggtttcgacagaaaatgtcattccaatgtcacagatgtttgacactgttggatggtttgctagagatttatctatgttatcttgtgtaagcaacgtgttgttgccactagctgctgacaacactatcaagcaaccaactcatgttacaattcctaaagactgttttgaaatcttaggctctctgagtgaccaaacatatcagattctcaatgcttcggtagctaagagatttggtaacgatgcagtagacaataggaaccttggtgagttcgtctccgccaatgttccaactgttgggaaattcattagcgacttctccagaagcgaagcaccatctgtacctgctctatctgttatttcatatgtcatgcgatgcctccaaaggtctgaattcaaagctaaccatggagagtgggtcaaaactgtaaaacctaacctaggccctggcatccgagagcgggtgcatgaagccattgcatcagaagatggacccatggaggattttcatgttctgaagactgaattcaagtcggcgctttctgctcttatcaaggatgatgggatccttgcgataccgacagttcctggttctccgccaaagctgcgcatggaggctgttgcattagaaaacttccgcgcaagagcattttcattgctgtccatcgccggactatctgggttttgccagctgagcattccacttggagtgcgccatggtgttccagtgtcagtctccctagtggcatgccatggtgcggaccgtttcctcctgagtgtggctcaggagctgtatgggacgctcaaacaggagaccaagaaagcctggagctggagttcatcagactcctctctctgagccatcaatcatgattcatatgcaaagttcaggttccaccggctctcgctcgctccgtgtcctgcacgactgcttgttgatctactctagtagatgtcgatgtggcacaggcgcactcgatccatgtgtaccgaggagacaatatgttttgccacgtaggcacatactacaatttgctgtttctgtatgcatatggtgatagagagtgcctactacaaattcaggcatgttggaaattggatctctggatttcaatatgacagcagcaagtccaaaaatcgtggaataggaatttgtgtgtgaataatttgtgcataaaagggcacagaaaactgttgatatcagtatatgtgtgagaaatggtggaactcaaaagaaaatttgttcagatactcgagtttaacatttggtacatgtaaaatagtacatcacggtggactgctatctagtgtaccagcgccgcttcgtggggcgggaatgagacactagacctgtttagtttactacctaatttaccatattt

SEQ ID NO: 105128 - DNA, 426 bp, Zea Mays
atggcggggtttggcggcggttccagggacggcgcgcgcgggttcggcggtggtttctgggaacgacgtgcacgacagattatgccgcgcccaatgctggcttgtgcagcagcgggtggccgggctctgggacggggcgtcggcgctcgggacggggatggggatggggatggcgcggccgcgaggtcgaggcgaggcggatttctgggcttggggacggggcgtcggcgctcggggtggggacgtgctgcagggatggcgcggtcatggtcgggctcgaggctcgtcggggctcggggatggggcgttggcgcttggggacggggcgtcgacgctcggggacggggatggcggtggcagggtcgggctgggggatcagcggggatggcgcgtgggtcggcggggatggagggggtgtcgttgtaa

SEQ ID NO: 105129 - DNA, 1010 bp, Zea Mays
atggtcacatctaggctcctcagggaccgctggaccctctggtgttgccgctcaaggcttctatggcccagaagtagccgtagccggagagggagacagctgagcccctcaacctctccgtggctcctcaagtcaaatcagaagttacaaggtttaagggaagaattgaatgcgattgtcccatacttggaggagatgagaaagaagaaagttgaaagatgggaccaatttgttgatgtcatagagcaaattaagaagtgttggattgtttcaactggcaatgcaccttctgttccactgttgctacttaagttttttctcctattaccctccaatctgcagctaagatggaccctaaacccttacatgagtggagctattgatcctgcgctggtgctggaacaaattgaggctcacattgccacagtgaaagaggaagcctttagcaggaaggatattctcgagaaggttgaaagatggttgaatgcatgtgaggaggaagcttggctggaagattacaacaaagtagcaatgctggatgacaatcgttataatgccgggaggggggcccacttgacactcaaaagggctgagaaagctcgtattttggttaacaagatcctaggactggtagatgttttaaccacaaaaattgtagcctgggaggcagaaagaggaaaggaattcacatacgacggtaatcaagaacagtcaggaagcagttctttaggatcttctggaatgctatacgaaggaagctcgggtgacaatgctccatttgatattaatgactttcctcagttaaatggacgacctaattctgctgaaggtggtcaaggacaatatggatcactgagaaagcatggagtaagcgtcaatgccattgtacaacaaaaccaggaattcagcattcagaatgaagattttccagctttaccaggattccggctcccgtcaagtgactcctccccctcacgttgactttgcggatagatgtctcaattctagtg

SEQ ID NO: 105130 - DNA, 1543 bp, Zea Mays
caacagccacccgcgaccccaagtcccgatcggccgccgatcccgatcccgatcccgaccccacctccctggctccacagcacccctgctccacacacacggccgccagcaagccgccggccctaggccctaccgtcgcagcgtcgcctgcttgactatctgcctccagccctccagcaagacttcagtcgcctgccccagcctggctgccgccgccctccagcaaggcagcaaacgccggcctccggccgcccgtccctaggccagaggccacccctaggccgctaggcttccaccgccgacgcccacagaaaccgtaggcgccaccaggccaccacgagatccctgccgtgacggagaatggaggccgccgcggccgtcctccccacgctggtgccctccgggagcgcggtggtggtgctcctcgcctacctcgggtatctcgccgccgctggagccatcctcccagggaagctcgtcgacggagccctactcccggactcctctcgcctccactatcgctgcaacggtttgctctcgctcctgctgctgctgggactctcggcgttcggtgtctacatggggtggatgtctcccacggttgtagctgacatgggactcgaacttctgtcagtgacctttatttttagtgtcattgtttcttttgcactctacattgccggcatcaagtccggccacaaaagttcttctttgagaccacatgttagtgggagcttcatgcaagattggtggtttggagtgcaacttaatcctcattttatggaagttgacctcaaattcttctttgtgagggcaggaatgatggcatggttatttattaacctctctttgtttgcaaagagctactttgctggttcagccaatctttcggtcattctctaccaatttttttgtgcgtggtatatcattgattacttcgtccatgaagaattcatgacctcaacgtgggacattattgctgaaagactgggtttcatgctggtgtttggtgatctagttttcatccctttcaccttcactattcaggggtggtggcttttgaagaacaaagtagagctgtcccttttgtctggtctagctaacttatgcatctttcttattggctacctagtgttccgaggagctaacaagcaaaaacatgtgttcaagaaggaccccaaagctcctatatggggaaaacctcccaaagttgtcgggggaaagctactagcatctggttactggtaaggacaatttatgccaatgaccctctgttaatcacattattatcattgtagcttgtatgatgcttcctattgaccctgccaacattgatgaacggtagcctgttcagagtataaaagaacttagagccatacaataatgtttttttagatgatggtgacatgaaaatgtagaaccaaatgctggtccacaatccacagaataattaagggatttttctgtagttaaaaaaatagtgcacccacgtagtgtctacggcagattcaaagcatagcagtttgtgatttgtgggtgtggt

SEQ ID NO: 105131 - DNA, 1847 bp, Zea Mays
caacagccacccgcgaccccaagtcccgatcggccgccgatcccgatcccgatcccgaccccacctccctggctccacagcacccctgctccacacacacggccgccagcaagccgccggccctaggccctaccgtcgcagcgtcgcctgcttgactatctgcctccagccctccagcaagacttcagtcgcctgccccagcctggctgccgccgccctccagcaaggcagcaaacgccggcctccggccgcccgtccctaggccagaggccacccctaggccgctaggcttccaccgccgacgcccacagaaaccgtaggcgccaccaggccaccacgagatccctgccgtgacggagaatggaggccgccgcggccgtcctccccacgctggtgccctccgggagcgcggtggtggtgctcctcgcctacctcgggtatctcgccgccgctggagccatcctcccagggaagctcgtcgacggagccctactcccggactcctctcgcctccactatcgctgcaacggtttgctctcgctcctgctgctgctgggactctcggcgttcggtgtctacatggggtggatgtctcccacggttgtagctgacatgggactcgaacttctgtcagtgacctttatttttagtgtcattgtttcttttgcactctacattgccggcatcaagtccggccacaaaagttcttctttgagaccacatgttagtgggagcttcatgcaagattggtggtttggagtgcaacttaatcctcattttatggaagttgacctcaaattcttctttgtgagggcaggaatgatggcatggttatttattaacctctctttgtttgcaaagagctactttgctggttcagccaatctttcggtcattctctaccaatttttttgtgcgtggtatatcattgattacttcgtccatgaagaattcatgacctcaacgtgggacattattgctgaaagactgggtttcatgctggtgtttggtgatctagttttcatccctttcaccttcactattcaggggtggtggcttttgaagaacaaagtagagctgtcccttttgtctggtctagctaacttatgcatctttcttattggctacctagtgttccgaggagctaacaagcaaaaacatgtgttcaagaaggaccccaaagctcctatatggggaaaacctcccaaagttgtcgggggaaagctactagcatctggttactggggcatcgcaaggcactgcaattatctcggagacctgctgctagcactttcgttcagcttgccctgtggagtgagttccgtggtcccatacttctaccccacgtacctgctcattctactggtcttgagggaaaggcgcgatgaggcgaggtgctcgcagaagtacagggagatctgggcagagtactgcaagctcgtgccgtggaggatcctgccttatgtgtactgaagagacggtagaaaccaaggcagctcatggccctgggccagctgtaaaccttattttgtttgcccttaaccagttggtgaatgttgatgtagcactcggtaaactgtgaccgtgcaaacttttgttattgttggtccatacatgtttggaatcgtgaatcagaccgcctcacttggtggcatattattccctttagcgcttgcttgggagctaggacccgagaggattgaaggggttaaaattttcttgttattcaatattgaatattaaggaaattttagtgactttaatcctctccggtatccttgctctcaaataagcccttagttatgtataatctaaatattatgttattgttcttcaaacattagata

SEQ ID NO: 105132 - DNA, 1820 bp, Zea Mays
caacagccacccgcgaccccaagtcccgatcggccgccgatcccgatcccgatcccgaccccacctccctggctccacagcacccctgctccacacacacggccgccagcaagccgccggccctaggccctaccgtcgcagcgtcgcctgcttgactatctgcctccagccctccagcaagacttcagtcgcctgccccagcctggctgccgccgccctccagcaaggcagcaaacgccggcctccggccgcccgtccctaggccagaggccacccctaggccgctaggcttccaccgccgacgcccacagaaaccgtaggcgccaccaggccaccacgagatccctgccgtgacggagaatggaggccgccgcggccgtcctccccacgctggtgccctccgggagcgcggtggtggtgctcctcgcctacctcgggtatctcgccgccgctggagccatcctcccagggaagctcgtcgacggagccctactcccggactcctctcgcctccactatcgctgcaacggtttgctctcgctcctgctgctgctgggactctcggcgttcggtgtctacatggggtggatgtctcccacggttgtagctgacatgggactcgaacttctgtcagtgacctttatttttagtgtcattgtttcttttgcactctacattgccggcatcaagtccggccacaaaagttcttctttgagaccacatgttagtgggagcttcatgcaagattggtggtttggagtgcaacttaatcctcattttatggaagttgacctcaaattcttctttgtgagggcaggaatgatggcatggttatttattaacctctctttgtttgcaaagagctactttgctggttcagccaatctttcgtggtatatcattgattacttcgtccatgaagaattcatgacctcaacgtgggacattattgctgaaagactgggtttcatgctggtgtttggtgatctagttttcatccctttcaccttcactattcaggggtggtggcttttgaagaacaaagtagagctgtcccttttgtctggtctagctaacttatgcatctttcttattggctacctagtgttccgaggagctaacaagcaaaaacatgtgttcaagaaggaccccaaagctcctatatggggaaaacctcccaaagttgtcgggggaaagctactagcatctggttactggggcatcgcaaggcactgcaattatctcggagacctgctgctagcactttcgttcagcttgccctgtggagtgagttccgtggtcccatacttctaccccacgtacctgctcattctactggtcttgagggaaaggcgcgatgaggcgaggtgctcgcagaagtacagggagatctgggcagagtactgcaagctcgtgccgtggaggatcctgccttatgtgtactgaagagacggtagaaaccaaggcagctcatggccctgggccagctgtaaaccttattttgtttgcccttaaccagttggtgaatgttgatgtagcactcggtaaactgtgaccgtgcaaacttttgttattgttggtccatacatgtttggaatcgtgaatcagaccgcctcacttggtggcatattattccctttagcgcttgcttgggagctaggacccgagaggattgaaggggttaaaattttcttgttattcaatattgaatattaaggaaattttagtgactttaatcctctccggtatccttgctctcaaataagcccttagttatgtataatctaaatattatgttattgttcttcaaacattagata

SEQ ID NO: 105133 - DNA, 1769 bp, Zea Mays
aacagccacccgcgaccccaagtcccgatcggccgccgatcccgatcccgatcccgaccccacctccctggctccacagcacccctgctccacacacacggccgccagcaagccgccggccctaggccctaccgtcgcagcgtcgcctgcttgactatctgcctccagccctccagcaagacttcagtcgcctgccccagcctggctgccgccgccctccagcaaggcagcaaacgccggcctccggccgcccgtccctaggccagaggccacccctaggccgctaggcttccaccgccgacgcccacagaaaccgtaggcgccaccaggccaccacgagatccctgccgtgacggagaatggaggccgccgcggccgtcctccccacgctggtgccctccgggagcgcggtggtggtgctcctcgcctacctcgggtatctcgccgccgctggagccatcctcccagggaagctcgtcgacggagccctactcccggactcctctcgcctccactatcgctgcaacggtttgctctcgctcctgctgctgctgggactctcggcgttcggtgtctacatggggtggatgtctcccacggttgtagctgacatgggactcgaacttctgtcagtgacctttatttttagtgtcattgtttcttttgcactctacattgccggcatcaagtccggccacaaaagttcttctttgagaccacatgttagtgggagcttcatgcaagattggtggtttggagtgcaacttaatcctcattttatggaagttgacctcaaattcttctttgtgagggcaggaatgatggcatggttatttattaacctctctttgtttgcaaagagctactttgctggttcagccaatctttcggtcattctctaccaatttttttgtgcgtggtatatcattgattacttcgtccatgaagaattcatgacctcaacgtgggacattattgctgaaagactgggtttcatgctggtgtttggtgatctagttttcatccctttcaccttcactattcagctacctagtgttccgaggagctaacaagcaaaaacatgtgttcaagaaggaccccaaagctcctatatggggaaaacctcccaaagttgtcgggggaaagctactagcatctggttactggggcatcgcaaggcactgcaattatctcggagacctgctgctagcactttcgttcagcttgccctgtggagtgagttccgtggtcccatacttctaccccacgtacctgctcattctactggtcttgagggaaaggcgcgatgaggcgaggtgctcgcagaagtacagggagatctgggcagagtactgcaagctcgtgccgtggaggatcctgccttatgtgtactgaagagacggtagaaaccaaggcagctcatggccctgggccagctgtaaaccttattttgtttgcccttaaccagttggtgaatgttgatgtagcactcggtaaactgtgaccgtgcaaacttttgttattgttggtccatacatgtttggaatcgtgaatcagaccgcctcacttggtggcatattattccctttagcgcttgcttgggagctaggacccgagaggattgaaggggttaaaattttcttgttattcaatattgaatattaaggaaattttagtgactttaatcctctccggtatccttgctctcaaataagcccttagttatgtataatctaaatattatgttattgttcttcaaacattagata

SEQ ID NO: 105134 - DNA, 1893 bp, Zea Mays
aacagccacccgcgaccccaagtcccgatcggccgccgatcccgatcccgatcccgaccccacctccctggctccacagcacccctgctccacacacacggccgccagcaagccgccggccctaggccctaccgtcgcagcgtcgcctgcttgactatctgcctccagccctccagcaagacttcagtcgcctgccccagcctggctgccgccgccctccagcaaggcagcaaacgccggcctccggccgcccgtccctaggccagaggccacccctaggccgctaggcttccaccgccgacgcccacagaaaccgtaggcgccaccaggccaccacgagatccctgccgtgacggagaatggaggccgccgcggccgtcctccccacgctggtgccctccgggagcgcggtggtgtctcgtcgctcatcgctcgcgaccgttgttcctctggtctgctgcgggttgctgcacatggatcgctcactgtgtacttgtgtgctcgctctttgctgcgcaggtggtggtgctcctcgcctacctcgggtatctcgccgccgctggagccatcctcccagggaagctcgtcgacggagccctactcccggactcctctcgcctccactatcgctgcaacggtttgctctcgctcctgctgctgctgggactctcggcgttcggtgtctacatggggtggatgtctcccacggttgtagctgacatgggactcgaacttctgtcagtgacctttatttttagtgtcattgtttcttttgcactctacattgccggcatcaagtccggccacaaaagttcttctttgagaccacatgttagtgggagcttcatgcaagattggtggtttggagtgcaacttaatcctcattttatggaagttgacctcaaattcttctttgtgagggcaggaatgatggcatggttatttattaacctctctttgtttgcaaagagctactttgctggttcagccaatctttcggtcattctctaccaatttttttgtgcgtggtatatcattgattacttcgtccatgaagaattcatgacctcaacgtgggacattattgctgaaagactgggtttcatgctggtgtttggtgatctagttttcatccctttcaccttcactattcagctacctagtgttccgaggagctaacaagcaaaaacatgtgttcaagaaggaccccaaagctcctatatggggaaaacctcccaaagttgtcgggggaaagctactagcatctggttactggggcatcgcaaggcactgcaattatctcggagacctgctgctagcactttcgttcagcttgccctgtggagtgagttccgtggtcccatacttctaccccacgtacctgctcattctactggtcttgagggaaaggcgcgatgaggcgaggtgctcgcagaagtacagggagatctgggcagagtactgcaagctcgtgccgtggaggatcctgccttatgtgtactgaagagacggtagaaaccaaggcagctcatggccctgggccagctgtaaaccttattttgtttgcccttaaccagttggtgaatgttgatgtagcactcggtaaactgtgaccgtgcaaacttttgttattgttggtccatacatgtttggaatcgtgaatcagaccgcctcacttggtggcatattattccctttagcgcttgcttgggagctaggacccgagaggattgaaggggttaaaattttcttgttattcaatattgaatattaaggaaattttagtgactttaatcctctccggtatccttgctctcaaataagcccttagttatgtataatctaaatattatgttattgttcttcaaacattagatacatctaagaaattta

SEQ ID NO: 105135 - DNA, 2013 bp, Zea Mays
atggaggccgccgcggccgtcctccccacgctggtgccctccgggagcgcggtggtgtctcgtcgctcatcgctcgcgaccgttgttcctctggtggtggtgctcctcgcctacctcgggtatctcgccgccgctggagccatcctcccagggaagctcgtcgacggagccctactcccggactcctctcgcctccactatcgctgcaacggtttgctctcgctcctgctgctgctgggactctcggcgttcggtgtctacatggggtggatgtctcccacggttgtagctgacatgggactcgaacttctgtcagtgacctttatttttagtgtcattgtttcttttgcactctacattgccggcatcaagtccggccacaaaagttcttctttgagaccacatgttagtgggagcttcatgcaagattggtggtttggagtgcaacttaatcctcattttatggaagttgacctcaaattcttctttgtgagggcaggaatgatggcatggttatttattaacctctctttgtttgcaaagagctactttgctggttcagccaatctttcgtggtatatcattgattacttcgtccatgaagaattcatgacctcaacgtgggacattattgctgaaagactgggtttcatgctggtgtttggtgatctagttttcatccctttcaccttcactattcaggggtggtggcttttgaagaacaaagtagagctgtcccttttgtctggtctagctaacttatgcatctttcttattggctacctagtgttccgaggagctaacaagcaaaaacatgtgttcaagaaggaccccaaagctcctatatggggaaaacctcccaaagttgtcgggggaaagctactagcatctggttactggtcctgtttggaagcaagccagtttcgcaagccagtttctaagaaactggtttttatatttttgctaggagaaggtaacttcttggtttctaagaaactgggaatccaatttctataaactgaggcataagttggtatgtttggaagggaaaaattcctggtatggcatcagattttatactcattccttgtgtgccactgagtgacatatagttatatttttttgtgtatgacatgtggggccagtgatacacaagtaacgagtatattttccgatggcatacaggaaataggccctatcaatttccacaagctagtttgttaaaactggtgcttccaaacatgcccttattcgaaccttttttcttggaaaatgtttggtacctcctcaggctttaaatgctcccttgtcccttaaagaaagatgaagcgtgttgagttgtcttgggaatgcaaaactacaaatattttaatcctccaattacaggggcatcgcaaggcactgcaattatctcggagacctgctgctagcactttcgttcagcttgccctgtggagtgagttccgtggtcccatacttctaccccacgtacctgctcattctactggtcttgagggaaaggcgcgatgaggcgaggtgctcgcagaagtacagggagatctgggcagagtactgcaagctcgtgccgtggaggatcctgccttatgtgtactgaagagacggtagaaaccaaggcagctcatggccctgggccagctgtaaaccttattttgtttgcccttaaccagttggtgaatgttgatgtagcactcggtaaactgtgaccgtgcaaacttttgttattgttggtccatacatgtttggaatcgtgaatcagaccgcctcacttggtggcatattattccctttagcgcttgcttgggagctaggacccgagaggattgaaggggttaaaattttcttgttattcaatattgaatattaaggaaattttagtgactttaatcctctccggtatccttgctctcaaataagcccttagttatgtataatctaaatattatgttattgttcttcaaacattagatacatctaagaaatttattcatacaa

SEQ ID NO: 105136 - DNA, 964 bp, Zea Mays
aaacagtaggctgagaattaagctaatcaacaagtatgatttgtttgtcaggggtggtggcttttgaagaacaaagtagagctgtcccttttgtctggtctagctaacttatgcatctttcttattgggtactcttggtttttctccagaatatcaaagctatagcaatttgatatatacctgtttcttgcattgtaactttgttgtctacatgctataccatgtggcatgtggtactcagctacctagtgttccgaggagctaacaagcaaaaacatgtgttcaagaaggaccccaaagctcctatatggggaaaacctcccaaagttgtcgggggaaagctactagcatctggttactggggcatcgcaaggcactgcaattatctcggagacctgctgctagcactttcgttcagcttgccctgtggagtgagttccgtggtcccatacttctaccccacgtacctgctcattctactggtcttgagggaaaggcgcgatgaggcgaggtgctcgcagaagtacagggagatctgggcagagtactgcaagctcgtgccgtggaggatcctgccttatgtgtactgaagagacggtagaaaccaaggcagctcatggccctgggccagctgtaaaccttattttgtttgcccttaaccagttggtgaatgttgatgtagcactcggtaaactgtgaccgtgcaaacttttgttattgttggtccatacatgtttggaatcgtgaatcagaccgcctcacttggtggcatattattccctttagcgcttgcttgggagctaggacccgagaggattgaaggggttaaaattttcttgttattcaatattgaatattaaggaaattttagtgactttaatcctctccggtatccttgctctcaaataagcccttagttatgtataatctaaatattatgttattgttcttcaaacattagata

SEQ ID NO: 105137 - DNA, 2135 bp, Zea Mays
cgccgccggacgacctcctcctgcctccaccgagcctgcccctgccggctgctggcccgccatgaggaagcgcctggagccccgtctcgtccgggcgctggctaccgccaccacctccgcggcgccttcatcgtcctcgaagccggtccgccccgcggcgccgttccttgccgtgctcctccgacggggccgagcggacgccgcggcgctcctcaaccgccgcctccgcgcggctcccgtcacggaggcctgctccctcctctccgcgctcccggacgtccgcgacgccgtctcctacaacatcgtcctcgccgcgctctgccgccgcgggggcgacctgcgccaggcgctctccctcctcgccgacatgtcgcgggaggcacacccggccgcccgacccaacgccgtgtcctacactatggtcatgcgagggctctgcgcgtcgcgccgcacggatgaagccgtcgcgttgctccgctccatgcaggccagcggcgtccgcgctgacgtcgtcacctacggcacgctcatccgcgggctctgcgacgccgcggagctcgacggggcgttggagctgctgggcgagatgtgcgggagtggtgttcatcccaacgtgatcgtgtacagctgcttgcttcgtgggtactgcaggtccggcaggtggcaggatgtaagcaaggtgttcgaagaaatgtcccgcctaggagtcgaaccggatgtgatcatgttcactggtttcatcgacgacttgtgtaaaaagggaaggataggtaaggctgtaaaggtgaaggacataatggtgcagcgggggctggagccaaacgtagtgacatacaatgtgctcatcaattgcctgtgcaaggaaggatcggtaagggaggcactggcattgaggaatgagatggatgacaagggtgtggcaccggatgttgtgacatacaataccctgatcgcagggctttctggtgtgcttgagatggatggggcaatgggtttgcttgaggagatgattcaaggagatactctagttgagcccgacgtggtgactttcaactcagttatacatggactatgtaagatcggtcggatgagacaggcaatcagtgttcgtgagatgatggccgagagagggtgcatgtgtaacttggtgacatataattatctgattggtggattccttagggttcacaaggttaatatggctatgaatctaatgagtgaactgatcagttctggattggaacctgattcattcacctatagcatattgataaatggcttcagcaagttgtgggaagttgaccgtgcggagatgttcttgcgtacaatgacacaacgtgggataagagccgagctatttcactatattcctttgcttgcagctttgtgtcaactgggaatgatggagcaagctatggttttgttcaatgaaatggatatgaactgcggacttgatgctgttgcatatagcacaatgatgtatggtgcttgcaaatcaggagatataaaagcagctaaacagttgcttcaggatatgcttgatgagggtctggctcctgatgccgtgacatattccattctaattaacatgtttgcaaaattaggagacctagaagaagctgagagggtgcttaaacagatggctgcaagtggctttgtgcctgatgtcgctgtatttgattcactgatcaaaggctatagcgctgaaggccagataaacaagattctggatttgatacatgaaatgagagccaagaatgtagctattgatccaaaatttatttgtacccttgtccgcctccctcaacagatgccgctgctctggtctgccaccaccgccttggtcgctcgcagccatcagtcttgaaatcagttccaccatccctcactcccgtccaccactgtcatgtagtcttgaccagtcatgccctgggagtgctcctgctgatcctgccgtaaaaaagttaaatatcatttccttggactcagcttgcctggatcctgcccatgtgtgcttttttttaccgtcagtcctgtacaaggactatcattttccttctcggcatagccgtaatcatttcgatcgatttgtttccttacaatgtttattcatacctaatgcctcaaaattatgg

SEQ ID NO: 105138 - DNA, 103 bp, Zea Mays
gggaacaggacatcaattgactcaagaagaacagagaggcgtcctccaaaattctgtaagcttgttaactactacctccgttctcgaatatttgtcgctggta

SEQ ID NO: 105139 - DNA, 1338 bp, Zea Mays
tctcgtgccccactcccccctctctcgctgactcggagcagtcaacagcttccccaatcccacccggccaccccgcccgccccagtctggcagcctgcctccatagtccatctcctctccccctaccgacaccgatcccattccccaggcccaagcgcccatggatcccaagcccgacgccagcgcgcccgccgcggtgccagcggagcacgcggcgtacccgaggctgtcaccggaggacatcgccccgccgccgccgcctgtcgtgccgccgtccggcgccaacccctacgtgctctccgccccgtcgcctaacccgcccgccaagagcgctagggagaatctgagggagatgttcggcatggtggggaagaagttcaacgaggccgcgcgcaagaccgagggcatcgccggcgacgtctggcagcatctgaaaactggacccagcatcactgatactgccatggggaggattgctcagatatccaaggttatatctgagggtggctacgacaagatatttcagcagacttttgagtgctcgcctgatgagaagctcaacaaggcatatgtgtgctacctatcaacgtcgcatggaccaatcatgggcgtcctgtatctctcgactgtcaagattgcattcggtagcgacagccctgtgaaatatgtgactgaggacaacaaaactgagtcatccttttataaggttgttttaccccttcatcacctgagatcagttactcccacagcaagtcagcaaaaccctgcagagaggtacattcaggtcgtttcagtcgacaaccacgagttctggttcatgggtttcgtgaactatgatagcgctgtaaagaatcttcaggagtctgttcgagttgttcacggggcctagaggttgcccatcacttttcctctatgtggatgtagtatgcccgtgtaaatgtatttgtgcatggcacctgtaaagttgtgtgttgaaattggtacacatcattaaggctatgtttgtttctctcctaaattatataagttggattataatgaaaagatagtagagtaaattatcactttgatatcataaataagttaaaataaactacttaatgctagcttattttaacttatttgtagttctaaagtgatgttttactcttctacctttccaccataacccaacttatacaatctaaagagaaacaaacacaccctaagcagtgcattcagatctgtggcatgtgaatgtttttggataaatgtgtaaatctctactacttattaaggctgtaagggtagcctgctgttctgccttcgttcaatctggattgtccatcgctgttgttc

SEQ ID NO: 105140 - DNA, 1161 bp, Zea Mays
gcagcgatgaacggtcaaggtcgatcctcgcaacagtgccgtgcggcgcccgctcctcctaccctcgcccgccctatataagcgctactcgtgttttccctcttccccctcgtccaaaaccctagccctcgcgccgccgccgccgtgcccagcgctcgagctcctcgcctgccgcgagctcgcgccgcaacgccaccatgaagttcaacatcgcgaacccgtctaccgggtgccagaagaagctggaaatcgatgacgaccagaaactacgtgccttttatgaccgaaggatctcccaggaggtcagtggtgatgctctgggtgaggagtttaagggttatgtcttcaagatcatgggtggatgtgagccaagacctatctgttatcaacttggtaattgttaagaagggtgagaacgatctgcctggtttaactgacactgagaagccaaggatgaggggtcccaaaagggcctccaagatcaggaagctgttcaatcttgcaaaggatgacgacgtgcgcaagtacgtgaacacgtaccgcaggacattcactaccaagaatggcaagaaggtgagcaaggcacctaagatccagcggcttgtgacccccttgaccctccagaggaagcgtgctagaattgctgacaagaagaagaggatcgctaagaagaagtctgaggctgctgagtaccagaagcttcttgcccagaggctgaaagaacagagggaccgccgcagtgagagcttggccaagaggaggtctaagctttctgccgccgccaaggcttctgctgccacctctgcctaagaatgatcagtgctttgagatgttttcaaggcctattttgttacagcttataagtaccttatgctgccctggctgtgttgcatcagtcgaccctccctacttagacttatgagtaattgttgcaattttgtatggacatggtactggcttgtcgggattttttgagtaccagaggtttgatatgttgttttattctgtgaacgtcagctagccttgttcttttgtctgcagtctgcaccatatgttgaactgctggattttttctgcttggttctatgtggcgttaaccttgtatactgcgttgctgcttcgtgcgtgataatagtcttgacgctgcacactgtttgatta

SEQ ID NO: 105141 - DNA, 1304 bp, Zea Mays
gcagcgatgaacggtcaaggtcgatcctcgcaacagtgccgtgcggcgcccgctcctcctaccctcgcccgccctatataagcgctactcgtgttttccctcttccccctcgtccaaaaccctagccctcgcgccgccgccgccgtgcccagcgctcgagctcctcgcctgccgcgagctcgcgccgcaacgccaccatgaagttcaacatcgcgaacccgtctaccgggtgccagaagaagctggaaatcgatgacgaccagaaactacgtgccttttatgaccgaaggatctcccaggaggtcagtggtgatgctctgggtgaggagtttaagggttatgtcttcaagatcatgggtggatgtgacaaacaaggcttcccaatgaagcaaggagttctgacttctggtcgtgtccgccttctgctccacagaggcactccctgcttccgcggttatggcaggcgtaatggtgagcgcaggaggaagtctgtccgtggttgtattgtgagccaagacctatctgttatcaacttggtaattgttaagaagggtgagaacgatctgcctggtttaactgacactgagaagccaaggatgaggggtcccaaaagggcctccaagatcaggaagctgttcaatcttgcaaaggatgacgacgtgcgcaagtacgtgaacacgtaccgcaggacattcactaccaagaatggcaagaaggtgagcaaggcacctaagatccagcggcttgtgacccccttgaccctccagaggaagcgtgctagaattgctgacaagaagaagaggatcgctaagaagaagtctgaggctgctgagtaccagaagcttcttgcccagaggctgaaagaacagagggaccgccgcagtgagagcttggccaagaggaggtctaagctttctgccgccgccaaggcttctgctgccacctctgcctaagaatgatcagtgctttgagatgttttcaaggcctattttgttacagcttataagtaccttatgctgccctggctgtgttgcatcagtcgaccctccctacttagacttatgagtaattgttgcaattttgtatggacatggtactggcttgtcgggattttttgagtaccagaggtttgatatgttgttttattctgtgaacgtcagctagccttgttcttttgtctgcagtctgcaccatatgttgaactgctggattttttctgcttggttctatgtggcgttaaccttgtatactgcgttgctgcttcgtgcgtgataatagtcttgacgctgcacactgtttgatta

SEQ ID NO: 105142 - DNA, 1107 bp, Zea Mays
taattagcaccttccttttttctctgccgtcaaccacgcccacgtccccgcggagcactgacatgcgcgcgtcgtggtaccctggtctgtggcctctgcgctccccttcctccgcggccctcgcctcgccagaacagcgggagatttcgggatcgggcggccctcctccggcgtccggatcgagaggattggacccgaatccgatcgcctagcagggggcgcggcgcgcgcgcgatggcgccggcggtggtgtcggcgctggccaagtacaaactggtgttcctcggcgaccagtccgtgggcaagaccagcatcatcaccagattcatgtacgacaagttcgacaccacctaccaggcaacgattggcattgactttctgtcaaaaacaatgtatctagaagaccgaactgtacgtttacaactctgggatactgcaggacaggagaggtttaggagtcttattccaagctacatcagggactcttctgttgcggtggttgtttatgatgtatccaatagacagtccttcctgaacacctcaaagtggatcgatgaagtgcgcaccgagagaggtggcgatgtgataatcgtgctcgttggcaacaaaactgatcttgtcgacaagagacaagtgtccacagaagaaggagagagcaaggcaaaagaattgaatgtcatgttcatcgagaccagcgcgaaagccggcttcaacatcaagccgttgttccgcaagatcgctgcagccctgccaggaatggagacattgtcagcaaagcaggaggacatggtggatgtcaacctgaagtcgacttctagccagtccaactcgcaacaacaggagggaagtggatgcgcctgctagaagtgtgttagcttcacgcatactttcacttgaagagcgtgtgtcggtaactgttgtataagcagttacatatttcactagtgttactacttactatccttaattctctgatgcttctgtagtgaggctcacatcgttttctcattttccatcttgattttgtatgttgcggcaaaagaccagaaataacaacattttgaatcacaccgggtcttttgtttcgaaataacaattagttatcgg

SEQ ID NO: 105143 - DNA, 1639 bp, Zea Mays
tgtggacccctctcccactcccctccggccctcccctcccacctcacatcccttcttgcttctcgcctccccacccttcatccacccgccgctcctcaagccccaagctccggcgatatgtcacgcttcggtcgatccggtccgccgccgccgatccgcgacacatattcactcctcgtcctcaacatcaccttccgcacgactgctgatgacctcttcccgctcttcgacaagtacggcgagattgtcgacatctacatcccaagggaccgcaggactggcgactcgcgcggattcgcgttcgtgaggtacaagtacgaggacgaggcacagaaggcagttgataggctcgatgggagattggtagacgggagggagatcatggtgcagtttgccaagtacggtccaaatgctgaacggattaataaagggagaataatggagccagttccaaggcccaggggccgttccagaagccgcagtccaagacggaggtaccgtgatgattatcgagatgactaccaggatagagattatagaaggcgaagccgtagccagagtagagatagatacgcccgtgacaggtacagagatagggattaccgccatcgtagcctgagtcgcaggtacagtcctgatgattacaagaagcgtgggagagacaggcatatgcacagaacatttgtttaattgttccatattgctggtttgcacttattcaccacatcatctgctgtgattatgggcagtttgtctcctgcacgaagaagccctagtcatagccgcagccgcagttacactcctgatgattacaagaggcgtggcaaagacagcagcgcatcacctgcaagtaggagccctagtcgctcccctcctcgcaagacgccaccttctcctaagagatctcctgtcaggcacaatgatgaccggtctccacgctcacggagcccttcaacataagcacaattcacttgcaaagcatcttgaacagctcaggatgaatggacttgctctgatcctatgtgtgtgtggctatgcttgtgctcaatggtgggcacttttcagttaaagttttgtagtgctgtctgtcagttgctgcctcaaacttggaatactacttctgtttggcacctgaactgcttatcaaaaactttatgtataccagttacattccacttttaaccttcatattagtattaccatattataactgtcttttcagtatttagtacttactattcatggtgacttgcacctttctagttacatggagtgaagatatgctggctgatatgcggtcaacatgcacgtagcttactgttgaagttgatataatctgtgctgtttgcgttgttgatgatgatggctgatgagatgatggaactgcagctgactgcacaatttgctgctgtctgcacctattatgctgacaacaatagaaggcgtggggagaagtttcagcgacagaaatgcctgactagttgattgatcttctggatctgaatgctgatgatttgcttcaaagacttagtctcatgtagtcatgtcatttgtggagtctgctgacccatcaggctctggattttgtaacacgaactttgatatgcttctgtgaaaaaaaatgggtaaccttacataa

SEQ ID NO: 105144 - DNA, 1636 bp, Zea Mays
tgtggacccctctcccactcccctccggccctcccctcccacctcacatcccttcttgcttctcgcctccccacccttcatccacccgccgctcctcaagccccaagctccggcgatatgtcacgcttcggtcgatccggtccgccgccgccgatccgcgacacatattcactcctcgtcctcaacatcaccttccgcacgactgctgatgacctcttcccgctcttcgacaagtacggcgagattgtcgacatctacatcccaagggaccgcaggactggcgactcgcgcggattcgcgttcgtgaggtacaagtacgaggacgaggcacagaaggcagttgataggctcgatgggagattggtagacgggagggagatcatggtgcagtttgccaagtacggtccaaatgctgaacggattaataaagggagaataatggagccagttccaaggcccaggggccgttccagaagccgcagtccaagacggaggtaccgtgatgattatcgagatgactaccaggatagagattatagaaggcgaagccgtagccagagtagagatagatacgcccgtgacaggtacagagatagggattaccgccatcgtagcctgagtcgcaggtacagtcctgatgattacaagaagcgtgggagagacaggcatatgcacagaacatttgtttaattgttccatattgctggtttgcacttattcaccacatcatctgctgtgattatgggcagtttgtctcctgcacgaagaagccctagtcatagccgcagccgcagttacactcctgatgattacaagaggcgtggcaaagacagcgcatcacctgcaagtaggagccctagtcgctcccctcctcgcaagacgccaccttctcctaagagatctcctgtcaggcacaatgatgaccggtctccacgctcacggagcccttcaacataagcacaattcacttgcaaagcatcttgaacagctcaggatgaatggacttgctctgatcctatgtgtgtgtggctatgcttgtgctcaatggtgggcacttttcagttaaagttttgtagtgctgtctgtcagttgctgcctcaaacttggaatactacttctgtttggcacctgaactgcttatcaaaaactttatgtataccagttacattccacttttaaccttcatattagtattaccatattataactgtcttttcagtatttagtacttactattcatggtgacttgcacctttctagttacatggagtgaagatatgctggctgatatgcggtcaacatgcacgtagcttactgttgaagttgatataatctgtgctgtttgcgttgttgatgatgatggctgatgagatgatggaactgcagctgactgcacaatttgctgctgtctgcacctattatgctgacaacaatagaaggcgtggggagaagtttcagcgacagaaatgcctgactagttgattgatcttctggatctgaatgctgatgatttgcttcaaagacttagtctcatgtagtcatgtcatttgtggagtctgctgacccatcaggctctggattttgtaacacgaactttgatatgcttctgtgaaaaaaaatgggtaaccttacataa

SEQ ID NO: 105145 - DNA, 1513 bp, Zea Mays
tgtggacccctctcccactcccctccggccctcccctcccacctcacatcccttcttgcttctcgcctccccacccttcatccacccgccgctcctcaagccccaagctccggcgatatgtcacgcttcggtcgatccggtccgccgccgccgatccgcgacacatattcactcctcgtcctcaacatcaccttccgcacgactgctgatgacctcttcccgctcttcgacaagtacggcgagattgtcgacatctacatcccaagggaccgcaggactggcgactcgcgcggattcgcgttcgtgaggtacaagtacgaggacgaggcacagaaggcagttgataggctcgatgggagattggtagacgggagggagatcatggtgcagtttgccaagtacggtccaaatgctgaacggattaataaagggagaataatggagccagttccaaggcccaggggccgttccagaagccgcagtccaagacggaggtaccgtgatgattatcgagatgactaccaggatagagattatagaaggcgaagccgtagccagagtagagatagatacgcccgtgacaggtacagagatagggattaccgccatcgtagcctgagtcgcagtttgtctcctgcacgaagaagccctagtcatagccgcagccgcagttacactcctgatgattacaagaggcgtggcaaagacagcgcatcacctgcaagtaggagccctagtcgctcccctcctcgcaagacgccaccttctcctaagagatctcctgtcaggcacaatgatgaccggtctccacgctcacggagcccttcaacataagcacaattcacttgcaaagcatcttgaacagctcaggatgaatggacttgctctgatcctatgtgtgtgtggctatgcttgtgctcaatggtgggcacttttcagttaaagttttgtagtgctgtctgtcagttgctgcctcaaacttggaatactacttctgtttggcacctgaactgcttatcaaaaactttatgtataccagttacattccacttttaaccttcatattagtattaccatattataactgtcttttcagtatttagtacttactattcatggtgacttgcacctttctagttacatggagtgaagatatgctggctgatatgcggtcaacatgcacgtagcttactgttgaagttgatataatctgtgctgtttgcgttgttgatgatgatggctgatgagatgatggaactgcagctgactgcacaatttgctgctgtctgcacctattatgctgacaacaatagaaggcgtggggagaagtttcagcgacagaaatgcctgactagttgattgatcttctggatctgaatgctgatgatttgcttcaaagacttagtctcatgtagtcatgtcatttgtggagtctgctgacccatcaggctctggattttgtaacacgaactttgatatgcttctgtgaaaaaaaatgggtaaccttacataa

SEQ ID NO: 105146 - DNA, 1445 bp, Zea Mays
tgtggacccctctcccactcccctccggccctcccctcccacctcacatcccttcttgcttctcgcctccccacccttcatccacccgccgctcctcaagccccaagctccggcgatatgtcacgcttcggtcgatccggtccgccgccgccgatccgcgacacatattcactcctcgtcctcaacatcaccttccgcacgactgctgatgacctcttcccgctcttcgacaagtacggcgagattgtcgacatctacatcccaagggaccgcaggactggcgactcgcgcggattcgcgttcgtgaggtacaagtacgaggacgaggcacagaaggcagttgataggctcgatgggagattggtagacgggagggagatcatggtgcagtttgccaagtacggtccaaatgctgaacggattaataaagggagaataatggagccagttccaaggcccaggggccgttccagaagccgcagtccaagacggaggtaccgtgatgattatcgagatgactaccaggatagagattatagaaggcgaagccgtagccagagtagagatagatacgcccgtgacaggtacagagatagggattaccgccatcgtagcctgagtcgcaggtacagtcctgatgattacaagaagcgtgggagagacagtttgtctcctgcacgaagaagccctagtcatagccgcagccgcagttacactcctgatgattacaagaggcgtggcaaagacagcgcatcacctgcaagtaggagccctagtcgctcccctcctcgcaagacgccaccttctcctaagagatctcctgtcaggcacaatgatgaccggtctccacgctcacggagcccttcaacataagcacaattcacttgcaaagcatcttgaacagctcaggatgaatggacttgctctgatcctatgtgtgtgtggctatgcttgtgctcaatggtgggcacttttcagttaaagttttgtagtgctgtctgtcagttgctgcctcaaacttggaatactacttctgtttggcacctgaactgcttatcaaaaactttatttacatggagtgaagatatgctggctgatatgcggtcaacatgcacgtagcttactgttgaagttgatataatctgtgctgtttgcgttgttgatgatgatggctgatgagatgatggaactgcagctgactgcacaatttgctgctgtctgcacctattatgctgacaacaatagaaggcgtggggagaagtttcagcgacagaaatgcctgactagttgattgatcttctggatctgaatgctgatgatttgcttcaaagacttagtctcatgtagtcatgtcatttgtggagtctgctgacccatcaggctctggattttgtaacacgaactttgatatgcttctgtgaaaaaaaatgggtaaccttacataa

SEQ ID NO: 105147 - DNA, 2040 bp, Zea Mays
tgtggacccctctcccactcccctccggccctcccctcccacctcacatcccttcttgcttctcgcctccccacccttcatccacccgccgctcctcaagccccaagctccggcgatatgtcacgcttcggtcgatccggtccgccgccgccgatccgcgacacatattcactcctcgtcctcaacatcaccttccgcacgactgctgatgacctcttcccgctcttcgacaagtacggcgagattgtcgacatctacatcccaagggaccgcaggactggcgactcgcgcggattcgcgttcgtgaggtacaagtacgaggacgaggcacagaaggcagttgataggctcgatgggagattggtagacgggagggagatcatggtgcagtttgccaagtacggtccaaatgctgaacggattaataaagggagaataatggagccagttccaaggcccaggggccgttccagaagccgcagtccaagacggaggtaccgtgatgattatcgagatgactaccaggatagagattatagaaggcgaagccgtagccagagtagagatagatacgcccgtgacaggtacagagatagggattaccgccatcgtagcctgagtcgcagtttgtctcctgcacgaagaagccctagtcatagccgcagccgcagttacactcctgatgattacaagaggcgtggcaaagacagcgcatcacctgcaagtaggagccctagtcgctcccctcctcgcaagacgccaccttctcctaagagatctcctgtcaggcacaatgatgaccggtctccacgctcacggagcccttcaacataagcacaattcacttgcaaagcatcttgaacagctcaggatgaatggacttgctctgatcctatgtgtgtgtggctatgcttgtgctcaatggtgggcacttttcagttaaagttttgtagtgctgtctgtcagttgctgcctcaaacttggaatactacttctgtttggcacctgaactgcttatcaaaaactttatttacatggagtgaagatatgctggctgatatgcggtcaacatgcacgtagcttactgttgaagttgatataatctgtgctgtttgcgttgttgatgatgatggctgatgagatgatggaactgcagctgactgcacaatttgctgctgtctgcacctattatgctgacaagtaagattccaatgatttagctgaattcagtgttcccatttttcgtgtcataaaatgcatgacaccacgaatcttgaatctacatgcttaggtgttaacacccttttaatattttggtttagaagtgtctgcactgatttatcatagatctgttttggggttgttggatcataagcctacatgtgcattattaattgttgcatgcactggttgtgctgtcaatgcatttctgccatttgccagacatgtcttgtaaagaaaagcataagctcagtcttacttttggaaactgttccattgtcttgagtagaggtgagtgttgtactgttgtttaagctgtatacacactcgtgtcataatgccgttgtagtgcaatccaagttcattgacatgatcacgagtcataaaagggtatcttttaccccaagtgttcattaatctcacctacttatgcttgcaagttaatgatttgcatgaaataaggaagttctctgcattaatgtatcgagagtaggaaaggtatgatggcatgtgagtatttggatttgttggtgctctttacccttcttcagcaatagaaggcgtggggagaagtttcagcgacagaaatgcctgactagttgattgatcttctggatctgaatgctgatgatttgcttcaaagacttagtctcatgtagtcatgtcatttgtggagtctgctgacccatcaggctctggattttgtaacacgaactttgatatgcttctgtgaaaaaaaatgggtaaccttacataagtgtttagacggtttagtggtgttctgctcttttctttacggtactgaaaaacattgactgt

SEQ ID NO: 105148 - DNA, 1002 bp, Zea Mays
tcccgaccgcgcgcgcgcgcaatgacgaagcacacggccttcgccggcgcggacggcggcacgaccgccgccgccgccgtcacgctgtgcgcgccgccgagggcgcgcggcgcacgcagggtggccgcggggtccttgccggagctcgttcggcgccacgcggatctcgacgactggatggagaagcacccgtcggcattggccgggttcgagtcggtgctggcggccgccgaggggaagcaggtcgtgatgttcctggactacgacggcacgctgtcgccgatcgtcaaggaccccgacagcgccgtcatgtcggaggagatgcgagacgcggtgagaggcgtggccgagcacttcccgacggcgatcgtgagcgggaggtgtagagacaaggtgttcaacttcgtgaagctggcggagctgtactacgccgggagccacggcatggacatcaagggacccacggcgcagtccaagcacaccaaggcaaaggccgaagctgttctgtgccaaccagcgagcgcgttcctgcccgtcatcgacgaggcgtaccgcgcgctgacggcgaggacggcgccgatccccggcgcgacggtggagaacaacaagttctgcctctccgtccacttccgctgcgtccaggaggagaaatggcgcgctctggaggagcaggtgcggtcggtgctcaaggagtacccggacctccggctcaccaagggcaggaaggtcttggaggtccggccgtccatcaagtgggacaagggcaacgccattcagttcttgctcgagtgtctcggttttgctgacagtaacaatgtcttcccgatatatattggagacgatcgcaccgacgaggacgcgttcaaggtgctgcgcggcatggggcaggggatcggaatcctcgtgagcaagattccaaaggagaccagtgcatcctactccttgcgtgaaccttccgaggtgaaggagttcctgcacatgttggtcaggtccaagcagcgg

SEQ ID NO: 105149 - DNA, 1612 bp, Zea Mays
tcccgaccgcgcgcgcgcgcaatgacgaagcacacggccttcgccggcgcggacggcggcacgaccgccgccgccgccgtcacgctgtgcgcgccgccgagggcgcgcggcgcacgcagggtggccgcggggtccttgccggagctcgttcggcgccacgcggatctcgacgactggatggagaagcacccgtcggcattggccgggttcgagtcggtgctggcggccgccgaggggaagcaggtcgtgatgttcctggactacgacggcacgctgtcgccgatcgtcaaggaccccgacagcgccgtcatgtcggaggagatgcgagacgcggtgagaggcgtggccgagcacttcccgacggcgatcgtgagcgggaggtgtagagacaaggtgttcaacttcgtgaagctggcggagctgtactacgccgggagccacggcatggacatcaagggacccacggcgcagtccaagcacaccaaggcaaaggccgaagctgttctgtgccaaccagcgagcgcgttcctgcccgtcatcgacgaggcgtaccgcgcgctgacggcgaggacggcgccgatccccggcgcgacggtggagaacaacaagttctgcctctccgtccacttccgctgcgtccaggaggagaaatggcgcgctctggaggagcaggtgcggtcggtgctcaaggagtacccggacctccggctcaccaagggcaggaaggtcttggaggtccggccgtccatcaagtgggacaagggcaacgccattcagttcttgctcgagtgtctcggttttgctgacagtaacaatgtcttcccgatatatattggagacgatcgcaccgacgaggacgcgttcaaggtgctgcgcggcatggggcaggggatcggaatcctcgtgagcaagattccaaaggagaccagtgcatcctactccttgcgtgaaccttccgaggtgaaggagttcctgcacatgttggtcaggtccaagcagcggcgggactagtcatggtccaggcagcaggtggtgaaaagctagaagcaaccgaggtcggtcgaggtagtccaagcacatgcatgtccatggtcgacaagcgaagctgtttttgcccatggtctctgtgaatatatcagctgactgtatctgactggatccggattttaactgttgcgctaggaaggaaaagttttttttttggttccttcattagagaagaaaaaagagagtgctgtctccgcgcctcgccgccggcgccgacacgcagccacgggggtggacgcaggcgccgacgggctgcatggtggttttgcctgctataaggtgggctgggccggcgtgtgaggctgtgagccccaggagtccagtacacctcagcctacctacgaaagagaacagaaccgaatacgctcgcacccatgctttgtgcccattggggccttagggcgtgcacaaaggcattaaaaacatcgtgttttactgggtgttagggtgctaattgtaaaaatattggagagccaatctcttggtcaataaacacctcgggcgctcagctcaatgtcgaagaaacacatctgtctacgttgtacctgctaatggcaaaaaatcc

SEQ ID NO: 105150 - DNA, 1303 bp, Zea Mays
aacgaaaaaaaatccctataccaaaaaaaaaatggaacgaacaaacgaaccccctcttcttgcattggaggaaatggatggattggctggggtcagcgtggcaggcacccgagcgatggaggcggtgggagaggagaagggagcgacggtggcggaggaggggaagatgatgaaggagcagggagagaaaggagtggtggcctcgacctcggaggcggagaaggagaagatggtggaggcgaagggagagaaggcagtggcggcatcggaggcagagggtgggaagatggtggaggggcagggagagaaggcagtggcgacctcggaggcggaggatgtgaagatggtggaggggaagggagagaaggcagtggcgaccacggaggcggaggatgtgaagatggtggaggggaagggagagaaggcagtggcgaccacggaggcggaagatgtgaagatggtggagtggaagggagagaaggcagtggcggccacggaggcggagatagggacttcggaaccgaaggatgtggctggcgggaggcttatcaccttgaagagctcggacggcaaggttcatcgcgcgtcggtggcggcggcacagctgtcggtgattctcagcggcatgatagaggaagtcgtcaccgacgacgaagtcgtcatagtccctttagtcgacgggcccaccctggtcacggtgctggagtactgcaccaagcacgccgaggtcgcggccgccgccagaggcaccagcgcagtcgctttcgccacggcgtccaaggccctcgaggcttgggaccgcgacttcctcgaccgcctcaccatggacgcgctccacgacctcttcgtcgcctccaacttcctcgaaattcaagggctcctcaacgccatcgctcagaaggccgccgacgtgatcaagggcaagaccaccgagcagatccgggacgccttcaacatcgtcaacgacctcaccccggaacaggaggcgacggccgcggagctgcgtcggaagtacacctgggactaccatccagaagcctgagcctaacagtttgttccatgctgctctaaccatctatctcaccacatctgccaccctagcggaaggttccccgtgttccacttcctcccattcccatcgtagtatagcagctgtctcgcctctcgcgtccatagggttctgatctgctcggtctaataagtactggcttggcattttcatttcgtcctgttgaatgtgcggtggaactaagtctgaacttgcttgcctgaagcgaatacatatcagatatcacattctgaa

SEQ ID NO: 105151 - DNA, 2130 bp, Zea Mays
gcctctggttttcttccgcaagctgttatctctcgcacgcaaacgactagcgcagcaaacaccccacctcgctcgcgatcgcggcacggcggcggcaatccaccgcggctcgctgccttcgccagtgatctggcctcttcgagtttcgccatcagataatcatccccagccactcccctcatctcccatcccctcccttccccttccgctgaatcggcgcggagaggatggcgtcccggcggggcagcagcagttgcgcgctctgcgagggatccaacctgccgtcttgttgcgcctcgtgcgtcaacgcgaggctggtcgagtaccacacgaggctgcgcatgatgaggagcctccgcgactccctccacggccgaatcgccgcacgcctcgaagccaagagaaaaacagatgagcagcggatctggagaacaagcaaagaacaggatatcatggagttgaggaatcggctcactgaattgaagagaaaaactgccgtagacaagaccgaggtcgagcaggcatcgagtgatcttaaggcaaaaattgtgccattgaatttggctcttgccacgctaaaaaagagacgagctgatgcagtggccatgcacaccaatgccatgaaagttgctcagatgaatctcatggcaaccacctcagattgtatgaaaatgcaatcaaaatctgtaaagcaactttgcagattgtttccaatgcgacgagtaattaaagagggagaaaagaaagacggctacaatggtccgtatgattcaatatgtggggttcgtcttcctcgtggtcttgatccacattctatttcatcagaagaactgtcggcatctttggggcacatgctacatttcatcaatatagcagttcgtatcttatcagcacctgctcttcatgtatcaggctgtaagggctcatgctcaaatatatggcagcggagttcctactggagcacacgacagtcccagagcaaggtttaccctctttttatacctaggaaaaatgtttgcacaggtggtgaagaaacttcattgacagaaagtggctcgagtaactttggggttgactctgtggattctgtcaagaaaccgtcttttgatcccaagagaagcaatagctttaacttttctggtgcatcttcccactccatggagaggcatcaatatttgcagagaggaatatcactattaaagacaagtgttacagccattactacctactattacaactcactgggcttggatgtgccatccaatctttctacttttgaggcgtttgctaagttgctccatatgttgtcgtcatcaaaggcccttcgaactgcctttgaattggacattgcttcaaggtcagagaagcaagcccagcagctgaacagatcgatttggaaggcaagttctgccatatcatcggacagcagttttatggacagcatgcacacaaccatcatgcccagcactctggacaacctcctcatgaactcagacgagagcctgtacactggtaagctggtgaagcatggtggtgcgccagatagcatatttgacagctgggacatagtagagcgtgaggttctaccaccaccaccctcgcgggttgaagacgtcgctcagtgggaatgggccatgtatgctggcagcaccaaaaagaaatgacctctatttacaaatcctccgtgaagcccaaactgttagacactgcaagagcttcagtttagatatgtaagtacttgatcactaggctcttagaaaccgggaatgtggaacttggccacgttcctcatttctggaacgtgggaataatctcgttcccatagttttaaaacctaatttaaatagcgtactgtgtacaatgttcctatttctcgatccattcattgattcgatctggggacctggttactaagatcaggctccggtcccatgtacagtatcagtccagacctaacctcgccctgtggggctgacctgtgaatcatctatactgcaagaatgcacataggagaattgcagtgtagagttgatttgctgccatctctacatcagtacgtgtacatgagggcagccctgtaaatttgtaaatataacccctgtaccgtttagaaatgaaaataaaatactt

SEQ ID NO: 105152 - DNA, 2115 bp, Zea Mays
gcaagctgttatctctcgcacgcaaacgactagcgcagcaaacaccccacctcgctcgcgatcgcggcacggcggcggcaatccaccgcggctcgctgccttcgccagtgatctggcctcttcgagtttcgccatcagataatcatccccagccactcccctcatctcccatcccctcccttccccttccgctgaatcggcgcggagaggatggcgtcccggcggggcagcagcagttgcgcgctctgcgagggatccaacctgccgtcttgttgcgcctcgtgcgtcaacgcgaggctggtcgagtaccacacgaggctgcgcatgatgaggagcctccgcgactccctccacggccgaatcgccgcacgcctcgaagccaagagaaaaacagatgagcagcggatctggagaacaagcaaagaacaggatatcatggagttgaggaatcggctcactgaattgaagagaaaaactgccgtagacaagaccgaggtcgagcaggcatcgagtgatcttaaggcaaaaattgtgccattgaatttggctcttgccacgctaaaaaagagacgagctgatgcagtggccatgcacaccaatgccatgaaagttgctcagatgaatctcatggcaaccacctcagattgtatgaaaatgcaatcaaaatctgtaaagcaactttgcagattgtttccaatgcgacgagtaattaaagagggagaaaagaaagacggctacaatggtccgtatgattcaatatgtggggttcgtcttcctcgtggtcttgatccacattctatttcatcagaagaactgtcggcatctttggggcacatgctacatttcatcaatatagcagttcgtatcttatcagcacctgctcttcatgtatcaggctgtaagggctcatgctcaaatatatggcagcggagttcctactggagcacacgacagtcccagagcaaggtttaccctctttttatacctaggaaaaatgtttgcacaggtggtgaagaaacttcattgacagaaagtggctcgagtaactttggggttgactctgtggattctgtcaagaaaccgtcttttgatcccaagagaagcaatagctttaacttttctggtgcatcttcccactccatggagaggcatcaatatttgcagagaggaatatcactattaaagacaagtgttacagccattactacctactattacaactcactgggcttggatgtgccatccaatctttctacttttgaggcgtttgctaagttgctccatatgttgtcgtcatcaaaggcccttcgaactgcctttgaattggacattgcttcaaggtcagagaagcaagcccagcagctgaacagatcgatttggaaggcaagttctgccatatcatcggacagcagttttatggacagcatgcacacaaccatcatgcactctggacaacctcctcatgaactcagacgagagcctgtacactggtaagctggtgaagcatggtggtgcgccagatagcatatttgacagctgggacatagtagagcgtgaggttctaccaccaccaccctcgcgggttgaagacgtcgctcagtgggaatgggccatgtatgctggcagcaccaaaaagaaatgacctctatttacaaatcctccgtgaagcccaaactgttagacactgcaagagcttcagtttagatatgtaagtacttgatcactaggctcttagaaaccgggaatgtggaacttggccacgttcctcatttctggaacgtgggaataatctcgttcccatagttttaaaacctaatttaaatagcgtactgtgtacaatgttcctatttctcgatccattcattgattcgatctggggacctggttactaagatcaggctccggtcccatgtacagtatcagtccagacctaacctcgccctgtggggctgacctgtgaatcatctatactgcaagaatgcacataggagaattgcagtgtagagttgatttgctgccatctctacatcagtacgtgtacatgagggcagccctgtaaatttgtaaatataacccctgtaccgtttagaaatgaaaataaaatacttggaatac

SEQ ID NO: 105153 - DNA, 1471 bp, Zea Mays
tggaccatagagaaatgttatatggagaccagtagcaatagcattccttgttatctacatgcacctgagtattttaagtattatgttcttgggttgtctaaattgttctctagtacagattgcaacaatactttgtcaatttggttctgaattagtgaaacttaagtttcttcttgctacaggcacatgctacatttcatcaatatagcagttcgtatcttatcagcacctgctcttcatgtatcaggctgtaagggctcatgctcaaatatatggcagcggagttcctactggagcacacgacagtcccagagcaaggtttaccctctttttatacctaggaaaaatgtttgcacaggtggtgaagaaacttcattgacagaaagtggctcgagtaactttggggttgactctgtggattctgtcaagaaaccgtcttttgatcccaagagaagcaatagctttaacttttctggtgcatcttcccactccatggagaggcatcaatatttgcagagaggaatatcactattaaagacaagtgttacagccattactacctactattacaactcactgggcttggatgtgccatccaatctttctacttttgaggcgtttgctaagttgctccatatgttgtcgtcatcaaaggcccttcgaactgcctttgaattggacattgcttcaaggtcagagaagcaagcccagcagctgaacagatcgatttggaaggcaagttctgccatatcatcggacagcagttttatggacagcatgcacacaaccatcatgcccagcactctggacaacctcctcatgaactcagacgagagcctgtacactggtaagctggtgaagcatggtggtgcgccagatagcatatttgacagctgggacatagtagagcgtgaggttctaccaccaccaccctcgcgggttgaagacgtcgctcagtgggaatgggccatgtatgctggcagcaccaaaaagaaatgacctctatttacaaatcctccgtgaagcccaaactgttagacactgcaagagcttcagtttagatatgtaagtacttgatcactaggctcttagaaaccgggaatgtggaacttggccacgttcctcatttctggaacgtgggaataatctcgttcccatagttttaaaacctaatttaaatagcgtactgtgtacaatgttcctatttctcgatccattcattgattcgatctggggacctggttactaagatcaggctccggtcccatgtacagtatcagtccagacctaacctcgccctgtggggctgacctgtgaatcatctatactgcaagaatgcacataggagaattgcagtgtagagttgatttgctgccatctctacatcagtacgtgtacatgagggcagccctgtaaatttgtaaatataacccctgtaccgtttagaaatgaaaataaaatacttggaata

SEQ ID NO: 105154 - DNA, 1466 bp, Zea Mays
tggaccatagagaaatgttatatggagaccagtagcaatagcattccttgttatctacatgcacctgagtattttaagtattatgttcttgggttgtctaaattgttctctagtacagattgcaacaatactttgtcaatttggttctgaattagtgaaacttaagtttcttcttgctacaggcacatgctacatttcatcaatatagcagttcgtatcttatcagcacctgctcttcatgtatcaggctgtaagggctcatgctcaaatatatggcagcggagttcctactggagcacacgacagtcccagagcaaggtttaccctctttttatacctaggaaaaatgtttgcacaggtggtgaagaaacttcattgacagaaagtggctcgagtaactttggggttgactctgtggattctgtcaagaaaccgtcttttgatcccaagagaagcaatagctttaacttttctggtgcatcttcccactccatggagaggcatcaatatttgcagagaggaatatcactattaaagacaagtgttacagccattactacctactattacaactcactgggcttggatgtgccatccaatctttctacttttgaggcgtttgctaagttgctccatatgttgtcgtcatcaaaggcccttcgaactgcctttgaattggacattgcttcaaggtcagagaagcaagcccagcagctgaacagatcgatttggaaggcaagttctgccatatcatcggacagcagttttatggacagcatgcacacaaccatcatgcactctggacaacctcctcatgaactcagacgagagcctgtacactggtaagctggtgaagcatggtggtgcgccagatagcatatttgacagctgggacatagtagagcgtgaggttctaccaccaccaccctcgcgggttgaagacgtcgctcagtgggaatgggccatgtatgctggcagcaccaaaaagaaatgacctctatttacaaatcctccgtgaagcccaaactgttagacactgcaagagcttcagtttagatatgtaagtacttgatcactaggctcttagaaaccgggaatgtggaacttggccacgttcctcatttctggaacgtgggaataatctcgttcccatagttttaaaacctaatttaaatagcgtactgtgtacaatgttcctatttctcgatccattcattgattcgatctggggacctggttactaagatcaggctccggtcccatgtacagtatcagtccagacctaacctcgccctgtggggctgacctgtgaatcatctatactgcaagaatgcacataggagaattgcagtgtagagttgatttgctgccatctctacatcagtacgtgtacatgagggcagccctgtaaatttgtaaatataacccctgtaccgtttagaaatgaaaataaaatacttggaata

SEQ ID NO: 105155 - DNA, 1600 bp, Zea Mays
gtcgttggcggggtctgcttcgtgtttcttactttgttctagaggaaaaaaaagatccctaaccaggagacaaggatccacatgcaataaatcttctcttctgttctgttctggcaccttcttcccagatcaataggggcgaggcgacaccagcgaggagacgaaatcgtttaaaggcgccagcttgtcttctgttccatttgtggtttcatttcctctgcaaacgatttccattttttctgcacgccgtcagctgatccttttcgccgtagtatccccgagcaaaagagaaaacccttttttttgtgcgctgtgctgtttcgccatctctgttcgtcccaccgaggcaccgactcaatccccattcttggcatctggcttcacaaaacaagaccggttcccgttccctagatctctgcgtagaggcggcggcgaggcacctgaatccggcaaaaaagggttcgcggtttggttgggaggagcgcaggagcccggcgtcaaaacccaatcttggcgcccgggctgccgtgcgccatcgtcttctccctgtggtgtttagggagaggagaaggccggtggagatggtgccgtgggaagggtacgtcagcgacgagacgatgggcaccttctcgcccatcgtgctctactggctgtacgccggcggctaccagctgatccttcaccgccggccgcttgagcggtacaggctccacacgcgggacgaggaggaggagaagaacctcgtcagcctctccaccgtcgtccgtggcgtactcctgcagcagctcgtgcaggccatcgtcgcgatgattttgttcatggtgacttctgatagctcaataactgttgttcagccacctatcgtcgtccagatcttccagtttctagttgcaatgttagtgatggactcatggcagtactttgtgcaccgctacatgcaccaaaacaagttcctgtatcggcacatccactcgcagcaccatcggctgattgtcccttacgctatcggggctctgtacaaccacccactggagggcctgcttctggacaccttaggaggcgccatctccttcttggtctccggcatgacgccgaggaccgccatgttcttcttctgcttcgcagtcctcaagacggtcgacgatcactgcgggctttggctaccgtataacatcttccagcacctgtttcagaacaacaccgcctatcacgacatccaccaccagctgcaaggaaccaaatacaactactcccagccattcttctcgatctgggacagaatgctaggaacccacatgccgtacgacttagtgagcaggaaagaaggtggatttgaagcaaggccgtcgcgagactagcttgaagtcatggaagtgtacaggctccggtgaatgagtcagacagaatatggttttttagctgtcatggttcattttttaaaaattttgtgcagggctgccatttacattgctgtgcagatagtgcatttgaaaatccacacttctgtatgtacccagttatttgtgtaattgattgaacctctggtcgtgatcgacaccttcggagcaatctttggctactactgactgtgctttgtttc

SEQ ID NO: 105156 - DNA, 228 bp, Zea Mays
tgacaattatcctgccaagtagtggttctatgaattaagatttggaagtccaattagtttgatcttacagatagacacttttttacaccataaatggaaatgcatgtaataaatttttttgtcccccttcacatcacatatactcacaggtatgaagtatccctatacaaagcaatactgctaaagaaacaatgttgttgtctcgatagggcgcccgtaagggcgccg

SEQ ID NO: 105157 - DNA, 2174 bp, Zea Mays
agtaaataatctatatctagtaagggatgtttagatacaccaactaaaattttatcggcgacaccggatgtttgaatgctagttagaagtattaaatatactgtaactataaactagtgctgtgatatagtaaacattttctaattatagactaattatgtttaataaactttcttctatgattaattttataattaaattatatataaacgctggatgtgatatatactaaacctttgtttgggggaattaaacacccttggatcattttctcgtaggcagagactagagagagcattacccatgggcacttggcccaggaagagaagaagctaaaaaatccagaggaactgtctgacagcttctgccatttcctgggaggctggtaccatttctctccggattctcagctttaatcacggtgcggcgtcagctcctcacagataggaccggcgggcggctgccggctttgtggcgttaagcagtggccggactgccggaggagggcagaggtggtcaggtggagttcgccagttcggagtcgccgattgagtcgggagccagagaggccgagaacggatgcttcctgttgcttgctgcgcacctcgtgggctggaagttgggcgtcagctaattttccgctccgcaccgactgcagccccgggcaccgtatccgctctttagcaatcataacaaacatacccgaaggaagccaacagatttcagtatttcacggtcaccatcaccactcaccagtccctcctacccgcttcccataaaatcttctgatctgtaacgcattcgtcgacgcccacctccgcttcgctctcttgctcttttagtcccatctcccatcccacctggaggcgaatttcgtctggggaaaaagtcggcggccatggccgggcgagactccctcccggagggttctctcttcctcgggttggacagctccactcaatcactgaaagctacggtgctcaataatgagctcaccatagtagcttctgaaattgttaattttgactctgaattgccacactacaaaactgaaggtggggtgtacagagacccagcagatgataggcacattttttcaccaaccattatgtgggtggaagctttggatgtgctgcttgagaagctaaaaccaaagatcaacttcggtaaggtagtggctgtttctgggagtgggcagcaacatggcagtgtttattggaaaaagggcagccatgctgtgttatcctccttggatgctagtaaaagcttgttatcgcaactaaaggatgcattttctacaatgaactcaccattatggatggatagtagcacaacaaagcaatgcagagaaatagagaacgcagttggaggtgcactggagttagcaaaactcacaggatctcgtgcgtatgaaagattcactggcccccagataaggaagatctatcagacagagcctgatgtttatgaagataccgagagaatatctttggtgagctcgttcatggcatctatccttgttggaagctatgcaagtattgatgaaactgatggtgcggggatgaacttgatggatatcaagcaaaggatctggtcaaagtctgctttagaggcaactgctcctggacttgaagcaaagcttggaaatctagcaccagcatattcagctgctggtcgaattgctccttattttgtagaaaggtttcagtttgataagaactgtttggtcattcagtggtctggagataatcctaatagccttgcaggtttaactctgaatacccctggtgatcttgccattagccttggtactagtgatacagtattcgggataacaacagaagctaaaccaagccttgaaggacatgttttccccaatcctgttgagcctaatggttatatggtcatgctatgctacaaaaatggctccttgaccagagaagatgtacgaaatcgctgtgcagacaaatcatgggacgtttttaacagctatctggagaaaacgccccctctaaatggtgggaagataggattctactacaaagaccatgagatcctccctccacttccagtgggtttccatcggtacactgtcgaaaacctcaacgacgtctcatcagacgctctgttggagcgtgaagtggaagaacttgacccaccgtccgaggtttgcg

SEQ ID NO: 105158 - DNA, 1181 bp, Zea Mays
tgacctcattagttccttagtccttactgatcagaacaagtttattctttgcagagttgctgatttgggataatcctgttctctctgagtgaatcaacatgtctgggaatgatgataagccacatgctgctgcagacagaataaaggcagccacgttatcagtggctaagggattaagcagggctcaagctgaacgggctgcgactgctgctgcccgcaatgtgaatgcctatgggcagaaggaagagggaccaagccgctggcaggagaggaaggaagccaagagacagatgtatctgatgagtacagagaaggctgcgaagctgggcactgtgaagccaaaagcttcagaaacttcttctgttggcgcatatacccaatgccagaagtgtttccagcatggtcactggacatatgagtgcaaaaatgagcgggtgtacatatcacggccctcaagaacgcagcagcttaagaaccccaagctgaagaaaagcgtaccggtttcttatcaatttgagaatcctgatattataaaggagaaggaagaggagcagaagatgatgaaagaaaagcagaagaaggagaaagccgaaagaaaaaagggaaagagtaagaggaagcatcgatcgccgagtgattcagatagcagcaatagtgctgcttcggtgttcgactctgactctgaatcatcgggctctgagtactcttccggaaccagttcaagctatagttcctcagactctgaagacaagaagcggcaacacagaaggaagcagaagaagagaaggcacaggagggacagcacatcatcagcatcttctgaatctgagtctgcgtcagacagtgattcggatgacaagagcagccggaggaagagtagaagaaggggtggtaggcgctgaatctaatgagctgcacaaagcagtgtggatgttgaatatcatcattatcattatatacttgtgttcaattcatgaataacttttcgtcatcatcagaccatgtgctgggctttgccaatcgaagaaacaaatgtagcatttgctttcctgaatgctagtaccgatgtttttccctgtacgaagaagcacttgggagcttttaggtgttcctattctatgatctttgtgtaacgatattcatctatggatttctaagtttggtgtgttcgtgttcctgtt

SEQ ID NO: 105159 - DNA, 125 bp, Zea Mays
gtatttgttcggtatacatcaagagtcagatggacagacgtacgttacctacgattaagggtagtaatggatcgtgatctaaatgttttttatagtaagttagtacctttaattaattttagttt

SEQ ID NO: 105160 - DNA, 2572 bp, Zea Mays
ccgtatatgcatcctacttattggtttgtaacaaagttaaactgcaaagggtaaaacagacaatcgccacagaccaccaactctcagcagacaagaatcagtttacttgccaaacggttttaaaaatgattctgattctctagaagaatcaggaggatcagctcctcacgaggatcaggatctgaagctaaagaagcaggagttggagctttgccaaacgggccctaagtaatagacagccacaaaagatccgctcccgtgagtctggcccaagcctctcgggtccacaaaacctcactccactgtctactccgccgagccgaccactgcaccccgcggccccgccgctccgctcgtctgccctggcgtcgccatcggccattccaacggccgcggaattcgaattcattcatacgcattccagagtccagactcatttcaaactaccccgccgctccgcctcgaccctcccctcctccccaatcccgcgcccttccaccctcccgccgaaagcccagcccggatggcgtctctagaaggcgaccggtggtcggagatcgtggccagcggccgtgcccggccgccccgcgttggcgtcgtgtacggtcgtcgcctggtcgaggaatcgtccggcagggccaacatggaaacgagagccagcttcagtggcctgcggcgcccgagcttcgtgccgcgcaagcgaaccagctggaaccggtcgctttccatcagagggagagagagtatcttcgtcgcacctggtgcaaatcttcaacagaaaccatgtgaagcaatgaaacgaccaccgaaaccgtgcaaccgaaagaaacgtctgggtggccctcctgatttgagcaaggagaaggcatattttgaagagatcgatgcttttgatcttatggaagaaagtccttctcctaagaactttgcctcgtggaccaaaggaatggggcagaatctcataattcatgatctgcctgcaatattggagagatggaaaatttctacccttgcaagacgtgtgtcatctgagcccttgtttgacattgtggagacgccaatcttaccatcagtcctcagtaacagcagtacatctaacaacgggtcagagacatacaccgctggaagggcaatctctgtaagctacactgatatcagtttaaagagcattgcagaagacagtctgattacatcattcggtaaagtgaagattaaggaagagcctgttgaagccagcattccatggaatggtgaagctctgactgcttttgatcagctcctcatggtttgcaggcagtctgcaccagttacactggcagaagtattctctgcttattgtgagctaggcagcatcaagaagcttggtgaagggacctatggggaggcctatagggctggaagaactgtgtgcaaagtggtaccttttgacggagacttgttagtcaatggagaaagccaaaagagatcggaagaaatacttgaggaagtcttactttctctaacgcttaataatctgagagcagaccggggtggtgatgttaaaacaaattcatgcaatggcttcattgagacaaaagactttcgagtttgtcaggggccatatgacccttttctgattagtgcttgggaagactatgatgcgaaacgtggatctgaaaatgaccatccaaaggagtttacaagggaacagtgctacattgtctttgttctagctgatggtggcactgatcttgaaagttttgctctagttgagtataatgaggttcacagtttactggttcaggttactgcttccttagcagtagctgaaagtgcttgtgaatttgaacatcgagatctgcactggggtaacattcttttggctcaagaggaaactccagatacaaatcatacaatgagcttcactcttcaagggaagaggatgcatgcaagaacttttggtctgaatgtctctataatcgacttcactctttctcggatcaacacaggaactgccattctttttcttgacctgtctgcggaccctgcactatttcaagggaaaaagggagataaacaggcagaaacatatcgaagaatgaaacaaatcacccaggaacactgggagggcagcttcccgaagacaaacgtggtgtggttaatctaccttgtagatatggtgctacagaagctgaaatcacctgctcatggcaacaaaatcgagcgggagcttcgctcgctcaagaaacgcctggcgtcttacgagtccgctggagattgtctacgcgaccccttcttcgctgatgtgttgctgatcgaggatgaccaggtcccttcaatgcctcctctgtaggtggatatgcgaaccggcagatcgagggtgtttgggttttagggttgtgttatttatgaccactgaaacacctgacgtgtagagaacgcaatgcctgaggcacgcaagagagcttactgttgcccggccgccttttgtaactactcgttactcgtataactgatcacgttggtgctggctggtggctgggttcgttgtcactgacgatgcaatcgggattccaaatgcagcctaccagtt

SEQ ID NO: 105161 - DNA, 1350 bp, Zea Mays
tcttatttttactgcagtttttgtcagcttgaaaaggttgaatacatgaacagagttgagcaaaaacagtttatgccagacaatcagcgacatcattttgaaacttcgttctcctagcacagaagtgattgtagatcatttaaagaataggacatgtaatgcagtaactttattttgcctctcttgtattccttgatattttgttccaggaactgccattctttttcttgacctgtctgcggaccctgcactatttcaagggaaaaagggagataaacaggcagaaacatatcgaagaatgaaacaaatcacccaggaacactgggagggcagcttcccgaagacaaacgtggtgtggttaatctaccttgtagatatggtgctacagaagctgaaatcacctgctcatggcaacaaaatcgagcgggagcttcgctcgctcaagaaacgcctggcgtcttacgagtccgctggagattgtctacgcgaccccttcttcgctgatgtgttgctgatcgaggatgaccaggtcccttcaatgcctcctctgtaggtggatatgcgaaccggcagatcgagggtgtttgggttttagggttgtgttatttatgaccactgaaacacctgacgtgtagagaacgcaatgcctgaggcacgcaagagagcttactgttgcccggccgccttttgtaactactcgttactcgtataactgatcacgttggtgctggctggtggctgggttcgttgtcactgacgatgcaatcgggattccaaatgcagcctaccagtttcctcggtgagcagcgtactcgacttcgaggagcacaggaaaaaccagcactgggcgtcgaagcatgcaaaactgagaatttccatcacaatcccacaaaccagtcacaactgttatgaaagataagaggttgctgactgcttccagccgacgtttttcaagcgacgtgctccttgcacgatcttcacgtagaatatggccaaccgacgtgcaccagttgtatagacgtgacccgccgacctcctattcatgtctccttcgcttatataaataccgttgcaataaagaataaagaaacatggattcatttactgtttcttctcccacagccgtttctatttttactaacaaccatgaagaatatctcacatccacaaccagtaccgcgtatacacagacaatcagaacgccggtgctaggaacctgaagctactacttaccaatgcaatagggaaggaatgggcggacgcaaacaacataaacacaatatacaggcacaaaagaatcgtgaaatcatatatcgtggctcgttaagagaactctgatgcgctgcgcag

SEQ ID NO: 105162 - DNA, 318 bp, Zea Mays
ccgagtcaggcgatcctagtcccatcaaagacccctaaccccaccgcttcgctggggaaaccgggctggcggcgtcggggactaatgggggagtacgcagcggtgaagacgtcggtgtggtgggacatcgagaactgtcatgtgccccgctgctgcgacccccacctcatcgcccagaaaatgagctccgccgtcgccgccgctggctacaccggccccatcaccatctcagcctacggggaccccaactgcgtccctaaacacgtccagcacgccctctccagcaccggcatcgcgctcaaccacgtccccgcaggc

SEQ ID NO: 105163 - DNA, 558 bp, Zea Mays
atggcaggtattaaagatgcaagtgataaaaagatcttagttgacatgttaatctgggctattgacaatcctccaccggcaaattatttgctaatttctggtgatcgggacttctcgaatgcccttcataagctagtgatgaggcggtacaatattctactagcacaacctccaaatgtgtctcaagcgcttactgctgcagcaaaacatgtttggctatggaaagacctcgtggctggggaaccaccattggcagagtccccatacataagtagcataacaaatggcagtgtggaccattcaaatgcatcgaagaacatggattcagattcttcagttgcaactccacatagcagtactcaaggacagaatagcataccgtgtgatcagcaaaaaggtggtaacagcaaggcagacaaacaatctaaagttaggcaacctcggaaaaaccagtcagatgaagcttcagttgatgggctacctggtagtcctaaaggaagcactgcttcccgagccaaatcaatctcagccttcatcatcctcactaccaagttctga

SEQ ID NO: 105164 - DNA, 1728 bp, Zea Mays
atgcggggctacctccgcgcgtgcctcccgctgcaagccctgctcttgcttcgctcggtcctgccgcgggcgccccgcctcctcgacaactccttctcgctctccctagcgatgcaggcatccgccgcgctctcggcctccgttccggctatgcgtgacctcggcctcggcgctgcgtccctccacgcgcgcgcgctcaagtccggcttcgccgcagccgacctcttcgtgcgcaccgcgctcgtcgaggcttacgccaaggcggggcgcgcggacctcgcgcgcgccgctttcgacgaggcgccgcgcagggacgtgttcctctgcaacgtcatgctcgcggcatacgttacgcgtggcgaggttgcggaggcgaggagagtgttcgatggaatgcgcgagagggacatggtctcttggaacacgatgatccatgggtatgcggtgaatggggaggtcgacctggcgagagaggtgttcaacggcatggacgacagggatgccttctcgtggagctccatgatgtcggcgtacaccaaggggcggaggtccaaggatgcgctggagctgtggcgggagatgcgcgcggcctgtgtcaacccggactgcaccaccatggtgagcgtgctctcggcgtgcagtgatatgggggcgcttgctgttggtgctgaagtgcatcagtttgtggagagcaatggggttgaattggatgtcaagcttgggaccgctctgatcgacatgtatgccaagtgcggtgacattgagaattcagtaagagtgttccactctatgccagtgaaggatgtgctgacttggagctcgatgatcatcgggttggccaatcatgggttcggccatgatgctctctccttgttctcaaggatgctatcagaaggactgcaaccaaatgaggttaccttcattggagttcttatatcatgtactcatcttggtcttgtgagcgatggcaagaaatatttcagctcaatgagtgtagtgcatggtgtaacccctaaggttcagcactatggatgcatggttgatcttttggggcgatcaggtcatattgaggaggcaaagcagcttatcagggacatgccattcgagccagatgcagtcatctggagggcacttctaggggcttgtcgcatctacaagaatgtagaagttgcagaggaagctatggcgaaactgcgagtattggatcctcatgccgatgggcactatgtcttactgtcaaacatatatgcacaggcgaattcctgggaaggtgttgcagagatgaggaggacgcttaggagggagagaatccagagaattcctggaagaagctcgattgaatggcagaatacaattcacgagtttatttctggtgatagatcgcatccaaggtccaaggagatctacaaaatgttgggagagatgatggatcgcttaaggcaagctggatataagccaatgacaggtttagtgttgcaagacattgatgagcaatctaaggaacgtgcactggctgaacatagtgagaagctggcagttgcttttgggctgctaaccactcctgcagggtcaactctccgaataacaaaaaatctcagagcttgtgaagactgccattcagctattaagcttattgccctgttatacgagcgcaagttgattattagagaccgtaaccgtttccaccatttcagtgaaggacggtgctcatgcaaggactactggtga

SEQ ID NO: 105165 - DNA, 1920 bp, Zea Mays
attccacacaaaaaacctcaccttctcattccttcaagcgtcagcagcaaaaccagagcttcccttcaacccagcaagaaaaccaagcgacctagttagcgcagcggcagttatttgtgcagaccccgatctgactgagagaggcaggcggcagctcgatcggcagtgaccgcgcgcgagccatgggactggcctggatggtggcggcggccgtcgcggccgtgctggcgtcgtgggcgttcaacgcgctggttcacctcgtgtggcgtccttacgccatcacccggaggctccgcgcgcagggcgtgcgcgggccgccctacacgttcttcaccgggagcctcggcgagatcaagcggctccgcggcgagggcgccgccgtcacgctggacgtcgacgaccacgacttcatccccatggtgcagccccatctccgcaaatggatcgcgctctacgggcggacgttcgtgtactggaccggcgcgaggccgaacgtgtgcgtggcggacgtgaacgtggtcaggcaggtgctcttcgaccgcaccggcctctaccccaagaacctcatgaacccgcacatctcccgcctgctcggcaagggcctcgtcctcaccgacggcgacgactggaagcgccaccgcaaggtcgtgcacccggccttcaacatggacaagctcaagctgatgacggcgaccatgtccgactgcgctcgctcgatgatctccgagtgggacgcacagctgcagaaggaggagagcgggcgcgacggtcacggccacggccacgtggaggtcgagctgagcagccgcttcgaggagctcaccgccgatgtcatctcgcacaccgcgtttgggagcagctacagcgaggggaagcgggtcttcctggcgcagagggagctgcagcacatcgcgttctcgaccattttcaacgtccagatcccagctctcaagtacctcccgaccaagaagaatgtcaggacacggaagctggacaggcaggtgagggccatgctcatgggcatcatcgaggcccgcctcgccagcaaggacaccgccggcggttacgggaacgacctgctcgggctcatgctggaggcgtgcgcgccgccaccggagcaccatggcgagatggcgctgaccacgctgagcatggacgagatcgtcgacgagtgcaagaccttcttcttcgccggccacgacaccacgtcgcacctgctcacctgggccaccttcctgctgagcacgcacccggagtggcagcacaggctccgggacgaggtcaggcgggagtgcggcgacgacgacgaggtccccaccggcgacgcgctcaacaggctgaagcttgtcaacatgttcctcctggagaccctgcggctgtacggcccggtgtccctgatccagaggaaggcgggctcagatctcgacctcgggggcatccgggtacccgagggcgcgatcctgaccattccgattgccacgatccaccgcgacaaggaggtctggggcgaggacgccggcgagttcaggccggagaggttcgagaacggggtgacgagggcggccaagcaccccaacgcgctgctgtccttctccagcgggccaaggtcgtgcatcggccagaacttcgccatgatcgaggcaaaggccgtggtcgccatgatcctgcagaggtttgcactcgagctgtccccgaaatacgtccacgcgcccatggacttgatcaccctgcgcccaaggcatgggctccccatgctcctcaagcgactgtaggtttcattcgatcatggtgcgcgtcagatagatgtgaaatatgagtatcgtatttgttgcttatatattcccgtttgtttttgctacttatatgtaccccacataatgtatgtcccagtttttttttcttggtgcatgataatctcta

SEQ ID NO: 105166 - DNA, 100 bp, Zea Mays
tgctcggactgtcgcgtgcgtcggtgcttccctgccgcactaccgcagcagtgcagcactgttgaacggaacatggaaatacaaatgtgtggtccaaaaa

SEQ ID NO: 105167 - DNA, 2410 bp, Zea Mays
aaaaaacagcagcacacggaaaaagacacacttgccctcctctcacctaatcaatacaggcatcggatcctcctctgctctgccgctctggagagagtgaggcgtcgactctagctcgacgcagcaggcgccccctagtcgccacccctgccgctgccaaggagacctcccccgccctgcaaatcatctcacgaaggaggattcgagggctgatgcaacgggattcgagggctcatggttaggatggacgctcctgattccctacgaaggtggtttctattggccctaaacatgattgcgcaagcactagcaaggtgacaggaaaggaagcttctgcagcttggattgccaatagagtgaagcctatgttgattaaagagccagggcttggtgcaagagaaatgcagtataggttggaggatcagttcacagtcactttgtcatataacaaggtctgggaagggagaaagttggcactaaaggaacttcatggtacatgggaggatagcttcaagttgctatggaattggaaagcagccgttgaggcaacttgtcctggaagtctcattgagattgattgcaagaaggtaaagggacagatgcacttctcaaagatgtttgtggctttacggccttgtgtcaatggatttcttatgggatgtcggccttatcttggagtagactcaactcatttgactggaaagtaccttggacagcttgcttcagcgacagccatagatggacataactggatgtatccagtagcatatgccatatttgacaaagaaacaaatttgaattggaaatggtttatgacactcctgaagagggctattggaacacccccaggtttgaccatacacactgatgcatgcaagggtcttgcatatggggtgtcacaagtgtttggtgatgcagctgaacatagggagtgttttagacacctcatggctaatttcaggaggaagtacaatggtgaggtgctgaaatacatgtggccttgcgcatgggcatgcacacatgagagacatcaagtacttatggataaaatttcagaaacttgtccaaatgctgtcgcatatcttagatatgaccacccacacttatggacaagagccaaattcaataaaatctgcaaggtggattacgttaataacaacatttcagaatgtttcaacaattggattaaaaatgtgaaggagttgcctgcagttgatctcatggacatgctcagggtgatgataatggagaagattgctacaagacagtccatagccaataaaatgcaaggccacatcctacctagtgtagttaatgatctgcatgagaagagtaggaatcttcgatataccatcactaaaagtgggtacatgaagggtgaggtttctggtgctagtagagatggtgttgcttggagatatggagtaaaccttgttactcaggcttgttcatgtggacagtgggatgtaactggaaaaccatgcactcatgccatagcattcataacttctcaacgaaatttgagaatcgaggactatgttggagaatgttattcggttcaaaggtttaaagatgcataccaatttgaggtgtatccaatgggagacaggttacagtggccgaaattggacccaggattcgaaatgaggccaccaaaacttgagggcaggcctgctggcagaccaagaaagaaaagaatcaagagtgctggagagccaggtaagagagggccatatcaatgcaagaggtgcttccagtatggccacattgaaaaaggatgcaaaaatccagtggtggagccacatgaagaccttccagacaaccatttgcagagaaagacaaaaaaaggcaccaaaaaaaggtgatgtactgctgctctagttctatatagctcttaattgtactgcaggtaagcattgacaaatttcactttatactatataggaagaaaagtgagccagaacagacttcaacttcacttgttcaaatatcgccatctagttctggaccaatgacaaggagaagggtggcgatgtccccaacctgcagctcaccttcagccagcaagcaaggagaagcaccggcttcaagcaaaaggagattaattatctagctgactgtgatggattgtatgtcatttgcatgtgtttgctacttatgcgatggacgtgtaagccatatattgtattttattgttagaatcaggcacccctgaattatattgttgcaaagtatcgattgggagagaggagggcaagagtgtcttttcccatgggctgctgggttaaaaaaaagaaaataattcaaaacagcctccgaactggttttgtggtagatttctaaataatcgagtctttgcatggtattaaagtgtaccaggaaagttagatggtagatttctaaagacgag

SEQ ID NO: 105168 - DNA, 720 bp, Zea Mays
cctctcacctaatcaatacaggcatcggatcctcctctgctctgccgctctggagagagtgaggcgtcgactctagctcgacgcagcaggcgccccctagtcgccacccctgccgctgccaaggagacctcccccgccctgcaaatcatctcacgaaggaggttcgaatgtttttggggtacatgctggccaatgctataggattcgagggctgatgcaacgggattcgagggctcatggttaggatggacgctcctgattccctacgaaggtggtttctattggccctaaacatgattgcgcaagcactagcaaggtgacaggaaaggaagcttctgcagcttggattgccaatagagtgaagcctatgttgattaaagagccagggcttggtgcaagagaaatgcagtataggttggaggatcagttcacagtcactttgtcatataacaaggtctgggaagggagaaagttggcactaaaggaacttcatggtacatgggaggatagcttcaagttgctatggaattggaaagcagccgttgaggcaacttgtcctggaagtctcattgagattgattgcaagaaggtaaagggacagatgcacttctcaaagatgtttgtggctttacggccttgtgtcaatggatttcttatgggatgtcggccttatcttggagtagactcaactcatttgactggaaagtaccttggacagct

SEQ ID NO: 105169 - DNA, 711 bp, Zea Mays
cctctcacctaatcaatacaggcatcggatcctcctctgctctgccgctctggagagagtgaggcgtcgactctagctcgacgcagcaggcgccccctagtcgccacccctgccgctgccaaggagacctcccccgccctgcaaatcatctcacgaaggaggattcgagggctgatgcaacgggattcgagggctcatggttaggatggacgctcctgattccctacgaaggtggtttctattggccctaaacatgattgcgcaagcactagcaaggtgacaggaaaggaagcttctgcagcttggattgccaatagagtgaagcctatgttgattaaagagccagggcttggtgcaagagaaatgcagtataggttggaggatcagttcacagtcactttgtcatataacaaggtctgggaagggagaaagttggcactaaaggaacttcatggtacatgggaggatagcttcaagttgctatggaattggaaagcagccgttgaggcaacttgtcctggaagtctcattgagattgattgcaagaaggtaaagggacagatgcacttctcaaagatgtttgtggctttacggccttgtgtcaatggatttcttatgggatgtcggccttatcttggagtagactcaactcatttgactggaaagtaccttggacagcttgcttcagcgacagccatagatggacataac

SEQ ID NO: 105170 - DNA, 810 bp, Zea Mays
cttggagatatggagtaaaccttgttactcaggcttgttcatgtggacagtgggatgtaactggaaaaccatgcactcatgccatagcattcataacttctcaacgaaatttgagaatcgaggactatgttggagaatgttattcggttcaaaggtttaaagatgcataccaatttgaggtgtatccaatgggagacaggttacagtggccgaaattggacccaggattcgaaatgaggccaccaaaacttgagggcaggcctgctggcagaccaagaaagaaaagaatcaagagtgctggagagccaggtaagagagggccatatcaatgcaagaggtgcttccagtatggccacattgaaaaaggatgcaaaaatccagtggtggagccacatgaagaccttccagacaaccatttgcagagaaagacaaaaaaaggcaccaaaaaaagaaaagtgagccagaacagacttcaacttcacttgttcaaatatcgccatctagttctggaccaatgacaaggagaagggtggcgatgtccccaacctgcagctcaccttcagccagcaagcaaggagaagcaccggcttcaagcaaaaggagattaattatctagctgactgtgatggattgtatgtcatttgcatgtgtttgctacttatgcgatggacgtgtaagccatatattgtattttattgttagaatcaggcacccctgaattatattgttgcaaagtatcgattgggagagaggagggcaagagtgtcttttcccatgggctgctgggttaaaaaaaagaaaataattcaa

SEQ ID NO: 105171 - DNA, 3727 bp, Zea Mays
ccttagttaagttggctggtctgatcactgagagatgtgcggggtctccattggcagcaaaagcaatagggtctgtactgcgtaacaagaccactgatggagaatgggaggatgtgttacaacgaagcaccatatgtaatgatgagactggaattttgcctatactcaagcttagttataatgacttgccaattgacatgaagcaatgttttgccttttgtgctctatatccaaaggattatcatattgatgtggacaaacttatccaactatggatggccaatggttttatctcggatcaagaaaatgaacctgctgaaaccataggtaaaaggattgtcaatgagttggtctcaaggtcctttttccaatatgaggagcaaactatgatcggatacaattctactacatttttgaagattcatgacctcatgcaggaggttgcactgtctgtttcggaaaaggagtgtgcttgtgtaacggataaattcattacaaatagtgagttgcttccaagtgctgcccgccacatacttattcaaacatggagtaacaaacggatacatggttatttatatggttttatgaggaaattgtctcgacctatccaaacattgatgtttgatgggtcttgtgaagatgccgttgtgcaacatttatcaagacatagttctttgcgagtactttccatgccaggattttggtttcgttttccaataaaaccaaagcatatgtgccaccttaggttccttgatgtcacgggtagtagaatcaaagaacttccatatgacataagcatcctttataatcttcagacactcaaactttctggatgcaggaatcttattagacttcctgagcaaatgaagcacatgagtgcccttcgtcatctctacacagatgggtgcacaaggttggagtgcatgcctccagatcttggacaaatcacctcgcttcgaacaattacatggtttgtagtgggaagtggcttgagttgtagtagccttggagagctaagggatttaaatattggtggctcattaatgctaaagcagctcgaaaatgtgacagggagaagaaatgcagaagcagccaaacttgagaataagaaggaactgagacaactgtcactagagtggacaagtggtaaggaggaggaacaacagtgtcatgaggtgctagagagccttgaagctcatgatggactgttggctctagaaatatattcctaccaaggcacccgttttccatcttggatgggtatgttgaaaaacatactcgagcttcggttgttcgattgctgtaaagtagagcagcttccaccactatgtcaactagcagaactgcaactccttcatttgaaaagattgggaaatttgcggtccctgtgtagcagatgtacatcctccacatttggaaagcttaaggatcttaagctagttgatcttcacgtttttgaaggattttgtaagacaatgcatggatctacagtagcattccctcagcttgagatattgcacatcgagcgctgtggaaatctagcagctctaacagaagcatcgcattgcggtggagattatacagtggcccgctcaacatttccagaactgaagaggctcatattggaagatttgtgtagctttgagagatgggtggctggcctgcttgaaattgaagaagaacatgcactattccctgtggttgagattgttgttattagtaaatgcccaaagttaacaactgtgcctagggcaccgaaggtcaaagaactagttttgcgtgatgtacatgaacatatctctctaggagggatcagatgtatgacgtcattgtccactttgcttttggacggcgtgaagcttgatgttaaggagagatgggaccatccatcgtccgtggtagatatgcaactgtggaggtgcagtttgttcttccaaccacgcgcactagtgatgtgggtttgctattggcagctgcaagatctgacaatttatagatgtgatgagcttgtgtcctggccggagaaagtattccaaagcttgatttctttgcggaggctatggattggcaattgcaagaacctaattggatatgcagcggcgaatgtccccgaccaggcaacttctggaaggagcgagcttttgccccatctagagtatctagagatatgggggtgccaaaatctggtagagttattcaactcctcccctgctctcaagagaatggaagttagagaatgttgtaagcttgagtccctatatggcaagcaattgttggatgaagctgctagtagtaccgatgacgtgacggcatccgcacatgttgaggagaagctatcaccatcatccctagaatctctaacaatattggactgtgacaggttgtcagaggttgtcaatcttccttcgtctctcagggtaatagatattcagggttgcttcaaactacggttcatgtcagggcagctggatgcactcaataccttagcaatcaccaactgcccggagttgcgatcactggaaacatgcatcgtagatctcacgtcactggaaatcctcgctctgtgtggttgcaaaagcttggcgtccttgcctagtgcgtgggcaggacgacaagaatattcatctctccgtcagcttacgattagggagtgcccaggtataaaatcgttgccttcaactctgcagcagcgactggacaacggcctcttggattttacgaacctagattcccgtcgtcgtgaagtgcagcagcaggccacgctgaagctgaagctgaagctgaacctcatctgcaggggcacaggcaaggagcagatggcagtagtgtagtgacgctagctcatggaaaaaaggtagaacgatctgaagcaggagttacagacaatgaggaagatgcgcttgtttacagctccctaaaaaaaagagataaatgcgtcgataaggccaaccttgttcatcatttggtttggatttttcggggaaaaaggggaatcaagttggtgtaagctgtagttgctttgttctgacccttggctacctgaatgagtgggtcaaaattaaacaggcactgcgctaattaagtgctgaatcgtgtttggagtctgcacaggggtttgcaatttgggtttgcaattttctaagacaagagggagtagtcagctttcaggttcaggatcgattagtgaatagttagtgtttgtaaagatggagtacatgctagcaatgcagagatgatgattccacgcattgtcgctggtgctaataatctgcatagtattggagtaatacgacctgtacatgcatgcgtgtcgctagacctttagatttgcttgtacctgaaactgaaactcataggtgcgctcattccattgaggtgttcgatgtgggctgattgtgtcaggttcagatgcaaaccaatgtaatttcagagatagttaggataggactatgtatcagataaggtccgagaggaaaagatagtgttcagtttgttcttgtctttcataatccggtgcactcggtgttatatatagccgtgagtttgttgattatgtatctagattatatatatgccctgataagctatgatgtaaaacaatggcaaggattgatactgtgtgtaaaaaggatttttttcttttttgagttgctaacttgctattagaattgcataccatgaattagtacatgctgttatccacgcagcacttcacggaagcttcgta

SEQ ID NO: 105172 - DNA, 3397 bp, Zea Mays
atgaagcaatgttttgccttttgtgctctatatccaaaggattatcatattgatgtggacaaacttatccaactatggatggccaatggttttatctcggatcaagaaaatgaacctgctgaaaccataggtaaaaggattgtcaatgagttggtctcaaggtcctttttccaatatgaggagcaaactatgatcggatacaattctactacatttttgaagattcatgacctcatgcaggaggttgcactgtctgtttcggaaaaggagtgtgcttgtgtaacggataaattcattacaaatagtgagttgcttccaagtgctgcccgccacatacttattcaaacatggagtaacaaacggatacatggttatttatatggttttatgaggaaattgtctcgacctatccaaacattgatgtttgatgggtcttgtgaagatgccgttgtgcaacatttatcaagacatagttctttgcgagtactttccatgccaggattttggtttcgttttccaataaaaccaaagcatatgtgccaccttaggttccttgatgtcacgggtagtagaatcaaagaacttccatatgacataagcatcctttataatcttcagacactcaaactttctggatgcaggaatcttattagacttcctgagcaaatgaagcacatgagtgcccttcgtcatctctacacagatgggtgcacaaggttggagtgcatgcctccagatcttggacaaatcacctcgcttcgaacaattacatggtttgtagtgggaagtggcttgagttgtagtagccttggagagctaagggatttaaatattggtggctcattaatgctaaagcagctcgaaaatgtgacagggagaagaaatgcagaagcagccaaacttgagaataagaaggaactgagacaactgtcactagagtggacaagtggtaaggaggaggaacaacagtgtcatgaggtgctagagagccttgaagctcatgatggactgttggctctagaaatatattcctaccaaggcacccgttttccatcttggatgggtatgttgaaaaacatactcgagcttcggttgttcgattgctgtaaagtagagcagcttccaccactatgtcaactagcagaactgcaactccttcatttgaaaagattgggaaatttgcggtccctgtgtagcagatgtacatcctccacatttggaaagcttaaggatcttaagctagttgatcttcacgtttttgaaggattttgtaagacaatgcatggatctacagtagcattccctcagcttgagatattgcacatcgagcgctgtggaaatctagcagctctaacagaagcatcgcattgcggtggagattatacagtggcccgctcaacatttccagaactgaagaggctcatattggaagatttgtgtagctttgagagatgggtggctggcctgcttgaaattgaagaagaacatgcactattccctgtggttgagattgttgttattagtaaatgcccaaagttaacaactgtgcctagggcaccgaaggtcaaagaactagttttgcgtgatgtacatgaacatatctctctaggagggatcagatgtatgacgtcattgtccactttgcttttggacggcgtgaagcttgatgttaaggagagatgggaccatccatcgtccgtggtagatatgcaactgtggaggtgcagtttgttcttccaaccacgcgcactagtgatgtgggtttgctattggcagctgcaagatctgacaatttatagatgtgatgagcttgtgtcctggccggagaaagtattccaaagcttgatttctttgcggaggctatggattggcaattgcaagaacctaattggatatgcagcggcgaatgtccccgaccaggcaacttctggaaggagcgagcttttgccccatctagagtatctagagatatgggggtgccaaaatctggtagagttattcaactcctcccctgctctcaagagaatggaagttagagaatgttgtaagcttgagtccctatatggcaagcaattgttggatgaagctgctagtagtaccgatgacgtgacggcatccgcacatgttgaggagaagctatcaccatcatccctagaatctctaacaatattggactgtgacaggttgtcagaggttgtcaatcttccttcgtctctcagggtaatagatattcagggttgcttcaaactacggttcatgtcagggcagctggatgcactcaataccttagcaatcaccaactgcccggagttgcgatcactggaaacatgcatcgtagatctcacgtcactggaaatcctcgctctgtgtggttgcaaaagcttggcgtccttgcctagtgcgtgggcaggacgacaagaatattcatctctccgtcagcttacgattagggagtgcccaggtataaaatcgttgccttcaactctgcagcagcgactggacaacggcctcttggattttacgaacctagattcccgtcgtcgtgaaggtacgcaccaatcttgtgcttatccacagcatgcctctgaaatccagcatgccagttaattccctatgttgctcattcaatagagtctgtcgacaactttggaagcaaagttcggccgaattagcatgtgtttaaagttttattgagatttaatcgatggctttttaattaactaacagatcggcctccacgacggctgcttgggtgtctcttcctcctgcctttattttgtctggtctcaagggccaaatgttgctttgtctctgattaacattatgagcggcacgtcaccgggtgatatgcagtgcagcagcaggccacgctgaagctgaagctgaagctgaacctcatctgcaggggcacaggcaaggagcagatggcagtagtgtagtgacgctagctcatggaaaaaaggtagaacgatctgaagcaggagttacagacaatgaggaagatgcgcttgtttacagctccctaaaaaaaagagataaatgcgtcgataaggccaaccttgttcatcatttggtttggatttttcggggaaaaaggggaatcaagttggtgtaagctgtagttgctttgttctgacccttggctacctgaatgagtgggtcaaaattaaacaggcactgcgctaattaagtgctgaatcgtgtttggagtctgcacaggggtttgcaatttgggtttgcaattttctaagacaagagggagtagtcagctttcaggttcaggatcgattagtgaatagttagtgtttgtaaagatggagtacatgctagcaatgcagagatgatgattccacgcattgtcgctggtgctaataatctgcatagtattggagtaata

SEQ ID NO: 105173 - DNA, 1114 bp, Zea Mays
atctatccaaccgcaccccagcgcatcgcaactcgatcgtcggagcaagcaagttaagctagcacccttccttccttccttccttcgcgaggcagccggcagggctagtatcaagctcgatcaaccaaccgatacatatggctgagaggacaagcgcgatggcggcgccgcggccgctcctgcgccggatgctctcgttccgggagccactcctgctcctcccgtgcttgctcagcgtcctgggcgccgcggcctcggcgctggcccgcagccacgcgtcgctgctgcactcgctggccagatcgctcgtccggcccgcgcccgcagccgtcaacgacaacatgaagcacgccgccgcgcacgcgccgtcgtccgccgccgccgccgcaacgcgcccggacgacggcgaggacgccgtcgcggcgctgagcaaggcggaggtggaggcggtcatggcggcgatcgggctggcggcgtccgggcgcggcgagggcctggctgccgccgtgggccgcggcgacgtcgccgggctcttcgacgccgacgagcccagcttcgcggaggtgcggggcgccttcgcggtgttcgacgccgaccgcgacggattcatcggcgccgaggacctgcgcgccgccctggcgcgcctgggcgtgcggcaggacgccgccgcgtgccgcgccatggtcgtcgcggccggcggcggccgcgacgcccggatgagcctgttccagttcgtcgcgttcctcgagaacggcctgtgctgaggagagagatgactgactgtcccttcacttattttttttcgtcgcctcggctgctcgtggcaggagatgagagagtgtagtgttcaggggtgtttgttggtccggtcgtctgtgttttttcccctcctcctgccatgagttagtttggggcgtggatggtggtgcactgtgcagcaattataacgcactaattgacaagttaggagcaatcagttagcggaactgattttcaccagttgcaacgatctcaccttgctcatcgatccatctaccgtccatactgccgaatgccttcttttcctctccttttacaatcacgcaacaaaatatactaatttattatgaattaa

SEQ ID NO: 105174 - DNA, 279 bp, Zea Mays
ttttttttagataatggaacagaaataaggtcccagcctctacaccatccaagacagcgtacacagcgtatcgatacatccaacaagcgcttaggctcacaaacagactcaaaaaaaccaagtttacccaagacagctagacgactaggccgcaattctatttgagaacttccacccaaacttagcgaacacctccataacgaccgactccaataagcggcatgccctgttcagatcggtcctcgcgtcctcgtctctaagcagcagcgaccaagaacg

SEQ ID NO: 105175 - DNA, 2136 bp, Zea Mays
cttcccccgccgctctcgcttgcccgtcgactatacaattccactgcggggcaggggtccagctccttatcctgtccccctcccacctttcccttcccccgctgctctcgattgcccgcgcaccgagtttcctgcctgctcgctccgctgctctcctcgactcctcctgcgtaccgaccggtccgaggcacgccgcggcgaaggctccgccggtcaggtcgtcgttaggttggttggttgggtcgcgggcatgtccacggcggtggcgcggccggcgcacggcggattccggcggtcggggagcgggaagccggatccggacgaggcggacaggatgatgcagagcgccaacgggtacttggtccaagaagaggaggaggaagagcatggcgatgaggcggcggcgaggagagaggatgaggacgaggcggaggcggtgtcggaggcctcgtcgatcggggcggcgttgtccgacagctcctcctctatcggggagaactccgcatccgacaaggaggaggaggaggaggtggagagcacggcgcaggggctcggcatgatggggctggccacgctcgaatccttggatgatgccctgcatccaagtaagctgctacttctctgctaatccctggcgtcgaggacggggtcgtcccagatggcgtcggtgaagtagcgcgagaagtttgtgtggcagtactcggccgcggcgacgaccgcggtggtgggcagctgcgtctcccagagccgccgcacgtcgaagtcgaggtatatcgtgcgcggcacgcagcgcgggagcaggccgtcgaggttgttccgcgcgtagttgagcggcgcctcaagcgcggcgcgcacggacgcggagatgagcccggcgaccgcgtcagcgcggaacgggtagatctcgaagctcagggacgggaaggaggccgccacgacggcccggagcccggcggccaccggcgcgccgctgccctccgtgtcgagcgtcatggcgatgttgaaagggaaatgtgcccttgggccatttctaagtgttttggtgatttagtgtccaacacaagtgcctaagtgtaaagaggtggacaaattataaatcaaggataaaggtatgtttctcagacttagtacattgttttatggactaatgtatagtgtctaagtgctggaaacaggaaaaatccaattgtaaatgtcttggctcgagcagccaagactctgctgagtctgggagcaccggactgtccggtggtgcaccggacagtgtccggtgcgccaggctggtgcgagcgaagtggccgctctcgggaattcaccggcgacgtacggctataattcactggactgtccggtgtgcactgtactgtccggtgaagccaacggtcggccgcgcaatctgcgcgggacacgtggccgagccaacagctagaagatgacaccggactgtccggtgtgcaccggacatgtccggtgcgccaacggctctcagcctgccaacggtcggcttcgctatttaaggaaggaaatcgggcaccggacagtgtccggtgtgcaccggactgtccggtgcgccagtcgacagaaggcaagatcagccttcctagattgctctcaacggctcctagctgcctttgggctataaaagggacccctaggcgcatggaggatgacaccaagcattcctacaacatctctaagcaccaagacctcgattccgcgcatttgtttcattgtgatagcatatagagctctagtggagttgtgaactcattgagttgtgttgcgaactcttgttgcgacttgtgtgcgtgttgacactctgattcttgtgtcttgtgtgcattgctaatccctcccttgctctgtgcttctttgtggatttcaagtgtaagggcgagaggctccaagttgtggagattcctcgcaaacgggattgagaaaagcaagcaaaacaccgtggtattcaagtgggtctttggaccgcttgagaggggttgattgcaaccctcgtccgttgggacgccacaacgtggagtaggcaagcgttggtcttggccgaaccacgggataaccactgtgccatctctgtgattgatccttgttggttattgtgttttgttgaggattcctctctag

SEQ ID NO: 105176 - DNA, 819 bp, Zea Mays
ccttatcctgtccccctcccacctttcccttcccccgctgctctcgattgcccgcgcaccgagtttcctgcctgctcgctccgctgctctcctcgactcctcctgcgtaccgaccggtccgaggcacgccgcggcgaaggctccgccggtcaggtcgtcgttaggttggttggttgggtcgcgggcatgtccacggcggtggcgcggccggcgcacggcggattccggcggtcggggagcgggaagccggatccggacgaggcggacaggatgatgcagagcgccaacgggtacttggtccaagaagaggaggaggaagagcatggcgatgaggcggcggcgaggagagaggatgaggacgaggcggaggcggtgtcggaggcctcgtcgatcggggcggcgttgtccgacagctcctcctctatcggggagaactccgcatccgacaaggaggaggaggaggaggtggagagcacggcgcaggggctcggcatgatggggctggccacgctcgaatccttggatgatgccctgcatccaatactcggccgcggcgacgaccgcggtggtgggcagctgcgtctcccagagccgccgcacgtcgaagtcgaggtatatcgtgcgcggcacgcagcgcgggagcaggccgtcgaggttgttccgcgcgtagttgagcggcgcctcaagcgcggcgcgcacggacgcggagatgagcccggcgaccgcgtcagcgcggaacgggtagatctcgaagctcagggacgggaaggaggccgccacgacggcccggagcccggcggccaccggcgcgccgctgcc

SEQ ID NO: 105177 - DNA, 1269 bp, Zea Mays
aagcccctcctcactccccaagtcctcccgtgtcatcgccattcacctccagccaggctccggaaccttatcaccaaaatcctcgtcccctacccgaggcgagcatcatggcggccgcgctcttctccagctcgctctcgccccgcttcctcgccctatcctccccgaagccggccgcgcccgcggccacagccttcctccccttcaggctgccgccgcgcgctgtctcggcgccgggtaggcgggtcttcgagcccgtcgccgtcgcggtgtcgtcggagtacaagacggagggcgcggagcaggagggggaggatggatccgaggagttctccgaggacctgaagctgttcgtcggcaacctaccgttcagcgtcgacagcgcgcagctcgcagggctcttcgagcaggccggctccgtcgagatggtcgaggttgtatatgacagaatgactggacggagccgaggatttggattcgtgacaatgtcttcggccgaagaagccgaagctgctgtcgagcagttcaacggttatgcatttcaaggaagacaactgagggtgaactgcgggccaccgccacctagagatgaatccacaccaagagcaccaaggggtggtggtggcggcggcggcggcggctttgtcgattcagctaacaaggtctacgtggggaaccttgcgtggggcgttgacaactcgactctggagaacctgttcagtgagcaagggcaagtgcttgatgctaaggtcatctacgacagggatagcggcaggtcaagggggtttggtttcgtcacctatggctccgcccaagaggtcaacaatgccatatcaaacctcgatggcatcgacttggatggtagacagatccgagtcacggctgcggagtcaaagccgagacgtcaattttgagattattttcttatgggggtttagaggctgatagtgtgtttcaaaacttttagtttgtagtgtctattctttcctccatatgagtaccaagaagatgataatgagagactggctgtgaaatggctgtatacaggaagacttttccccgctggaaagatgcatttatttgtttcagctgtaccacaaaattggcagttcaaatttcccttccatctactcactttattttaaattataagagaatttagcttttctaaatactagcttttgctatgtgtacgccatatgtagatgtataggaaaaacaatgtttctgagatatttaagaaggacaacaactaatatgccagcaatc

SEQ ID NO: 105178 - DNA, 403 bp, Zea Mays
ttatcaccaaaatcctcgtcccctacccgaggcgagcatcatggcggccgcgctcttctccagctcgctctcgccccgcttcctcgccctatcctccccgaagccggccgcgcccgcggccacagccttcctccccttcaggctgccgccgcgcgctgtctcggcgccgggtaggcgggtcttcgagcccgtcgccgtcgcggtgtcgtcggagtacaagacggagggcgcggagcaggagggggaggatggatccgaggagttctccgaggacctgaagctgttcgtcggcaacctaccgttcagcgtcgacagcgcgcagctcgcagggctcttcgagcaggccggctccgtcgagatggtcgaggtatatattcgagttttccagccctcctcttcgtaa

SEQ ID NO: 105179 - DNA, 854 bp, Zea Mays
aagccctacctgcccatccccctcccaccacccaatcgcgctcgcacggaggcggcgccggcgcggacggacatattccattcacctcccatccatttctcaccagaagcgaaggcggaggcggaggagcggaggtaggagatctcgagcaagccggaggcagaggagatgaagacgttcgacccgtggccggtcttcttccgccgggagtggaagcgcaactggcccttcctcacgggtttcgccatcaccggattcatcatcacgaagatgacggccaacttcaccgaggaggatctcaagaactctaagttcgtccaggaacacaagaagaagcactgacgaaccaggtgaaggagttgtcagaaacgcatgtttggccagccagttctgttatgcttttgaatgaaaaatttagacccttctttctcgtttccttaatcgaaatgcttgcactctatgttccatttgtaatgtaataagaggcaaatggattgaaccaacaacaatcaacttctgattgaaaaatatcgatgtgtggcctgaatgttgtgggatcgcatctaatcctgtcgatttggtgaagtgaagattctgccatattactgcagctatttgaaactgaggtgtggagagcctgtatggtcttttagcacttgcaacgtactaattctgaagcagatgtgttgtaccacgagtccatgactctcatgagtagtttgtaaaaactattcccttccaactatatggatcgaggagggaagtgagctaaggccctgattggatctcaggagctaaaatttagttattgtagaagctaaagttttaaacaagagagaactaaaaatgacaaa

SEQ ID NO: 105180 - DNA, 2564 bp, Zea Mays
gaactaatctaagtgcctcctagaaaaagcttaaccaaagcaaacccctcgcccccacgcaaaccccgataccttcgccttttccgcccgcgccgtccgtctccgtcgatggcgatggagattccggcgcaggtgcgccgctactggctgccgatactcctattcaccgccggattcctgttccaggtcctcgtcctgccccgccacttcccgcccactcactacgacgtattgggagtggagaggttcgcgtctgtcgagcgggtcgtggaggcatacgagtcgctctccaaggagtggctatctgaaacgagtcaccaaccaactgttgatattataaagatccgttatgcatatgagctgttgacaaatccagttttaaagagggactatgatctttttggactggatgagcataaggatgtccttgagagagtcaaagaacaatatcaaatggtgcactttctcaaaattgatcttccattgttaaaagactctgtagtcagtttgatcgatgatgccttcaatgtactcacacatgagtcgttcatgtctgctattagtgaagaatacccgttaatcatacttgtatattcaaaggggagtcctcggtgtgctcaatttattgagtactggaagcaaattggcactcaattggatggaattgtcagaactgctatggtagaagttggtgattcacaagtggctggttatttcgccgaaaaacggttctcgaaacggccatttttccgtaatggtgtaccaacacttgttgcataccctgctaactgcaaaagtccatcctgttacatgaggtacccaggtgggctttttgtggattctgttgttgattgggttgcaacatcagttgtaggattgcctcggatcttgtactattcaaaggagacattgggcccccaattcattgggaagagtggcaatcataaggtcaaaactatctttttctcaagtactggagagcgtgctgctccattcgttcgccaagctgcccaagagtattcaagttattcatcatttggatttgtcctatggagagaagacgaatcccagatttggtggaattcgttaggggtggaatcggctccagcacttgttttcttgaaggggccaggcacaacgccttttgtacaccatggaatttttagcaagtcagagttcatagagatgatggaggagcacaagcaccatgaactgcgacagctaagaagtgacacatctttggaactgggttgtgatgctagaggtcattcacgtgctggcaatgatgcagcaatttggtattgtgtaattgttgctggtcgtccaggtgcagaattaagcaagaagagacaaattttgcggaaggctcaagacaaattgttaggtgatgttgacagaagtgctgggaacgttgacaattcagtagagacatcaagtgctgcaactgccttcaaagatgataggttaacctttgtttggttagatggagaagtacaaaagcaaatttgtgccttctaccttgccactgattatactggagcctgtggccctcgagactttggagatgacaatgataaacctgaaatttttattgttcgattccaaagaaatgcaacatatgaggcactgaaagctgaaaaaaagaacaatcttgtggatgttctccagggacagcatgctgatgcgtcccagttagtggcaaggtacaagggcccagttgaaattgaagagataaataggtggatctctcagattatcaaagatggagatactagagaaattccttactttacttcaaaggtgccagatcttgtaccagaggaaacaagcaaagcatggaattctaaaagtatccgctcagcagggaaaagtctaaaagagaacatcggtttccatttccaagattacctaacccacccaatgattggttcaactttgcttatgtgcggatgtatttctatgggaatattatggttcaggaacaacacacccactcaaagtactcgacaggagaaagctcggaaagacaaggcaaagaggccccgtccgaagcttagcacgtcgctcttcggtgaaccttctgtcccagacgtcgacccaaaagatgctcgtcagtgggaaatgtcaagctcggattcagactaatgactcgcttcttacatttggacctgacgtactgcaaagacgttttaaaattaagtaaactacatagtagtgcggtggccttagttttgggaaatggaacagagtataaccgatgtagtgaaaacagttggaccactgaagtaatccagttgccatctttccgatgcttcagctgccctgtgacgtgactccagggacgtatttgttgacacctgcttgaaaactgacaagcctctctattagacagagtgttaacctgtggtctcagaatggagtaaacaatggtagacagagtgttaacgtacatcatgtctgatgtaagccggcaggtattttcgtcgtgagccaaaactcggctaacgtcgtgacacggactattatttttatttttcttaaataataatcccttttcagacata

SEQ ID NO: 105181 - DNA, 1389 bp, Zea Mays
cacacccgtgtcttccaccaagaggaagccgccgccgatgccgcctccgcctgcatacccgctcccgcccgcgcccgccgcgcttgccggtgcccccgccccggccaaggtttgtgtcgctactcgctagactagaattccgcgcgcggacctttgccggccgagccgttctgcggcatctcgacggggacaaccatgcgaatttccttggcgtccacgttgacgccacctgagccaccaccggtgaaggccggctggccgctgacctccgagacaggggaggcgcccgagctccacaacggccgcgggcctcgacgactgggctaaggccgagcgctcgtcgaagttggactgccgctgcgtcagccccctcgaccgctgcgacaccgacaaccagcgcaccgtgacgtggagcctatcgtcctccgccacctcggcctccatctcggcgcgcccgccctacagcgacaacacgtccgggtccacatgcagcgacgcgatggctgccgtggtgtcagggaactggtccacgatgagcgtccgcgcggcgcagaacttgaagaggaacagcagcagtgtgtaccatatgatgcactggagggcaggcttgagcacgcggccagcctcgcgaggacgaccagcttctgcagcgtgtccgctgccaggaaccggagattcatggcgtacaggtcgttggtggagatgaagtggaaggatttgaatcaaggttcatttattttcaggcgtggaaagtattgcagatagatgtctctattttcacgtcatcattagttgatgttcaggtatattgtctttaacatctatgtattttctatgaataaattatctcatggaagttatattccttttctagaaatcgttggagagaatgttatccaaaggaaatattttaattggccatagcttacatagagatttatgcgccttaaagattgattactctcaagttattgatacaacatacatatttaagtatgcaaatttaccgactactgcatcaccttccttgaacagtctgtgcaaggctgttttggagtatttagttcgagaagaaggagaaccacataattgcttaaaggatgcagaagctgcaatgaatctagttcttgcaaagcttaagaatgagtttaatgaccccattgaaattgctgcaagtattgtaagcgccaaaaaaagatgttcttaaatcttaccattagtatagatgatgccaccttacttctttgtggtaccttcctaggtaactgaatctgattttgtgaagttgctcgctcatagaattctagtgtcttattatgactatggatgagacttttgtgatgtaattgatgagactatggatttaaatattattatgtgattgtgtgt
